United States Patent Application Publication US 2018/0126003 A1 - sequence listing, part 104

SEQ ID NO: 185225 - DNA, 1722 bp, Artificial Sequence
  derived and/or modified sequence
atgatccccccccaggaggccagcgccagaagaagagagatcgaggacaagctgaagcaggaggaggagaccctgagcttcatcagagacagcctggagaagagcgaccagctgaccaagaacatggtgagcatcctgagcagcttcgagagcagactgatgaagctggagaacagcatcatccccgtgcacaagcagaccgagaacctgcagagactgcaggagaacgtggagaagaccctgagctgcctggaccacgtgatcagctactaccacgtgatcagcggcgacgacgacctggaggcccaggaggacgtgaccctggagcacctgcccgagagcgtgctgcaggacgtgatcagaatcagcagatggctggtggagtacggcagaaaccaggacttcatgaacgtgtactaccagatcagaagcagccagctggacagaagcatcaagggcctgaaggagcacttccacaagagcagcagcagcagcggcgtgccctacagccccgccatccccaacaagagaaaggacacccccaccaagaagcccgtgaagagacccggcagagacgacatgctggacgtggagaccgacgcctacatccactgcgtgagcgccttcgtgaagctggcccagagcgagtaccagctgctggccgacatcatccccgagcaccaccagaagaagaccttcgacagcctgatccaggacgccctggacggcctgatgctggagggcgagaacatcgtgagcgccgccagaaaggccatcgtgagacacgacttcagcaccgtgctgaccgtgttccccatcctgagacacctgaagcagaccaagcccgagttcgaccaggtgctgcagggcaccgccgccagcaccaagaacaagctgcccggcctgatcaccagcatggagaccatcggcgccaaggccctggaggacttcgccgacaacatcaagaacgaccccgacaaggagtacaacatgcccaaggacggcaccgtgcacgagctgaccagcaacgccatcctgttcctgcagcagctgctggacttccaggagaccgccggcgccatgctggccagccaggagaccagcagcagcgccaccagctacagcagcgagttcagcaagagactgctgagcacctacatctgcaaggtgctgggcaacctgcagctgaacctgctgagcaagagcaaggtgtacgaggaccccgccctgagcgccatcttcctgcacaacaactacaactacatcctgaagagcctggagaagagcgagctgatccagctggtggccgtgacccagaagaccgccgagagaagctacagagagcacatcgagcagcagatccagacctaccagagaagctggctgaaggtgaccgactacatcgccgagaagaacctgcccgtgttccagcccggcgtgaagctgagagacaaggagagacagatcatcaaggagagattcaagggcttcaacgacggcctggaggagctgtgcaagatccagaaggcctgggccatccccgacaccgagcagagagacagaatcagacaggcccagaagaccatcgtgaaggagacctacggcgccttcctgcagaagttcggcagcgtgcccttcaccaagaaccccgagaagtacatcaagtacggcgtggagcaggtgggcgacatgatcgacagactgttcgacaccagcgcctag

SEQ ID NO: 185226 - DNA, 4699 bp, Artificial Sequence
  derived and/or modified sequence
gggaccaagagcggaagtgggtgtgacggggacgggggcccggtgggcccgcggaggaaagatactggggagtgggagccgcggggttcagagcgatgattcccccacaggaggcatccgctcgacggcgggagattgaggacaagctgaagcaggaggaggagactctgtccttcatccgagacagcctggagaagagcgaccagctcactaagaacatggtgtctatcttatcatcctttgagagccgccttatgaagctggagaactccatcatccctgtgcacaagcagacggagaatctgcagcggctgcaggagaatgttgagaagacgctgtcctgcctggaccatgtcatcagctactaccatgtggccagtgacactgagaagatcatcagagagggccccacaggtaggctggaagagtacctgggaagcatggccaagattcagaaggcagtggagtatttccaggacaacagcccagacagcccggaactcaacaaagtgaaactgctctttgagcgcgggaaggaggccctggagtccgaatttcgcagcctgatgacgcggcacagtaaggtcgtctcgcccgtgctcatcttggatctgatcagtggtgacgatgatctggaggcccaggaggacgtgaccctggagcacctgcccgagagcgtgctccaggatgtcattcgcatctcccgctggctggtggaatatggccgcaaccaagatttcatgaacgtctactaccagatacgctccagccagctggaccgctccatcaaaggactgaaggagcatttccataagagcagttcttcctctggggttccctactcccctgctatccccaacaagaggaaagacacacctaccaagaagccagtcaagcggccagggagagatgacatgctggacgtggagaccgatgcctacatccactgcgtcagtgccttcgtcaagctggcgcagagcgagtaccagctgctggccgacatcatccccgagcaccaccagaagaagaccttcgactccctgatacaggatgccctggatgggctgatgcttgaaggggagaacatcgtgtctgctgcccggaaggccattgtgcgacacgacttctccacggtgctcaccgtcttccccatcctgcgacacctcaagcagaccaagcctgagtttgaccaggtgctccagggcacggctgccagcacaaagaacaagctgcctggcctcatcacatccatggagaccatcggtgccaaagcgctggaggacttcgcagacaacatcaagaatgacccggacaaggagtacaacatgccgaaggacggcaccgtacacgagctcaccagcaatgccatcctcttcctgcagcagcttttggacttccaggagacggcaggcgccatgctggcctcccaagagaccagctcttcggccaccagctacagctctgagttcagcaagcggctgctaagcacctatatctgtaaagtgctgggcaacctgcagttgaacttgctgagcaagtccaaggtgtacgaggacccagctctgagcgccatcttcctgcacaacaactacaattacatcctcaagtccctggagaagtctgaactgatccagctggtggcagtgacacagaagactgctgagcgctcctaccgggagcacattgagcagcagatccagacctaccagcgcagctggttaaaggtgactgattacatcgcagagaagaatctacctgtgttccagccgggagtcaagctccgggacaaggagcggcagattatcaaggagcgttttaagggcttcaatgatggcctcgaagaactgtgcaaaatccagaaggcctgggctattccagacacagagcagagggacaggattcgccaggcccagaagaccattgtcaaggagacctacggggcctttctacagaagtttggcagcgtgcccttcaccaagaacccggagaagtacatcaagtacggggtggagcaggtgggcgacatgatcgatcgccttttcgacacctctgcctgagcctgctgctagccctgcctggttccaccagactggcgtgtcattggacagataaaccagtgttagcttgcctctgggctgggtgagcttgaagtcctctgggacagagacctgtctccacgcctccgggagctgtgtccctgagccccctagtcctggctcctgctttttccccacagcccgtgttcccagccgaaccagcactctcccggaagcctggggtccctccacaccttggcttttatgaccctgatggcttctgaaacaggaaaagagagaaggaagacagaggcctgtgcccactgctgctccatgtgtaccaagagcagcagggcagaagggccctccctccagcctaggtcagaggtggggacagagaactcccctacagcccagagatgtggcagggctcagagaagcagccagagctcctggaggaaaggcagtcgggactgaccccctctcttaaaacacattcccgcccgcccacaggcctgaggtctgggacctttccctcccaggagtcccctaggtggctgggggaggcaggctcactggccattttccctagagtccagcacactgcaggaggcgttcggaggaggagttccgccccaccctctacagccttcctcaggcccctgtctctggcccccagcctcagtgcctcttggcccagggccaggcagtcgtggttgcagaaggagcaattaggctgcctgcctgtgggctgggagacagggacaatggggaaaagttaaggagcaaaatgggggttggaagcaaaaaatagggccccacctatttaggacgagattgaagactgacccttgaggcacacttgcactggagatgggtttatttcacgctctgtgcttgtgtgctagcggagggagagctcagggtggcttaatccagaggccctgtcatggcccgcccccagccatgggaaagcaaacttcatcctaaggtgtgcagcccaggccctgcccctttacagtctaggccgcctgccatggggtgcagcctctccaggggctgcgtcagacttgcacgctgcccacatccagattcctgcaaagacgaattgggtgcacagcaccccaaccacatacacgaggaagaagatgcggtcagcagtctcaggccagcttctctgtgacccctttactcctctggagggctctgtggggagagatacagggaaaggagctgttcttcaaggtcccctcaacatgagcggaagagcgaaccccaggggtcatcagcctgtatcgcttcctttcttagattctcagctgatgaaaatttgggtctggcccatttcaggccatcttcagttgaagaaacaccctcttaggctgtgcaaggcatgggttatcaggggattgaggtcacctgggacttcagggaggctcagcttgctccctgccccagacctgtttcttctaagggaggaggacatggtggagaccagggacaggagagccagcagggtggatgcaaggggcctctacccacacctggacctccgtgccctcaccccagccctaggtgtgcacctaggcctcattccttaccccccagcccctgcccaccttcagcaggatgaggccctgggttgccgtgctctcgctgttcccctctcggggctgggctggggccgctcttggccccaaggttgccccgggccagcagcccagccagcagcacagtctctatggtgctgaggaagagcagcagcagcaggatggtgaagtagtaaactgggggaggcagggcacagggagatgctcaggggccagtccctgtgtctctggtgcccagcgagctgagcaccagtgggtgaccggggagaaacagggcagactgggtaagggagcagggcttactgagcagtgggttgcaggaggaggagctgggcagggcctgcaccagggaggagtggaggacgaggtaactcagcagcaatgtcaccttgtagcctatgcgctcaatggcccggaggggcagcaaccccccgcacacgtcagccaacagcagtgcctctgcaggcaccaagagagcgatgatggacttgagcgccgtgttcttcagcctcagctggaaggggaaaagtcagggccttcccggcgggggggaaggaggtgggcatcgggggcatggggcctggcctctggccgtgcatcctcactcccacccgcctccagcagccctctgtcggcctcctcccgacttgactcaccgtcacctggaagcagggcaccagctgctggggtgggacttgggtcttcagatcataaactacgtattccctcttgacactcacaatctcgttcaccacgtgggcctggaactctaactccatcgctgaggggtgggaatgagaactatgaaccaggaaggagagatcccagctgccaagtctgggggtagcagactggagcccaggggtgatggagacttttgatggcttttggcagggacagacttggacacaaaaccgatccatagaagggcttcccaaaccttgttttgcaacatcccaaattgtctccagttgaaggaaggcctttatcagattcatagatgagctttcattgtaaaaataaatgtactttgcaccacttcatgatggaggg

SEQ ID NO: 185227 - DNA, 3067 bp, Artificial Sequence
  derived and/or modified sequence
gggaccaagagcggaagtgggtgtgacggggacgggggcccggtgggcccgcggaggaaagatactggggagtgggagccgcggggttcagagcgatgattcccccacaggaggcatccgctcgacggcgggagattgaggacaagctgaagcaggaggaggagactctgtccttcatccgagacagcctggagaagagcgaccagctcactaagaacatggtgtctatcttatcatcctttgagagccgccttatgaagctggagaactccatcatccctgtgcacaagcagacggagaatctgcagcggctgcaggagaatgttgagaagacgctgtcctgcctggaccatgtcatcagctactaccatgtgatcagtggtgacgatgatctggaggcccaggaggacgtgaccctggagcacctgcccgagagcgtgctccaggatgtcattcgcatctcccgctggctggtggaatatggccgcaaccaagatttcatgaacgtctactaccagatacgctccagccagctggaccgctccatcaaaggactgaaggagcatttccataagagcagttcttcctctggggttccctactcccctgctatccccaacaagaggaaagacacacctaccaagaagccagtcaagcggccagggagagatgacatgctggacgtggagaccgatgcctacatccactgcgtcagtgccttcgtcaagctggcgcagagcgagtaccagctgctggccgacatcatccccgagcaccaccagaagaagaccttcgactccctgatacaggatgccctggatgggctgatgcttgaaggggagaacatcgtgtctgctgcccggaaggccattgtgcgacacgacttctccacggtgctcaccgtcttccccatcctgcgacacctcaagcagaccaagcctgagtttgaccaggtgctccagggcacggctgccagcacaaagaacaagctgcctggcctcatcacatccatggagaccatcggtgccaaagcgctggaggacttcgcagacaacatcaagaatgacccggacaaggagtacaacatgccgaaggacggcaccgtacacgagctcaccagcaatgccatcctcttcctgcagcagcttttggacttccaggagacggcaggcgccatgctggcctcccaagagaccagctcttcggccaccagctacagctctgagttcagcaagcggctgctaagcacctatatctgtaaagtgctgggcaacctgcagttgaacttgctgagcaagtccaaggtgtacgaggacccagctctgagcgccatcttcctgcacaacaactacaattacatcctcaagtccctggagaagtctgaactgatccagctggtggcagtgacacagaagactgctgagcgctcctaccgggagcacattgagcagcagatccagacctaccagcgcagctggttaaaggtgactgattacatcgcagagaagaatctacctgtgttccagccgggagtcaagctccgggacaaggagcggcagattatcaaggagcgttttaagggcttcaatgatggcctcgaagaactgtgcaaaatccagaaggcctgggctattccagacacagagcagagggacaggattcgccaggcccagaagaccattgtcaaggagacctacggggcctttctacagaagtttggcagcgtgcccttcaccaagaacccggagaagtacatcaagtacggggtggagcaggtgggcgacatgatcgatcgccttttcgacacctctgcctgagcctgctgctagccctgcctggttccaccagactggcgtgtcattggacagataaaccagtgttagcttgcctctgggctgggtgagcttgaagtcctctgggacagagacctgtctccacgcctccgggagctgtgtccctgagccccctagtcctggctcctgctttttccccacagcccgtgttcccagccgaaccagcactctcccggaagcctggggtccctccacaccttggcttttatgaccctgatggcttctgaaacaggaaaagagagaaggaagacagaggcctgtgcccactgctgctccatgtgtaccaagagcagcagggcagaagggccctccctccagcctaggtcagaggtggggacagagaactcccctacagcccagagatgtggcagggctcagagaagcagccagagctcctggaggaaaggcagtcgggactgaccccctctcttaaaacacattcccgcccgcccacaggcctgaggtctgggacctttccctcccaggagtcccctaggtggctgggggaggcaggctcactggccattttccctagagtccagcacactgcaggaggcgttcggaggaggagttccgccccaccctctacagccttcctcaggcccctgtctctggcccccagcctcagtgcctcttggcccagggccaggcagtcgtggttgcagaaggagcaattaggctgcctgcctgtgggctgggagacagggacaatggggaaaagttaaggagcaaaatgggggttggaagcaaaaaatagggccccacctatttaggacgagattgaagactgacccttgaggcacacttgcactggagatgggtttatttcacgctctgtgcttgtgtgctagcggagggagagctcagggtggcttaatccagaggccctgtcatggcccgcccccagccatgggaaagcaaacttcatcctaaggtgtgcagcccaggccctgcccctttacagtctaggccgcctgccatggggtgcagcctctccaggggctgcgtcagacttgcacgctgcccacatccagattcctgcaaagacgaattgggtgcacagcaccccaaccacatacacgaggaagaagatgcggtcagcagtctcaggccagcttctctgtgacccctttactcctctggagggctctgtggggagagatacagggaaaggagctgttcttcaaggtcccctcaacatgagcggaagagcg

SEQ ID NO: 185228 - DNA, 1962 bp, Artificial Sequence
  derived and/or modified sequence
atgattccacctcaggaggcaagtgcccggaggagagaaattgaagataaattgaagcaggaagaggaaacactgtcttttattagagattctttggagaaatccgaccagctgaccaagaacatggtgtctatcctgtcgagcttcgaaagccgccttatgaagttggaaaactctatcatcccagtccacaaacagacagaaaacctgcaaaggttgcaggagaacgtggagaaaaccctgtcttgtctggaccacgtaatctcatactaccacgtggcctctgatacagagaaaataatcagggagggacccaccgggcgcctcgaggaatacctgggcagtatggcaaagatacagaaggccgtagagtattttcaggataattccccggactccccagagctcaacaaagtcaaactcttgtttgaacgggggaaagaagcgctagagtccgagttcagaagcctgatgacgagacattccaaagttgtatcaccagtgttgatactggacctaatctctggagatgacgatctcgaggcacaggaggacgtgaccttggaacacctccctgagtcagtcctgcaagacgtgattagaatcagccgatggctcgtcgagtatggacgcaatcaagacttcatgaatgtctattatcaaattcgcagctcacagctagataggtcgatcaagggcctaaaagaacactttcacaagtcgagctcctctagcggcgtaccctactctccagctattccaaataaacggaaagacacccctactaagaaaccggtaaaacggccaggaagggatgacatgctggatgttgagacggatgcatacattcattgcgtcagcgcctttgtgaagttagctcagtcagaataccagctcttggccgacatcatccccgagcaccaccagaaaaagacttttgattctctcattcaagacgctttagatggtttgatgctggagggcgagaatatagtctcagcggcacgcaaagcaattgtccggcatgacttcagcaccgtgttgaccgtttttcctatcctacgtcacttgaaacagactaagccagaatttgatcaagtgttgcagggaacagccgcatctaccaagaataaactgcctgggttaatcactagcatggagacaataggtgcaaaagccttagaggactttgcagataacattaagaatgatcccgataaggagtataatatgccaaaagatggcacagttcacgagctgacttccaatgctatcctctttctgcagcaactcttggactttcaggagacagcaggtgcaatgctagcctctcaggagacgtctagctccgccacctcatattcttctgaattctccaaacgactcctctcaacgtacatttgtaaagtcctgggcaaccttcaactgaacctactatcgaagagtaaggtgtacgaggacccggccttatctgcaattttccttcataataactacaattatatcttgaagtcgcttgaaaaatctgaacttattcagttggtcgccgtcacccagaaaacagccgagcgcagttatcgagagcatatagagcaacagatccagacgtaccagcgcagctggttaaaagtcacagattatatcgcagaaaaaaatctgccggtgttccaacccggagtgaaattgagagataaagagaggcaaatcatcaaggagagatttaagggtttcaacgacggactcgaggaactatgtaaaatccagaaagcttgggccatcccagacaccgagcagcgggaccgcatccggcaagctcagaagaccatcgtcaaggagacatatggagccttcctccagaaattcgggagcgttccgtttacgaagaatcctgagaagtatattaaatatggggttgaacaggtgggcgacatgatcgatcggctgtttgacacaagcgcctag

SEQ ID NO: 185229 - DNA, 1722 bp, Artificial Sequence
  derived and/or modified sequence
atgatccctcctcaggaggcctcagcaaggagacgggagattgaagataagttaaagcaggaagaagagacattgtcctttatccgtgacagtctcgagaaatcagatcagctcacaaaaaatatggtgtccatcttgtcctcattcgagagccgcctcatgaagttagagaattccataatccctgtacacaagcagaccgaaaacctgcaaagattgcaggagaatgtcgaaaagaccttatcttgtctggaccacgtaataagttactatcatgtgatatctggcgatgatgatctagaagcccaagaagatgtgaccctcgagcatctccctgaatctgtgctccaagatgtgattcgcatctcccggtggcttgtcgaatatgggaggaaccaggacttcatgaatgtgtattatcaaatcaggtcgagccaattggatcggagcattaaaggactcaaagagcacttccacaagtctagctcgagcagcggagtgccctactcccctgccataccgaacaagcgcaaggacacccctacaaaaaaacccgtgaagaggccaggccgcgacgatatgctggatgtcgagacagacgcatacattcattgtgtgtcagcctttgtcaagttggctcagtccgaataccagctgctggcggacatcattcctgaacaccaccaaaaaaaaacatttgattctctgattcaagacgccctcgatggactcatgctggaaggtgaaaatatagtctcagctgcccggaaagctattgtgcgtcacgacttttcgacagtgctgactgtttttccgatcctgagacacctgaagcagaccaagccagagtttgaccaggtgctacagggaacggccgccagcacgaaaaataagctaccggggttgatcactagtatggagactatcggtgcaaaggctttggaggattttgctgataatattaagaatgaccccgataaagaatacaacatgcccaaggacgggaccgtccacgagctcacctctaatgcaatattgttcctacagcagctactggactttcaagagactgctggcgccatgctggctagccaggagacaagcagtagcgccacgagttattcttccgagttcagtaaacggctgcttagcacctatatctgcaaggtgttgggaaatttgcaattgaatttactaagcaaaagcaaggtgtatgaggatcctgcactctctgcaatatttctacataataactacaattacatactcaaatccctggaaaagtcagagttgatccagctggtcgcagttactcagaagactgccgaacgcagttacagagagcatatagaacagcagatccagacctatcagagatcatggttaaaggtaacggattatatagccgaaaagaatctccccgtgtttcagcccggagtcaagttaagggataaggagaggcagattatcaaggagagattcaaggggtttaatgatggcctggaggagctttgcaagatccagaaggcatgggccataccagataccgagcagcgagatagaatccggcaggcccagaaaactattgtgaaggagacctatggggcctttctccagaagtttgggtccgtacctttcacaaagaatccagaaaaatatataaaatacggcgtagagcaggttggcgatatgattgaccgattgttcgatacttctgcctag

SEQ ID NO: 185230 - DNA, 1962 bp, Artificial Sequence
  derived and/or modified sequence
atgatccccccccaggaggccagcgccaggagaagagaaattgaggacaagctgaagcaggaggaggagaccctgtccttcatccgggacagcctggagaagagtgaccagctgaccaagaacatggtgtccatcctgagcagctttgagagccggctgatgaagctggagaacagcatcatccctgtgcacaagcagacagagaacctgcagaggctgcaggagaatgtggagaagaccctgagctgcctggaccacgtgatctcctactaccacgtggccagtgacacagagaagatcatccgggagggccccaccggccgcctggaggagtacctgggctccatggccaagatccagaaggctgtggagtacttccaggacaacagcccagacagccctgagctgaacaaggtgaagctgctgtttgagcggggcaaggaggccctggagagcgagttccgcagcctgatgaccaggcacagcaaggtggtgtcccctgtgctgatcctggacctgatctctggagatgatgacctggaggcccaggaggatgtgaccctggagcacctgcctgagagcgtgctgcaggacgtcatccgcatcagccgctggctggtggagtatggaagaaaccaggacttcatgaatgtgtactaccagatccgcagcagccagctggacaggagcatcaagggcctgaaggagcacttccacaagagcagcagcagcagtggagtgccctacagccctgccatccccaacaagaggaaggacacccccaccaagaagcctgtgaagaggcctggaagagatgacatgctggatgtggagacagatgcctacatccactgtgtgtctgcctttgtgaagctggcccagagcgagtaccagctgctggccgacatcatccctgagcaccaccagaagaagacctttgacagcctcatccaggatgccctggatggcctgatgctggagggagaaaatattgtgtctgctgccaggaaggccatcgtgagacatgacttcagcacagtgctgactgtgttccccatcctgcggcacctgaagcagaccaagccagagtttgaccaggtgctgcagggcacagctgccagcaccaagaacaagctgcccggcctcatcacctccatggagaccatcggggccaaggccctggaggactttgctgacaacatcaagaatgaccctgacaaggagtacaacatgcccaaggatggcaccgtgcatgagctgaccagcaatgccatcctcttcctgcagcagctgctggacttccaggagacagctggggccatgctggccagccaggagaccagcagcagcgccaccagctacagcagcgagttcagcaagaggctgctgagcacctacatctgcaaggtgctgggcaacctgcagctgaacctgctgagcaagagcaaggtgtatgaggaccctgccctgagcgccatcttcctgcacaacaactacaactacatcctgaagagcctggagaagtctgagctgatccagctggtggccgtgacccagaagacagctgagaggagctaccgggagcacatcgagcagcagatccagacctaccagaggtcctggctgaaggtgacagactacatcgccgagaagaacctgcccgtcttccagcccggggtgaagctgcgggacaaggagcggcagatcatcaaggagcgcttcaagggcttcaatgatggcctggaggagctgtgcaagatccagaaggcctgggccatcccagacacagagcagagggaccgcatccggcaggcccagaagaccatcgtgaaggagacctacggggccttcctgcagaagtttggatctgtgcccttcaccaagaaccctgagaagtacatcaagtatggagtggagcaggtgggggacatgattgaccggctgtttgacaccagcgcctag

SEQ ID NO: 185231 - DNA, 1722 bp, Artificial Sequence
  derived and/or modified sequence
atgatccccccccaggaggccagcgccaggagaagagaaattgaggacaagctgaagcaggaggaggagaccctgtccttcatccgggacagcctggagaagagtgaccagctgaccaagaacatggtgtccatcctgagcagctttgagagccggctgatgaagctggagaacagcatcatccctgtgcacaagcagacagagaacctgcagaggctgcaggagaatgtggagaagaccctgagctgcctggaccacgtgatctcctactaccacgtgatctctggagatgatgacctggaggcccaggaggatgtgaccctggagcacctgcctgagagcgtgctgcaggacgtcatccgcatcagccgctggctggtggagtatggaagaaaccaggacttcatgaatgtgtactaccagatccgcagcagccagctggacaggagcatcaagggcctgaaggagcacttccacaagagcagcagcagcagtggagtgccctacagccctgccatccccaacaagaggaaggacacccccaccaagaagcctgtgaagaggcctggaagagatgacatgctggatgtggagacagatgcctacatccactgtgtgtctgcctttgtgaagctggcccagagcgagtaccagctgctggccgacatcatccctgagcaccaccagaagaagacctttgacagcctcatccaggatgccctggatggcctgatgctggagggagaaaatattgtgtctgctgccaggaaggccatcgtgagacatgacttcagcacagtgctgactgtgttccccatcctgcggcacctgaagcagaccaagccagagtttgaccaggtgctgcagggcacagctgccagcaccaagaacaagctgcccggcctcatcacctccatggagaccatcggggccaaggccctggaggactttgctgacaacatcaagaatgaccctgacaaggagtacaacatgcccaaggatggcaccgtgcatgagctgaccagcaatgccatcctcttcctgcagcagctgctggacttccaggagacagctggggccatgctggccagccaggagaccagcagcagcgccaccagctacagcagcgagttcagcaagaggctgctgagcacctacatctgcaaggtgctgggcaacctgcagctgaacctgctgagcaagagcaaggtgtatgaggaccctgccctgagcgccatcttcctgcacaacaactacaactacatcctgaagagcctggagaagtctgagctgatccagctggtggccgtgacccagaagacagctgagaggagctaccgggagcacatcgagcagcagatccagacctaccagaggtcctggctgaaggtgacagactacatcgccgagaagaacctgcccgtcttccagcccggggtgaagctgcgggacaaggagcggcagatcatcaaggagcgcttcaagggcttcaatgatggcctggaggagctgtgcaagatccagaaggcctgggccatcccagacacagagcagagggaccgcatccggcaggcccagaagaccatcgtgaaggagacctacggggccttcctgcagaagtttggatctgtgcccttcaccaagaaccctgagaagtacatcaagtatggagtggagcaggtgggggacatgattgaccggctgtttgacaccagcgcctag

SEQ ID NO: 185232 - DNA, 1962 bp, Artificial Sequence
  derived and/or modified sequence
atgatccccccccaggaggccagcgcccggcggcgggagatcgaggataaactgaagcaagaggaagaaacactatcatttattcgggatagcctggagaagtcagatcagcttaccaaaaatatggtctccatcttgtcatcctttgagagccgtctcatgaagctggagaattcaatcatacctgtgcataagcagacagagaatttacagcgtttgcaggagaacgtggagaagaccctgtcatgtctcgaccatgtgatctcctactaccacgtggcttccgacacagaaaagattattcgcgagggccctaccggtcgactggaggagtatcttggctcaatggcaaaaatccaaaaagccgttgagtatttccaggataatagtcctgattctcccgagctgaataaggttaaactgctctttgaaagaggcaaggaagcactagaatcagaattccggtcactgatgacccgccacagcaaagtggtttcccccgtcctgatccttgaccttatttcaggggacgacgaccttgaagcacaagaagacgtcacactagagcacctccctgagtcagtgttgcaggatgtcatccgcatctctagatggttggttgagtacggcagaaaccaggattttatgaatgtctactatcagatccgatcttcacagttggatcggtccataaaagggttgaaagagcactttcataaaagcagttcaagtagcggagtgccctactctccagctattcccaataagcggaaggacaccccaaccaagaagcccgtgaagaggcccggcagagatgacatgctggatgtggagaccgacgcctatattcactgcgtgtctgcctttgtaaagttggcacagagcgagtatcaactgctcgcagacattattcccgaacaccaccagaagaagaccttcgacagtctaattcaggatgccttggacggacttatgttggagggggaaaatatagtgtcagctgcccggaaggcaattgtgcgccacgacttttcaactgtgcttactgtgtttcctattctccgacaccttaagcagacgaaacctgagtttgatcaggtgttgcaaggcaccgcagcttctacgaaaaacaagctccccggtcttatcacatcaatggaaaccatcggcgcaaaggcccttgaggactttgccgacaacatcaaaaatgatcctgacaaagagtacaacatgcctaaagatggtacagtccacgagctcaccagcaacgctattctattcctacagcagctgcttgactttcaggaaaccgcgggcgctatgctcgcctcccaggaaactagtagtagcgccactagttactcctctgagttttcgaaacgtttactgtctacctacatttgcaaagtcctaggcaatctgcagttgaacttactctccaaaagtaaagtctacgaggacccagctctaagcgctattttcctccacaataattataactatatcctgaaaagcctggaaaaaagtgaactgattcaactggtcgccgtgacccagaaaaccgctgaaaggagctaccgcgagcatatagagcagcaaatccagacctaccagcggtcatggctaaaagtcaccgactacatagcggagaagaatcttccggtgttccagccaggggtaaaactgcgcgacaaggagcgccagataatcaaggagagattcaaaggtttcaacgatggcctcgaggagctgtgcaagatccagaaggcctgggccatccccgataccgagcaacgggaccgaattcgtcaggctcagaaaacgattgtgaaagagacctatggggccttcctgcagaaattcgggtcggtgccctttacgaaaaatcctgaaaagtatattaagtacggtgtcgaacaggttggcgatatgatcgacaggctttttgatacctctgcttag

SEQ ID NO: 185233 - DNA, 1722 bp, Artificial Sequence
  derived and/or modified sequence
atgatccccccccaggaggccagcgcccggcggcgggagatcgaggacaagctgaagcaggaggaggagaccctgtcctttatccgggattcactggaaaaatccgaccagctgactaaaaacatggtgtccatcctctccagctttgagtctagactgatgaaactggaaaatagcattatccctgtgcataagcagacggagaatctgcaaaggctccaggagaatgtcgagaaaacactgagttgtctcgaccacgtcatttcatactatcatgtgatctctggagacgacgatttggaggcccaagaagacgtcaccctggagcatctccccgagagcgtacttcaagacgtgatccggatcagtcgatggttagtggagtacggacgaaaccaggacttcatgaacgtgtattaccagattcgttcttcacagttagatagatccattaagggcttgaaagagcattttcacaagagctcctccagcagtggcgtgccgtattcacctgccataccaaacaagaggaaagacacaccgaccaagaagcccgtcaaaagacccggcagagatgacatgctggacgttgagacagatgcttatatccactgcgtctcggcgttcgtgaaattggcacagtccgaataccagctcctggccgatatcattccagaacaccaccagaagaagacttttgattcgctgatccaggatgcgctggatggtctcatgctggagggggaaaatatagtctccgccgctcgcaaagccatagtgcggcacgatttttcgaccgtgctgacagttttccccatcctgagacacctcaaacagactaagcctgagttcgaccaggtgctacaggggaccgccgcctctacaaagaacaagctccctggtcttatcaccagtatggagactattggcgccaaggccctagaggatttcgcagacaacattaaaaacgatcccgacaaagagtacaacatgcctaaggacggcactgtgcacgagcttacaagtaacgccatactctttctgcagcagctcttggactttcaagagacagccggcgccatgttagcgtctcaggaaacttcttcgtccgctacttcctactcatcggaatttagtaaaagacttctttcgacatacatctgtaaagtgttaggaaacctccagctgaacctgctgagcaagagcaaagtctacgaggaccccgcactttccgctatctttcttcataacaactataattatatattgaaaagtttggagaaaagtgaactgatccagctggtcgctgtcacacagaaaacggcggagagaagttacagggaacacatcgagcagcagattcagacatatcagagaagttggttgaaagtcaccgactacatcgctgaaaaaaacctacctgtgttccaacccggtgtaaaactgcgggataaagaaagacaaattatcaaggagagattcaaaggattcaatgatggattagaagagctctgcaagatacagaaggcctgggcaattcctgacaccgaacagagggataggattaggcaagcacagaagactattgtgaaggagacttatggcgcattcttgcagaagttcgggagtgtgcctttcaccaaaaacccagaaaagtacatcaagtatggggtggagcaggtcggggatatgatcgaccgactgttcgataccagcgcctag

SEQ ID NO: 185234 - DNA, 1962 bp, Artificial Sequence
  derived and/or modified sequence
atgattccaccgcaggaagcctctgcccgtcgcagagaaattgaggacaaactgaagcaggaagaagagaccctgtccttcatcagagatagcttagagaagagcgatcagctcacaaagaacatggtgagcatcctttcttcttttgagtcacgtctcatgaagctggaaaactccataatacctgtacacaaacagactgaaaaccttcaaaggctccaggaaaacgtggagaagaccctctcctgcttggaccacgtgatctcatactatcacgtggcatccgacacagagaagattataagggaaggacctacggggaggctagaagagtatctcggctctatggctaagatccagaaagcggtagagtactttcaggataactctccagactctccggagcttaataaggttaagcttctcttcgagcggggtaaggaggctctagaaagtgagtttagatcactgatgactaggcatagcaaagtggtcagccccgtcctgattctcgacctgatatctggagatgatgacctggaggcccaggaggatgtcacgctcgaacacctccccgagagcgtactgcaagacgttattagaatcagcaggtggctggtcgaatatggccgaaaccaggattttatgaatgtctactaccaaattcggtcgagtcagcttgataggagtatcaagggtttgaaggaacacttccacaaatcttcgtccagttcgggggtaccgtatagcccagccattccaaacaagaggaaggatacccccacgaagaaacccgtgaagcggcctggacgggacgatatgctggatgttgaaacagatgcctacatccattgcgtatccgcgtttgtcaagcttgctcaatcagaatatcagttgctggctgatatcatacccgaacaccatcagaaaaaaacattcgattccctcatccaagatgcgctggatggtttaatgctcgaaggtgagaacatcgtgtccgccgcacgcaaggccattgtccgccacgatttctctaccgtactaactgtatttccaatactgaggcacctcaagcagacaaagcccgagttcgaccaggttctccaaggaaccgctgctagtacaaagaacaaattgcctggcctgattacttcgatggaaacgattggagctaaggccctggaggatttcgctgacaatataaagaatgacccggataaggagtacaatatgccgaaagacggcacagtccatgaacttacctcaaatgctattttgtttctgcagcagctgctggattttcaggagacagctggagccatgctggcgtcacaagagaccagctcaagtgcaaccagctacagcagtgaattctccaagcgcctcttgagcacctacatctgcaaggtgcttggtaacctgcagcttaatctcctgtccaagagtaaggtctacgaagacccggcactttccgctatttttctgcacaacaactacaactacatcctgaaatctctcgaaaaatccgagctcatccaattagtggctgttactcagaagacagcagagaggtcttaccgcgagcatatcgagcaacagatccaaacctatcagaggagttggctcaaggtgacagactatatcgccgaaaagaacctcccagtgttccagccgggagttaagctgcgggataaggagcgtcagatcatcaaggaaaggttcaaagggttcaacgacggcctggaagagctgtgtaaaatccaaaaagcatgggcgattccagatacagagcagagagatagaatccgtcaggctcagaaaaccattgtcaaggaaacctatggggcatttctgcagaaatttggctccgtccccttcactaagaacccagagaaatatataaagtacggcgtcgaacaggtcggcgatatgatcgatagactctttgacacaagcgcttag

SEQ ID NO: 185235 - DNA, 1722 bp, Artificial Sequence
  derived and/or modified sequence
atgattcctccccaagaagccagcgccagacgtagggagatcgaggataagctgaaacaagaggaggaaaccctgtccttcattcgggactctctggaaaaatctgaccagctgacaaaaaatatggtatctattctttcctcttttgagtccaggcttatgaagttggagaactccatcatccccgttcataaacagacagagaacctccagcggttgcaggaaaacgttgaaaaaactctgagctgccttgaccatgtgattagctactaccacgtgatcagtggcgatgatgatctcgaagcacaggaggatgtaacactggaacacctcccggagtctgttttgcaggacgtgatcaggattagcaggtggttagttgagtatggcaggaaccaggatttcatgaatgtttactaccaaattagatcgtcccagcttgataggagtattaagggcttgaaggagcatttccacaagtcctcgtcctccagtggcgtaccttactcccccgctatacctaataagcgcaaggacactcccacgaaaaagcccgtcaaacgcccaggaagggatgacatgctggacgtggaaacagatgcctatatccattgcgtttccgcatttgtgaaactggctcaaagtgaatatcagctgctggctgatatcatccccgagcaccatcagaagaagacctttgacagcttaatacaggacgcactggatggactcatgctcgagggagaaaacatcgtgtccgcagccagaaaggctatcgtgcggcatgacttcagtacagtgctcactgtgtttcccattcttcgccaccttaagcagactaagccggagttcgaccaagtcctccaaggcaccgccgctagcacaaaaaataaattaccgggtctaattacgtccatggagaccattggtgcgaaagctctcgaggattttgctgataatattaagaatgatccagataaagaatacaatatgccaaaggatggcaccgtacacgagctgacaagcaacgccattctgtttctacagcagcttctcgactttcaggagacagctggggctatgctggcatcacaggagacatcatccagcgccacaagctactcctcagaattctccaagagactcttgagcacatatatctgtaaagtgttggggaacttgcagttaaacttgctctctaagagcaaagtttatgaagatccagcactctctgccatcttcctccacaacaattacaattatatcctgaagtcgctggaaaaaagcgagctcatccagttagttgcagtgacacagaagaccgccgagagatcttaccgggaacatatcgagcagcaaatacagacctatcaacgatcgtggttgaaagtgactgactatatcgctgagaagaatctcccagtatttcagcccggagtcaaactgcgggataaagagaggcagattattaaagaacgcttcaaagggttcaatgatggccttgaggagctgtgtaaaatccagaaggcgtgggccatacctgataccgagcagcgcgataggattcggcaggctcagaagacaatcgtgaaagaaacatacggagcgttcttgcagaagttcgggtccgtacccttcactaaaaaccccgaaaagtacattaaatatggggttgagcaagtgggtgacatgatcgacagactttttgacacatccgcctag

SEQ ID NO: 185236 - protein, 1577 aa, Artificial Sequence
  derived and/or modified sequence
MEAGSVVRAIFDFCPSVSEELPLFVGDIIEVLAVVDEFWLLGKKEDVTGQFPSSFVEIVTIPSLKEGERLFVCICEFTSQELDNLPLHRGDLVILDGIPTAGWLQGRSCWGARGFFPSSCVRELCLSSQSRQWHSQSALFQIPEYSMGQARALMGLSAQLDEELDFREGDVITIIGVPEPGWFEGELEGRRGIFPEGFVELLGPLRTVDESVSSGNQDDCIVNGEVDTPVGEEEIGPDEDEEEPGTYGVALYRFQALEPNELDFEVGDKIRILATLEDGWLEGSLKGRTGIFPYRFVKLCPDTRVEETMALPQEGSLARIPETSLDCLENTLGVEEQRHETSDHEAEEPDCIISEAPTSPLGHLTSEYDTDRNSYQDEDTAGGPPRSPGVEWEMPLATDSPTSDPTEVVNGISSQPQVPFHPNLQKSQYYSTVGGSHPHSEQYPDLLPLEARTRDYASLPPKRMYSQLKTLQKPVLPLYRGSSVSASRVVKPRQSSPQLHNLASYTKKHHTSSVYSISERLEMKPGPQAQGLVMEAATHSQGDGSTDLDSKLTQQLIEFEKSLAGPGTEPDKILRHFSIMDFNSEKDIVRGSSKLITEQELPERRKALRPPPPRPCTPVSTSPHLLVDQNLKPAPPLVVRPSRPAPLPPSAQQRTNAVSPKLLSRHRPTCETLEKEGPGHMGRSLDQTSPCPLVLVRIEEMERDLDMYSRAQEELNLMLEEKQDESSRAETLEDLKFCESNIESLNMELQQLREMTLLSSQSSSLVAPSGSVSAENPEQRMLEKRAKVIEELLQTERDYIRDLEMCIERIMVPMQQAQVPNIDFEGLFGNMQMVIKVSKQLLAALEISDAVGPVFLGHRDELEGTYKIYCQNHDEAIALLEIYEKDEKIQKHLQDSLADLKSLYNEWGCTNYINLGSFLIKPVQRVMRYPLLLMELLNSTPESHPDKVPLTNAVLAVKEINVNINEYKRRKDLVLKYRKGDEDSLMEKISKLNIHSIIKKSNRVSSHLKHLTGFAPQIKDEVFEETEKNFRMQERLIKSFIRDLSLYLQHIRESACVKVVAAVSMWDVCMERGHRDLEQFERVHRYISDQLFTNFKERTERLVISPLNQLLSMFTGPHKLVQKRFDKLLDFYNCTERAEKLKDKKTLEELQSARNNYEALNAQLLDELPKFHQYAQGLFTNCVHGYAEAHCDFVHQALEQLKPLLSLLKVAGREGNLIAIFHEEHSRVLQQLQVFTFFPESLPATKKPFERKTIDRQSARKPLLGLPSYMLQSEELRASLLARYPPEKLFQAERNFNAAQDLDVSLLEGDLVGVIKKKDPMGSQNRWLIDNGVTKGFVYSSFLKPYNPRRSHSDASVGSHSSTESEHGSSSPRFPRQNSGSTLTFNPSSMAVSFTSGSCQKQPQDASPPPKECDQGTLSASLNPSNSESSPSRCPSDPDSTSQPRSGDSADVARDVKQPTATPRSYRNFRHPEIVGYSVPGRNGQSQDLVKGCARTAQAPEDRSTEPDGSEAEGNQVYFAVYTFKARNPNELSVSANQKLKILEFKDVTGNTEWWLAEVNGKKGYVPSNYIRKTEYT

SEQ ID NO: 185237 - protein, 1601 aa, Artificial Sequence
  derived and/or modified sequence
MEAGSVVRAIFDFCPSVSEELPLFVGDIIEVLAVVDEFWLLGKKEDVTGQFPSSFVEIVTIPSLKEGERLFVCICEFTSQELDNLPLHRGDLVILDGIPTAGWLQGRSCWGARGFFPSSCVRELCLSSQSRQWHSQSALFQIPEYSMGQARALMGLSAQLDEELDFREGDVITIIGVPEPGWFEGELEGRRGIFPEGFVELLGPLRTVDESVSSGNQDDCIVNGEVDTPVGEEEIGPDEDEEEPGTYGVALYRFQALEPNELDFEVGDKIRILATLEDGWLEGSLKGRTGIFPYRFVKLCPDTRVEETMALPQEGSLARIPETSLDCLENTLGVEEQRHETSDHEAEEPDCIISEAPTSPLGHLTSEYDTDRNSYQDEDTAGGPPRSPGVEWEMPLATDSPTSDPTEVVNGISSQPQVPFHPNLQKSQYYSTVGGSHPHSEQYPDLLPLEARTRDYASLPPKRMYSQLKTLQKPVLPLYRGSSVSASRVVKPRQSSPQLHNLASYTKKHHTSSVYSISERLEMKPGPQAQGLVMEAATHSQGDGSTDLDSKLTQQLIEFEKSLAGPGTEPDKILRHFSIMDFNSEKDIVRGSSKLITEQELPERRKALRPPPPRPCTPVSTSPHLLVDQNLKPAPPLVVRPSRPAPLPPSAQQRTNAVSPKLLSRHRPTCETLEKEGPGHMGRSLDQTSPCPLVLVRIEEMERDLDMYSRAQEELNLMLEEKQDESSRAETLEDLKFCESNIESLNMELQQLREMTLLSSQSSSLVAPSGSVSAENPEQRMLEKRAKVIEELLQTERDYIRDLEMCIERIMVPMQQAQVPNIDFEGLFGNMQMVIKVSKQLLAALEISDAVGPVFLGHRDELEGTYKIYCQNHDEAIALLEIYEKDEKIQKHLQDSLADLKSLYNEWGCTNYINLGSFLIKPVQRVMRYPLLLMELLNSTPESHPDKVPLTNAVLAVKEINVNINEYKRRKDLGKNSIIAEKEYAHAEESAFLTYSLVLKYRKGDEDSLMEKISKLNIHSIIKKSNRVSSHLKHLTGFAPQIKDEVFEETEKNFRMQERLIKSFIRDLSLYLQHIRESACVKVVAAVSMWDVCMERGHRDLEQFERVHRYISDQLFTNFKERTERLVISPLNQLLSMFTGPHKLVQKRFDKLLDFYNCTERAEKLKDKKTLEELQSARNNYEALNAQLLDELPKFHQYAQGLFTNCVHGYAEAHCDFVHQALEQLKPLLSLLKVAGREGNLIAIFHEEHSRVLQQLQVFTFFPESLPATKKPFERKTIDRQSARKPLLGLPSYMLQSEELRASLLARYPPEKLFQAERNFNAAQDLDVSLLEGDLVGVIKKKDPMGSQNRWLIDNGVTKGFVYSSFLKPYNPRRSHSDASVGSHSSTESEHGSSSPRFPRQNSGSTLTFNPSSMAVSFTSGSCQKQPQDASPPPKECDQGTLSASLNPSNSESSPSRCPSDPDSTSQPRSGDSADVARDVKQPTATPRSYRNFRHPEIVGYSVPGRNGQSQDLVKGCARTAQAPEDRSTEPDGSEAEGNQVYFAVYTFKARNPNELSVSANQKLKILEFKDVTGNTEWWLAEVNGKKGYVPSNYIRKTEYT

SEQ ID NO: 185238 - DNA, 98 bp, Artificial Sequence
  derived and/or modified sequence
aagataacctgtgcccaggagaaaaacaatcaatggcaacaaaagcagaaacaacacaaatgatacaattagcagacagaaacattgagattgctatt

SEQ ID NO: 185239 - DNA, 4806 bp, Artificial Sequence
  derived and/or modified sequence
atggaggccggcagcgtggtgagagccatcttcgacttctgccccagcgtgagcgaggagctgcccctgttcgtgggcgacatcatcgaggtgctggccgtggtggacgagttctggctgctgggcaagaaggaggacgtgaccggccagttccccagcagcttcgtggagatcgtgaccatccccagcctgaaggagggcgagagactgttcgtgtgcatctgcgagttcaccagccaggagctggacaacctgcccctgcacagaggcgacctggtgatcctggacggcatccccaccgccggctggctgcagggcagaagctgctggggcgccagaggcttcttccccagcagctgcgtgagagagctgtgcctgagcagccagagcagacagtggcacagccagagcgccctgttccagatccccgagtacagcatgggccaggccagagccctgatgggcctgagcgcccagctggacgaggagctggacttcagagagggcgacgtgatcaccatcatcggcgtgcccgagcccggctggttcgagggcgagctggagggcagaagaggcatcttccccgagggcttcgtggagctgctgggccccctgagaaccgtggacgagagcgtgagcagcggcaaccaggacgactgcatcgtgaacggcgaggtggacacccccgtgggcgaggaggagatcggccccgacgaggacgaggaggagcccggcacctacggcgtggccctgtacagattccaggccctggagcccaacgagctggacttcgaggtgggcgacaagatcagaatcctggccaccctggaggacggctggctggagggcagcctgaagggcagaaccggcatcttcccctacagattcgtgaagctgtgccccgacaccagagtggaggagaccatggccctgccccaggagggcagcctggccagaatccccgagaccagcctggactgcctggagaacaccctgggcgtggaggagcagagacacgagaccagcgaccacgaggccgaggagcccgactgcatcatcagcgaggcccccaccagccccctgggccacctgaccagcgagtacgacaccgacagaaacagctaccaggacgaggacaccgccggcggcccccccagaagccccggcgtggagtgggagatgcccctggccaccgacagccccaccagcgaccccaccgaggtggtgaacggcatcagcagccagccccaggtgcccttccaccccaacctgcagaagagccagtactacagcaccgtgggcggcagccacccccacagcgagcagtaccccgacctgctgcccctggaggccagaaccagagactacgccagcctgccccccaagagaatgtacagccagctgaagaccctgcagaagcccgtgctgcccctgtacagaggcagcagcgtgagcgccagcagagtggtgaagcccagacagagcagcccccagctgcacaacctggccagctacaccaagaagcaccacaccagcagcgtgtacagcatcagcgagagactggagatgaagcccggcccccaggcccagggcctggtgatggaggccgccacccacagccagggcgacggcagcaccgacctggacagcaagctgacccagcagctgatcgagttcgagaagagcctggccggccccggcaccgagcccgacaagatcctgagacacttcagcatcatggacttcaacagcgagaaggacatcgtgagaggcagcagcaagctgatcaccgagcaggagctgcccgagagaagaaaggccctgagaccccccccccccagaccctgcacccccgtgagcaccagcccccacctgctggtggaccagaacctgaagcccgccccccccctggtggtgagacccagcagacccgcccccctgccccccagcgcccagcagagaaccaacgccgtgagccccaagctgctgagcagacacagacccacctgcgagaccctggagaaggagggccccggccacatgggcagaagcctggaccagaccagcccctgccccctggtgctggtgagaatcgaggagatggagagagacctggacatgtacagcagagcccaggaggagctgaacctgatgctggaggagaagcaggacgagagcagcagagccgagaccctggaggacctgaagttctgcgagagcaacatcgagagcctgaacatggagctgcagcagctgagagagatgaccctgctgagcagccagagcagcagcctggtggcccccagcggcagcgtgagcgccgagaaccccgagcagagaatgctggagaagagagccaaggtgatcgaggagctgctgcagaccgagagagactacatcagagacctggagatgtgcatcgagagaatcatggtgcccatgcagcaggcccaggtgcccaacatcgacttcgagggcctgttcggcaacatgcagatggtgatcaaggtgagcaagcagctgctggccgccctggagatcagcgacgccgtgggccccgtgttcctgggccacagagacgagctggagggcacctacaagatctactgccagaaccacgacgaggccatcgccctgctggagatctacgagaaggacgagaagatccagaagcacctgcaggacagcctggccgacctgaagagcctgtacaacgagtggggctgcaccaactacatcaacctgggcagcttcctgatcaagcccgtgcagagagtgatgagataccccctgctgctgatggagctgctgaacagcacccccgagagccaccccgacaaggtgcccctgaccaacgccgtgctggccgtgaaggagatcaacgtgaacatcaacgagtacaagagaagaaaggacctgggcaagaacagcatcatcgccgagaaggagtacgcccacgccgaggagagcgccttcctgacctacagcctggtgctgaagtacagaaagggcgacgaggacagcctgatggagaagatcagcaagctgaacatccacagcatcatcaagaagagcaacagagtgagcagccacctgaagcacctgaccggcttcgccccccagatcaaggacgaggtgttcgaggagaccgagaagaacttcagaatgcaggagagactgatcaagagcttcatcagagacctgagcctgtacctgcagcacatcagagagagcgcctgcgtgaaggtggtggccgccgtgagcatgtgggacgtgtgcatggagagaggccacagagacctggagcagttcgagagagtgcacagatacatcagcgaccagctgttcaccaacttcaaggagagaaccgagagactggtgatcagccccctgaaccagctgctgagcatgttcaccggcccccacaagctggtgcagaagagattcgacaagctgctggacttctacaactgcaccgagagagccgagaagctgaaggacaagaagaccctggaggagctgcagagcgccagaaacaactacgaggccctgaacgcccagctgctggacgagctgcccaagttccaccagtacgcccagggcctgttcaccaactgcgtgcacggctacgccgaggcccactgcgacttcgtgcaccaggccctggagcagctgaagcccctgctgagcctgctgaaggtggccggcagagagggcaacctgatcgccatcttccacgaggagcacagcagagtgctgcagcagctgcaggtgttcaccttcttccccgagagcctgcccgccaccaagaagcccttcgagagaaagaccatcgacagacagagcgccagaaagcccctgctgggcctgcccagctacatgctgcagagcgaggagctgagagccagcctgctggccagatacccccccgagaagctgttccaggccgagagaaacttcaacgccgcccaggacctggacgtgagcctgctggagggcgacctggtgggcgtgatcaagaagaaggaccccatgggcagccagaacagatggctgatcgacaacggcgtgaccaagggcttcgtgtacagcagcttcctgaagccctacaaccccagaagaagccacagcgacgccagcgtgggcagccacagcagcaccgagagcgagcacggcagcagcagccccagattccccagacagaacagcggcagcaccctgaccttcaaccccagcagcatggccgtgagcttcaccagcggcagctgccagaagcagccccaggacgccagccccccccccaaggagtgcgaccagggcaccctgagcgccagcctgaaccccagcaacagcgagagcagccccagcagatgccccagcgaccccgacagcaccagccagcccagaagcggcgacagcgccgacgtggccagagacgtgaagcagcccaccgccacccccagaagctacagaaacttcagacaccccgagatcgtgggctacagcgtgcccggcagaaacggccagagccaggacctggtgaagggctgcgccagaaccgcccaggcccccgaggacagaagcaccgagcccgacggcagcgaggccgagggcaaccaggtgtacttcgccgtgtacaccttcaaggccagaaaccccaacgagctgagcgtgagcgccaaccagaagctgaagatcctggagttcaaggacgtgaccggcaacaccgagtggtggctggccgaggtgaacggcaagaagggctacgtgcccagcaactacatcagaaagaccgagtacacctag

SEQ ID NO: 185240 - DNA, 6472 bp, Artificial Sequence
  derived and/or modified sequence
aggggcggaggtgacagcgggctggggactggcggctgcaactgcctgccgcgccgagggaccgccgggcggcggaaagcaggttataaaacatggaggctggctcagtggttcgagccatttttgacttctgccctagcgtatcagaagaactgccgctctttgtgggagatattattgaggtgctggcagtggtggatgaattttggcttctaggaaagaaggaggatgttacaggacaattccccagcagttttgtggaaattgtgaccattcccagtctaaaagagggagagaggctgtttgtgtgcatttgtgaattcacatcccaagagttggataatcttcccctccatcgaggtgacctggtgattctcgatggcattcccactgcaggctggctgcagggccgaagctgctggggcgcacggggcttcttcccatcttcatgtgtccgcgagctctgcctctcctcacagagccggcagtggcactcccagagcgccctgtttcagattccggaatattccatgggacaagcccgggccctaatggggctttctgctcagctggatgaagagctggacttcagggaaggggatgtgatcaccattattggagttcctgaaccaggctggtttgaaggggagttagagggccgaagaggcatttttccagaaggttttgtagagctgttggggcccctgaggactgtggatgagtcagtaagttctggaaatcaagatgactgcattgttaatggtgaagtagatacccctgtaggagaagaagagatagggccggatgaggatgaggaggagccagggacctatggggtcgccctgtacagattccaagccctggagccaaatgagctggatttcgaggtcggggataaaatccgaattctggcgaccttggaagatggctggctggaaggatccctgaagggcaggacaggcatctttccttaccggtttgtgaaattatgtcctgacacacgggtggaggaaaccatggctctgccccaggaaggcagccttgccaggatcccggaaacttctttggattgtttggagaacaccttaggagtagaggaacaaagacatgaaaccagtgaccatgaggccgaggagcctgactgcattatttctgaagcacccacttctcccctcggtcatctgacttcagagtatgacacagacagaaactcttatcaggacgaggacaccgcaggagggcccccgagaagcccaggcgtggagtgggaaatgcctcttgccacagactctcccacatctgaccctacagaagtagtcaatggtatttcctcccaacctcaggtcccttttcatcccaacttgcagaaaagccagtattattctacagtgggagggagccacccgcactcagaacagtaccccgaccttcttcccctagaagcaaggactagagactatgccagcctacctcccaaaagaatgtattcccagctaaaaactcttcagaagccagtgctccctctttacaggggctcttctgtttcagcttcaagggtagtcaaacccagacaatcaagtcctcagctccacaacctagcaagttatactaaaaagcaccacacgtccagtgtttactccatctcagagagattggagatgaagcctggtccgcaagcccaagggcttgttatggaagcagcaacacattcacagggagacggcagcactgacctggactcgaagctgacacaacagctgatcgagtttgagaagagcttggcagggcccggcacagagccagataaaattttacgccacttttcaatcatggactttaactctgagaaggatattgtccgaggttcctcaaagttaatcaccgagcaggagctgccggaaaggagaaaggccctaaggccaccgccacctcgtccctgtactccggtatccacttctccccatttgctggttgaccagaacctaaaacctgcaccacccttggtggtgcgaccctctcgcccagctcccctgcctccctcagcacagcagagaacgaatgcggtatcccccaagctcctatctcgacaccgtcctacctgtgagaccttagaaaaggagggccctggtcatatgggaaggagtctggaccagacctccccatgccccttagtgctggtgaggattgaggaaatggagcgggacttggatatgtacagtagagctcaagaagagctaaacctcatgctggaggagaagcaggatgaatcatcaagagcagagaccctcgaggatctcaagttctgtgaaagtaacattgaaagtttgaatatggaactccagcaactaagagaaatgacgctcctctcctcccagtcttcatcactggtggccccttctgggtctgtgtctgccgaaaatccagagcagaggatgctggagaagagagccaaggtcatagaagaacttcttcagacagaaagagactacattcgggatctggaaatgtgtattgagcggatcatggtacccatgcagcaggcacaggtaccaaacattgattttgagggactttttggaaatatgcagatggtgattaaggtctcgaagcaattattggctgctctggaaatcagcgatgctgtaggacctgtgtttcttggtcaccgggatgagcttgagggaacatacaagatttactgccagaatcatgatgaggccattgcgctgcttgaaatctacgagaaggatgagaagatccagaagcatcttcaggactccttggcagatctgaagagcctatacaacgaatggggatgcacaaattatattaacctgggctccttcctcatcaaaccagtacagagagtaatgcgttacccgctgttgctaatggagttgctgaattccaccccagaatcccacccagataaagtgcctttaaccaatgcagtccttgcggtcaaggaaatcaacgttaacattaatgaatataaacggcgaaaggacctgggtaagaacagcataattgctgaaaaggagtatgcccatgctgaggaaagtgcttttctgacttactccctagtcctcaagtaccgtaagggtgatgaagatagccttatggagaaaatttccaaactgaacatccactccatcatcaagaaatccaaccgagttagcagtcacctgaagcatctcactggctttgctcctcagataaaagatgaagtatttgaagaaacagaaaaaaacttccgaatgcaagaaagattgattaagtcttttatccgagacctgtctctctacctccagcacatccgggagtccgcatgtgtgaaagtggtggctgctgtgagcatgtgggatgtgtgcatggagagaggacaccgggacctggagcagtttgagagggtgcatcgctacatcagtgaccagctcttcacaaactttaaggagaggacagagcggcttgtcatctcccccttaaatcagttactgagcatgtttacagggccccataagctggtacagaaacgctttgacaagctcctggacttctataactgtacagaacgggcagaaaagctaaaggacaagaagaccctggaggagctgcagtcggcccggaacaactatgaggccctgaatgcacagctgctggatgagctgcccaagttccaccagtacgcccagggcctcttcaccaactgtgtccacggctatgctgaagcccactgtgactttgtgcaccaggctctggagcaattaaagccactgctttcgttactcaaagtggctggcagagagggaaaccttattgccatcttccacgaagagcacagcagagttctgcagcaactccaggtttttaccttcttcccggagtctcttccagctaccaagaagccatttgagaggaaaaccattgaccgccagtctgctcgaaagccactcctgggcctgccaagttacatgctacagtcagaagaactccgggcctccctcctggccaggtatccccctgaaaaactcttccaggcagaacggaacttcaatgctgctcaagacttggatgtctcacttttggaaggtgacctggtgggtgtgattaagaaaaaagaccccatgggcagccagaaccgctggctgattgacaatggagtcaccaaaggcttcgtgtacagctctttcctaaagccctacaatcctcgccgcagccactccgatgcctccgtgggtagccactcctccacagagtctgagcacggcagctcctcccccaggttcccacgccagaacagcggcagcaccctgaccttcaaccccagcagcatggctgtatcctttacctcggggtcttgccagaagcagcctcaagatgcatctcctccgccaaaagaatgtgaccaaggaactctcagtgcatccctaaatccgagtaattcagagagtagtccttccagatgcccttcagacccagactccacctcccagccaaggtcaggggactctgcagatgtagctagagatgtaaagcaacccactgccacgccgaggagctaccggaacttcaggcatccagaaatagttggctactccgtaccaggacgaaatgggcaaagtcaagacctcgtcaaaggatgtgcaagaacagcccaggctccggaagacagaagtacagagccagatggcagtgaggcagaaggcaaccaggtctattttgctgtctacaccttcaaggcacgaaacccaaatgagctgagcgtgtcagccaatcagaaactcaagatcctcgagtttaaagatgttacaggaaatacagagtggtggttagctgaggttaacgggaagaagggctacgttccctccaattatatccgcaaaaccgagtacacctgagcccacgttgcctgccacccagccttgctgcctttgctttcagtccgccgagggttctggcggcccaccgagagggcgcctgctcctgagacacaggccctgtctgcgttgcttaaccatggcatggtggagcacaccacagatcttgttctcctcgattgggttgtaaaccttgatgctcactagaatctctagaatttgaaatggaccctggggctttgcaaatgacttagtgactatgagaagagagacaagtcttagagctggcttttggaaaggagaaacttgcagtcagaagcccagtgtcctatgtatgcaggaagctgtgctctagcaatagacagtgttggtaatggttgtgctgtacggcgtttggggtggccccatgttccatgctcagctgaccggatgccaactcagatgaaaagaattcatggctctgggcaccccgtgaggcagtgcttgcacatggctgggagtttgtcgggattgaaccaaacctagtgcttcaaagctcctgggacacctccagtgtccagcacacattctcatacatactgcccctaatttctaaagtccctaaagcactacattctgtaaccttgtttcttttactccattcccagattagttatgcaaaattcaactgcgttctacttttagaagtgtttagggtctttattttctgttgacccttcatctgaaagattctcttcccttgttaggtacaatcactgcccccccgcttttttttttgagatggggtcttgctatgttgcccaggctggtcttaaacgcctgggctcaagcaaccctcccgcctccctgctgagattacaggtgtaagccaccataccgcaacctcaatgacacctttctgatggtctttacacagtctgtgatgtctggtggcccccctgccctggactcaataattgatagattttcctagagtaacagtatgagagctccagccattccattaaaagtattagttctgctttgagctgaaaccagttgagcctaatggaagactggatgtctttcttcttcatccaagcaccctaatgactgtttagttacatccatagatgcagacaacataacacctgtgacttacttgaattgggataagccattccagaagtagcttatcctagacttggaaataagatttttttcaccactaacttccatgcttcagagatgacattcaaagccagattcccaagtgcctgatcatacctcccagtctcaggaagatatttgcttaccccttagaccaagaatcttaagatcttccccagctatgaagcctatcttggaatgggaaaccatgaaatttgtcttttaaaagaaagggaagaaatagccttacagcccctgttcctccaagtgcacatttagccttaaaatcctgggagtcgggagacaccgtggagtcctaacatccacagtgtctgctggtcgtggtcagaaggcagtaatgcaagagtccttttgtgaagagtgtttctatgtagagatgtttatatttaagtagttcttttataaataaaagcatttctaatggc

SEQ ID NO: 185241 - DNA, 4734 bp, Artificial Sequence
  derived and/or modified sequence
atggaagcgggctccgtggtccgcgccatctttgacttttgcccgtcagtctccgaggaactcccactgtttgttggagacatcattgaagtgttggctgtggttgatgaattctggttactgggtaaaaaggaggacgtcacaggccagtttccttcctcttttgttgagatcgtaactattccaagcctgaaggaaggagagagactttttgtgtgcatctgtgaatttaccagccaggagctggacaatctgcctctgcatcgaggagatctggtaatcctggatgggattccaacagctgggtggctccaggggcgtagttgctggggcgcccgcggcttctttccctccagctgcgttagggaactgtgtctgtcctctcagagcaggcagtggcattcacagagcgcgctgttccagatacccgaatactccatgggtcaagcgcgtgctctgatgggattgagcgcccagctcgacgaggaactggattttcgcgagggggacgtgatcacgatcatcggcgtccctgagcccggctggttcgagggcgaactggaaggccgtcgcggcatattcccagaaggctttgtggagttgctcggccccctcaggacagtggacgagagcgtgagcagtgggaaccaggacgactgtatcgtcaacggggaagtggacactccagtcggtgaagaagaaataggcccagatgaggacgaagaagaaccgggcacttatggcgttgccttgtaccgcttccaggccttggaacctaatgagctggattttgaggtcggtgacaagattcgtattcttgcaaccttagaggatgggtggttggaagggagtttgaaaggcagaaccggaatcttcccataccgcttcgtcaagctgtgtcctgatactagagtagaagaaacgatggcgctacctcaggaagggtctctggccaggatcccagagaccagcctcgattgcctggagaataccttgggagtggaagagcagcgccacgagacatctgatcacgaggccgaggagcccgattgcattatctcagaggctccgacctctcccctcggacaccttacaagcgaatacgacaccgatcggaattcttaccaggacgaagacacagcaggtggtccccccaggagcccgggagtggagtgggagatgccgttagccaccgactcaccaacctctgatcccaccgaggtggtcaatggaattagctcccaaccacaagtacccttccacccaaacctccagaagagccagtactatagtaccgtcggggggagccacccacactctgaacagtatcccgatttattaccgctcgaggcacgtacccgcgactacgccagcctaccacccaaacggatgtacagccaactgaagacgttgcagaagccagtgctgccattgtaccggggctcatccgtgtccgctagtcgcgtggttaaaccgcgccagtcctccccacagctacacaatctcgcctcctataccaagaaacatcacacctcttccgtgtacagcatctctgaacggttggagatgaagccagggcctcaagctcaggggctggtcatggaggccgcaacccattcacagggtgatggaagcactgacctggattcgaaattaacgcagcagcttattgagtttgagaagagtctcgctgggcctggaaccgaacctgacaaaatccttcggcacttctctatcatggactttaactctgagaaggatatcgtgagggggtcaagtaaattgatcacggaacaggagctgccagagcggcggaaagcgctgagacctccgcctcccaggccttgcacacccgtaagtacctctccccacttgctggtggatcagaacttgaaacccgccccaccgctcgtggtacgtccttcccgccctgccccactgccccctagcgctcagcagcgcactaacgccgtgtcgcccaagttgctatccagacatcgacccacatgtgaaaccttagagaaagagggcccgggacacatgggccgctctttagaccagactagcccttgcccccttgtcttagtccggattgaagagatggaaagagatcttgatatgtacagcagggcacaggaggaattaaatctgatgctggaagaaaagcaggacgaatcttcacgggcagaaactctagaggacttgaaattctgcgagagtaacattgagagcctaaatatggaacttcaacagttaagagagatgaccctgttaagtagccagagctcatccctggtggccccctcggggtcagtaagtgccgagaatccggagcaacgaatgctggaaaagcgcgccaaagtgatagaggaattgctccagacagagcgagactacattcgcgatctcgaaatgtgtatcgaaaggatcatggtgcccatgcagcaggctcaagtacctaatatcgactttgagggcctcttcgggaacatgcagatggttatcaaagtttcaaagcagcttctcgccgctcttgagatttctgacgcagtcgggccagtatttttaggacaccgcgatgagctggaaggaacatacaaaatttactgccagaatcacgacgaggctatcgcactcctcgaaatatacgaaaaggacgaaaagattcaaaaacacctccaagattctctcgcggacttaaagtcactatataatgaatggggttgcacaaactatatcaacctgggaagtttcctgatcaaacccgttcagcgggtgatgagataccctctcctcctcatggaactcctaaatagcacacccgagagtcatccagacaaagtgcccctcacgaacgcggtgcttgcagttaaagaaattaatgtgaacattaatgagtacaagcgcaggaaggacctcgtcctgaagtatagaaaaggcgacgaagatagccttatggaaaagatttctaagctgaatatccattcaataatcaagaaatctaatcgggtgtcatcacaccttaagcacttaacaggctttgccccgcagattaaggatgaggttttcgaagagactgagaagaattttcgcatgcaggagaggcttataaagagcttcatcagagacctgtctttatatcttcaacacatcagagaatccgcatgtgtgaaggtggtggccgctgtctctatgtgggatgtttgtatggaacgcgggcaccgtgatctcgaacagttcgagagagtgcacagatacatctcggaccagctgtttacaaattttaaggagcgcacagagcgccttgttatatctccactgaaccagctgctgagcatgtttaccggacctcataagctcgtgcaaaaaagatttgacaagctgttggatttctataactgcacagagcgtgccgagaagcttaaggataaaaaaaccctggaggaactccagagtgctaggaataattacgaggccctgaatgctcaacttcttgatgaactgccaaagtttcatcagtacgcacagggactcttcactaattgtgtgcatgggtatgccgaggctcactgtgattttgtccatcaggccctagagcagcttaagcctctcctgagcctcctgaaggtagccggtcgtgagggtaatcttattgctatctttcacgaggaacattcacgggtgctgcaacagctgcaagtcttcaccttctttccagagagtcttccagctaccaaaaaaccatttgagcgaaaaaccatcgatagacagagtgcacgtaagcccctgttggggctgccatcatatatgcttcagagcgaggagctaagagcgagcttactggctcgttatcccccagagaagttgttccaagcagaacggaacttcaacgccgcacaagacttggatgtgagtctacttgagggagatctggtgggtgttatcaaaaaaaaggaccctatgggctcacagaatcggtggctgatagacaacggcgtaaccaagggattcgtgtactcctcatttctgaaaccgtataaccctaggcgttcacattcagatgcttccgtgggttcacatagttctaccgaatctgaacacggaagtagcagtccacgattcccgaggcagaattctgggagtacactgaccttcaacccttccagtatggcagttagcttcacttccggttcctgccagaaacaaccacaggatgcatccccccctcccaaggaatgtgatcaagggaccctgagcgcaagcctcaatccctcaaactctgaatcaagtccaagtagatgtcccagcgatccggacagtacctcccaacctaggtcgggcgactcagctgatgtcgcaagggacgtcaagcagcccaccgccactcccagatcatatcggaatttcagacacccggagattgtgggctactctgtcccaggcagaaacggacagagtcaggacttggttaaggggtgtgcccggaccgcgcaggcgcctgaggataggagcacagagccagacggcagcgaggccgaagggaaccaagtgtacttcgcggtgtacacatttaaggcacggaatccaaatgaattgtccgtctcggcaaaccagaaactgaaaatcttggagttcaaggacgtcaccggaaatactgagtggtggctagcagaagtcaatggtaaaaagggttacgtaccatccaactatatcagaaagaccgagtatacttag

SEQ ID NO: 185242 - DNA, 4806 bp, Artificial Sequence
  derived and/or modified sequence
atggaggccgggagcgttgttcgggctatttttgatttttgtcctagcgtcagcgaggaacttccgcttttcgtcggggacataatcgaggtgttagctgttgtagatgagttctggcttctgggcaaaaaggaagacgtcacaggtcagtttccttctagctttgttgaaattgtaaccattccgagtctgaaggaaggcgaaagactctttgtttgtatctgcgagttcacaagccaggagctcgataatttgcccctgcataggggggaccttgtaattctggatggcatcccgaccgccggttggctccagggaagatcttgctggggagcgcgcgggttcttcccttcctcgtgcgtcagagagctatgtttgtccagccagagcaggcagtggcactcacagtccgctctgtttcagattcccgagtattccatggggcaggcaagagccctgatgggcctttccgcccaactcgatgaggagctcgactttcgggaaggcgatgtcatcacaattattggggtgcccgagcccggctggttcgaaggggagctggagggccggagaggaatttttccagaaggttttgtggagctcctgggccccttgcgtactgtagacgaatccgtctcctcaggcaatcaggatgattgcatcgtgaacggtgaggtggacaccccagtgggagaggaggaaattgggcccgacgaagatgaagaagagcctggtacatacggtgtggccctgtatcgatttcaggcgctggagcccaacgagctggatttcgaggtcggtgacaagatccggatcctcgcgacactggaggacgggtggttggaagggtccctgaaaggcagaacgggcatctttccttaccgcttcgtgaaactttgtcccgacaccagagtggaggagacaatggctcttccgcaggagggctccctggcgcggatcccagaaacaagtctggattgtctcgagaataccctgggagtcgaggaacagcgccacgaaacttccgatcacgaagccgaagagcctgactgtatcatttctgaggcacctacaagccccctcggccacctcaccagcgagtacgacaccgatcgcaacagctaccaggacgaagacactgcgggtggaccaccaagatctcctggcgtggagtgggaaatgcctctggccaccgactctccgacaagtgacccaaccgaagtggttaacgggattagcagccagccgcaggttccctttcatcccaatcttcagaaatctcagtattattcaaccgttggcggttcgcacccacacagcgagcaatatccggacctacttccgcttgaagcacgaacaagagactatgcaagcctccctcctaaaagaatgtatagccaacttaaaaccctacagaagccagtgctcccactctatagaggctcatccgtctcagcttcacgggtggttaagccccgccagagcagcccccagctgcataacctcgcctcatataccaaaaagcaccatacgagctcagtttatagcatatcggagcggctcgaaatgaagcccggtccacaggctcagggactagtcatggaggctgccacgcattcccaaggggacggcagcacagacctggatagcaagttaactcaacagctcatcgaatttgagaaatccctggccggtcctggaacggagccagataaaatattgcgacacttcagcataatggactttaattccgagaaggatatcgtgcgcggctcatctaagctaatcacagagcaagaattgcccgagcgacgcaaagcgctgcggccgccacctcccaggccgtgcacaccggtatctacctcaccacacctccttgtcgaccagaacctgaaaccggcccccccactggtagtgagaccctcgaggccagctccacttccgcccagcgcccagcagcgcacaaacgctgtgtcccctaaactgctttctcgccatagacccacatgtgagacacttgagaaggagggaccgggacacatgggtcgaagcctggaccaaactagtccctgccctcttgtgctggtgaggattgaggagatggaaagggacctcgacatgtacagccgggctcaggaggaactgaatctgatgttagaagagaagcaagatgaatcgtcaagggccgagacactggaggacctgaaattctgcgagtccaatattgagtctctgaacatggagcttcagcagctgcgggagatgaccctgctcagttcccagtcaagctcccttgtcgcccccagcgggagtgtgtccgccgagaaccccgagcagcgaatgcttgagaaacgggcaaaggtgattgaggagctattgcagacggaacgggactatatccgcgatcttgaaatgtgcatcgagcgcatcatggtacctatgcagcaggctcaggtgccaaacatagacttcgaagggctgtttggcaatatgcagatggtgatcaaggtgtccaagcaacttttagccgcccttgagatcagcgatgctgtgggtccagtctttctcggtcacagggatgagctggaaggcacctacaaaatctactgtcagaatcatgacgaggcaatcgcgctcctggagatttacgagaaggatgagaagattcagaaacaccttcaggactcgctcgcagaccttaaatccctgtacaacgagtggggttgcacaaactacattaatctgggaagcttcctcatcaaacccgtgcagagagtgatgagataccccctgcttctcatggagctactgaacagtacccccgagtcacaccccgacaaggtccccttgactaatgcggtgttagcagtgaaggaaattaacgtcaatattaacgagtacaagcggcggaaagaccttgggaaaaattcgattatcgcggagaaggagtatgcccatgcagaggagtcagccttcctgacttactcgttagtcctaaaatatcgcaaaggtgatgaggatagcctgatggagaagatatctaagctgaatatacactccattattaaaaaatcgaatagagtcagctcccacttgaaacacctgacgggcttcgcgcctcaaattaaggacgaagtatttgaggagaccgaaaagaactttagaatgcaggagaggctaataaagtcatttatccgggacctgtcactgtacctgcagcacatcagggagtcagcatgcgtgaaagtagtggccgccgtgtctatgtgggatgtgtgcatggaaagaggacacagagacctggagcaattcgagcgggtccaccggtatatttccgaccagctgttcaccaatttcaaagaacggaccgagcgtttggtcattagtccgctgaaccagcttctttctatgtttacgggcccgcataaactggtgcagaaacgctttgataaactcctcgacttctacaactgcacggaaagagcagaaaaactgaaggacaaaaagacactggaagaactccagtcagcccggaacaactacgaggcattgaatgcacagctgcttgatgagctgcctaagttccaccagtacgctcaaggtctgttcactaattgcgtgcatggctatgccgaagctcattgtgactttgttcaccaggctctggagcagttgaagcccttgctcagtttgttaaaagtagcggggcgggagggcaacctaattgctatttttcatgaagaacattccagggtcttgcaacagctacaggtattcacattcttccctgagagcctgcccgcaactaagaagcctttcgaaagaaagacaattgatcgacaatctgctagaaaacctctgcttggactgccttcatatatgttgcagtccgaggaacttagagcctcactgctcgctagataccccccggagaagctttttcaggccgaacgtaactttaatgccgcacaggacttagacgtgtcattgctggaaggcgacctggtaggcgtgatcaagaagaaagaccccatgggctcgcagaatcgctggctcatagacaacggggtaaccaaagggttcgtatactccagctttctaaaaccctataaccccagacggagtcacagcgatgccagcgtcggaagccactccagtacagagagcgaacatggttctagctcccctcggtttccccggcaaaattccgggagcactcttacctttaatcccagttcaatggcggtgtcatttacttccggatcctgtcagaaacagcctcaggacgcgagtccaccaccaaaggagtgcgatcaaggcactctgtcagcctcattaaacccttccaactcagagagtagtccttcacgctgtcccagcgacccagatagcacatcccagccaaggtccggagattccgccgatgttgcgagggacgttaaacagccaacagccactccgcgctcatataggaactttagacaccccgaaattgtgggctattctgtgcccgggcgcaatgggcagagccaggatctggtcaagggctgcgcccgcaccgcacaggccccagaagatcgcagcaccgagccagacgggtcagaagcagaggggaaccaggtttactttgccgtctatactttcaaggctaggaaccccaatgagttgtctgtctccgccaatcagaaactcaagatcctggaattcaaggatgttacaggtaacaccgagtggtggctcgctgaagtaaatggtaaaaaagggtacgtacccagcaattacattcgaaaaaccgagtacacctag

SEQ ID NO: 185243 - DNA, 4734 bp, Artificial Sequence
  derived and/or modified sequence
atggaggccggctctgtggtgcgggccatctttgacttctgccccagcgtgtctgaggagctgcccctgtttgtgggggacatcatcgaggtgctggccgtggtggatgagttctggctgctgggcaagaaggaggatgtgacaggccagttccccagcagctttgtggagatcgtgaccatccccagcctgaaggagggggagcggctgtttgtgtgcatctgtgagttcaccagccaggagctggacaacctgcccctgcacagaggagacctggtgatcctggatggcatccccacagctggctggctgcagggccgcagctgctggggcgcccggggcttcttccccagcagctgtgtgcgggagctgtgcctgagcagccagagccggcagtggcacagccagagcgccctcttccagatccctgagtacagcatgggccaggcccgggccctgatgggcctgagcgcccagctggatgaggagctggacttccgggagggagatgtgatcaccatcattggagtgcctgagcccggctggtttgaaggagagctggagggccggcggggcatcttccctgagggctttgtggagctgctgggccccctgaggacagtggatgaatctgtgagcagcggcaaccaggatgactgcatcgtgaatggagaggtggacacccctgtgggggaggaggagattggaccagatgaagatgaggaggagcccggcacctatggagtggccctgtaccgcttccaggccctggagcccaatgagctggactttgaggtgggggacaagatccgcatcctggccaccctggaggatggctggctggagggcagcctgaagggccgcacaggcatcttcccctacagatttgtgaagctgtgcccagacaccagggtggaggagaccatggccctgccccaggagggcagcctggcccgcatccctgagaccagcctggactgcctggagaacaccctgggcgtggaggagcagagacatgagaccagtgaccacgaggccgaggagccagactgcatcatcagcgaggcccccaccagccccctgggccacctgaccagtgaatatgacacagacaggaacagctaccaggatgaggacacagctgggggcccccccaggagccctggggtggagtgggagatgcccctggccacagacagccccaccagtgaccccacagaggtggtgaatggcatcagcagccagccccaggtgcccttccaccccaacctgcagaagagccagtactacagcacagtgggcggcagccacccccacagcgagcagtacccagacctgctgcccctggaggcccggacccgggactatgccagcctgccccccaagaggatgtacagccagctgaagaccctgcagaagcctgtgctgcccctgtaccggggcagctctgtgtctgccagccgggtggtgaagccccggcagagcagcccccagctgcacaacctggccagctacaccaagaagcaccacaccagctctgtgtacagcatcagcgagcggctggagatgaagccaggcccccaggcccagggcctggtgatggaggccgccacccacagccagggagatggcagcacagacctggacagcaagctgacccagcagctgattgaatttgagaagagcctggccggccctggaacagagccagacaagatcctgcggcacttcagcatcatggacttcaacagcgagaaggacatcgtgcggggcagcagcaagctgatcacagagcaggagctgcctgagaggaggaaggccctgcggcccccaccaccccggccctgcacccctgtgtccaccagcccccacctgctggtggaccagaacctgaagccagccccacccctggtggtgcggcccagcaggcctgcccccctgccccccagcgcccagcagaggaccaatgctgtgagccccaagctgctgagccgccaccggcccacctgtgagaccctggagaaggagggccctggccacatgggccgcagcctggaccagaccagcccctgccccctggtgctggtgcgcatcgaggagatggagcgggacctggacatgtacagccgggcccaggaggagctgaacctgatgctggaggagaagcaggatgagagcagcagagctgagaccctggaggacctgaagttctgtgagagcaacatcgagagcctgaacatggagctgcagcagctgcgggagatgaccctgctgagcagccagagcagcagcctggtggcccccagcggctctgtgtctgcagaaaatcctgagcagaggatgctggagaagagggccaaggtgattgaggagctgctgcagacagagcgggactacatccgggacctggagatgtgcatcgagcgcatcatggtgcccatgcagcaggcccaggtgcccaacatcgactttgagggcctgtttggaaacatgcagatggtgatcaaggtgtccaagcagctgctggccgccctggagatcagtgatgctgtgggccctgtgttcctgggccacagagatgagctggagggcacctacaagatctactgccagaaccatgatgaggccatcgccctgctggagatctatgagaaggatgagaagatccagaagcacctgcaggacagcctggccgacctgaagagcctgtacaatgagtggggctgcaccaactacatcaacctgggcagcttcctgatcaagcctgtgcagagggtgatgagataccccctgctgctgatggagctgctgaacagcaccccagagagccacccagacaaggtgcccctgaccaatgctgtgctggccgtgaaggagatcaacgtgaacatcaatgagtacaagaggaggaaggacctggtgctgaagtacagaaaaggagatgaggacagcctgatggagaagatcagcaagctgaacatccacagcatcatcaagaagagcaacagagtgagcagccacctgaagcacctgaccggctttgccccccagatcaaggatgaggtgtttgaggagacagagaagaacttcaggatgcaggagcggctcatcaagagcttcatccgggacctgagcctgtacctgcagcacatccgggagagcgcctgtgtgaaggtggtggccgctgtgtccatgtgggatgtgtgcatggagcggggccaccgggacctggagcagtttgagcgggtgcaccgctacatcagtgaccagctgttcaccaacttcaaggagaggacagagcggctggtgatcagccccctgaaccagctgctgtccatgttcaccggcccccacaagctggtgcagaagagatttgacaagctgctggacttctacaactgcacagagcgggcagagaagctgaaggacaagaagaccctggaggagctgcagagcgccaggaacaactatgaggccctgaatgcccagctgctggatgagctgcccaagttccaccagtatgcccagggcctcttcaccaactgtgtgcacggctatgcagaggcccactgtgactttgtgcaccaggccctggagcagctgaagcccctgctgagcctgctgaaggtggccggccgggagggcaacctgattgccatcttccacgaggagcacagccgggtgctgcagcagctgcaggtgttcaccttcttccctgagagcctgcctgccaccaagaagccctttgagaggaagaccatcgaccggcagagcgccaggaagcccctgctgggcctgcccagctacatgctgcagagcgaggagctgcgggccagcctgctggcccgctacccacctgagaagctgttccaggccgagaggaacttcaatgctgcccaggacctggatgtgtccctgctggagggggacctggtgggcgtcatcaagaagaaggaccccatgggcagccagaaccgctggctgattgacaatggagtgaccaagggctttgtgtacagcagcttcctgaagccctacaaccccaggaggagccacagtgatgcctctgtgggcagccacagcagcacagaaagtgaacatggcagcagcagcccccgcttcccccggcagaacagcggcagcaccctgaccttcaaccccagctccatggctgtgtccttcaccagcggcagctgccagaagcagccccaggatgccagccccccacccaaggaatgtgaccagggcaccctgagcgccagcctgaaccccagcaacagcgagagcagccccagccgctgccccagcgaccctgacagcaccagccagcccaggtctggggacagcgcagatgtggccagagatgtgaagcagcccacagccacccccaggagctacagaaacttccgccaccctgagatcgtgggctacagcgtgcccggcagaaatggccagagccaggacctggtgaagggctgtgccaggacagcccaggccccagaagatagaagcacagagccagatggcagcgaggccgagggcaaccaggtgtactttgctgtgtacaccttcaaggccaggaaccccaatgagctgtctgtgtctgccaaccagaagctgaagatcctggagttcaaggatgtgactggaaacacagagtggtggctggccgaggtgaatggcaagaagggctacgtgcccagcaactacatcaggaagacagagtacacctag

SEQ ID NO: 185244 - DNA, 4806 bp, Artificial Sequence
  derived and/or modified sequence
atggaggccggctctgtggtgcgggccatctttgacttctgccccagcgtgtctgaggagctgcccctgtttgtgggggacatcatcgaggtgctggccgtggtggatgagttctggctgctgggcaagaaggaggatgtgacaggccagttccccagcagctttgtggagatcgtgaccatccccagcctgaaggagggggagcggctgtttgtgtgcatctgtgagttcaccagccaggagctggacaacctgcccctgcacagaggagacctggtgatcctggatggcatccccacagctggctggctgcagggccgcagctgctggggcgcccggggcttcttccccagcagctgtgtgcgggagctgtgcctgagcagccagagccggcagtggcacagccagagcgccctcttccagatccctgagtacagcatgggccaggcccgggccctgatgggcctgagcgcccagctggatgaggagctggacttccgggagggagatgtgatcaccatcattggagtgcctgagcccggctggtttgaaggagagctggagggccggcggggcatcttccctgagggctttgtggagctgctgggccccctgaggacagtggatgaatctgtgagcagcggcaaccaggatgactgcatcgtgaatggagaggtggacacccctgtgggggaggaggagattggaccagatgaagatgaggaggagcccggcacctatggagtggccctgtaccgcttccaggccctggagcccaatgagctggactttgaggtgggggacaagatccgcatcctggccaccctggaggatggctggctggagggcagcctgaagggccgcacaggcatcttcccctacagatttgtgaagctgtgcccagacaccagggtggaggagaccatggccctgccccaggagggcagcctggcccgcatccctgagaccagcctggactgcctggagaacaccctgggcgtggaggagcagagacatgagaccagtgaccacgaggccgaggagccagactgcatcatcagcgaggcccccaccagccccctgggccacctgaccagtgaatatgacacagacaggaacagctaccaggatgaggacacagctgggggcccccccaggagccctggggtggagtgggagatgcccctggccacagacagccccaccagtgaccccacagaggtggtgaatggcatcagcagccagccccaggtgcccttccaccccaacctgcagaagagccagtactacagcacagtgggcggcagccacccccacagcgagcagtacccagacctgctgcccctggaggcccggacccgggactatgccagcctgccccccaagaggatgtacagccagctgaagaccctgcagaagcctgtgctgcccctgtaccggggcagctctgtgtctgccagccgggtggtgaagccccggcagagcagcccccagctgcacaacctggccagctacaccaagaagcaccacaccagctctgtgtacagcatcagcgagcggctggagatgaagccaggcccccaggcccagggcctggtgatggaggccgccacccacagccagggagatggcagcacagacctggacagcaagctgacccagcagctgattgaatttgagaagagcctggccggccctggaacagagccagacaagatcctgcggcacttcagcatcatggacttcaacagcgagaaggacatcgtgcggggcagcagcaagctgatcacagagcaggagctgcctgagaggaggaaggccctgcggcccccaccaccccggccctgcacccctgtgtccaccagcccccacctgctggtggaccagaacctgaagccagccccacccctggtggtgcggcccagcaggcctgcccccctgccccccagcgcccagcagaggaccaatgctgtgagccccaagctgctgagccgccaccggcccacctgtgagaccctggagaaggagggccctggccacatgggccgcagcctggaccagaccagcccctgccccctggtgctggtgcgcatcgaggagatggagcgggacctggacatgtacagccgggcccaggaggagctgaacctgatgctggaggagaagcaggatgagagcagcagagctgagaccctggaggacctgaagttctgtgagagcaacatcgagagcctgaacatggagctgcagcagctgcgggagatgaccctgctgagcagccagagcagcagcctggtggcccccagcggctctgtgtctgcagaaaatcctgagcagaggatgctggagaagagggccaaggtgattgaggagctgctgcagacagagcgggactacatccgggacctggagatgtgcatcgagcgcatcatggtgcccatgcagcaggcccaggtgcccaacatcgactttgagggcctgtttggaaacatgcagatggtgatcaaggtgtccaagcagctgctggccgccctggagatcagtgatgctgtgggccctgtgttcctgggccacagagatgagctggagggcacctacaagatctactgccagaaccatgatgaggccatcgccctgctggagatctatgagaaggatgagaagatccagaagcacctgcaggacagcctggccgacctgaagagcctgtacaatgagtggggctgcaccaactacatcaacctgggcagcttcctgatcaagcctgtgcagagggtgatgagataccccctgctgctgatggagctgctgaacagcaccccagagagccacccagacaaggtgcccctgaccaatgctgtgctggccgtgaaggagatcaacgtgaacatcaatgagtacaagaggaggaaggacctgggcaagaacagcatcatcgccgagaaggagtatgcccatgctgaggagagcgccttcctgacctacagcctggtgctgaagtacagaaaaggagatgaggacagcctgatggagaagatcagcaagctgaacatccacagcatcatcaagaagagcaacagagtgagcagccacctgaagcacctgaccggctttgccccccagatcaaggatgaggtgtttgaggagacagagaagaacttcaggatgcaggagcggctcatcaagagcttcatccgggacctgagcctgtacctgcagcacatccgggagagcgcctgtgtgaaggtggtggccgctgtgtccatgtgggatgtgtgcatggagcggggccaccgggacctggagcagtttgagcgggtgcaccgctacatcagtgaccagctgttcaccaacttcaaggagaggacagagcggctggtgatcagccccctgaaccagctgctgtccatgttcaccggcccccacaagctggtgcagaagagatttgacaagctgctggacttctacaactgcacagagcgggcagagaagctgaaggacaagaagaccctggaggagctgcagagcgccaggaacaactatgaggccctgaatgcccagctgctggatgagctgcccaagttccaccagtatgcccagggcctcttcaccaactgtgtgcacggctatgcagaggcccactgtgactttgtgcaccaggccctggagcagctgaagcccctgctgagcctgctgaaggtggccggccgggagggcaacctgattgccatcttccacgaggagcacagccgggtgctgcagcagctgcaggtgttcaccttcttccctgagagcctgcctgccaccaagaagccctttgagaggaagaccatcgaccggcagagcgccaggaagcccctgctgggcctgcccagctacatgctgcagagcgaggagctgcgggccagcctgctggcccgctacccacctgagaagctgttccaggccgagaggaacttcaatgctgcccaggacctggatgtgtccctgctggagggggacctggtgggcgtcatcaagaagaaggaccccatgggcagccagaaccgctggctgattgacaatggagtgaccaagggctttgtgtacagcagcttcctgaagccctacaaccccaggaggagccacagtgatgcctctgtgggcagccacagcagcacagaaagtgaacatggcagcagcagcccccgcttcccccggcagaacagcggcagcaccctgaccttcaaccccagctccatggctgtgtccttcaccagcggcagctgccagaagcagccccaggatgccagccccccacccaaggaatgtgaccagggcaccctgagcgccagcctgaaccccagcaacagcgagagcagccccagccgctgccccagcgaccctgacagcaccagccagcccaggtctggggacagcgcagatgtggccagagatgtgaagcagcccacagccacccccaggagctacagaaacttccgccaccctgagatcgtgggctacagcgtgcccggcagaaatggccagagccaggacctggtgaagggctgtgccaggacagcccaggccccagaagatagaagcacagagccagatggcagcgaggccgagggcaaccaggtgtactttgctgtgtacaccttcaaggccaggaaccccaatgagctgtctgtgtctgccaaccagaagctgaagatcctggagttcaaggatgtgactggaaacacagagtggtggctggccgaggtgaatggcaagaagggctacgtgcccagcaactacatcaggaagacagagtacacctag

SEQ ID NO: 185245 - DNA, 6400 bp, Artificial Sequence
  derived and/or modified sequence
aggggcggaggtgacagcgggctggggactggcggctgcaactgcctgccgcgccgagggaccgccgggcggcggaaagcaggttataaaacatggaggctggctcagtggttcgagccatttttgacttctgccctagcgtatcagaagaactgccgctctttgtgggagatattattgaggtgctggcagtggtggatgaattttggcttctaggaaagaaggaggatgttacaggacaattccccagcagttttgtggaaattgtgaccattcccagtctaaaagagggagagaggctgtttgtgtgcatttgtgaattcacatcccaagagttggataatcttcccctccatcgaggtgacctggtgattctcgatggcattcccactgcaggctggctgcagggccgaagctgctggggcgcacggggcttcttcccatcttcatgtgtccgcgagctctgcctctcctcacagagccggcagtggcactcccagagcgccctgtttcagattccggaatattccatgggacaagcccgggccctaatggggctttctgctcagctggatgaagagctggacttcagggaaggggatgtgatcaccattattggagttcctgaaccaggctggtttgaaggggagttagagggccgaagaggcatttttccagaaggttttgtagagctgttggggcccctgaggactgtggatgagtcagtaagttctggaaatcaagatgactgcattgttaatggtgaagtagatacccctgtaggagaagaagagatagggccggatgaggatgaggaggagccagggacctatggggtcgccctgtacagattccaagccctggagccaaatgagctggatttcgaggtcggggataaaatccgaattctggcgaccttggaagatggctggctggaaggatccctgaagggcaggacaggcatctttccttaccggtttgtgaaattatgtcctgacacacgggtggaggaaaccatggctctgccccaggaaggcagccttgccaggatcccggaaacttctttggattgtttggagaacaccttaggagtagaggaacaaagacatgaaaccagtgaccatgaggccgaggagcctgactgcattatttctgaagcacccacttctcccctcggtcatctgacttcagagtatgacacagacagaaactcttatcaggacgaggacaccgcaggagggcccccgagaagcccaggcgtggagtgggaaatgcctcttgccacagactctcccacatctgaccctacagaagtagtcaatggtatttcctcccaacctcaggtcccttttcatcccaacttgcagaaaagccagtattattctacagtgggagggagccacccgcactcagaacagtaccccgaccttcttcccctagaagcaaggactagagactatgccagcctacctcccaaaagaatgtattcccagctaaaaactcttcagaagccagtgctccctctttacaggggctcttctgtttcagcttcaagggtagtcaaacccagacaatcaagtcctcagctccacaacctagcaagttatactaaaaagcaccacacgtccagtgtttactccatctcagagagattggagatgaagcctggtccgcaagcccaagggcttgttatggaagcagcaacacattcacagggagacggcagcactgacctggactcgaagctgacacaacagctgatcgagtttgagaagagcttggcagggcccggcacagagccagataaaattttacgccacttttcaatcatggactttaactctgagaaggatattgtccgaggttcctcaaagttaatcaccgagcaggagctgccggaaaggagaaaggccctaaggccaccgccacctcgtccctgtactccggtatccacttctccccatttgctggttgaccagaacctaaaacctgcaccacccttggtggtgcgaccctctcgcccagctcccctgcctccctcagcacagcagagaacgaatgcggtatcccccaagctcctatctcgacaccgtcctacctgtgagaccttagaaaaggagggccctggtcatatgggaaggagtctggaccagacctccccatgccccttagtgctggtgaggattgaggaaatggagcgggacttggatatgtacagtagagctcaagaagagctaaacctcatgctggaggagaagcaggatgaatcatcaagagcagagaccctcgaggatctcaagttctgtgaaagtaacattgaaagtttgaatatggaactccagcaactaagagaaatgacgctcctctcctcccagtcttcatcactggtggccccttctgggtctgtgtctgccgaaaatccagagcagaggatgctggagaagagagccaaggtcatagaagaacttcttcagacagaaagagactacattcgggatctggaaatgtgtattgagcggatcatggtacccatgcagcaggcacaggtaccaaacattgattttgagggactttttggaaatatgcagatggtgattaaggtctcgaagcaattattggctgctctggaaatcagcgatgctgtaggacctgtgtttcttggtcaccgggatgagcttgagggaacatacaagatttactgccagaatcatgatgaggccattgcgctgcttgaaatctacgagaaggatgagaagatccagaagcatcttcaggactccttggcagatctgaactctttagttctaaaaaagggatgcacaaattatattaacctgggctccttcctcatcaaaccagtacagagagtaatgcgttacccgctgttgctaatggagttgctgaattccaccccagaatcccacccagataaagtgcctttaaccaatgcagtccttgcggtcaaggaaatcaacgttaacattaatgaatataaacggcgaaaggacctggtcctcaagtaccgtaagggtgatgaagatagccttatggagaaaatttccaaactgaacatccactccatcatcaagaaatccaaccgagttagcagtcacctgaagcatctcactggctttgctcctcagataaaagatgaagtatttgaagaaacagaaaaaaacttccgaatgcaagaaagattgattaagtcttttatccgagacctgtctctctacctccagcacatccgggagtccgcatgtgtgaaagtggtggctgctgtgagcatgtgggatgtgtgcatggagagaggacaccgggacctggagcagtttgagagggtgcatcgctacatcagtgaccagctcttcacaaactttaaggagaggacagagcggcttgtcatctcccccttaaatcagttactgagcatgtttacagggccccataagctggtacagaaacgctttgacaagctcctggacttctataactgtacagaacgggcagaaaagctaaaggacaagaagaccctggaggagctgcagtcggcccggaacaactatgaggccctgaatgcacagctgctggatgagctgcccaagttccaccagtacgcccagggcctcttcaccaactgtgtccacggctatgctgaagcccactgtgactttgtgcaccaggctctggagcaattaaagccactgctttcgttactcaaagtggctggcagagagggaaaccttattgccatcttccacgaagagcacagcagagttctgcagcaactccaggtttttaccttcttcccggagtctcttccagctaccaagaagccatttgagaggaaaaccattgaccgccagtctgctcgaaagccactcctgggcctgccaagttacatgctacagtcagaagaactccgggcctccctcctggccaggtatccccctgaaaaactcttccaggcagaacggaacttcaatgctgctcaagacttggatgtctcacttttggaaggtgacctggtgggtgtgattaagaaaaaagaccccatgggcagccagaaccgctggctgattgacaatggagtcaccaaaggcttcgtgtacagctctttcctaaagccctacaatcctcgccgcagccactccgatgcctccgtgggtagccactcctccacagagtctgagcacggcagctcctcccccaggttcccacgccagaacagcggcagcaccctgaccttcaaccccagcagcatggctgtatcctttacctcggggtcttgccagaagcagcctcaagatgcatctcctccgccaaaagaatgtgaccaaggaactctcagtgcatccctaaatccgagtaattcagagagtagtccttccagatgcccttcagacccagactccacctcccagccaaggtcaggggactctgcagatgtagctagagatgtaaagcaacccactgccacgccgaggagctaccggaacttcaggcatccagaaatagttggctactccgtaccaggacgaaatgggcaaagtcaagacctcgtcaaaggatgtgcaagaacagcccaggctccggaagacagaagtacagagccagatggcagtgaggcagaaggcaaccaggtctattttgctgtctacaccttcaaggcacgaaacccaaatgagctgagcgtgtcagccaatcagaaactcaagatcctcgagtttaaagatgttacaggaaatacagagtggtggttagctgaggttaacgggaagaagggctacgttccctccaattatatccgcaaaaccgagtacacctgagcccacgttgcctgccacccagccttgctgcctttgctttcagtccgccgagggttctggcggcccaccgagagggcgcctgctcctgagacacaggccctgtctgcgttgcttaaccatggcatggtggagcacaccacagatcttgttctcctcgattgggttgtaaaccttgatgctcactagaatctctagaatttgaaatggaccctggggctttgcaaatgacttagtgactatgagaagagagacaagtcttagagctggcttttggaaaggagaaacttgcagtcagaagcccagtgtcctatgtatgcaggaagctgtgctctagcaatagacagtgttggtaatggttgtgctgtacggcgtttggggtggccccatgttccatgctcagctgaccggatgccaactcagatgaaaagaattcatggctctgggcaccccgtgaggcagtgcttgcacatggctgggagtttgtcgggattgaaccaaacctagtgcttcaaagctcctgggacacctccagtgtccagcacacattctcatacatactgcccctaatttctaaagtccctaaagcactacattctgtaaccttgtttcttttactccattcccagattagttatgcaaaattcaactgcgttctacttttagaagtgtttagggtctttattttctgttgacccttcatctgaaagattctcttcccttgttaggtacaatcactgcccccccgcttttttttttgagatggggtcttgctatgttgcccaggctggtcttaaacgcctgggctcaagcaaccctcccgcctccctgctgagattacaggtgtaagccaccataccgcaacctcaatgacacctttctgatggtctttacacagtctgtgatgtctggtggcccccctgccctggactcaataattgatagattttcctagagtaacagtatgagagctccagccattccattaaaagtattagttctgctttgagctgaaaccagttgagcctaatggaagactggatgtctttcttcttcatccaagcaccctaatgactgtttagttacatccatagatgcagacaacataacacctgtgacttacttgaattgggataagccattccagaagtagcttatcctagacttggaaataagatttttttcaccactaacttccatgcttcagagatgacattcaaagccagattcccaagtgcctgatcatacctcccagtctcaggaagatatttgcttaccccttagaccaagaatcttaagatcttccccagctatgaagcctatcttggaatgggaaaccatgaaatttgtcttttaaaagaaagggaagaaatagccttacagcccctgttcctccaagtgcacatttagccttaaaatcctgggagtcgggagacaccgtggagtcctaacatccacagtgtctgctggtcgtggtcagaaggcagtaatgcaagagtccttttgtgaagagtgtttctatgtagagatgtttatatttaagtagttcttttataaataaaagcatttctaatggc

SEQ ID NO: 185246 - DNA, 4734 bp, Artificial Sequence
  derived and/or modified sequence
atggaggccggcagcgtggtgcgggccatcttcgacttctgccccagtgtctctgaggaactgcctttgtttgtgggtgacatcattgaagtcctcgcagtggtggatgagttttggttgctgggaaagaaggaggacgtgaccggtcagttccccagttcgtttgttgagattgtcacaattcctagcttaaaggagggcgagcggctctttgtctgcatttgcgagttcacatcacaggagctggacaacctgcctcttcataggggtgacctcgttatattagacggcataccgaccgccggatggttgcaaggtaggtcttgttggggcgccaggggattctttccctccagttgtgtccgggaactgtgcctaagctcccagagcaggcagtggcattcacaatcagcactgttccaaatcccggagtactccatgggacaggccagagctctgatggggttaagtgcacagctggacgaggagctcgatttccgagagggagacgtgatcacaatcatcggagtccccgaacccggatggttcgagggagaactagaagggcgccgggggatctttcctgagggcttcgttgagctgttaggaccactgagaactgtggatgagtctgttagttccggcaatcaagacgactgcatcgttaatggggaggtagacacaccggtgggcgaggaagagatcgggccagacgaggacgaggaagaacccggaacctatggggtggccctgtaccgcttccaggcgctcgaacctaatgaactcgactttgaagtgggggataaaatccgcatactggcaactctcgaagacggatggctcgaggggagcctgaaaggcaggaccggtatattcccatacagatttgtgaaactgtgccccgatacgagagttgaggagactatggccctcccacaggagggaagcctcgcacggatcccggagaccagcctcgattgcttagagaacacactgggcgtagaggagcaaaggcatgagacttccgaccacgaagctgaagagccagattgtatcatcagcgaggcaccaacctctcctctgggccaccttactagcgagtatgacaccgataggaactcctatcaggatgaagataccgctgggggccccccacgttccccaggggtggaatgggaaatgcctctcgccactgatagtccaacctctgaccctacagaagtggtaaacggcatttcctctcagccccaggtgccgtttcatccaaatttgcagaaaagtcaatactattctacagtgggaggctctcacccgcactccgaacagtaccccgatctgctgcctttggaagcgagaaccagagactacgccagccttccaccaaagcgaatgtacagccaactcaagaccctacagaaacctgtcttgcccctttataggggttcgtccgtttctgcaagccgcgtagttaaacctaggcaaagctccccacagcttcataacttggctagctacaccaaaaagcaccacacaagcagcgtctatagtatttcggagcggcttgagatgaaacctggcccccaggcgcagggcctcgtcatggaagccgccacacactcacagggggatggatccacggatctggattccaaactgacacagcagctgattgagttcgagaaaagcctggcggggccagggacggagcctgacaaaatcctgcgtcacttttctattatggacttcaactccgagaaagatattgttcggggatcatctaagttgatcaccgagcaggaactcccggagcggcgtaaggccttgcgccctccaccccccaggccttgtactcctgtcagcacatcaccacatctgttggtggaccagaacttaaagccggctcccccgctggtggtcagaccatcccggcccgcgcccctgccaccatccgcacagcagagaacaaatgcagtgtcacctaagttgctctccaggcaccggccaacgtgcgagacactcgaaaaagaaggacctgggcatatgggcaggtcgcttgatcagacgtcaccatgcccacttgtcctagtgaggatagaggaaatggaaagggatctcgatatgtacagtagggcccaagaggagctcaacctcatgctagaagaaaaacaggatgaatcctcccgtgcagaaactcttgaagatctaaagttttgtgagtccaatattgaatccctcaatatggagctgcagcaattgagggaaatgacacttctgagctcacagtcaagctccctggtggccccttccggctctgtcagtgcggaaaaccctgaacagcgcatgttggagaagcgggcaaaggtcatcgaagagcttctgcagaccgagagagactatattcgggacctggagatgtgcattgagcgcattatggtccctatgcaacaggctcaggttccaaacatagattttgagggcctattcggcaacatgcaaatggtgattaaggtttctaagcagcttctggctgccctggaaatcagcgatgctgttggtcctgtgtttctgggacaccgagacgagttggaagggacctataaaatttactgtcaaaatcacgacgaggccatagccctgctggaaatttacgagaaggatgaaaagattcaaaaacacctccaggattcattggctgaccttaagtctctgtacaacgagtggggatgtacaaactatatcaacttaggtagcttcctcatcaaacccgtacagagagtcatgcgctatcctctgctgctgatggagctcctaaactctacccctgagtcccaccccgacaaggtccctttgaccaatgccgtactggcggtgaaggagataaatgtaaatataaacgaatataaacgccggaaggacctggttttaaagtatagaaaaggagatgaggattcactcatggaaaagatcagcaagttgaacatccattccattatcaaaaaatcaaatagggtgagctcacatctgaaacacctcaccggcttcgctccccaaatcaaggacgaggtgttcgaggagacagagaaaaactttaggatgcaggaacgactgataaaatctttcatccgggacctgtccctttatctgcagcatatccgagagtccgcctgtgtgaaagtggtggcagctgttagcatgtgggatgtgtgtatggagcgagggcatcgggatttggagcagttcgagagagtgcatcgatatatctctgatcagctttttactaacttcaaagaacgtaccgaaagacttgtgatcagccctttgaatcagctgctgagcatgtttactggacctcataaacttgttcaaaagcgcttcgacaagctccttgatttttataattgtacagagcgtgcagaaaaacttaaagacaagaaaacccttgaggaacttcaatccgcccgaaacaactatgaggcccttaacgctcagctgcttgatgaactgccaaaatttcaccagtacgcccaagggctttttacaaactgtgtccatgggtacgccgaggcccattgcgatttcgtccaccaggctctggagcagctgaagcccctcctctctctgctcaaggttgcggggagggaaggaaaccttatcgcaatctttcatgaggagcactctcgtgtgctccagcagctgcaagtgtttaccttctttccagagagcctacccgccacaaaaaaacctttcgaacgcaaaacgatcgataggcaatctgcacggaaaccactgctgggtttgcctagttacatgctgcagtccgaggagcttagggcctctctgctggcgaggtatccccccgaaaagctgttccaagcagaacgtaattttaacgctgcccaggacctcgatgtgtcgcttctggaaggtgaccttgttggcgtcatcaaaaagaaagacccgatgggttctcagaacaggtggttaatcgataatggcgtgaccaaaggcttcgtgtattcctcattccttaaaccatacaacccaaggcggagccatagtgacgcctccgtgggaagtcactcatctaccgaaagtgagcacggttcaagttctccccggttccctagacagaattcaggtagcaccctcacgtttaatccatcgtctatggctgtctcctttacttcaggaagctgccagaaacagccgcaagatgcgagcccacctccaaaggaatgcgatcaaggcacgttaagtgcttcactcaatccttctaatagcgagtcaagccctagccggtgccccagcgacccagattccacctcacagccacggagcggcgactccgccgacgttgcaagagacgtgaaacagccaacggcgaccccccggtcttacaggaactttagacatcccgagattgtggggtactctgtgcccggacgaaacgggcagtcacaagacctggtgaagggatgcgcccgcaccgcccaggcacccgaggaccggtctaccgagccagacggttctgaagccgagggcaaccaggtttattttgccgtgtatacgttcaaggcaaggaaccctaacgaactgtcagtatctgccaaccagaaactaaaaatcctggaattcaaagatgtgacagggaacactgagtggtggttggccgaggtgaacggtaaaaaggggtatgtgcctagcaattacattcggaagactgagtatacgtag

SEQ ID NO: 185247 - DNA, 4806 bp, Artificial Sequence
  derived and/or modified sequence
atggaggccggcagcgtggtgcgggccatcttcgacttctgcccctccgtttcagaagaactcccactcttcgtgggggatatcatagaagtattggcagtggtggacgaattttggctgctggggaaaaaggaagatgtgaccggccagtttccaagctccttcgtggaaattgtgacgataccatcactcaaggaaggcgaacgcctattcgtgtgtatttgcgaatttacctcacaggaacttgataacttgccactccatcggggtgatcttgtgattttggatggcatccccacagccggatggttgcagggacggtcttgctggggggcccgaggattcttcccatcctcatgcgtcagggaactgtgtctatcaagccaatctcgccaatggcactcacaatctgctctgtttcagatcccagaatacagtatgggtcaagcgcgcgccttgatggggctttccgcccaacttgacgaggaattggatttcagagaaggtgacgtgatcaccatcattggcgtccctgagcctggatggttcgaaggggaactggaggggcgcagaggcatttttcccgaaggctttgtcgagcttctcgggccacttcgcacggtggacgaaagtgttagttctgggaatcaagatgactgtatagttaatggtgaggtggatactccggtcggcgaggaggagatcggacctgatgaagacgaggaagagcccgggacttacggggttgcgttgtacaggtttcaggcgctggaaccaaacgagctggactttgaggtaggggataagattcgcattttggcgaccttggaagacgggtggcttgagggctcgttaaagggaagaaccggcatctttccctatagattcgtgaagttgtgccctgacaccagggtggaggaaacgatggcgcttccccaggaaggatcgttggcgagaattcctgaaacatccctggactgtttggagaataccctcggcgttgaagagcagcgacacgaaacctctgaccacgaggctgaggagccagactgcatcatcagtgaagcccctacttcccccctcggacacctgacgtctgagtatgataccgaccgcaatagctatcaagacgaggacaccgcaggtggaccacccagatcacctggagtggagtgggagatgcctctggccaccgacagcccaacaagcgaccccaccgaggttgtgaacgggatttcgagccaaccgcaggtgccgtttcaccctaatctacagaaatctcagtactacagcacagtggggggcagccaccctcattccgagcagtatcctgatttgctccccctggaggcacgaactagagactatgcctccctgcctcccaagaggatgtattcccagcttaagacactccagaagcccgtgttgcctctttacaggggaagttctgtttcagcttcccgggtggtgaagcccagacaatcttcgcctcaacttcacaacttggcctcttacaccaagaaacatcacacctctagcgtgtactccataagtgagcggctagagatgaaaccaggaccccaggctcaggggttggtcatggaggcagccactcattctcagggggacggcagtacagacctcgactctaaactcactcagcagctcattgaatttgagaagagcctggccggccctggcaccgagcctgacaagatcctgagacactttagtatcatggatttcaatagtgagaaggacatcgtccgcggctcgtccaagctaatcactgagcaagagctgccggagaggcgcaaggccctgcgaccaccccctccacggccctgcacacctgtgtccacctcacctcacctgctcgtggaccaaaatctgaagccagcaccaccactggtggtgcggccgtcaaggcctgcccccctgccaccttcagcccagcagagaaccaacgctgtgtcccccaaactgcttagccgacaccggcctacatgtgaaacactggaaaaggagggacccggtcatatggggaggtccctggatcagacttccccttgtccgctggttcttgttcgcatcgaagagatggagagagacttagacatgtacagccgggcacaagaggaacttaacctgatgctggaagagaagcaagacgagtcgtcccgagccgaaacccttgaggacctgaaattctgtgagagtaatatcgagtcattgaatatggagttacagcagctgcgcgagatgacccttttgagcagccaatcctcctcactggttgccccatccggctccgtgagcgccgagaatcctgaacaaaggatgctcgagaagcgcgcaaaagtgatagaagaactgctgcagaccgaacgggactacattcgcgatcttgagatgtgcatcgagagaattatggtaccgatgcagcaggcccaggtccccaacattgactttgagggtctgtttgggaatatgcagatggtgattaaggtatcgaagcaacttttggctgccctggaaatttccgacgcggtcggccccgtattcctgggccaccgtgatgagcttgagggtacttacaaaatctactgtcagaaccacgacgaggcgatagcgctgctcgagatttatgaaaaggacgagaaaattcagaagcatctgcaggacagcttagcagatcttaagagcttgtacaacgaatggggctgtacaaactatatcaacctgggcagtttcctcattaagcctgtgcagagggttatgcgctaccctctcctgcttatggagcttctgaattcaaccccagagagccaccccgataaagtccccctaaccaacgcggtactggcggtcaaagagattaacgttaatatcaatgagtacaagcgtagaaaggacctcggcaaaaactcaattatcgcggaaaaagagtacgcacatgctgaggagtcagccttcctgacctactccctcgtgctgaagtatcgtaaaggggacgaggattcattaatggaaaagatcagcaaacttaacatccactcgatcatcaagaagtcaaacagggtgtcttcccacttgaagcaccttaccggattcgccccacaaatcaaggacgaagtgttcgaagagaccgagaagaacttccgcatgcaggagagattgattaagtccttcatccgagatttatctctctacttacagcacatccgggagtctgcctgcgtcaaagtggtggctgcagtctccatgtgggacgtgtgcatggagcggggtcaccgggatctggaacaattcgaaagggtccacaggtatatatccgaccaactgttcacaaacttcaaagagcgcaccgagagacttgtgatctcccctctaaaccagttgctttccatgtttacaggtcctcacaagctggtccagaagagatttgacaaactgctcgacttctacaactgcacggagcgcgcagagaaactcaaggataagaagactttggaagagctgcagtcggccagaaacaattatgaggcccttaatgcccagttattggatgagcttcctaaatttcaccagtacgcacagggactcttcaccaattgtgttcacggatacgccgaagctcattgcgattttgtgcaccaggccctggaacagttgaaaccccttctgtcactcctgaaggtagccggaagagaaggaaatttgatagccattttccatgaggagcattctcgtgtgctccaacagctgcaggtgtttactttctttcctgaatccttgcctgcaacaaagaaaccttttgaacgcaagaccattgatcgccagagcgccagaaagccgttgttgggtctgccgtcctacatgctacagagcgaagaattgagggcctcactcctggcccggtatccccccgaaaaactgttccaggctgaaaggaattttaacgccgcccaggaccttgatgtcagcctcttggagggcgaccttgtcggggtcattaagaaaaaagatcccatgggcagccaaaatcgttggctcattgacaatggagtgacgaaagggttcgtgtacagcagctttctgaagccctataacccaagaaggagccactcggacgcaagcgttggtagccactcgtctactgagtctgagcacgggtcaagctcaccacgtttcccccgtcagaatagcgggtcaactctgacgtttaacccgtctagcatggcagtgtctttcacatcgggctcttgtcagaaacagcctcaggatgcctctcctcctcccaaggagtgcgatcaaggcactctttcagcaagcctcaatccctcgaactctgaatccagcccatcaagatgtccttccgacccggatagtacctcgcagccccgcagcggcgattccgccgacgtggctcgggatgttaagcaacccaccgcgacgcccagatcgtaccgaaactttcggcacccggagatcgttggctactccgtgcctggtcgcaatgggcagagccaggatctggttaaaggctgcgcccgcactgcacaagctccagaagatcgatccaccgaaccagatggatccgaagcagagggtaaccaggtgtacttcgccgtgtacaccttcaaagcacggaatcccaacgagctatcagtctctgccaatcagaagctgaaaatcttagaatttaaagacgtgaccggaaacaccgaatggtggctagctgaagtcaacgggaagaagggctatgtcccgtcaaattacatacgcaagacagagtacacatag

SEQ ID NO: 185248 - DNA, 4734 bp, Artificial Sequence
  derived and/or modified sequence
atggaggctggaagtgttgttcgagctatcttcgatttttgtccgtccgtgagcgaggagctcccactctttgtgggtgacattattgaggtgctcgctgtggtggacgaattttggttgctggggaaaaaagaggacgtgacaggtcagtttccatcatcattcgtggaaattgtcactatcccaagtcttaaagagggcgagcgcctgtttgtgtgcatctgtgaatttacaagccaggagttggacaatttgccactgcatcggggtgacctggtgatcttggatggaatcccaaccgctggctggttgcaggggcgatcctgttggggagccagggggttctttccaagtagttgcgtccgtgaactatgtctttcctcccagagcaggcaatggcattcacagagtgcacttttccaaattcctgagtactctatgggccaggctagagctttgatgggcctgagtgcccagctcgacgaggaactggacttccgagagggcgacgttatcactattataggcgtgcctgagccaggatggttcgagggcgagctggagggtcgcagaggcattttcccagagggctttgtcgaattgttgggcccacttcgaaccgtggacgagtctgtctcttccggcaaccaggacgactgcattgtcaatggggaggtcgataccccagttggggaagaggagattggcccagacgaggacgaggaagaaccaggaacctacggcgtggcgctgtacagattccaagccctggaacccaatgagctcgactttgaggtgggcgataaaattcgcattctggctactctagaggatggctggctagagggctccctgaaggggcgaacaggtatcttcccctacaggttcgtgaagctttgcccggacacacgagtggaagagactatggcactgccacaagagggaagccttgctcggatccccgagaccagcttagattgtttagaaaacactctgggagtggaagagcagcgacatgagaccagcgaccatgaagccgaagagcccgattgtatcattagcgaggcacccacatctccccttggtcacctgacaagtgaatacgatacagaccgcaactcttaccaagacgaggataccgcagggggacccccacggtcacctggcgtggaatgggaaatgcccctggctaccgacagcccaacgagcgacccaactgaggtcgttaacggtatcagcagccagccacaggtgcctttccacccgaacttgcaaaagagccaatattacagtacagtcggaggctcgcatcctcatagtgaacaatatcccgatcttctacccttggaagcacggactcgggattatgcctccctgccaccaaagagaatgtatagtcagctaaagaccctccagaagccagttctcccactgtacagaggatcttccgtcagtgcaagtcgagtcgtgaagcccagacagtcttccccacaactccacaacctggccagttacacgaaaaagcaccacaccagttccgtatactccatttcagaacggctcgagatgaagcccggaccgcaagcacagggccttgtgatggaggctgccactcacagccagggtgacggctctaccgatttggattccaagttaacacaacagctgattgagttcgagaagtcactggccggtcctggtaccgagccagataaaatcctcaggcacttctcgataatggactttaacagcgaaaaggatattgtgagggggtcctctaaactgattacggaacaggaactacccgaacgcagaaaggccctgcgtcccccaccgccacgcccttgtacgccagtttccacttctccacatttactagttgaccagaatctgaaacctgccccaccactggtagtgaggcccagtcgcccagctccgttgcctccgtctgctcagcagcgtaccaatgccgtttcaccaaagttgctgtctagacacaggccaacatgcgaaacgcttgagaaggaggggcctggtcacatgggccgatccctagaccaaaccagcccatgccctctggtgctggtgcgaattgaagaaatggagcgcgaccttgacatgtacagccgagcgcaagaggagctcaatctgatgttggaggaaaaacaagacgagtctagccgagccgagaccttagaagacctgaaattttgtgaaagcaatatcgaatccctcaacatggaacttcagcagctgagagaaatgaccctcctctcttctcagtcaagtagcctcgtggccccttccggtagcgtgtccgcagagaatccggaacagcgcatgcttgagaagcgtgctaaagttattgaagaattactacagactgaaagggattacattcgggatctggaaatgtgcattgagagaatcatggtgcctatgcagcaggcccaggtccctaatatcgacttcgagggcctgttcggcaatatgcagatggtgatcaaagtttccaagcagctgctggcggctcttgaaatttcagatgcggtcggcccagtttttctcggccaccgggacgaactggagggcacatacaagatttattgtcagaaccacgacgaggcaatcgccctgttagaaatctacgagaaagatgagaaaattcagaagcatctgcaggatagcctcgccgatctaaaatcgctgtataatgagtggggttgtacgaattatattaatctgggaagcttcctcatcaaacccgttcaaagagtaatgcgctatcctcttctgttgatggaactgctgaattccacccccgaatctcatcctgataaggtaccgctcaccaacgccgtgcttgctgtgaaggaaatcaatgttaacattaatgagtacaagcgcaggaaagacctggtacttaagtatcggaagggcgacgaggattccctcatggagaagatttccaagctcaatatccacagtatcattaagaagtctaacagagttagctcacacctgaaacaccttaccgggttcgctccacagatcaaagatgaggtgttcgaggaaaccgagaaaaattttcggatgcaggagcggttaattaagtcctttatacgagacctttccttgtacttacaacatattcgggagtctgcatgcgttaaggtcgtggcagcagtgtctatgtgggacgtttgtatggagagggggcatcgcgacctggaacagttcgagagagttcaccgctatatctccgaccaattatttacaaatttcaaggagaggactgagcgtctcgtgatctcccctctgaatcagctgctctcaatgtttacaggaccccataagctggttcagaaacgctttgacaagttgctggacttctataattgcactgaaagggccgagaagctaaaggataagaagacattagaagaactgcagtcagctcgcaataattatgaagcactgaatgcacagctactggatgagctgccgaaatttcatcagtacgcgcagggcttgttcaccaactgtgtgcacgggtacgctgaggcacattgtgattttgttcatcaagctcttgagcagctgaaacccctgctatctctcctcaaagttgccggtcgggagggcaatttgatagcaatatttcacgaggagcactcgcgcgttttgcagcagttgcaggtgttcacattttttccagaatcgcttccggcaactaaaaaacctttcgaacgcaagactatcgatcggcagtcagctagaaagccgctgctgggactccccagctacatgctgcagtccgaagagctgcgcgcaagtctgttagccagatatccacccgaaaaactgttccaagccgagagaaactttaatgctgcacaagacctggatgtttcgctcctagagggtgacctggtcggcgtcatcaagaagaaagatcccatgggcagccagaacaggtggctcattgacaacggggtgactaaaggctttgtgtattctagcttcctgaagccctacaacccaaggcgaagccacagcgacgcgtccgtaggctcccattccagcacagagtcggaacatggctcttcatcgccccgatttcccaggcaaaacagtggcagcacgttgacatttaacccatcttctatggccgtcagttttactagcggctcatgtcagaagcaaccgcaggatgccagcccccctccaaaggaatgcgatcagggaacactttcagcttccttgaaccccagcaactccgagtcaagtcccagtcggtgcccttcggatccagactctacgtcccagcctcgctctggcgattcagccgatgtggcgcgagacgtgaagcagcccacggcaactcccaggagctatcgcaacttcagacatcccgaaatcgtggggtactcagtgccaggcagaaacggacagagtcaggaccttgtgaagggctgcgctcgcaccgctcaggcacctgaggaccgaagtactgagcctgatgggagtgaggcagaggggaatcaagtgtactttgctgtgtataccttcaaagctcgcaatccaaacgagctgtccgtctctgcaaaccagaagttaaaaatattggagtttaaagatgtgactggcaatacagagtggtggctcgcagaggtcaacggtaagaagggttacgtccccagtaactatatccgaaagacagagtatacttag

SEQ ID NO: 185249 - DNA, 4806 bp, Artificial Sequence
  derived and/or modified sequence
atggaggccggatccgtggttagagctatttttgacttttgcccatccgtgtctgaggaactgccactctttgtgggggatattattgaagtgcttgctgtggtcgatgagttctggctcctgggcaagaaagaagacgtgacaggacagtttccttcgagcttcgttgaaatagtcactatcccctccctcaaagagggtgagcggctctttgtctgcatctgcgaatttacgtctcaggagctggataatcttcctctccaccgcggagatctcgttattttagacgggatcccaacggcgggttggctgcaggggaggagctgttggggcgctcgagggttttttccatcaagctgcgtccgggagctctgcctgtcctcccagtcacgccagtggcacagccagagcgcacttttccagattccagagtactcaatggggcaggctagagccctcatgggcttgtccgcccagttggatgaagagctcgacttcagagagggagatgtcattacaattattggggttccagagcccggatggttcgagggtgagttagaaggcaggagaggcatttttcccgaggggttcgtagagcttctagggcctcttcgcactgttgacgagtctgtatccagcgggaaccaggatgactgtattgtgaatggcgaggtcgacacaccagtgggagaggaggaaatcggacccgacgaggacgaggaagagccaggtacatatggcgtggccctgtacagattccaagccctcgaacctaatgaattagactttgaagtaggggacaagatcaggatccttgcaaccctcgaagacggctggctcgaaggcagccttaagggccgaaccggaatttttccttatcgattcgtgaagctgtgccccgacacccgcgtggaagaaacgatggctctgccacaagaaggtagccttgcgaggatccccgaaacttcattagattgtcttgagaatacactgggggtcgaggaacagagacacgagacatccgatcacgaggctgaggagccagactgcatcatttctgaggcaccaacatctccgctcggacacctaaccagcgaatacgacacagaccgcaattcataccaggatgaggataccgccggaggccctcccagatcgcctggcgtggaatgggaaatgccgttggcaacagattccccgacatcggatccgaccgaggtggtgaacggtatcagcagtcagcctcaggtaccctttcatcccaatctccagaagagccagtactattccaccgtggggggaagccacccccatagcgagcagtacccagaccttttaccactggaagcccgaactcgtgactatgccagcctgcccccaaagcggatgtacagccagctcaagactttgcaaaagcccgtcctgccactgtatcgcggtagctccgtgtccgcctcacgcgtcgttaaacccaggcagtcctccccacagctgcataacctggcttcctacacaaaaaaacaccacacctctagcgtgtacagtatcagcgagcggctcgaaatgaagcctggccctcaggcccaaggattggtcatggaagccgctactcattcacagggcgacgggtctacagacctcgacagtaagttgacacaacagctcattgaattcgaaaaaagcctggcgggtcctgggaccgagccagataagatactcagacactttagcattatggatttcaactccgagaaagacattgtccggggatccagcaagctgatcaccgagcaggagcttccagaacgtcggaaagctcttcggcctccgccacctagaccctgtacccccgtatctacgtcgcctcacctcctggtcgatcagaacttaaagcctgctccaccgctggtggtcagaccctcccgccctgcccctctgcccccatcagcacagcaaagaaccaatgctgtttctccaaagctgctatcccggcaccggccaacctgcgaaaccctggagaaagaagggcctggtcatatgggacgatcccttgatcagaccagcccatgtcccctcgttctggtcagaattgaggagatggaacgggatctggacatgtactcacgtgcgcaggaagaactcaatctgatgttagaggaaaaacaggacgaaagttcaagggccgaaaccctggaggatcttaagttttgcgaatctaacatcgagagcctgaacatggagcttcagcagcttagagaaatgacactactgagcagtcagtcgagctccctggtggcaccctctgggtctgtgagcgccgagaatcccgaacagagaatgttggaaaaacgcgctaaggttattgaggaactgttgcagactgagcgggactacatccgtgatcttgagatgtgcatcgagagaatcatggtgccaatgcagcaggcccaggtgccaaatattgacttcgagggactgttcggaaacatgcagatggtgattaaggtctccaagcagcttttagccgctctcgagatatctgacgccgtgggcccagttttcctggggcatcgcgatgagctggagggaacctacaaaatttattgtcagaatcacgatgaggccatcgctcttctagagatttacgagaaggatgagaaaatccagaagcatctccaggactcgctggccgatcttaaatctctgtataacgagtggggttgtaccaattacataaacctgggcagctttctgattaagcctgtccagagagtgatgaggtacccattactcctgatggaacttctgaattctacccccgagagtcaccccgacaaagttccgttgaccaatgctgttctcgccgttaaggagatcaatgtcaacataaacgaatataaacgaaggaaggacctgggaaaaaactccattatagcagaaaaagagtatgcccacgctgaagagtctgcctttttaacgtactcacttgtgctgaaatataggaagggcgacgaggactccttgatggaaaaaataagtaaactaaatattcacagcattatcaagaaatcgaacagggtctcttcacaccttaagcacctgacagggtttgctccacagatcaaggacgaggtctttgaggagacagagaaaaactttaggatgcaagagcgactaattaagagtttcatcagggacctctcactgtatctgcagcatatcagggagagcgcgtgcgtgaaagtggtcgctgcagtttcaatgtgggacgtgtgtatggaacggggacaccgggatctggagcagttcgagcgagtgcataggtacattagtgatcagctattcaccaatttcaaggagcgcaccgaacgcctggttatttcccctttgaatcagttgctaagcatgtttaccggaccacacaaattggttcagaaacggtttgacaaattactggacttctacaattgtacagaaagggctgaaaaactaaaggacaaaaagaccctggaagagctccagtccgcccgaaacaactacgaggcactgaatgcccaactgctcgacgagctgcctaaatttcaccagtacgcacagggattattcacaaattgcgtccacgggtatgcagaagcgcactgtgactttgttcaccaagcgttagagcagctgaagcctctgctctctctactgaaggtcgctggccgagagggcaacttgattgccatttttcatgaagagcacagtcgcgtactgcagcagctgcaagtgtttactttttttcccgagagcctgccagcaaccaaaaagcccttcgaacgaaagaccatcgatagacaatccgccaggaaaccattattaggcctgccttcttacatgcttcaaagtgaagagctgagagcctccttgctagcacggtacccaccagaaaagctctttcaggccgagagaaacttcaacgccgctcaagacctcgacgtctcgctgttagaaggagaccttgtcggagtgataaaaaagaaggatcccatggggtcccagaacaggtggctcatcgataacggcgtcactaaagggttcgtctattccagctttctgaaaccctacaatccgcgacgctcacacagcgacgcctccgtgggttcacacagcagcactgagtcagagcacggatcaagttccccaaggtttcccaggcagaattctggatcgactctcacatttaatccttcaagcatggcggtgtcatttacgtctggctcctgccaaaaacagcctcaggatgccagtccacctccgaaagaatgtgatcaaggcacactctcagcttccctgaatccctctaattcggagagcagccccagccgctgtccctccgaccccgacagcacttctcagccgagatcgggagatagtgcagacgtcgccagggatgtcaaacagcccaccgctactcctagatcctataggaactttcgccacccagagatagtaggctatagcgtgcctggccgaaatgggcagagccaggaccttgtcaagggttgcgcaagaactgcacaggccccagaggatcgatcaactgaacctgacggctccgaggcagaagggaatcaggtttatttcgccgtgtatacctttaaggcccgaaaccctaacgaattaagcgtgtctgcaaatcaaaaactgaagattctggaatttaaagatgtaactggcaatacagagtggtggttagcagaagtgaacggtaaaaaaggctacgtacctagcaactacatcagaaaaacagaatatacctag

SEQ ID NO: 185250 - DNA, 6400 bp, Artificial Sequence
  derived and/or modified sequence
aggggcggaggtgacagcgggctggggactggcggctgcaactgcctgccgcgccgagggaccgccgggcggcggaaagcaggttataaaacatggaggctggctcagtggttcgagccatttttgacttctgccctagcgtatcagaagaactgccgctctttgtgggagatattattgaggtgctggcagtggtggatgaattttggcttctaggaaagaaggaggatgttacaggacaattccccagcagttttgtggaaattgtgaccattcccagtctaaaagagggagagaggctgtttgtgtgcatttgtgaattcacatcccaagagttggataatcttcccctccatcgaggtgacctggtgattctcgatggcattcccactgcaggctggctgcagggccgaagctgctggggcgcacggggcttcttcccatcttcatgtgtccgcgagctctgcctctcctcacagagccggcagtggcactcccagagcgccctgtttcagattccggaatattccatgggacaagcccgggccctaatggggctttctgctcagctggatgaagagctggacttcagggaaggggatgtgatcaccattattggagttcctgaaccaggctggtttgaaggggagttagagggccgaagaggcatttttccagaaggttttgtagagctgttggggcccctgaggactgtggatgagtcagtaagttctggaaatcaagatgactgcattgttaatggtgaagtagatacccctgtaggagaagaagagatagggccggatgaggatgaggaggagccagggacctatggggtcgccctgtacagattccaagccctggagccaaatgagctggatttcgaggtcggggataaaatccgaattctggcgaccttggaagatggctggctggaaggatccctgaagggcaggacaggcatctttccttaccggtttgtgaaattatgtcctgacacacgggtggaggaaaccatggctctgccccaggaaggcagccttgccaggatcccggaaacttctttggattgtttggagaacaccttaggagtagaggaacaaagacatgaaaccagtgaccatgaggccgaggagcctgactgcattatttctgaagcacccacttctcccctcggtcatctgacttcagagtatgacacagacagaaactcttatcaggacgaggacaccgcaggagggcccccgagaagcccaggcgtggagtgggaaatgcctcttgccacagactctcccacatctgaccctacagaagtagtcaatggtatttcctcccaacctcaggtcccttttcatcccaacttgcagaaaagccagtattattctacagtgggagggagccacccgcactcagaacagtaccccgaccttcttcccctagaagcaaggactagagactatgccagcctacctcccaaaagaatgtattcccagctaaaaactcttcagaagccagtgctccctctttacaggggctcttctgtttcagcttcaagggtagtcaaacccagacaatcaagtcctcagctccacaacctagcaagttatactaaaaagcaccacacgtccagtgtttactccatctcagagagattggagatgaagcctggtccgcaagcccaagggcttgttatggaagcagcaacacattcacagggagacggcagcactgacctggactcgaagctgacacaacagctgatcgagtttgagaagagcttggcagggcccggcacagagccagataaaattttacgccacttttcaatcatggactttaactctgagaaggatattgtccgaggttcctcaaagttaatcaccgagcaggagctgccggaaaggagaaaggccctaaggccaccgccacctcgtccctgtactccggtatccacttctccccatttgctggttgaccagaacctaaaacctgcaccacccttggtggtgcgaccctctcgcccagctcccctgcctccctcagcacagcagagaacgaatgcggtatcccccaagctcctatctcgacaccgtcctacctgtgagaccttagaaaaggagggccctggtcatatgggaaggagtctggaccagacctccccatgccccttagtgctggtgaggattgaggaaatggagcgggacttggatatgtacagtagagctcaagaagagctaaacctcatgctggaggagaagcaggatgaatcatcaagagcagagaccctcgaggatctcaagttctgtgaaagtaacattgaaagtttgaatatggaactccagcaactaagagaaatgacgctcctctcctcccagtcttcatcactggtggccccttctgggtctgtgtctgccgaaaatccagagcagaggatgctggagaagagagccaaggtcatagaagaacttcttcagacagaaagagactacattcgggatctggaaatgtgtattgagcggatcatggtacccatgcagcaggcacaggtaccaaacattgattttgagggactttttggaaatatgcagatggtgattaaggtctcgaagcaattattggctgctctggaaatcagcgatgctgtaggacctgtgtttcttggtcaccgggatgagcttgagggaacatacaagatttactgccagaatcatgatgaggccattgcgctgcttgaaatctacgagaaggatgagaagatccagaagcatcttcaggactccttggcagatctgaagagcctatacaacgaatggggatgcacaaattatattaacctgggctccttcctcatcaaaccagtacagagagtaatgcgttacccgctgttgctaatggagttgctgaattccaccccagaatcccacccagataaagtgcctttaaccaatgcagtccttgcggtcaaggaaatcaacgttaacattaatgaatataaacggcgaaaggacctggtcctcaagtaccgtaagggtgatgaagatagccttatggagaaaatttccaaactgaacatccactccatcatcaagaaatccaaccgagttagcagtcacctgaagcatctcactggctttgctcctcagataaaagatgaagtatttgaagaaacagaaaaaaacttccgaatgcaagaaagattgattaagtcttttatccgagacctgtctctctacctccagcacatccgggagtccgcatgtgtgaaagtggtggctgctgtgagcatgtgggatgtgtgcatggagagaggacaccgggacctggagcagtttgagagggtgcatcgctacatcagtgaccagctcttcacaaactttaaggagaggacagagcggcttgtcatctcccccttaaatcagttactgagcatgtttacagggccccataagctggtacagaaacgctttgacaagctcctggacttctataactgtacagaacgggcagaaaagctaaaggacaagaagaccctggaggagctgcagtcggcccggaacaactatgaggccctgaatgcacagctgctggatgagctgcccaagttccaccagtacgcccagggcctcttcaccaactgtgtccacggctatgctgaagcccactgtgactttgtgcaccaggctctggagcaattaaagccactgctttcgttactcaaagtggctggcagagagggaaaccttattgccatcttccacgaagagcacagcagagttctgcagcaactccaggtttttaccttcttcccggagtctcttccagctaccaagaagccatttgagaggaaaaccattgaccgccagtctgctcgaaagccactcctgggcctgccaagttacatgctacagtcagaagaactccgggcctccctcctggccaggtatccccctgaaaaactcttccaggcagaacggaacttcaatgctgctcaagacttggatgtctcacttttggaaggtgacctggtgggtgtgattaagaaaaaagaccccatgggcagccagaaccgctggctgattgacaatggagtcaccaaaggcttcgtgtacagctctttcctaaagccctacaatcctcgccgcagccactccgatgcctccgtgggtagccactcctccacagagtctgagcacggcagctcctcccccaggttcccacgccagaacagcggcagcaccctgaccttcaaccccagcagcatggctgtatcctttacctcggggtcttgccagaagcagcctcaagatgcatctcctccgccaaaagaatgtgaccaaggaactctcagtgcatccctaaatccgagtaattcagagagtagtccttccagatgcccttcagacccagactccacctcccagccaaggtcaggggactctgcagatgtagctagagatgtaaagcaacccactgccacgccgaggagctaccggaacttcaggcatccagaaatagttggctactccgtaccaggacgaaatgggcaaagtcaagacctcgtcaaaggatgtgcaagaacagcccaggctccggaagacagaagtacagagccagatggcagtgaggcagaaggcaaccaggtctattttgctgtctacaccttcaaggcacgaaacccaaatgagctgagcgtgtcagccaatcagaaactcaagatcctcgagtttaaagatgttacaggaaatacagagtggtggttagctgaggttaacgggaagaagggctacgttccctccaattatatccgcaaaaccgagtacacctgagcccacgttgcctgccacccagccttgctgcctttgctttcagtccgccgagggttctggcggcccaccgagagggcgcctgctcctgagacacaggccctgtctgcgttgcttaaccatggcatggtggagcacaccacagatcttgttctcctcgattgggttgtaaaccttgatgctcactagaatctctagaatttgaaatggaccctggggctttgcaaatgacttagtgactatgagaagagagacaagtcttagagctggcttttggaaaggagaaacttgcagtcagaagcccagtgtcctatgtatgcaggaagctgtgctctagcaatagacagtgttggtaatggttgtgctgtacggcgtttggggtggccccatgttccatgctcagctgaccggatgccaactcagatgaaaagaattcatggctctgggcaccccgtgaggcagtgcttgcacatggctgggagtttgtcgggattgaaccaaacctagtgcttcaaagctcctgggacacctccagtgtccagcacacattctcatacatactgcccctaatttctaaagtccctaaagcactacattctgtaaccttgtttcttttactccattcccagattagttatgcaaaattcaactgcgttctacttttagaagtgtttagggtctttattttctgttgacccttcatctgaaagattctcttcccttgttaggtacaatcactgcccccccgcttttttttttgagatggggtcttgctatgttgcccaggctggtcttaaacgcctgggctcaagcaaccctcccgcctccctgctgagattacaggtgtaagccaccataccgcaacctcaatgacacctttctgatggtctttacacagtctgtgatgtctggtggcccccctgccctggactcaataattgatagattttcctagagtaacagtatgagagctccagccattccattaaaagtattagttctgctttgagctgaaaccagttgagcctaatggaagactggatgtctttcttcttcatccaagcaccctaatgactgtttagttacatccatagatgcagacaacataacacctgtgacttacttgaattgggataagccattccagaagtagcttatcctagacttggaaataagatttttttcaccactaacttccatgcttcagagatgacattcaaagccagattcccaagtgcctgatcatacctcccagtctcaggaagatatttgcttaccccttagaccaagaatcttaagatcttccccagctatgaagcctatcttggaatgggaaaccatgaaatttgtcttttaaaagaaagggaagaaatagccttacagcccctgttcctccaagtgcacatttagccttaaaatcctgggagtcgggagacaccgtggagtcctaacatccacagtgtctgctggtcgtggtcagaaggcagtaatgcaagagtccttttgtgaagagtgtttctatgtagagatgtttatatttaagtagttcttttataaataaaagcatttctaatggc

SEQ ID NO: 185251 - DNA, 4734 bp, Artificial Sequence
  derived and/or modified sequence
atggaggccggcagcgtggtgagagccatcttcgacttctgccccagcgtgagcgaggagctgcccctgttcgtgggcgacatcatcgaggtgctggccgtggtggacgagttctggctgctgggcaagaaggaggacgtgaccggccagttccccagcagcttcgtggagatcgtgaccatccccagcctgaaggagggcgagagactgttcgtgtgcatctgcgagttcaccagccaggagctggacaacctgcccctgcacagaggcgacctggtgatcctggacggcatccccaccgccggctggctgcagggcagaagctgctggggcgccagaggcttcttccccagcagctgcgtgagagagctgtgcctgagcagccagagcagacagtggcacagccagagcgccctgttccagatccccgagtacagcatgggccaggccagagccctgatgggcctgagcgcccagctggacgaggagctggacttcagagagggcgacgtgatcaccatcatcggcgtgcccgagcccggctggttcgagggcgagctggagggcagaagaggcatcttccccgagggcttcgtggagctgctgggccccctgagaaccgtggacgagagcgtgagcagcggcaaccaggacgactgcatcgtgaacggcgaggtggacacccccgtgggcgaggaggagatcggccccgacgaggacgaggaggagcccggcacctacggcgtggccctgtacagattccaggccctggagcccaacgagctggacttcgaggtgggcgacaagatcagaatcctggccaccctggaggacggctggctggagggcagcctgaagggcagaaccggcatcttcccctacagattcgtgaagctgtgccccgacaccagagtggaggagaccatggccctgccccaggagggcagcctggccagaatccccgagaccagcctggactgcctggagaacaccctgggcgtggaggagcagagacacgagaccagcgaccacgaggccgaggagcccgactgcatcatcagcgaggcccccaccagccccctgggccacctgaccagcgagtacgacaccgacagaaacagctaccaggacgaggacaccgccggcggcccccccagaagccccggcgtggagtgggagatgcccctggccaccgacagccccaccagcgaccccaccgaggtggtgaacggcatcagcagccagccccaggtgcccttccaccccaacctgcagaagagccagtactacagcaccgtgggcggcagccacccccacagcgagcagtaccccgacctgctgcccctggaggccagaaccagagactacgccagcctgccccccaagagaatgtacagccagctgaagaccctgcagaagcccgtgctgcccctgtacagaggcagcagcgtgagcgccagcagagtggtgaagcccagacagagcagcccccagctgcacaacctggccagctacaccaagaagcaccacaccagcagcgtgtacagcatcagcgagagactggagatgaagcccggcccccaggcccagggcctggtgatggaggccgccacccacagccagggcgacggcagcaccgacctggacagcaagctgacccagcagctgatcgagttcgagaagagcctggccggccccggcaccgagcccgacaagatcctgagacacttcagcatcatggacttcaacagcgagaaggacatcgtgagaggcagcagcaagctgatcaccgagcaggagctgcccgagagaagaaaggccctgagaccccccccccccagaccctgcacccccgtgagcaccagcccccacctgctggtggaccagaacctgaagcccgccccccccctggtggtgagacccagcagacccgcccccctgccccccagcgcccagcagagaaccaacgccgtgagccccaagctgctgagcagacacagacccacctgcgagaccctggagaaggagggccccggccacatgggcagaagcctggaccagaccagcccctgccccctggtgctggtgagaatcgaggagatggagagagacctggacatgtacagcagagcccaggaggagctgaacctgatgctggaggagaagcaggacgagagcagcagagccgagaccctggaggacctgaagttctgcgagagcaacatcgagagcctgaacatggagctgcagcagctgagagagatgaccctgctgagcagccagagcagcagcctggtggcccccagcggcagcgtgagcgccgagaaccccgagcagagaatgctggagaagagagccaaggtgatcgaggagctgctgcagaccgagagagactacatcagagacctggagatgtgcatcgagagaatcatggtgcccatgcagcaggcccaggtgcccaacatcgacttcgagggcctgttcggcaacatgcagatggtgatcaaggtgagcaagcagctgctggccgccctggagatcagcgacgccgtgggccccgtgttcctgggccacagagacgagctggagggcacctacaagatctactgccagaaccacgacgaggccatcgccctgctggagatctacgagaaggacgagaagatccagaagcacctgcaggacagcctggccgacctgaagagcctgtacaacgagtggggctgcaccaactacatcaacctgggcagcttcctgatcaagcccgtgcagagagtgatgagataccccctgctgctgatggagctgctgaacagcacccccgagagccaccccgacaaggtgcccctgaccaacgccgtgctggccgtgaaggagatcaacgtgaacatcaacgagtacaagagaagaaaggacctggtgctgaagtacagaaagggcgacgaggacagcctgatggagaagatcagcaagctgaacatccacagcatcatcaagaagagcaacagagtgagcagccacctgaagcacctgaccggcttcgccccccagatcaaggacgaggtgttcgaggagaccgagaagaacttcagaatgcaggagagactgatcaagagcttcatcagagacctgagcctgtacctgcagcacatcagagagagcgcctgcgtgaaggtggtggccgccgtgagcatgtgggacgtgtgcatggagagaggccacagagacctggagcagttcgagagagtgcacagatacatcagcgaccagctgttcaccaacttcaaggagagaaccgagagactggtgatcagccccctgaaccagctgctgagcatgttcaccggcccccacaagctggtgcagaagagattcgacaagctgctggacttctacaactgcaccgagagagccgagaagctgaaggacaagaagaccctggaggagctgcagagcgccagaaacaactacgaggccctgaacgcccagctgctggacgagctgcccaagttccaccagtacgcccagggcctgttcaccaactgcgtgcacggctacgccgaggcccactgcgacttcgtgcaccaggccctggagcagctgaagcccctgctgagcctgctgaaggtggccggcagagagggcaacctgatcgccatcttccacgaggagcacagcagagtgctgcagcagctgcaggtgttcaccttcttccccgagagcctgcccgccaccaagaagcccttcgagagaaagaccatcgacagacagagcgccagaaagcccctgctgggcctgcccagctacatgctgcagagcgaggagctgagagccagcctgctggccagatacccccccgagaagctgttccaggccgagagaaacttcaacgccgcccaggacctggacgtgagcctgctggagggcgacctggtgggcgtgatcaagaagaaggaccccatgggcagccagaacagatggctgatcgacaacggcgtgaccaagggcttcgtgtacagcagcttcctgaagccctacaaccccagaagaagccacagcgacgccagcgtgggcagccacagcagcaccgagagcgagcacggcagcagcagccccagattccccagacagaacagcggcagcaccctgaccttcaaccccagcagcatggccgtgagcttcaccagcggcagctgccagaagcagccccaggacgccagccccccccccaaggagtgcgaccagggcaccctgagcgccagcctgaaccccagcaacagcgagagcagccccagcagatgccccagcgaccccgacagcaccagccagcccagaagcggcgacagcgccgacgtggccagagacgtgaagcagcccaccgccacccccagaagctacagaaacttcagacaccccgagatcgtgggctacagcgtgcccggcagaaacggccagagccaggacctggtgaagggctgcgccagaaccgcccaggcccccgaggacagaagcaccgagcccgacggcagcgaggccgagggcaaccaggtgtacttcgccgtgtacaccttcaaggccagaaaccccaacgagctgagcgtgagcgccaaccagaagctgaagatcctggagttcaaggacgtgaccggcaacaccgagtggtggctggccgaggtgaacggcaagaagggctacgtgcccagcaactacatcagaaagaccgagtacacctag

SEQ ID NO: 185252 - protein, 3088 aa, Artificial Sequence
  derived and/or modified sequence
MEEFLQRAKSKLNRSKRLEKVHVVIGPKSCDLDSLISTFTYAYFLDKVSPPGVLCLPVLNIPRTEFNYFTETRFILEELNISESFHIFRDEINLHQLNDEGKLSITLVGSSVLASEDKTLESAVVKVINPVEQSDANVEFRESSSSLVLKEILQEAPELITEQLAHRLRGSILFKWMTMESEKISEKQEEILSILEEKFPNLPPREDIINVLQETQFSAQGLSIEQTMLKDLKELSDGEIKVAISTVSMNLENCLFHSNITSDLKAFTDKFGFDVLILFSSYLSEEQQPRRQIAVYSENMELCSQICCELEECQNPCLELEPFDCGCDEILVYQQEDPSVTCDQVVLVVKEVINRRCPEMVSNSRTSSTEAVAGSAPLSQGSSGIMELYGSDIEPQPSSVNFIENPPDLNDSNQAQVDANVDLVSPDSGLATIRSSRSSKESSVFLSDDSPVGEGAGPHHTLLPGLDSYSPIPEGAVAEEHAWSGEHGEHFDLFNFDPAPMASGQSQQSSHSADYSPADDFFPNSDLSEGQLPAGPEGLDGMGTNMSNYSSSSLLSGAGKDSLVEHDEEFVQRQDSPRDNSERNLSLTDFVGDESPSPERLKNTGKRIPPTPMNSLVESSPSTEEPASLYTEDMTQKATDTGHMGPPQTHARCSSWWGGLEIDSKNIADAWSSSEQESVFQSPESWKEHKPSSIDRRASDSVFQPKSLEFTKSGPWESEFGQPELGSNDIQDKNEESLPFQNLPMEKSPLPNTSPQGTNHLIEDFASLWHSGRSPTAMPEPWGNPTDDGEPAAVAPFPAWSAFGKEDHDEALKNTWNLHPTSSKTPSVRDPNEWAMAKSGFAFSSSELLDNSPSEINNEAAPEIWGKKNNDSRDHIFAPGNPSSDLDHTWTNSKPPKEDQNGLVDPKTRGKVYEKVDSWNLFEENMKKGGSDVLVPWEDSFLSYKCSDYSASNLGEDSVPSPLDTNYSTSDSYTSPTFAGDEKETEHKPFAKEEGFESKDGNSTAEETDIPPQSLQQSSRNRISSGPGNLDMWASPHTDNSSEINTTHNLDENELKTEHTDGKNISMEDDVGESSQSSYDDPSMMQLYNETNRQLTLLHSSTNSRQTAPDSLDLWNRVILEDTQSTATISDMDNDLDWDDCSGGAAIPSDGQTEGYMAEGSEPETRFTVRQLEPWGLEYQEANQVDWELPASDEHTKDSAPSEHHTLNEKSGQLIANSIWDSVMRDKDMSSFMLPGSSHITDSEQRELPPEIPSHSANVKDTHSPDAPAASGTSESEALISHLDKQDTERETLQSDAASLATRLENPGYFPHPDPWKGHGDGQSESEKEAQGATDRGHLDEEEVIASGVENASGISEKGQSDQELSSLVASEHQEICIKSGKISSLAVTFSPQTEEPEEVLEYEEGSYNLDSRDVQTGMSADNLQPKDTHEKHLMSQRNSGETTETSDGMNFTKYVSVPEKDLEKTEECNFLEPENVGGGPPHRVPRSLDFGDVPIDSDVHVSSTCSEITKNLDVKGSENSLPGAGSSGNFDRDTISSEYTHSSASSPELNDSSVALSSWGQQPSSGYQEENQGNWSEQNHQESELITTDGQVEIVTKVKDLEKNRINEFEKSFDRKTPTFLEIWNDSVDGDSFSSLSSPETGKYSEHSGTHQESNLIASYQEKNEHDISATVQPEDARVISTSSGSDDDSVGGEESIEEEIQVANCHVAEDESRAWDSLNESNKFLVTADPKSENIYDYLDSSEPAENENKSNPFCDNQQSSPDPWTFSPLTETEMQITAVEKEKRSSPETGTTGDVAWQISPKASFPKNEDNSQLEMLGFSADSTEWWKASPQEGRLIESPFERELSDSSGVLEINSSVHQNASPWGVPVQGDIEPVETHYTNPFSDNHQSPFLEGNGKNSHEQLWNIQPRQPDPDADKFSQLVKLDQIKEKDSREQTFVSAAGDELTPETPTQEQCQDTMLPVCDHPDTAFTHAEENSCVTSNVSTNEGQETNQWEQEKSYLGEMTNSSIATENFPAVSSPTQLIMKPGSEWDGSTPSEDSRGTFVPDILHGNFQEGGQLASAAPDLWIDAKKPFSLKADGENPDILTHCEHDSNSQASDSPDICHDSEAKQETEKHLSACMGPEVESSELCLTEPEIDEEPIYEPGREFVPSNAELDSENATVLPPIGYQADIKGSSQPASHKGSPEPSEINGDNSTGLQVSEKGASPDMAPILEPVDRRIPRIENVATSIFVTHQEPTPEGDGSWISDSFSPESQPGARALFDGDPHLSTENPALVPDALLASDTCLDISEAAFDHSFSDASGLNTSTGTIDDMSKLTLSEGHPETPVDGDLGKQDICSSEASWGDFEYDVMGQNIDEDLLREPEHFLYGGDPPLEEDSLKQSLAPYTPPFDLSYLTEPAQSAETIEEAGSPEDESLGCRAAEIVLSALPDRRSEGNQAETKNRLPGSQLAVLHIREDPESVYLPVGAGSNILSPSNVDWEVETDNSDLPAGGDIGPPNGASKEISELEEEKTIPTKEPEQIKSEYKEERCTEKNEDRHALHMDYILVNREENSHSKPETCEERESIAELELYVGSKETGLQGTQLASFPDTCQPASLNERKGLSAEKMSSKSDTRSSFESPAQDQSWMFLGHSEVGDPSLDARDSGPGWSGKTVEPFSELGLGEGPQLQILEEMKPLESLALEEASGPVSQSQKSKSRGRAGPDAVTLQAVTHDNEWEMLSPQPVQKNMIPDTEMEEETEFLELGTRISRPNGLLSEDVGMDIPFEEGVLSPSAADMRPEPPNSLDLNDTHPRRIKLTAPNINLSLDQSEGSILSDDNLDSPDEIDINVDELDTPDEADSFEYTGHDPTANKDSGQESESIPEYTAEEEREDNRLWRTVVIGEQEQRIDMKVIEPYRRVISHGGYYGDGLNAIIVFAACFLPDSSRADYHYVMENLFLYVISTLELMVAEDYMIVYLNGATPRRRMPGLGWMKKCYQMIDRRLRKNLKSFIIVHPSWFIRTILAVTRPFISSKFSSKIKYVNSLSELSGLIPMDCIHIPESIIKLDEELREASEAAKTSCLYNDPEMSSMEKDIDLKLKEKP

SEQ ID NO: 185253 - DNA, 9267 bp, Artificial Sequence
  derived and/or modified sequence
atggaagagttcttgcaacgcgccaagagcaaactcaacaggtctaagcggttggaaaaggtgcatgtggtgatcggccctaagtcctgcgatctggacagtctgatcagcacatttacttatgcttatttcctagataaggtatcaccgcccggcgtgctttgcctgcctgtgcttaatatcccacgaactgagtttaattattttactgagacgaggtttatactggaagaactgaatatctccgaatccttccacatatttcgggacgagattaatctacaccagcttaacgatgagggcaagctgtccattaccttagtaggtagcagtgtgctggcttcagaagacaagaccttggagagcgccgtcgtgaaagttataaatccagtagagcagtctgacgcgaatgtggagttccgtgaatcttcctcaagccttgtcctgaaggagattctgcaggaggccccggaactaattactgagcagctcgctcaccgactaaggggctccatcctgtttaaatggatgacgatggagagcgaaaagatctccgagaagcaggaggaaattctctcaatactcgaagagaagtttccgaatttgcctcctcgagaggatatcatcaacgttctccaagagacacagttcagcgcgcagggactgtcgatcgagcagaccatgctgaaggatctgaaagaactaagtgacggagagatcaaggtagcgatttccactgtttctatgaatctggaaaattgtctgtttcactctaacatcacgtcggacctcaaggctttcaccgacaagtttggcttcgatgttctcattctgttctcctcttacctgagcgaggaacagcagcctcgccggcaaatagctgtttactccgagaatatggagctgtgtagccagatttgttgcgaattggaagagtgtcaaaatccttgtctggaattggaacctttcgattgtggctgcgacgagatcttggtataccaacaggaagacccaagcgtcacttgtgatcaggtagtactggtggtcaaagaggtgatcaaccgacgttgtcccgagatggtttccaattcacggactagctctaccgaagcagtggccggctctgctcccctgtcccagggctcgagtgggattatggaactgtatggctcagacattgagccccaacctagcagtgtgaattttatagagaacccgcctgatctaaacgactctaatcaggctcaggtggatgcgaatgtggatctcgtgtctccagactccgggctggctacgatccgatccagccgctcttcaaaggagtccagcgtgttcctgtccgatgattctccagtgggcgaaggtgctggacctcatcacactctgctgcccggcctcgattcttattctccaattcctgaaggcgccgtggccgaggaacacgcctggtcaggagaacacggtgagcattttgacttgtttaacttcgaccctgctcctatggcctcaggtcagtcacagcaatcttcccattccgccgactacagccccgccgacgatttcttcccaaatagcgatctgtccgaggggcaattacctgccggtccagaggggctggacgggatgggtacaaacatgagcaattacagttcgagttctctgctatcaggtgcaggcaaggattccctcgttgagcatgacgaggagtttgtacagagacaggactcacccagggataactctgaaagaaacttatccctaaccgatttcgtcggcgacgagtcaccaagcccagaacgcctgaagaacacggggaagaggatcccaccgacaccaatgaatagcctcgtggaatctagcccctctactgaagaacctgctagtttatacacagaggacatgacacagaaggcaaccgataccggccacatgggtccgccacagacacacgctaggtgttccagttggtggggtggattggaaatcgactcaaagaatattgccgatgcctggtcaagtagtgagcaggaatccgtattccaaagcccagaatcgtggaaggaacacaagccctccagtattgataggagggcctctgacagcgtattccagccaaaatctttggaatttactaaatcaggtccatgggagagcgagtttggacagcctgaattaggaagcaatgacatccaggacaaaaacgaagaatccctgcctttccagaaccttcccatggagaagagcccacttcctaatacttctcctcaagggacaaatcacctaattgaagactttgctagcctttggcacagcgggaggagcccaaccgctatgcctgagccgtggggaaacccaacggacgatggagagcccgctgccgttgccccattccccgcatggtctgccttcggaaaggaggaccacgatgaggcactgaagaacacatggaacttgcaccccacctcaagtaagaccccttccgtgcgagaccctaatgaatgggccatggccaagagcgggtttgccttttcctcctccgagctgctcgataactctcctagcgagatcaacaatgaggctgctcccgaaatttggggcaagaaaaacaacgactcaagggaccacatattcgccccaggaaatccttcttcggacttggaccacacatggaccaactccaagcctcccaaggaggatcagaacgggttggttgaccccaagacaagagggaaagtgtatgaaaaggttgatagctggaatctttttgaggaaaatatgaagaaaggaggctcggacgtcctggtgccctgggaggacagctttctgtcttataaatgctcagactacagtgccagcaatctgggagaggactctgtgccgtctcccctggatactaactactctactagcgatagctacacttcacctacttttgccggcgacgagaaggagaccgaacataagcccttcgctaaagaagaaggtttcgagagcaaagacgggaattctaccgccgaggagactgacatcccaccacagagtctccagcagtcctctagaaacaggatcagcagcggtcctggcaatctcgacatgtgggccagtccccacactgataactccagtgagattaacaccacccacaacctggacgagaacgagctcaaaacagagcacacggacggcaaaaatatctcgatggaggatgacgtgggggagtctagccagtcctcttacgatgatccatctatgatgcagctttacaatgagactaacagacagttgacgttgctgcactcatctacaaatagcagacaaaccgcgcccgactcacttgatctgtggaatagggtgattctggaggatacacagtcaacagcaaccatcagcgacatggacaacgacttggactgggatgattgtagcggcggtgctgccatcccttccgacggccagactgagggctacatggcagagggctccgaaccagagacgagattcactgtgcgccagctcgaaccatggggattagagtaccaagaagcgaatcaggtcgattgggagctccctgcctcagatgagcacacaaaggattcggccccaagcgagcaccataccctcaacgaaaagtccggacagctgatcgctaacagtatctgggactccgttatgagagacaaggatatgtcatcctttatgctgcctggctcttcccacattactgattccgagcagcgagaattaccccctgagatcccgagccacagtgcaaacgtgaaagatacccactccccggacgctccagcagcatcggggacctcagagagtgaagcactgatctcccacctcgataaacaagatactgagagggagactttgcagtccgacgcagcatccctggccacacgcctggaaaatcctggttatttcccacaccctgacccttggaagggacacggcgacggccagagcgagtctgaaaaggaggcacagggagccaccgaccggggtcatctcgatgaggaggaggtcatcgcctccggggtggaaaatgcctcaggcatttccgagaagggccaatctgaccaggagctaagttctttagtcgctagtgaacaccaggagatctgcattaaatccggtaagatttcctcattagcggtgacgttcagtcctcagaccgaggagccggaggaggtactggagtatgaggagggctcatataatttagactcgcgggatgtgcagacaggcatgagcgccgacaatctacagccaaaggatacacacgagaagcacttgatgagtcagaggaattcgggcgagaccaccgagaccagcgacggaatgaatttcaccaagtatgtcagtgtccccgagaaagacctggagaaaacagaagagtgtaactttctggaacccgagaacgtgggcgggggccccccacaccgggtgccacgttcattagactttggagacgttcctatagattccgacgtgcacgtgtcctccacctgcagtgagatcacaaagaaccttgatgtgaaaggaagcgaaaacagtctaccaggggccggatcaagtgggaactttgaccgagacacgatctctagtgaatatacacactcttctgcctcatcccctgagttgaatgatagttctgtggccttatccagctggggccaacagcccagtagcggataccaagaagaaaaccagggtaactggtccgagcaaaaccatcaggagtccgaactgatcaccaccgatggacaggtggagatagtgaccaaggttaaggacttggagaagaatcgcattaatgagttcgaaaaaagcttcgatcgtaagaccccgacattcttagagatttggaatgattccgtcgacggggatagctttagttctctatctagtcctgaaaccgggaagtatagtgagcattcgggcacccaccaggagtccaatctcatcgcatcttatcaggagaaaaatgaacacgatatctcagctactgtacagcccgaggatgcaagagtgatatctacatcctccggatccgacgatgacagcgtcggaggggaggagagtatcgaagaagagatacaggtggccaactgtcacgttgccgaggatgaatccagggcatgggacagtctaaacgaaagtaacaaattcctggtgaccgccgacccaaaaagtgaaaatatttatgactacctcgacagtagcgagccagcggaaaacgaaaataagtcaaacccattctgtgataatcagcagtcatcccctgacccatggacatttagtcctctgacggaaaccgaaatgcaaatcaccgctgtagagaaagaaaaaagatcctcaccagagacaggtacgacaggcgacgtagcatggcagatctcacccaaggcgtcatttccaaaaaatgaggacaattctcagctcgagatgctcggtttctctgcagatagtacagaatggtggaaggcttccccacaggaagggcgcctcatcgagagccctttcgagcgggagttgagtgacagtagtggcgtgctcgagatcaactcctccgtgcaccagaatgcatccccctggggcgtacccgtgcagggtgacatcgaaccggtcgaaactcactataccaaccctttcagcgacaaccatcagtccccttttttagaaggcaacggaaaaaacagtcatgaacagctgtggaacatccagccgcggcagcccgacccggatgccgataagtttagccagctcgtgaaactagaccagattaaggagaaggactctagagaacagacctttgtgtccgctgcgggcgacgagctgactcctgaaacccccacgcaagaacagtgccaggatactatgctgccagtgtgcgatcaccccgacacagcattcactcacgcagaagagaattcctgcgtcaccagcaacgtgtcaactaatgagggacaggaaacaaaccagtgggagcaagagaagtcctatctgggggaaatgacgaacagtagcatcgccacagaaaattttcctgcagtatcgagccccacccagttaataatgaaaccaggcagcgagtgggacggcagtaccccatcagaggattccagagggacttttgttcccgacattctccacgggaattttcaggaagggggacagctggcctccgctgcacccgacctgtggatcgacgcgaagaaacccttcagcctcaaagctgatggagagaatcccgatattctcacccattgtgagcacgacagcaacagtcaggccagcgactcacctgacatttgccatgattccgaagccaaacaggagacagaaaagcatttaagcgcatgcatggggccagaggtcgagtcatcagaactgtgcctgacagaacctgagatcgatgaagaacctatctacgagccgggacgagagtttgtgccatcaaacgccgaacttgactctgagaatgctacagtcttaccccccattggttaccaggcggatattaaagggagctctcaaccagcatcccacaagggttccccggaaccttccgagatcaatggagacaatagcactggtctccaggtaagtgaaaagggagctagtcccgatatggcacccatccttgaaccagtcgatcgcagaattccccggatcgagaatgtcgccacctccatttttgtcactcatcaggaacctacccctgagggggatggaagctggatcagcgacagcttctctccagaatcccagcccggagctagagctttgttcgacggagacccacatttatcgactgagaacccagcactggtgccagatgcactgctggctagtgacacatgcctagacatcagcgaggcagcgttcgaccatagttttagcgacgcctctggtcttaacacatctacagggaccattgacgatatgagcaagctgactcttagcgagggacaccctgaaaccccagtggacggcgacctcggaaagcaggacatttgtagcagcgaggctagctggggagatttcgaatatgacgtgatgggacaaaatatcgatgaagacctgctcagggaacccgagcattttttgtatgggggggatccgcctttggaagaggattccctcaaacagagcctggccccctacactcctcccttcgatctgagctacttaacggagcccgcgcagagtgccgagactatcgaagaagctggatctcctgaagatgagtctctgggctgtagggccgctgaaattgtactgagtgcattgccagatcggaggtctgagggcaaccaggcagaaacaaagaaccggctccccggttctcaacttgccgtccttcacatccgggaagaccccgagtccgtttatcttccagtcggggcgggtagcaacattctgagcccatctaacgtggattgggaagtcgagacggataacagtgacttacctgcagggggggacattggaccaccgaatggagcgtcaaaggaaatctctgaactggaggaggagaagaccattcccaccaaagaaccagagcagataaagtccgagtataaagaagaacgatgtacagagaaaaacgaggatcgccatgccctgcatatggattatatccttgtgaatcgagaggagaactcccattccaagcccgaaacctgtgaagagcgcgaaagcatcgcagaacttgagctgtacgttgggtctaaggaaactggactgcagggcacgcagctggccagctttcccgatacatgtcaacctgcctcactgaacgagagaaagggcctcagtgcagagaagatgtcttctaaaagcgacaccagatccagtttcgagtcccccgctcaagaccagtcgtggatgtttcttggccattccgaggtcggagatcctagcctagatgcacgagattccggcccaggctggtccggtaagaccgtggaaccattttctgagctcggtttgggagaaggcccacaactacagatactcgaggagatgaaacctctggaaagcctcgctcttgaagaagcttcgggtccagtcagtcagtcccaaaagtccaaaagcagagggcgcgctggccctgatgctgtgacccttcaggcggtgacacacgataatgaatgggagatgctgagccctcagcctgtgcagaagaatatgatccctgatacagagatggaggaggaaaccgagtttcttgagctgggaacgcgtatcagtagaccaaacggattactcagcgaggatgtgggaatggacattccatttgaggagggggtgctttctccaagcgctgccgacatgaggccagaacctcctaactctttggacctgaacgacacacacccaagaagaattaagctcaccgccccaaatatcaacttgagcctagaccagtcagagggatcgatcctttcagatgacaatttagatagtcctgatgaaatagatatcaacgtggacgagctggatacccccgacgaggccgactcattcgaatacacaggacatgatcctactgcaaacaaggactcggggcaggagtccgaatctatcccagaatataccgccgaagaggaacgcgaagacaataggctatggcgcacggttgtcattggcgagcaggaacagcgaatcgatatgaaggttatcgagccataccgtcgggtgatctcacacggcggctactatggagatggtctgaacgctatcattgtgttcgcggcttgctttttacctgacagctccagagctgactaccattatgtgatggaaaacctctttctttatgtcatcagtaccttagagcttatggtggccgaggactatatgattgtgtacctgaatggggcgaccccccgccggagaatgccaggcctcggatggatgaagaaatgctaccagatgatcgatcgaaggttacgcaaaaacctcaagagcttcatcattgttcacccatcgtggttcattagaaccatcctggccgtcactcgaccctttatctcctccaaatttagttccaaaatcaagtacgtgaatagcctgtccgagttatcgggactgatcccgatggactgtatacacattcctgagagtataatcaaactggatgaggaactcagggaggcttcagaggccgccaagaccagttgtctatataacgatcctgaaatgagcagcatggagaaagacatcgatctgaagctcaaagaaaagccatag

SEQ ID NO: 185254 - DNA, 9267 bp, Artificial Sequence
  derived and/or modified sequence
atggaggagttcctgcagagggccaagagcaagctgaacagaagcaagaggctggagaaggtgcacgtggtgattggccccaagagctgtgacctggacagcctcatcagcaccttcacctacgcctacttcctggacaaggtgagccccccaggagtgctgtgcctgcctgtgctgaacatccccaggacagagttcaactacttcacagagacccgcttcatcctggaggagctgaacatcagcgagagcttccacatcttcagagatgagatcaacctgcaccagctgaatgatgagggcaagctgagcatcaccctggtgggcagctctgtgctggccagcgaggacaagaccctggagagcgctgtggtgaaggtgatcaaccctgtggagcagagtgatgccaacgtggagttccgggagagcagcagcagcctggtgctgaaggagatcctgcaggaggcccctgagctgatcacagagcagctggcccaccggctgcggggcagcatcctcttcaagtggatgaccatggagagcgagaagatcagcgagaagcaggaggagatcctgagcatcctggaggagaagttccccaacctgcccccccgggaggacatcatcaacgtgctgcaggagacccagttcagcgcccagggcctgagcattgagcagaccatgctgaaggacctgaaggagctgagtgatggagagatcaaggtggccatcagcacagtgtccatgaacctggagaactgcctcttccacagcaacatcaccagtgacctgaaggccttcacagacaagtttggatttgatgtgctgatcctcttcagcagctacctgtctgaggagcagcagccccggcggcagattgctgtgtacagcgagaacatggagctgtgcagccagatctgctgtgagctggaggagtgccagaacccctgcctggagctggagccctttgactgtggctgtgatgagatcctggtgtaccagcaggaggaccccagcgtgacctgtgaccaggtggtgctggtggtgaaggaggtgatcaacagacgctgcccagagatggtgagcaacagcaggaccagcagcacagaagctgtggccggcagcgcccccctgagccagggcagcagcggcatcatggagctgtatggcagtgacatcgagccccagcccagctctgtgaacttcatcgagaaccccccagacctgaatgacagcaaccaggcccaggtggatgccaacgtggacctggtgtccccagacagcggcctggccaccatccgcagcagccgcagcagcaaggagagctctgtgttcctgagtgatgacagccctgtgggggagggcgccggcccccaccacaccctgctgcccggcctggacagctacagccccatccctgagggcgctgtggccgaggagcacgcctggagcggggagcacggggagcactttgacctcttcaactttgatcctgcccccatggccagcggccagagccagcagagcagccacagcgctgactacagccctgcagatgacttcttccccaacagcgacctgtctgagggccagctgcctgctggccctgagggcctggatggcatgggcaccaacatgagcaactacagcagcagcagcctgctgagcggggccggcaaggacagcctggtggagcatgatgaggagtttgtgcagaggcaggacagcccccgggacaacagcgagaggaacctgagcctgacagactttgtgggagatgagagccccagccctgagcggctgaagaacacaggcaagagaattcctcccacccccatgaacagcctggtggagagcagccccagcacagaggagcccgccagcctgtacacagaggacatgacccagaaggccacagacaccggccacatgggccccccccagacccacgcccgctgcagctcctggtggggcggcctggagattgacagcaagaacattgctgatgcctggagcagcagcgagcaggagagcgtcttccagagccctgagagctggaaggagcacaagcccagcagcattgaccggcgggccagtgacagcgtcttccagcccaagagcctggagttcaccaagagcggcccctgggagagcgagtttggccagcctgagctgggcagcaatgacatccaggacaagaatgaggagagcctgcccttccagaacctgcccatggagaagagccccctgcccaacaccagcccccagggcaccaaccacctgattgaagattttgccagcctgtggcacagcggccgcagccccacagccatgcctgagccctggggcaaccccacagatgatggagagcctgctgctgtggcccccttccctgcctggagcgccttcggcaaggaggaccatgatgaggccctgaagaacacctggaacctgcaccccaccagcagcaagaccccatctgtgcgggaccccaatgagtgggccatggccaagagcggctttgccttcagcagcagcgagctgctggacaacagccccagcgagatcaacaatgaggccgcccctgagatctggggcaagaagaacaatgacagccgggaccacatctttgcccctggcaaccccagcagtgacctggaccacacctggaccaacagcaagccacccaaggaggaccagaatggcctggtggaccccaagacccggggcaaggtgtatgagaaggtggacagctggaacctgtttgaggagaacatgaagaagggcggcagtgatgtgctggtgccctgggaggacagcttcctgagctacaagtgcagcgactacagcgccagcaacctgggggaggacagcgtgcccagccccctggacaccaactacagcaccagtgacagctacaccagccccacctttgctggagatgagaaggagacagagcacaagccctttgccaaggaggagggctttgagagcaaggatggcaacagcacagctgaggagacagacatccccccccagagcctgcagcagagcagcaggaaccgcatcagcagcggccctggcaacctggacatgtgggccagcccccacacagacaacagcagcgagatcaacaccacccacaacctggatgaaaatgagctgaagacagagcacacagatggcaagaacatctccatggaggatgatgtgggggagagcagccagagcagctatgatgaccccagcatgatgcagctgtacaatgagaccaaccggcagctgaccctgctgcacagcagcaccaacagccggcagacagccccagacagcctggacctgtggaacagagtcatcctggaggacacccagagcacagccaccatcagtgacatggacaatgacctggactgggatgactgcagcggcggggccgccatccccagtgatggccagacagagggctacatggccgagggcagcgagcctgagacccgcttcaccgtgcggcagctggagccctggggcctggagtaccaggaggccaaccaggtggactgggagctgcctgccagtgatgagcacaccaaggacagcgcccccagcgagcaccacaccctgaatgagaagagcggccagctgattgccaacagcatctgggacagcgtgatgagggacaaggacatgagcagcttcatgctgcccggcagcagccacatcacagattctgagcagcgggagctgcccccagagatccccagccacagcgccaacgtgaaggacacccacagcccagatgccccagctgccagcggcaccagcgagagcgaggccctgatcagccacctggacaagcaggacacagagcgggagaccctgcagagtgatgctgccagcctggccacccggctggagaaccctggctacttcccccacccagacccctggaagggccatggagatggccagagcgagagcgagaaggaggcccagggcgccacagaccggggccacctggatgaggaggaggtgattgccagcggcgtggagaatgccagcggcatcagcgagaagggccagagcgaccaggagctgagcagcctggtggccagcgagcaccaggagatctgcatcaagagcggcaagatcagcagcctggccgtgaccttcagcccccagacagaggagcctgaggaggtgctggagtatgaggagggcagctacaacctggacagcagagatgtgcagacaggcatgtctgctgacaacctgcagcccaaggacacccatgagaagcacctgatgagccagaggaacagcggggagaccacagagaccagtgatggcatgaacttcaccaagtatgtgtctgtgcctgagaaggacctggagaagacagaggagtgcaacttcctggagccagaaaatgtgggcggcggccccccccaccgggtgcccaggagcctggactttggagatgtgcccatcgacagtgatgtgcacgtgagcagcacctgcagcgagatcaccaagaacctggatgtgaagggcagcgagaacagcctgcctggagctggcagcagcggcaactttgaccgggacaccatcagcagcgagtacacccacagcagcgccagcagccctgagctgaatgacagctctgtggccctgagctcctggggccagcagcccagcagcggctaccaggaggagaaccagggcaactggagcgagcagaaccaccaggagagcgagctgatcaccacagatggccaggtggagatcgtgaccaaggtgaaggacctggagaagaaccgcatcaatgaatttgagaagagctttgacaggaagacccccaccttcctggagatctggaatgacagcgtggatggagacagcttcagcagcctgagcagccctgagaccgggaagtacagcgagcacagcggcacccaccaggagagcaacctgattgccagctaccaggagaagaatgaacatgacatcagcgccaccgtgcagccagaagatgcccgggtcatcagcaccagcagcggcagtgatgatgattctgtgggcggggaggagagcattgaggaggagatccaggtggccaactgccacgtggctgaagatgagagccgggcctgggacagcctgaatgaaagcaacaagttcctggtgacagctgaccccaagtctgagaacatctatgactacctggacagcagcgagccagcagaaaatgaaaacaagagcaaccccttctgtgacaaccagcagagcagcccagacccctggaccttcagccccctgacagaaacagagatgcagatcacagctgtggagaaggagaagaggagcagccctgagaccggcaccactggagatgtggcctggcagatcagccccaaggccagcttccccaagaatgaagacaacagccagctggagatgctgggcttctctgctgacagcacagagtggtggaaggccagcccccaggagggccgcctcatcgagagcccctttgagcgggagctgagtgacagcagcggcgtgctggagatcaacagctctgtgcaccagaatgccagcccctggggcgtgcctgtgcagggcgacatcgagcctgtggagacccactacaccaaccccttcagtgacaaccaccagagccccttcctggagggcaatggcaagaacagccatgagcagctgtggaacatccagccccggcagcctgaccctgatgctgacaagttcagccagctggtgaagctggaccagatcaaggagaaggacagccgggagcagacctttgtgtctgctgctggagatgagctgaccccagagacccccacccaggagcagtgccaggacaccatgctgcctgtgtgtgaccacccagacacagccttcacccatgctgaggagaacagctgtgtgaccagcaatgtgtccaccaatgaaggccaggagaccaaccagtgggagcaggagaagagctacctgggggagatgaccaacagcagcatcgccacagagaacttccctgctgtgagcagccccacccagctgatcatgaagccaggcagcgagtgggatggcagcaccccatctgaggacagccggggcacctttgtgcctgacatcctgcacggcaacttccaggagggcggccagctggccagcgctgccccagacctgtggattgatgccaagaagcccttcagcctgaaggcagatggagaaaatccagacatcctgacccactgtgaacatgacagcaacagccaggccagtgacagcccagacatctgccatgattctgaggccaagcaggagacagagaagcacctgagcgcctgcatgggccctgaggtggagagcagcgagctgtgcctgacagagcctgagattgatgaggagcccatctatgagcccggccgggagtttgtgcccagcaatgctgagctggacagtgaaaatgccaccgtgctgccccccatcggctaccaggccgacatcaagggcagcagccagcctgccagccacaagggcagccctgagcccagcgagatcaacggggacaacagcacaggcctgcaggtgtctgagaagggggccagcccagacatggcccccatcctggagcctgtggaccggcgcatccccagaattgaaaatgtggccaccagcatctttgtgacccaccaggagcccaccccagaaggagatggctcctggatcagtgacagcttcagccctgagagccagcccggggcccgggccctgtttgatggagacccccacctgagcacagagaacccagccctggtgcctgatgccctgctggccagtgacacctgcctggacatcagcgaggccgcctttgaccacagcttcagtgatgccagcggcctgaacaccagcacaggcaccattgatgacatgagcaagctgaccctgtctgagggccaccctgagacccctgtggatggagacctgggcaagcaggacatctgcagcagcgaggcctcctggggagactttgaatatgatgtgatgggccagaacattgatgaggacctgctgcgggagcctgagcacttcctgtatggaggagacccccccctggaggaggacagcctgaagcagagcctggccccctacaccccaccatttgacctgagctacctgacagagcccgcccagagcgctgagaccatcgaggaggccggcagcccagaagatgagagcctgggctgcagagctgctgagatcgtgctgagcgccctgcctgacagaagaagtgagggcaaccaggccgagaccaagaaccggctgcccggcagccagctggccgtgctgcacatccgggaggaccctgagagcgtgtacctgcctgtgggcgccggcagcaacatcctgagccccagcaatgtggactgggaggtggagacagacaacagcgacctgcctgctggaggagacatcggcccccccaacggggccagcaaggagatcagcgagctggaggaggagaagaccatccccaccaaggagcctgagcagatcaagtctgagtacaaggaggagcgctgcacagagaagaatgaagatagacatgccctgcacatggactacatcctggtgaaccgggaggagaacagccacagcaagccagagacctgtgaggagcgggagagcattgctgagctggagctgtatgtgggcagcaaggagaccggcctgcagggcacccagctggccagcttcccagacacctgccagcctgccagcctgaatgaaaggaagggcctgtctgctgagaagatgagcagcaagagtgacaccaggagcagctttgagagccctgcccaggaccagagctggatgttcctgggccacagcgaggtgggggaccccagcctggatgcccgggacagcggccctggctggagcggcaagacagtggagcccttcagcgagctgggcctgggggagggcccccagctgcagatcctggaggagatgaagcccctggagagcctggccctggaggaggccagcggccctgtgtcccagagccagaagagcaagagccggggccgggccggcccagatgctgtgaccctgcaggccgtgacccatgacaatgagtgggagatgctgagcccccagcctgtgcagaagaacatgatcccagacacagagatggaggaggagacagagttcctggagctgggcacccgcatcagccggcccaacggcctgctgtctgaagatgtgggcatggacatcccctttgaggagggcgtgctgagccccagcgctgctgacatgaggcctgagccccccaacagcctggacctgaatgacacccacccccggcgcatcaagctgacagcccccaacatcaacctgagcctggaccagagcgagggcagcatcctgagtgatgacaacctggacagcccagatgaaattgacatcaacgtggatgagctggacaccccagatgaggccgacagctttgagtacacaggccatgaccccacagccaacaaggacagcggccaggagagcgagagcatccctgagtacacagctgaggaggagcgggaggacaaccggctgtggaggacagtggtgattggagagcaggagcagagaattgacatgaaggtgattgagccctacagaagagtcatcagccacggcggctactatggagatggcctgaatgccatcatcgtgtttgctgcctgcttcctgcctgacagcagcagagctgactaccactacgtgatggagaacctcttcctgtatgtgatcagcaccctggagctgatggtggccgaggactacatgattgtgtacctgaatggagccaccccaagaagaaggatgcctggcctgggctggatgaagaagtgctaccagatgattgaccggcggctgaggaagaacctgaagagcttcatcatcgtgcaccccagctggttcatccgcaccatcctggccgtgacccggcccttcatcagcagcaagttcagcagcaagatcaagtatgtgaacagcctgtctgagctgagcggcctcatccccatggactgcatccacatccctgagagcatcatcaagctggatgaggagctgcgggaggccagcgaggccgccaagaccagctgcctgtacaatgaccctgagatgagctccatggagaaggacatcgacctgaagctgaaggagaagccctag

SEQ ID NO: 185255 - DNA, 9267 bp, Artificial Sequence
  derived and/or modified sequence
atggaggagttcctgcagcgggccaagagcaagctgaaccggagcaaacggctcgaaaaagtacacgtggtcataggccctaaatcttgtgatctggacagcctgatcagtacctttacctacgcatactttctggataaggtgtcaccacccggggtgttatgcctcccggtgttaaatataccaagaacggagttcaactatttcacagaaactcgattcatcctggaggaactgaacattagtgagtcatttcatattttcagggacgagatcaacttgcatcagttgaacgatgaaggaaaactgtctatcacactcgtgggcagctcagttctggcttcagaggacaagactttggagagcgctgtcgttaaagtcattaaccccgtcgaacagagcgatgccaatgtagagttccgcgaaagctcgagttccttagtgttaaaagaaattctgcaggaggcaccggagctaataactgagcaactggctcatcggctgaggggcagcattctatttaagtggatgacgatggaaagcgaaaagattagcgagaaacaggaagagatcttgagcatactcgaagagaaatttccgaacttacctccgcgcgaggacatcataaacgtgctgcaggagactcagttcagtgctcagggcctgagcatagaacaaaccatgcttaaagaccttaaagaactaagcgacggggaaatcaaggttgctatcagcaccgtgtccatgaatctagagaattgtctctttcactccaatattacgtccgatctgaaggcattcacagacaaatttggctttgatgtcctgatcctgttttctagttacctctctgaagagcagcaacctcgcaggcaaatcgccgtgtactctgagaatatggaactatgtagccaaatctgttgcgagcttgaagagtgtcagaacccctgtctggaattggagccattcgattgcggttgcgacgagatcctggtataccagcaggaagacccgtccgttacatgcgaccaggtggttttggtggtgaaggaggtaatcaacagacgatgccccgagatggtttccaattctcgcacatctagcacagaagccgtagctggctcggctcctctatcccaggggagttccggaatcatggaactctacggctcagacatcgaacctcagccctcgtctgtcaatttcatagagaacccacctgatctcaacgacagtaatcaggcccaggttgacgcgaatgtggaccttgtatccccagactcaggacttgccaccatcaggagcagcaggagctccaaagaatcatcagtgtttctgtccgacgatagtcccgtgggcgaaggcgcagggccccaccataccttactacctggcctcgactcttacagccctatccccgaaggggccgtagctgaagaacatgcgtggagcggcgaacacggcgaacacttcgacctgtttaattttgaccctgcacccatggcaagtggccagagccagcagagttcccattccgcagattatagccctgctgatgacttctttccaaattccgaccttagcgaaggtcagctgcctgcaggacccgaaggtctggacgggatgggaaccaatatgtctaactatagctcatcctctctactcagcggtgccgggaaggacagcctggtggagcatgatgaagaattcgtccagcgacaggacagtccccgggataacagtgaacggaacttgagcctcacagactttgtgggcgatgagtcaccatcgcctgaacgactcaagaacaccgggaagaggatcccgccaactcccatgaactctctagtggaatcttccccatccaccgaggaaccagcgagcctgtacactgaggacatgacccagaaagctactgacacagggcatatgggccctcctcagacccacgcacgatgctcttcatggtgggggggtctcgaaatcgattcaaagaacatcgcagatgcctggtcatcgtccgaacaggagtcagtgtttcagtcccccgaaagctggaaagagcataagccctcttcaatcgatcgacgcgcttctgatagtgtcttccagccaaagtctctcgagttcaccaagtccgggccttgggaaagcgagttcggacagccagagctcggctctaatgacatccaggacaaaaatgaggaatccctgcctttccagaacctaccgatggagaaaagccctctgcccaacacttcccctcaaggcactaaccatctgatcgaggatttcgcatccctatggcactctgggaggtctccgacagcaatgccagaaccctggggcaaccctaccgatgatggagaaccagccgctgtggctccattcccagcctggagtgcctttgggaaggaggaccatgatgaggctctgaagaacacctggaacttgcatcctactagttctaaaaccccttcagtacgggacccaaatgaatgggccatggcgaagtctggattcgcctttagtagctctgagctccttgataactccccgtcagagattaataacgaggccgccccagaaatatggggtaaaaaaaataacgactctcgagaccatatttttgcccccggtaatcctagttccgacctcgaccatacttggacgaactcaaaaccgccaaaggaggatcaaaacggtctagttgatcccaaaacccgcgggaaggtttatgaaaaagtggatagttggaatttgtttgaggaaaacatgaaaaaagggggctcagatgtcctggtcccatgggaggattccttcctgtcgtataaatgctccgattacagcgcttccaatcttggagaagacagtgtgccctctcccctggataccaactacagtacatccgatagctacacttctcccacgttcgccggcgacgagaaagagactgagcacaaaccctttgctaaggaagagggctttgagtccaaggacggaaactccaccgcggaggagacagatatcccccctcagagtttacagcagtcatcacgtaatagaatcagcagcgggcccggaaacctggacatgtgggcttccccccatacagacaattctagtgagatcaacactacacacaatcttgatgagaatgagttgaaaactgagcatacggatggcaagaacatctctatggaagatgacgtcggagaatcatcacagtcctcctatgacgacccaagcatgatgcagctgtacaatgaaacaaacagacagctgactctactgcattcttcaaccaattcacgacagactgctcctgactccctcgatctatggaacagggttattcttgaggacacacagtccaccgctacaatttccgacatggacaacgaccttgattgggatgattgtagtggtggcgccgctattcccagcgacggtcagactgagggttacatggccgaggggtccgagccggaaaccagattcacggttcggcaactggaaccctgggggctcgagtatcaagaagcaaaccaggttgactgggagctgccagccagcgatgaacacacaaaagattccgccccatctgagcaccacactctgaatgagaagagcggtcagttaattgccaactcgatatgggattcagtgatgagagataaggatatgtcgagttttatgctgcccggctccagccacattacagatagtgagcagcgcgaactcccaccggagatcccatcccacagcgccaacgtgaaggatactcactcccccgatgcaccagccgcaagcggcacctccgagtcagaagccttgatctcacatctggacaagcaggacacggaacgcgagactctgcaatcggacgctgcctccctagctacacgcctggagaatccaggctatttcccacatcctgacccttggaaaggacatggagacggccagtccgaaagcgaaaaagaggcgcagggggccaccgacagggggcatctggacgaggaagaggtaattgcttcgggggtcgagaacgcatcagggatctccgagaagggccagtccgatcaggaactcagttctctagtagcatccgagcaccaagagatctgtattaagtcaggtaagatatcttcgcttgctgtgacattcagccctcaaactgaggagcctgaagaagtcctagaatacgaggagggcagctataacctggactccagggatgttcagactggaatgagcgcagataatttacagcctaaagacacacatgagaagcaccttatgtctcagaggaacagcggtgagacaactgaaacatccgacgggatgaattttacaaagtatgtctcagtccctgagaaggacctggaaaagactgaggaatgcaactttctggagccggagaacgtaggcggcggcccaccccatcgtgtgccacggagcctggattttggggacgtgccaattgatagtgatgtgcatgtgtcatcaacctgttcagaaatcaccaaaaatctcgatgtgaaggggagcgagaacagcctacccggtgctggcagcagcggtaatttcgaccgggacacaataagctcagagtatacgcattcctcggccagttcgcctgaactgaacgacagcagcgtggcgctgagcagttggggccaacagccatcttcggggtaccaggaagagaaccagggcaactggtccgaacagaaccatcaagagtcagagctgatcacgacagatggccaggtggaaattgttaccaaggtgaaggatttagaaaaaaaccggatcaacgaattcgagaagagctttgatcgcaagacaccaaccttcctggagatttggaatgactctgtggatggagacagtttttcctcgctctctagtcctgagaccggaaaatacagcgagcactcaggcacacaccaggagagcaatctgattgcctcctaccaggagaagaacgagcacgatatctctgctacagtgcagcccgaggacgcacgtgttatttctaccagtagtggatctgacgatgattccgtaggcggagaggagagcatcgaggaggagattcaggtcgctaattgtcacgtcgccgaagacgagtcacgggcctgggattcactgaatgagagtaataagttcttggtaactgctgaccctaagagcgagaatatttacgattacttagactcctctgagcctgccgagaatgagaacaaatcaaaccccttttgcgataaccagcagtcttccccagacccatggacattctctcccctaactgagactgagatgcagatcacagctgtggaaaaagaaaagcgctcaagcccagaaacaggcaccacgggagatgtagcgtggcagatctcgccgaaggccagtttcccaaaaaatgaggataacagccaactggagatgctggggttcagtgcggatagtacagaatggtggaaggccagtccccaggaaggtagactgatcgaaagtccattcgagagggagctgtctgacagtagtggcgtgctggaaatcaactcttcggtgcaccagaatgctagtccttggggcgtgccagtccagggagatatcgagcctgtagaaacccactacactaatccgttttccgataatcaccagagcccgtttctggaagggaacggcaagaacagtcacgaacaactgtggaatatccagcctcgacagcctgatccagacgccgacaagttcagtcagctggtgaagcttgaccagatcaaggagaaagactccagagaacagacgttcgtgtcagctgccggggacgaactgacacccgagactcctactcaggaacagtgccaggatactatgctccctgtctgcgatcatcccgataccgcttttacgcatgcggaagagaactcctgcgtgacaagtaacgttagtaccaacgaagggcaggagactaaccaatgggagcaggagaaaagctacttgggcgaaatgactaactcaagcatcgcaaccgaaaattttcccgctgtaagcagtccgacccaactgatcatgaagcctggcagcgagtgggatggaagcacaccgtccgaagacagccgcggtacattcgtgcccgatatcctgcatggtaacttccaggagggcggacaactggccagcgctgctcctgatctgtggatagatgccaaaaagccttttagtctgaaggccgacggggaaaatccagacattctaacccattgtgaacacgattcaaactcccaggccagcgattcccccgacatatgtcacgattccgaagccaagcaggaaacagagaaacatctcagcgcctgcatggggcccgaggtggaaagctctgagctttgtctcacggagcctgaaattgatgaggaacccatctacgagcccggccgcgagttcgttcccagcaacgccgaactagattccgagaatgcaaccgtgctgccgcctattggataccaggcagatatcaaagggtcaagtcagccagcttctcataagggaagccccgaaccttctgagatcaatggtgacaactccactggtctacaagtgagtgagaaaggtgcctccccagacatggctcctatactggaacctgtggacagacggattcctaggattgaaaatgtggccacgtctatatttgtgacgcaccaggagcccacccccgagggcgatggcagttggatatccgattcctttagtccagaaagccagcccggggccagagccttgttcgacggagacccgcacttatcgaccgaaaatcctgcactggtgccagacgccctcttggcatctgacacctgtcttgatattagtgaggccgccttcgatcatagcttctccgatgcgagcgggcttaataccagcacaggaacaatcgacgatatgagtaagctgactttgtcagaaggccacccagaaacaccagtggacggagacctgggtaaacaggatatatgctcttcagaggcttcttggggtgactttgaatacgacgttatggggcagaacatcgacgaggatctgctccgtgagcccgaacactttctttacggcggcgacccacccttggaagaggattctctcaagcagagcctggcgccatacactcccccgttcgatctgtcatatttaactgaaccagctcagtccgccgagactatcgaggaagccggaagccctgaagacgaaagtttaggctgtcgtgctgccgagattgtccttagcgcactcccagaccgcaggagtgagggtaaccaagccgaaacgaaaaatcgcctgcctgggagtcagcttgccgtcctccacatcagggaggatcctgagagtgtgtacttacctgttggcgcaggctctaatatcctctccccttcgaatgttgactgggaggtggagacagacaactctgacctgcccgccgggggcgacatcggaccgcctaacggcgcttcaaaggaaatttctgagctggaggaggagaagactatacccactaaggagcccgaacagatcaaatccgaatataaagaggagcgttgtaccgaaaaaaatgaggatagacacgctctccacatggattatatcctggttaaccgcgaagaaaatagtcacagcaaaccggagacgtgcgaggagcgcgagtccatcgcagagttggaactgtatgtggggtccaaggaaaccggcctgcagggtacccaactggcttcgtttccggacacatgtcaaccagcatcactgaatgaacgtaagggtctgtccgctgaaaagatgtcaagcaaaagcgatactcggtcatctttcgagagccctgcccaggatcagtcttggatgtttctggggcactcggaggtaggtgacccaagtctggacgctcgggacagcggtccaggttggtccggaaagaccgtggagcctttctccgaactggggctcggagagggaccacaactccagatacttgaggaaatgaaaccgttagagagcctcgccctggaggaggcatctggaccggtttcccagtcccagaagagcaaaagccgagggcgggcagggcccgatgccgtcactctccaggccgtcacacacgataacgagtgggagatgttatccccacagccagtccagaaaaacatgatcccagatacagagatggaagaagagaccgaattccttgagctgggaacccggatatcaagacccaacggcttactcagtgaggacgtggggatggacattcccttcgaggaaggggttttatccccctcagcagcagatatgcgaccggaaccccctaattctctggacctgaacgacacacacccgagaagaataaagttaaccgcccccaacatcaacctgagtctggaccagagtgaaggctccatcctcagtgacgacaatttggattcacccgatgagatagatattaacgtagacgaactggacacccctgatgaggccgatagcttcgagtacactggtcacgatcccactgccaacaaagatagcgggcaagagagcgagagtatcccagagtacactgctgaagaggagcgagaggacaatcggttatggaggacagtcgttatcggcgagcaggagcaacgaattgacatgaaggtcattgagccctataggcgggtaatcagccatggtggatactatggggacggccttaacgccatcatcgtctttgcggcctgttttttacctgactcttccagagccgactaccactacgtgatggagaacctcttcctttacgtgatttcaactttggagctgatggttgccgaggattacatgatcgtgtacctaaacggcgccacccctcgaaggagaatgcccggactggggtggatgaagaaatgttatcagatgattgataggagattgaggaagaatcttaagtcatttattattgtacaccctagctggtttatcagaaccatacttgccgtcactaggcctttcattagctctaagtttagctctaagattaagtacgtgaacagcctctctgagttgagtgggcttattcccatggactgtatccatattccagaatccattatcaagctggacgaggagctacgggaggcgagcgaagcggcaaagacatcttgcctatataacgaccccgaaatgagttccatggaaaaagacattgatctcaaactgaaggaaaagccatag

SEQ ID NO: 185256 - DNA, 9266 bp, Artificial Sequence
  derived and/or modified sequence
atggaggagttcttacagcgggctaaaagtaagctgaatcggtccaagcggcttgagaaggtgcacgtcgtgatcggccctaaatcctgcgatctcgattccctaatttcaacgtttacatacgcctattttctggataaggtctcccccccaggagtgctgtgtctgcctgttctcaacatcccgaggacggaatttaattatttcactgagacgcggtttatcctagaggagctgaatattagcgagagttttcatatttttagagacgagataaatttgcatcaactcaatgatgagggaaaactaagcattacacttgtagggtcctccgtgttggcgagcgaggacaagactctcgagagtgccgtggtgaaagttattaacccagtggagcagtctgacgctaatgtggagttccgggaatccagctcatctcttgtactgaaggaaatcttacaagaagccccagaactcattacagaacagttggcgcacaggctccgcggatccatcctatttaaatggatgaccatggagagtgagaaaatttccgagaagcaagaggagatcctgagtatcctcgaagagaaattcccaaatctgcctccaagggaggacattattaatgtattgcaggaaacccagtttagcgcgcagggcctgtccattgagcagactatgttaaaggacctgaaggaactctcagacggggaaatcaaggtggcgatcagtaccgtctctatgaatctcgaaaactgtctgttccactctaacattacgagcgacttaaaggccttcaccgacaaattcgggttcgatgtgttgatccttttcagctcctacctttccgaagagcagcagccccgtagacagattgccgtgtattccgagaatatggagctgtgctcccaaatctgctgcgagttagaggagtgccagaacccatgtctcgaattggagccattcgactgcgggtgcgatgagatcctcgtgtatcagcaagaggacccaagcgtgacctgtgaccaggtggtgcttgtggtgaaggaggtaattaacagacggtgtcccgagatggtctctaattcccgaacaagctctacagaggccgtggctggaagcgccccactgtcacaggggtcatcaggcattatggagctctacgggagcgacatcgagccccaaccctcttccgtgaacttcatcgagaatcccccagatctgaacgattccaatcaggctcaggtcgacgccaatgtagatctggtgagtccggactctggccttgctacaatacgaagcagtcgttcatcaaaggagagttctgtgttcctgtccgatgatagccctgtgggggaaggcgcaggacctcatcataccctgctgcccggacttgatagctatagtcctatccctgagggggcagtcgccgaggagcacgcctggagtggggaacacggagagcactttgacctgttcaattttgaccctgcccctatggcaagtgggcagtctcagcaaagctcccactccgccgattactcccccgcagacgacttctttccgaacagtgatctcagcgaggggcagctgcctgccggtccagaaggactcgacgggatgggcactaatatgagtaactatagctcctccagtctgctgagcggagctggcaaggactcactggtggaacacgatgaagaatttgtccagcggcaagatagccctagagacaatagcgaacgcaatctcagtcttaccgactttgtcggggacgaatctccaagccctgaacgccttaaaaataccgggaaaaggattccgccaacgccaatgaattccctggtcgagtcctcaccatccacagaggagccagcttcgctctacacagaggatatgacccagaaggcaactgacacgggccacatgggtccgccacagacacatgcacggtgtagttcttggtggggtggtttggagatagattccaagaacatcgcagatgcttggagcagttcagagcaggagagtgtgtttcagtcccccgagtcctggaaggagcacaaacccagctccattgatcgccgtgcatcggactccgtgtttcagcccaaaagtctggagttcaccaaatctggcccatgggagtccgaattcggccagcccgaactggggtctaatgatattcaggacaagaatgaggaatctttgccctttcagaatctgccgatggaaaagagccctctgcccaacacaagtccccagggcacaaaccacctgatcgaggattttgcttctctctggcattccgggaggtcccctaccgctatgccggagccgtgggggaatcccactgacgacggcgagcctgccgctgtcgctccctttcccgcttggtcagcttttggcaaggaggaccacgacgaggctcttaaaaacacatggaacctgcatcctaccagcagcaagacaccctcggtaagagacccaaatgagtgggcaatggctaagtcggggttcgctttcagtagttcagagttgctcgacaactcgccatccgagatcaataatgaggctgcacccgagatctggggaaaaaagaataacgattcaagagatcatatcttcgcacctggcaacccctcatctgatttggatcatacctggacaaattcaaagccaccaaaggaggatcagaacggcctggtggatcctaaaactagaggcaaggtttacgaaaaggtggactcatggaacctcttcgaagaaaacatgaagaagggtggcagcgatgtgctagtcccctgggaggatagttttctatcctataaatgctctgattacagtgcctcaaatctgggagaggatagcgtaccttctccactggataccaattactcgactagcgacagctacacttccccaactttcgccggtgacgaaaaggaaacagaacacaaaccatttgctaaggaagaaggcttcgaaagcaaggacgggaattctaccgctgaagagaccgatatccccccacagtctttgcagcagagcagtcgcaatcggatttcatccgggccaggtaatctggacatgtgggcctcaccccatactgacaattccagcgagatcaacacaacccacaatcttgacgaaaacgagctcaagacagagcataccgacggcaagaatatcagtatggaggatgacgtcggagagtcctcacagtcctcctacgatgacccaagcatgatgcagctctacaacgaaaccaaccgtcagctgaccctgctgcatagcagcaccaatagccggcagaccgcccctgatagcctggatctgtggaatcgggtcatcctcgaagatacccagtccaccgccactataagcgatatggacaacgatctcgactgggacgactgtagcggaggtgctgctattcccagcgatgggcaaaccgaagggtatatggcagaaggctccgaacctgaaactcgcttcacagtgcggcagctggagccctggggcctggagtatcaggaagccaaccaggtcgattgggagctaccagccagcgacgagcacacaaaagacagtgccccaagcgaacaccacacactgaatgagaagtccggtcaactcattgcgaacagcatctgggattcggtcatgcgcgataaggacatgtcatcgttcatgctccccggaagcagccacatcaccgattcagagcaacgcgaactgccccctgagatccccagccacagcgcaaacgttaaggatacccatagtccggatgcccctgccgcaagtggaacttctgaatccgaagcgctgatctctcacctagataagcaagacactgaacgcgagacgctccagagcgatgcagcatcgttagctacccgcctggaaaatcctggctactttcctcacccagacccatggaaagggcacggggacggacaatctgaatccgagaaagaagctcagggtgccaccgatcggggacatttggatgaagaggaggtcattgcgtcgggcgtggaaaacgcctcaggaatttctgaaaaagggcagtcagaccaggaactgagctcattggttgcgagtgaacatcaagagatctgtattaagtctggcaagatctcatcactagccgtcacatttagtccacagacagaggagcccgaggaggtgttggaatatgaagagggctcgtacaacctcgattctagggacgtccagactggaatgagtgctgataacctgcagccgaaagatacccatgagaagcacttgatgtcccagcgcaacagcggggaaaccacagaaacatccgacgggatgaattttacgaagtacgttagtgtgccagaaaaggacctggagaagaccgaggagtgcaacttcctggagccagaaaatgttgggggagggccacctcaccgtgtcccgcgttcactggacttcggagacgtcccaattgattccgacgtgcacgtgagctccacttgtagtgagatcacgaagaatctggacgtgaaaggatcggaaaatagtcttccaggcgctggcagctctggaaactttgaccgcgatacaatctcaagtgagtacacacacagctctgcttcctcaccggaactgaatgactcctccgtggctttgagttcatggggccagcagccatcgagtggatatcaggaggagaaccaggggaactggtcagaacaaaaccatcaggaatccgaactcattacaacagatggacaggtcgagattgttacaaaggtcaaggacctggagaaaaataggataaatgagttcgaaaaatcatttgatcgtaaaacaccaactttcttagaaatatggaacgattccgtagatggcgacagcttcagctccctgagtagccccgagactggcaagtatagcgagcattccggaacccaccaggaaagcaaccttattgctagctatcaagaaaagaatgaacacgacatcagtgcaactgtgcagccagaagacgctcgagtgattagtacatcatccggcagtgacgacgatagtgtaggaggcgaggagtcgatcgaagaggaaatccaggtggctaactgccacgtggctgaggatgagagtagggcttgggactctctcaacgagagcaataaatttcttgtgaccgccgatcccaagtccgagaacatttacgattacctggatagctcagagcccgcagagaacgagaacaaatcaaacccgttctgtgacaaccagcagagttctccagacccatggacattttcccctctgactgaaaccgaaatgcaaattaccgccgtggaaaaggagaaacgaagttctccagagaccggcacaacgggagacgtagcctggcagatctcccctaaagcaagttttcccaagaatgaagataattctcagctggaaatgctgggattttctgcagatagcaccgaatggtggaaggcttcgccccaagaaggtcggcttatcgagagtcccttcgaacgggaactgtctgattcatcaggcgtgctggaaattaattcttcggttcatcagaacgcctctccatggggggttcccgtgcagggggatatcgagcccgtggagacccactatacgaacccattcagtgacaatcatcaatctcctttcttggagggcaatgggaaaaattcccacgaacagctgtggaacattcagccacgacagcctgacccggacgcagacaagttttcacaactagtgaaactggatcagataaaagagaaggactctcgggagcagacctttgtgtccgcggcaggggatgagctgacaccggagacccccactcaggagcaatgccaggatactatgctcccggtttgcgaccacccagatacggcttttactcatgccgaggagaactcttgcgtgactagcaatgtaagtactaacgagggccaggagaccaaccaatgggagcaggaaaagtcttacctgggcgaaatgacaaacagttctatcgccactgaaaacttccccgctgtctctagccccacacaactgattatgaaacccggaagcgagtgggacggaagtactccatctgaggattctcgcggtaccttcgtgcccgacatacttcacggaaattttcaagagggagggcaactcgccagcgcagcacccgacctgtggattgatgccaagaagccattttctttgaaggcagacggcgagaaccctgacatcctcacacactgcgagcatgatagcaatagtcaggcctcggattctccagacatctgtcatgactcggaggccaaacaggaaactgagaagcatttaagcgcttgcatgggtcctgaagtcgagtcatctgagctgtgtctgacagagcctgaaatcgatgaagaacctatttacgaaccgggacgggagtttgtgcctagtaacgcggagttagactcagagaacgccaccgtgcttccccctatcggctaccaggccgacatcaagggttcatcgcagcccgcttcccacaagggatcacccgaaccgagcgagataaacggagataatagtacaggactgcaggtgtctgaaaaaggggcatctccagacatggccccaattttagagcctgtggaccggcgtattcctcggatcgagaatgtggccacatcaatatttgtgacccaccaggagcccacacccgagggtgacgggtcatggatctccgatagtttctcccctgagtcccagccaggcgctagggcgttgttcgacggagacccccacctaagtactgagaacccggctctggttcccgatgccctgttggcatccgatacatgcctcgacatatcagaagccgcatttgaccactcgttttccgatgcatccggtctcaatacctctaccggaaccatcgatgacatgagcaagctgacactgtctgagggtcacccggagactcccgtggatggagacttgggtaagcaggacatttgcagcagcgaagcatcctggggcgacttcgagtacgacgtcatgggacagaacattgatgaggacctcctacgtgagcccgaacatttcctctatggaggcgaccccccattagaggaagactcccttaaacaaagtctcgcaccatatacgcccccttttgacctgtcgtatctgactgagcccgctcagagcgccgaaacaatcgaagaggctggatcaccagaggatgaatcattgggttgtcgcgcagccgagatcgtactttctgctctcccagatcggcgatcagaaggcaatcaggccgagacaaagaacagactgcccggaagccagctggcggtgctgcacatccgggaagatccagaaagtgtgtacctgcccgttggtgccggatccaacatcctttccccaagcaacgttgactgggaggttgaaacagataatagtgacctgcctgccggaggtgacattggaccaccgaacggcgcaagcaaggagatctcagagctggaggaagaaaaaacaatcccgactaaggaaccagaacaaataaaaagcgaatataaagaggagaggtgtaccgagaaaaacgaagataggcacgcactccatatggattacatcctggtaaatagagaagagaacagccactctaagccagaaacttgcgaagaacgggagtccatcgcggaactggagttgtacgtgggaagcaaggagactggcctgcaggggacccaactggcatccttcccagacacgtgtcagcccgcttccctgaatgaaagaaaaggtttgagcgccgaaaagatgtcctctaagagtgacacgcgaagctctttcgagagtccagcccaagaccagtcctggatgtttctggggcatagcgaggtgggcgacccttccctggacgctcgggactccggaccaggatggtctggtaaaacagtagaacccttctcagagcttggcctgggcgagggccctcagctgcagattcttgaagagatgaagccccttgagtctctggctttggaagaggcaagtggtccggtctctcagagtcaaaagagcaagagccggggtcgcgctgggccagatgcggtcacgctccaggctgtgacccatgacaacgagtgggagatgttgtcgccgcaacccgtgcagaaaaacatgattcctgataccgagatggaggaggagaccgaattcctggaactggggaccagaatctcccgacctaatggcctattaagcgaggatgtgggcatggacatccccttcgaggaaggagttctgagcccctccgctgctgacatgagacctgagcctcccaatagcctagacctgaatgatacccatcccaggcgtatcaagcttaccgctcccaacattaatttatctctagatcaaagcgaggggtccattctctcagacgacaatcttgattcacctgatgagatcgacatcaatgtggacgagctggatacacccgatgaagccgacagcttcgagtacaccggtcacgacccgactgctaataaggactctggacaagaaagtgagtcaattccggaatatactgctgaggaagaacgggaagacaatagattgtggaggacagtggtgatcggagagcaggagcagcgaatcgacatgaaggttatcgaaccttatcggcgagtgatttctcatgggggatactacggcgatggcttgaacgccatcatagtctttgcagcctgttttttgccggactctagccgggctgactatcactacgtgatggagaacttgtttctgtacgtcatctccacactggagttaatggtcgccgaggattatatgattgtgtatctgaatggcgctacaccgcgacgacggatgccaggtcttggctggatgaagaagtgttatcagatgattgaccgtaggctgcggaagaatctgaagagcttcatcatagttcatccaagttggtttatccgaaccattctggcagtgaccaggccgtttatatcctccaagttttcctccaagatcaaatatgtaaatagcttgtcggagttgtccggactgattccaatggactgcatccacatcccagaatccattatcaaactggatgaggaacttcgtgaagcctctgaagctgctaagacatcttgcctttacaacgatcccgagatgtcctccatggagaaagacatcgatttaaagctcaaagaaaagcctta

SEQ ID NO: 185257 - DNA, 12584 bp, Artificial Sequence
  derived and/or modified sequence
ggagggagcagtcggtcgctgcgccccggcgggccactttcccgggaccccgctcgtcttccttgggccgagattttccactgcgcccctccgagtacccgggttccaaacccctagccacgacatggaagaatttttgcaacgcgccaaatctaaactgaatcgaagcaaacgcttggagaaggtccatgtggttattgggcctaaatcgtgtgacttggattctctcatttctaccttcacatatgcttactttctagacaaggtcagtccaccaggggttctgtgtttaccagtgctgaacataccaagaactgaattcaactacttcaccgagacgaggtttattttagaagagctaaatatttccgaatcattccacatattccgggatgaaattaacctgcatcagctaaatgatgaagggaagttatcgataacacttgttggcagcagtgtgctggcgagtgaagacaaaactttagaatcagcagttgtcaaagtcattaatccggttgagcagagcgatgccaacgttgagttccgagagtcttcctcttctctcgtgctaaaggagattctccaagaggctcctgagctcatcaccgagcaactggctcatcgcctcagaggtagcattcttttcaagtggatgaccatggaatcagagaagatctcagagaagcaggaggaaattctttctatcctggaagaaaaatttcctaacttgcctccaagagaggacatcatcaacgtcctacaggagacccagttcagtgctcagggtttaagtattgaacagacaatgttgaaagatctaaaggagctgtcagatggagaaataaaagtggccattagtactgtgagcatgaaccttgagaattgtctatttcacagcaatattaccagtgacttgaaagcatttacagacaagtttggttttgatgtcctcatcctgttctccagctatctgtcagaggagcagcagccgagacgacagattgctgtgtactcagaaaacatggagctgtgcagtcagatttgctgtgagctggaagagtgtcagaacccttgcctagaactggagccctttgactgtggctgtgatgagatcctggtgtaccaacaagaggacccttcagtgacttgtgatcaggtggttctcgttgtcaaggaagtcatcaacaggaggtgtccagagatggtctccaatagccggacatcctcaacagaagccgtggcaggcagtgcccccctctcccaggggtcttctgggattatggaattgtatggttctgacatagagccacaacccagctctgtgaatttcatagagaaccctccagatctcaatgattctaaccaggctcaggtggatgccaatgtagaccttgttagcccagacagcggactggctaccattaggagcagccgctcatccaaggagagctctgttttcctcagtgacgacagccccgtgggagaaggtgctgggcctcaccacacccttctcccagggcttgactcctacagccccatccctgaaggggcggtggcggaggaacatgcatggtctggagaacacggtgagcacttcgacctcttcaattttgacccagcacccatggcttctgggcagtcccagcaatcttctcattctgcagactactccccagcagatgacttcttccccaacagtgacctgtcagaaggacagctccccgctgggcctgaaggacttgatggcatgggaaccaacatgtctaattattcatccagttcacttttgtcaggggctggcaaagatagccttgtggaacatgatgaggagtttgtccagagacaagacagtcccagagataactctgaaagaaatttgagcctgacagattttgtgggagatgaatccccttccccagaaaggctaaaaaatactggaaagaggatcccaccaacacccatgaatagtttagtagaaagctcgccatccactgaagaaccagcctcactctatacagaagatatgacccaaaaagcaactgacacaggtcacatggggccacctcagacccatgcacggtgcagcagctggtggggtggtttggaaattgactccaaaaatattgcagatgcgtggagttccagtgaacaggaatctgttttccagagccctgaatcatggaaagagcataagccaagctccattgataggagagcctcagattctgtatttcaaccaaagagcctcgaatttacaaagtcaggtccctgggagtctgaatttggtcagcctgaactgggtagcaatgatattcaagacaaaaatgaggaaagcttgccgttccagaacctgcccatggagaagtcacctttgccaaatacatctccccaaggaacaaaccacctgatagaagactttgcttctttgtggcattctggtcgctctcccacagccatgcccgagccctggggaaatcctacagatgatggtgaaccagcagctgtggcgccattcccagcctggagtgcatttggtaaagaagatcatgatgaagctttaaaaaatacctggaatttgcacccaacaagcagcaagacaccttctgttagggacccgaatgagtgggccatggcaaaaagtgggtttgccttttcttcttcagaactactggacaattcacccagtgagataaacaatgaagcagctccagaaatctggggcaagaaaaacaatgactccagggatcacatctttgcacctggaaatcccagttctgatctggatcacacatggactaattctaagccaccaaaagaagatcagaatggtttagtggatcctaaaactaggggcaaggtatatgaaaaggtagattcctggaacctttttgaggagaatatgaagaaaggagggtcagatgtcctagttccttgggaagattccttcttatcttacaaatgttctgattacagtgcatccaacctaggagaagattcggtgccttcccccttagataccaattattccacctcagactcttacacatcaccaacatttgctggagacgaaaaggaaactgaacacaagccatttgctaaagaggaaggttttgagtcaaaagatggtaactccacggcagaggagactgacattcctcctcagtcactgcaacagtcatctcgaaatcgaatcagttcaggtcctgggaacctagacatgtgggcttcacctcatacagataacagttctgaaataaataccactcacaacctggatgaaaatgaactcaagacagagcacacagatggtaagaatatctccatggaggatgacgtcggggaaagcagccagtccagttacgacgaccccagcatgatgcaactgtacaatgaaacaaaccgacaactcacacttttgcacagcagcaccaactcccggcagacggcccctgacagtctcgacttgtggaacagagtgattttggaggatactcagtccactgcaacgatctcagatatggacaatgatttggactgggatgactgcagtgggggtgcggcaatccccagtgatggtcaaacagaaggatacatggctgaaggttccgagccggaaacccgatttacagtgagacagctggaaccctggggcttggagtatcaggaagcaaatcaggtagattgggagctccctgcctctgatgagcataccaaggacagtgctcccagtgaacatcacacattgaatgagaaaagtgggcagctaattgcaaacagtatttgggattctgtcatgagagataaagacatgtcatcattcatgttaccaggctcctcacatatcacagattcagagcaaagggaattgcctcctgaaatccccagccattcagcaaatgttaaagacactcattccccagatgcgccagcagcctctggaaccagtgaatcagaggcacttatatctcatcttgacaagcaggacacagagagggaaaccctgcaaagtgatgcagcatccttggcgactaggcttgagaatccagggtattttccacacccagatccatggaaaggtcatggcgatggacaaagtgaaagtgagaaggaagcccagggagccactgacagggggcaccttgatgaagaggaggtgatcgcctctggtgtggagaatgcctcagggatttctgaaaaagggcagagtgaccaggaactgtcttctctggttgcatctgaacatcaggaaatctgcattaaatcaggcaaaatcagctctcttgctgtcactttcagtcctcaaaccgaggaaccagaggaagttttagagtatgaggaggggtcttacaatctagactcccgtgatgtgcaaacagggatgtccgcagataacctgcagccaaaagatacccatgaaaaacacctcatgagtcaaagaaattcaggtgaaactactgagacttcagatgggatgaatttcacaaaatatgtatctgtacctgaaaaggatcttgagaaaactgaagaatgtaactttctagagccagagaacgtgggtggagggccacctcacagagttccccgaagtcttgattttggggacgtccctatagacagtgatgtgcatgtcagcagcacatgttctgagataaccaaaaatcttgacgttaaggggtctgaaaatagccttccaggagccggttcgtctggaaattttgacagagatactatttctagtgagtatactcattcaagtgcatcaagtcctgagttaaatgactcttcagttgcactgtcctcctggggccagcaacccagttctgggtatcaagaagaaaaccaaggcaactggagtgaacagaatcaccaagaatctgaactaattaccactgatggccaagtagaaatagttaccaaagtgaaggatttagagaaaaacagaataaatgagtttgaaaagagctttgatcgcaaaactcctacatttttagagatctggaatgactcagttgatggtgattccttttcctctttatccagtcctgaaacaggcaaatattctgaacattcagggacacatcaggaaagcaatctaattgctagctaccaggagaaaaatgaacatgacatttctgcaactgtgcagccagaggatgccagggtcatttcaacaagctcaggttctgatgatgacagtgtcggtggtgaagagtcaatagaggaagagatccaggtggccaactgccacgttgctgaggatgaatccagagcttgggattcattgaatgaatctaataagttcttggtcacagctgatcctaagtctgaaaatatttatgactacctagacagctcagagccagcagagaatgagaataagtcaaacccattctgtgacaatcaacaaagcagccctgatccctggactttctcaccattaacggagactgaaatgcagattacagcagtggagaaggagaagagatcttctccagaaacagggacaacaggagatgttgcatggcaaatatctcccaaagcttcgttcccaaagaacgaagataattctcaactggaaatgctgggcttctcagctgatagcactgagtggtggaaggcctcaccccaggaagggagactaattgaaagtccatttgaaagggagctgtctgactccagtggtgtgttggagataaattcttcagtacaccaaaatgccagtccctggggagtaccagttcagggtgatattgagcccgtggaaacacactatactaatccttttagtgacaaccatcagtcaccctttctggaaggtaatgggaagaactcccatgagcaactctggaacattcaaccaaggcagccagacccagatgctgacaagttcagccagcttgtaaaattagaccaaattaaagaaaaggactcaagagagcaaacctttgtgtctgctgctggtgatgagctgactcctgaaacacctacccaagagcagtgtcaggacaccatgctgccagtctgtgatcatccggacacagcctttactcacgcagaggaaaatagttgtgttacatctaatgtttcaactaatgaaggtcaagaaacaaatcagtgggaacaagaaaaatcatacctaggtgagatgacaaattcaagcattgccacagaaaattttcctgctgtcagttctcccacccaactgataatgaagccaggctctgaatgggatggctctaccccaagtgaggactcccgaggtacctttgtgccagatattttacatggcaactttcaagagggtgggcagctggcctctgccgcgcctgacttgtggatagatgctaagaagcccttcagtttgaaagcagatggtgagaatcctgatatcctgacgcactgcgaacatgacagcaattctcaggcttccgacagccctgatatatgtcacgattctgaagcaaagcaagagactgagaagcacctcagtgcttgcatgggacctgaagtggaatccagtgagctttgtctcactgagccagagatagatgaagaacccatttatgagcctggacgggagtttgtcccatccaatgcagaactcgattctgaaaacgcaactgtgctgcctccaattggctatcaagcagacataaagggctcctctcagcccgcctctcataaaggttcacctgaaccttctgaaataaacggtgacaacagtacaggtttacaagtatcagaaaaaggagccagcccagatatggcaccaattttggaaccagttgacagaagaatcccaaggattgaaaatgtggcaactagcatttttgtaactcaccaagagccaactccagaaggtgacggttcttggatatcagacagcttttctcctgaaagtcagcctggtgcaagagctttgtttgatggtgatccacatttatccacagagaatcctgccttggttcctgatgctttgctagcctcagacacttgtctggatataagcgaagctgcctttgaccacagtttcagcgatgcctcaggtctcaacacatccacgggaacaatagatgacatgagtaaactgacattatccgaaggccatccggaaacgccagttgatggggacctagggaagcaagatatctgctcatctgaagcctcgtggggtgattttgaatatgatgtaatgggccagaatatcgatgaagatttactgagagagcctgaacacttcctgtatggtggtgaccctcctttggaggaagattctctgaagcagtcgctggcaccgtacacacctccctttgatttgtcttatctcacagaacctgcccagagtgctgaaacaatagaggaagctgggtctccagaggatgaatctctgggatgcagagcagcagagatagtgctttctgcacttcctgatcgaagaagtgagggaaaccaggctgagaccaaaaacagactgcctggatcccagctggctgtgctgcatattcgtgaagaccctgagtccgtttatttgccggtaggagcaggctccaacattttgtctccatcaaacgttgactgggaagtagaaacagataattctgatttaccagcaggtggagacataggaccaccaaatggtgccagcaaggaaatatcagaattggaagaagaaaaaacaattcctaccaaagagcctgagcagataaaatcagaatacaaggaagaaagatgtacagagaagaatgaagatcgtcatgcactacacatggattacatacttgtaaaccgtgaagaaaattcacactcaaagccagagacctgtgaagaaagagaaagcatagctgaattagaattgtatgtaggttccaaagaaacagggctgcagggaactcagttagcaagcttcccagacacatgtcagccagcctccttaaatgaaagaaaaggtctctctgcagagaaaatgtcttctaaaagcgatacgagatcatcttttgaaagccctgcacaagaccagagttggatgttcttgggccatagtgaggttggtgatccatcactggatgccagggactcagggcctgggtggtctggcaagactgtggagccgttctctgaactcggcttgggtgagggtccccagctgcagattctggaagaaatgaagcctctagaatctttggcactagaggaagcctctggtccagtcagccaatcacagaagagtaagagccgaggcagggctggcccggatgcagttacgttgcaggctgtcacccatgacaatgaatgggaaatgctttcaccacagcctgttcagaaaaacatgatccctgacacggaaatggaggaggagacagagttccttgagctcggaaccaggatatcaagaccaaatggactactgtcagaggatgtaggaatggacatcccctttgaagagggcgtgctgagtcccagtgctgcagacatgaggcctgaacctcctaattctctggatcttaatgacactcatcctcggagaatcaagctcacagccccaaatatcaatctttctctggaccaaagtgaaggatctattctctctgatgataacttggacagtccagatgaaattgacatcaatgtggatgaacttgatacccccgatgaagcagattcttttgagtacactggccatgatcccacagccaacaaagattctggccaagagtcagagtctattccagaatatacggccgaagaggaacgggaggacaaccggctttggaggacagtggtcattggagaacaagagcagcgcattgacatgaaggtcatcgagccctacaggagagtcatttctcacggaggatactatggggacggtctaaatgccatcattgtgtttgccgcctgttttctgccagacagcagtcgggcggattaccactatgtcatggaaaatcttttcctatatgtaataagtactttagagttgatggtagctgaagactatatgattgtgtacttgaatggtgcaaccccaagaaggaggatgccagggctaggctggatgaagaaatgctaccagatgattgacagacggttgaggaagaatttgaaatcattcatcattgttcatccatcttggttcatcagaacaatccttgctgtgacacgaccttttataagttcaaaattcagcagtaaaattaaatatgtcaatagcttatcagaactcagtgggctgatcccaatggattgcatccacattccagagagcatcatcaaactggatgaagaactgagggaagcatcagaggcagctaaaactagctgcctttacaatgatccagaaatgtcttctatggagaaggatattgacttgaagctgaaagaaaagccttagttggccatgctggaagaagaggatgcttttctggttcatggttctgttgaaacatatctacctgaaagagacagggctgatgttacctttttccactttgcactacctggtgccattctaaatttctaaggggaaaaatagaaagtttgtttactcttaagatattttatgaaattgtgtgtactttcctattttgccaattatgtgcctcaaagattttagttgagccttagcaagaaagtaggaccttccatttcaatacttcattaacacggtgtagtgatactttgtcccttagactggtgtttaccagtaagatacctttaatccactgttaagtatgagtggatttgtttccatagattagctggatttccttttggtgattgcattaggtttaaagtacacaggtctcaactctccccaggaaagtttcccctgtttgactccacctttaaaatcctaagcctgactaggacagccacaaaccacacaaggtgtaaaaccatcatcagctaagtgcccgttttgttcttgtttaccagaatctcctttaacttctcaaagggaagccgggctttctaatccacgtcaactttattttagttgtcaaattgggcattatattttatgtaaattggtcttttaacatcattttcctgatgaatgttggtgaccaccacattgtgaaatttaagaatccgtgttgcatgtttggtagctctctgagtttcaggccataaactcagctccagaggttaccttttaagtgccaagaactcaagtgcaaggtggcctactcaaaaatcatttggtagcattcagttattcatgaattcctctctcgcatgcattataaaaagtgatctgctttaaaacaccgtaatctgatcataggcttaaaattaaatatgagtattactttcatgtacaaaatatttcctttatagtcttcatatgccctttaaaatgccaacaagatttcaagtctgtaggcctctagtgaggtggggtggcaaaccacagctaagtctcgctcaccactgcaagctaagaatggtttttacattttgggttggaaaaattttttttgaatatttcatgacacatgaaaattattcaaatgttagtgccgataaataaagtggtactgaaacacagccacacaaacttgtttttgtactgtctacagctactttcacactacagccgcagagctgagcagttcagcagaccgtatgtcccacaatgcctaaaacattgactatgtttacagaaaaagtttgctgacccctgctctagcaaacgcatcctttcctactccaccccaatttgtatttagatagtttctctaacagaacggacaaatgaggctgcaaactaatttatttttgtcaaaaatcaatgttttgacatccacagacagtgaaataaaagaaatggcttgctgaaaaacatgaggagtcctagccacaaaatcactgcttaggttgcaattgccaaaatgaagccttcttagaagcacttctttagtatatacaggtgttggctgaagtccgtgcctcactctgggaaccattcttagtctccagtgtctcctattacaaagaagctggcagaaataaaaatgaaggggtgagagcggttccaccctagtctcatggtggaaaattcattggggagagctgtccaggatatttggagtcctgggtagaaggagcttgtaactactttaaagtcgacatctttgcacaggtgattgagtttctctgacctcattgcttcacctctgtctcctcccgtccttccgcacgtgcccacacacacgcagttcagccctctttcctccataagcctccatcgttttctcttttctcctcttgatcctttcaagcgagtatcttgttgaattgtatgttctgttggatctcctccttcataacatctggcttgttggacagaaaaaccctacagcccaccccctcccacagcccacctccacttttgaaagcccaaattacacctctcccagaacacagtgttgacgtaaatacagttacccaatattcctgtttgttcacctatttgctactttcactcagtagcatcccattttgtaaaatgaattccatggtcaccctgtcacaggaagtaatgaaaaatccagtgttcagtgtagtggtgcaaacctgagggcatagagctgttcatagagggctcttgttatagccaaacagacacagcaacaatctcaccatttatatatatatttttaacttgtccagctcatctatggaaaactactcaggtggtatgctgtttgaagcctcatcttcctacatgaaaattatgggcatttgtcccaatgattttgtttcagctgttctgtaggctgcataaccactctgatatttaggtatctgctattttattatcttaaaagacaaattaatttaattgcatgtgctagggaaaagctaccatgtacattcaccccaagtaaatagaatcctagatgaatcctagaaaaataatccctaagcagataggtagacagaggtaaacattcacatgatttagctctctagctcttgcactctgaacattcttgctttggttctgacttctgggaactgctttgcatttctcctatagatctgtagttaagggaaccaaggggtcattggggcaaaagcattgtttctcaaagctccttgattaagagaaagaacagaaatttgcacagaagatagtgtcaaggagtgagaaagtttgtttgagggcagtagctcagtgtggaagaaaatcctgaagtttctgttgaagccatacaatgttctatggggttactctctaagacattctctgaggtgtgtgaggaagtcactactcctagcctttgttaagatgtaattttaaatattcagttatggtactatgtttgcaactctcgtcttatcacaatgcctcagtagtttgttcccttagaaacatttagatgtgcacaaattaatcttttatatatctaaaggtttttctatcatgcattggattgctcagaataaagtgtctgttagacttcgttttggtaaataaattctccataatgtagattaataatataaaagtctttaatgacacaatatatctatatagcctcactgtataattcagaaataaaaattgattctgc

SEQ ID NO: 185258 - DNA, 9267 bp, Artificial Sequence
  derived and/or modified sequence
atggaggagttcctgcagagagccaagagcaagctgaacagaagcaagagactggagaaggtgcacgtggtgatcggccccaagagctgcgacctggacagcctgatcagcaccttcacctacgcctacttcctggacaaggtgagcccccccggcgtgctgtgcctgcccgtgctgaacatccccagaaccgagttcaactacttcaccgagaccagattcatcctggaggagctgaacatcagcgagagcttccacatcttcagagacgagatcaacctgcaccagctgaacgacgagggcaagctgagcatcaccctggtgggcagcagcgtgctggccagcgaggacaagaccctggagagcgccgtggtgaaggtgatcaaccccgtggagcagagcgacgccaacgtggagttcagagagagcagcagcagcctggtgctgaaggagatcctgcaggaggcccccgagctgatcaccgagcagctggcccacagactgagaggcagcatcctgttcaagtggatgaccatggagagcgagaagatcagcgagaagcaggaggagatcctgagcatcctggaggagaagttccccaacctgccccccagagaggacatcatcaacgtgctgcaggagacccagttcagcgcccagggcctgagcatcgagcagaccatgctgaaggacctgaaggagctgagcgacggcgagatcaaggtggccatcagcaccgtgagcatgaacctggagaactgcctgttccacagcaacatcaccagcgacctgaaggccttcaccgacaagttcggcttcgacgtgctgatcctgttcagcagctacctgagcgaggagcagcagcccagaagacagatcgccgtgtacagcgagaacatggagctgtgcagccagatctgctgcgagctggaggagtgccagaacccctgcctggagctggagcccttcgactgcggctgcgacgagatcctggtgtaccagcaggaggaccccagcgtgacctgcgaccaggtggtgctggtggtgaaggaggtgatcaacagaagatgccccgagatggtgagcaacagcagaaccagcagcaccgaggccgtggccggcagcgcccccctgagccagggcagcagcggcatcatggagctgtacggcagcgacatcgagccccagcccagcagcgtgaacttcatcgagaacccccccgacctgaacgacagcaaccaggcccaggtggacgccaacgtggacctggtgagccccgacagcggcctggccaccatcagaagcagcagaagcagcaaggagagcagcgtgttcctgagcgacgacagccccgtgggcgagggcgccggcccccaccacaccctgctgcccggcctggacagctacagccccatccccgagggcgccgtggccgaggagcacgcctggagcggcgagcacggcgagcacttcgacctgttcaacttcgaccccgcccccatggccagcggccagagccagcagagcagccacagcgccgactacagccccgccgacgacttcttccccaacagcgacctgagcgagggccagctgcccgccggccccgagggcctggacggcatgggcaccaacatgagcaactacagcagcagcagcctgctgagcggcgccggcaaggacagcctggtggagcacgacgaggagttcgtgcagagacaggacagccccagagacaacagcgagagaaacctgagcctgaccgacttcgtgggcgacgagagccccagccccgagagactgaagaacaccggcaagagaatcccccccacccccatgaacagcctggtggagagcagccccagcaccgaggagcccgccagcctgtacaccgaggacatgacccagaaggccaccgacaccggccacatgggccccccccagacccacgccagatgcagcagctggtggggcggcctggagatcgacagcaagaacatcgccgacgcctggagcagcagcgagcaggagagcgtgttccagagccccgagagctggaaggagcacaagcccagcagcatcgacagaagagccagcgacagcgtgttccagcccaagagcctggagttcaccaagagcggcccctgggagagcgagttcggccagcccgagctgggcagcaacgacatccaggacaagaacgaggagagcctgcccttccagaacctgcccatggagaagagccccctgcccaacaccagcccccagggcaccaaccacctgatcgaggacttcgccagcctgtggcacagcggcagaagccccaccgccatgcccgagccctggggcaaccccaccgacgacggcgagcccgccgccgtggcccccttccccgcctggagcgccttcggcaaggaggaccacgacgaggccctgaagaacacctggaacctgcaccccaccagcagcaagacccccagcgtgagagaccccaacgagtgggccatggccaagagcggcttcgccttcagcagcagcgagctgctggacaacagccccagcgagatcaacaacgaggccgcccccgagatctggggcaagaagaacaacgacagcagagaccacatcttcgcccccggcaaccccagcagcgacctggaccacacctggaccaacagcaagccccccaaggaggaccagaacggcctggtggaccccaagaccagaggcaaggtgtacgagaaggtggacagctggaacctgttcgaggagaacatgaagaagggcggcagcgacgtgctggtgccctgggaggacagcttcctgagctacaagtgcagcgactacagcgccagcaacctgggcgaggacagcgtgcccagccccctggacaccaactacagcaccagcgacagctacaccagccccaccttcgccggcgacgagaaggagaccgagcacaagcccttcgccaaggaggagggcttcgagagcaaggacggcaacagcaccgccgaggagaccgacatccccccccagagcctgcagcagagcagcagaaacagaatcagcagcggccccggcaacctggacatgtgggccagcccccacaccgacaacagcagcgagatcaacaccacccacaacctggacgagaacgagctgaagaccgagcacaccgacggcaagaacatcagcatggaggacgacgtgggcgagagcagccagagcagctacgacgaccccagcatgatgcagctgtacaacgagaccaacagacagctgaccctgctgcacagcagcaccaacagcagacagaccgcccccgacagcctggacctgtggaacagagtgatcctggaggacacccagagcaccgccaccatcagcgacatggacaacgacctggactgggacgactgcagcggcggcgccgccatccccagcgacggccagaccgagggctacatggccgagggcagcgagcccgagaccagattcaccgtgagacagctggagccctggggcctggagtaccaggaggccaaccaggtggactgggagctgcccgccagcgacgagcacaccaaggacagcgcccccagcgagcaccacaccctgaacgagaagagcggccagctgatcgccaacagcatctgggacagcgtgatgagagacaaggacatgagcagcttcatgctgcccggcagcagccacatcaccgacagcgagcagagagagctgccccccgagatccccagccacagcgccaacgtgaaggacacccacagccccgacgcccccgccgccagcggcaccagcgagagcgaggccctgatcagccacctggacaagcaggacaccgagagagagaccctgcagagcgacgccgccagcctggccaccagactggagaaccccggctacttcccccaccccgacccctggaagggccacggcgacggccagagcgagagcgagaaggaggcccagggcgccaccgacagaggccacctggacgaggaggaggtgatcgccagcggcgtggagaacgccagcggcatcagcgagaagggccagagcgaccaggagctgagcagcctggtggccagcgagcaccaggagatctgcatcaagagcggcaagatcagcagcctggccgtgaccttcagcccccagaccgaggagcccgaggaggtgctggagtacgaggagggcagctacaacctggacagcagagacgtgcagaccggcatgagcgccgacaacctgcagcccaaggacacccacgagaagcacctgatgagccagagaaacagcggcgagaccaccgagaccagcgacggcatgaacttcaccaagtacgtgagcgtgcccgagaaggacctggagaagaccgaggagtgcaacttcctggagcccgagaacgtgggcggcggccccccccacagagtgcccagaagcctggacttcggcgacgtgcccatcgacagcgacgtgcacgtgagcagcacctgcagcgagatcaccaagaacctggacgtgaagggcagcgagaacagcctgcccggcgccggcagcagcggcaacttcgacagagacaccatcagcagcgagtacacccacagcagcgccagcagccccgagctgaacgacagcagcgtggccctgagcagctggggccagcagcccagcagcggctaccaggaggagaaccagggcaactggagcgagcagaaccaccaggagagcgagctgatcaccaccgacggccaggtggagatcgtgaccaaggtgaaggacctggagaagaacagaatcaacgagttcgagaagagcttcgacagaaagacccccaccttcctggagatctggaacgacagcgtggacggcgacagcttcagcagcctgagcagccccgagaccggcaagtacagcgagcacagcggcacccaccaggagagcaacctgatcgccagctaccaggagaagaacgagcacgacatcagcgccaccgtgcagcccgaggacgccagagtgatcagcaccagcagcggcagcgacgacgacagcgtgggcggcgaggagagcatcgaggaggagatccaggtggccaactgccacgtggccgaggacgagagcagagcctgggacagcctgaacgagagcaacaagttcctggtgaccgccgaccccaagagcgagaacatctacgactacctggacagcagcgagcccgccgagaacgagaacaagagcaaccccttctgcgacaaccagcagagcagccccgacccctggaccttcagccccctgaccgagaccgagatgcagatcaccgccgtggagaaggagaagagaagcagccccgagaccggcaccaccggcgacgtggcctggcagatcagccccaaggccagcttccccaagaacgaggacaacagccagctggagatgctgggcttcagcgccgacagcaccgagtggtggaaggccagcccccaggagggcagactgatcgagagccccttcgagagagagctgagcgacagcagcggcgtgctggagatcaacagcagcgtgcaccagaacgccagcccctggggcgtgcccgtgcagggcgacatcgagcccgtggagacccactacaccaaccccttcagcgacaaccaccagagccccttcctggagggcaacggcaagaacagccacgagcagctgtggaacatccagcccagacagcccgaccccgacgccgacaagttcagccagctggtgaagctggaccagatcaaggagaaggacagcagagagcagaccttcgtgagcgccgccggcgacgagctgacccccgagacccccacccaggagcagtgccaggacaccatgctgcccgtgtgcgaccaccccgacaccgccttcacccacgccgaggagaacagctgcgtgaccagcaacgtgagcaccaacgagggccaggagaccaaccagtgggagcaggagaagagctacctgggcgagatgaccaacagcagcatcgccaccgagaacttccccgccgtgagcagccccacccagctgatcatgaagcccggcagcgagtgggacggcagcacccccagcgaggacagcagaggcaccttcgtgcccgacatcctgcacggcaacttccaggagggcggccagctggccagcgccgcccccgacctgtggatcgacgccaagaagcccttcagcctgaaggccgacggcgagaaccccgacatcctgacccactgcgagcacgacagcaacagccaggccagcgacagccccgacatctgccacgacagcgaggccaagcaggagaccgagaagcacctgagcgcctgcatgggccccgaggtggagagcagcgagctgtgcctgaccgagcccgagatcgacgaggagcccatctacgagcccggcagagagttcgtgcccagcaacgccgagctggacagcgagaacgccaccgtgctgccccccatcggctaccaggccgacatcaagggcagcagccagcccgccagccacaagggcagccccgagcccagcgagatcaacggcgacaacagcaccggcctgcaggtgagcgagaagggcgccagccccgacatggcccccatcctggagcccgtggacagaagaatccccagaatcgagaacgtggccaccagcatcttcgtgacccaccaggagcccacccccgagggcgacggcagctggatcagcgacagcttcagccccgagagccagcccggcgccagagccctgttcgacggcgacccccacctgagcaccgagaaccccgccctggtgcccgacgccctgctggccagcgacacctgcctggacatcagcgaggccgccttcgaccacagcttcagcgacgccagcggcctgaacaccagcaccggcaccatcgacgacatgagcaagctgaccctgagcgagggccaccccgagacccccgtggacggcgacctgggcaagcaggacatctgcagcagcgaggccagctggggcgacttcgagtacgacgtgatgggccagaacatcgacgaggacctgctgagagagcccgagcacttcctgtacggcggcgacccccccctggaggaggacagcctgaagcagagcctggccccctacaccccccccttcgacctgagctacctgaccgagcccgcccagagcgccgagaccatcgaggaggccggcagccccgaggacgagagcctgggctgcagagccgccgagatcgtgctgagcgccctgcccgacagaagaagcgagggcaaccaggccgagaccaagaacagactgcccggcagccagctggccgtgctgcacatcagagaggaccccgagagcgtgtacctgcccgtgggcgccggcagcaacatcctgagccccagcaacgtggactgggaggtggagaccgacaacagcgacctgcccgccggcggcgacatcggcccccccaacggcgccagcaaggagatcagcgagctggaggaggagaagaccatccccaccaaggagcccgagcagatcaagagcgagtacaaggaggagagatgcaccgagaagaacgaggacagacacgccctgcacatggactacatcctggtgaacagagaggagaacagccacagcaagcccgagacctgcgaggagagagagagcatcgccgagctggagctgtacgtgggcagcaaggagaccggcctgcagggcacccagctggccagcttccccgacacctgccagcccgccagcctgaacgagagaaagggcctgagcgccgagaagatgagcagcaagagcgacaccagaagcagcttcgagagccccgcccaggaccagagctggatgttcctgggccacagcgaggtgggcgaccccagcctggacgccagagacagcggccccggctggagcggcaagaccgtggagcccttcagcgagctgggcctgggcgagggcccccagctgcagatcctggaggagatgaagcccctggagagcctggccctggaggaggccagcggccccgtgagccagagccagaagagcaagagcagaggcagagccggccccgacgccgtgaccctgcaggccgtgacccacgacaacgagtgggagatgctgagcccccagcccgtgcagaagaacatgatccccgacaccgagatggaggaggagaccgagttcctggagctgggcaccagaatcagcagacccaacggcctgctgagcgaggacgtgggcatggacatccccttcgaggagggcgtgctgagccccagcgccgccgacatgagacccgagccccccaacagcctggacctgaacgacacccaccccagaagaatcaagctgaccgcccccaacatcaacctgagcctggaccagagcgagggcagcatcctgagcgacgacaacctggacagccccgacgagatcgacatcaacgtggacgagctggacacccccgacgaggccgacagcttcgagtacaccggccacgaccccaccgccaacaaggacagcggccaggagagcgagagcatccccgagtacaccgccgaggaggagagagaggacaacagactgtggagaaccgtggtgatcggcgagcaggagcagagaatcgacatgaaggtgatcgagccctacagaagagtgatcagccacggcggctactacggcgacggcctgaacgccatcatcgtgttcgccgcctgcttcctgcccgacagcagcagagccgactaccactacgtgatggagaacctgttcctgtacgtgatcagcaccctggagctgatggtggccgaggactacatgatcgtgtacctgaacggcgccacccccagaagaagaatgcccggcctgggctggatgaagaagtgctaccagatgatcgacagaagactgagaaagaacctgaagagcttcatcatcgtgcaccccagctggttcatcagaaccatcctggccgtgaccagacccttcatcagcagcaagttcagcagcaagatcaagtacgtgaacagcctgagcgagctgagcggcctgatccccatggactgcatccacatccccgagagcatcatcaagctggacgaggagctgagagaggccagcgaggccgccaagaccagctgcctgtacaacgaccccgagatgagcagcatggagaaggacatcgacctgaagctgaaggagaagccctag

SEQ ID NO: 185259 - protein, 1053 aa, Artificial Sequence
  derived and/or modified sequence
MFGRSRSWVGGGHGKTSRNIHSLDHLKYLYHVLTKNTTVTEQNRNLLVETIRSITEILIWGDQNDSSVFDFFLEKNMFVFFLNILRQKSGRYVCVQLLQTLNILFENISHETSLYYLLSNNYVNSIIVHKFDFSDEEIMAYYISFLKTLSLKLNNHTVHFFYNEHTNDFALYTEAIKFFNHPESMVRIAVRTITLNVYKVSLDNQAMLHYIRDKTAVPYFSNLVWFIGSHVIELDDCVQTDEEHRNRGKLSDLVAEHLDHLHYLNDILIINCEFLNDVLTDHLLNRLFLPLYVYSLENQDKGGERPKISLPVSLYLLSQVFLIIHHAPLVNSLAEVILNGDLSEMYAKTEQDIQRSSAKPSIRCFIKPTETLERSLEMNKHKGKRRVQKRPNYKNVGEEEDEEKGPTEDAQEDAEKAKGTEGGSKGIKTSGESEEIEMVIMERSKLSELAASTSVQEQNTTDEEKSAAATCSESTQWSRPFLDMVYHALDSPDDDYHALFVLCLLYAMSHNKGMDPEKLERIQLPVPNAAEKTTYNHPLAERLIRIMNNAAQPDGKIRLATLELSCLLLKQQVLMSAGCIMKDVHLACLEGAREESVHLVRHFYKGEDIFLDMFEDEYRSMTMKPMNVEYLMMDASILLPPTGTPLTGIDFVKRLPCGDVEKTRRAIRVFFMLRSLSLQLRGEPETQLPLTREEDLIKTDDVLDLNNSDLIACTVITKDGGMVQRFLAVDIYQMSLVEPDVSRLGWGVVKFAGLLQDMQVTGVEDDSRALNITIHKPASSPHSKPFPILQATFIFSDHIRCIIAKQRLAKGRIQARRMKMQRIAALLDLPIQPTTEVLGFGLGSSTSTQHLPFRFYDQGRRGSSDPTVQRSVFASVDKVPGFAVAQCINQHSSPSLSSQSPPSASGSPSGSGSTSHCDSGGTSSSSTPSTAQSPADAPMSPELPKPHLPDQLVIVNETEADSKPSKNVARSAAVETASLSPSLVPARQPTISLLCEDTADTLSVESLTLVPPVDPHSLRSLTGMPPLSTPAAACTEPVGEEAACAEPVGTAED

SEQ ID NO: 185260 - protein, 1053 aa, Artificial Sequence
  derived and/or modified sequence
MFGRSRSWVGGGHGKTSRNIHSLDHLKYLYHVLTKNTTVTEQNRNLLVETIRSITEILIWGDQNDSSVFDFFLEKNMFVFFLNILRQKSGRYVCVQLLQTLNILFENISHETSLYYLLSNNYVNSIIVHKFDFSDEEIMAYYISFLKTLSLKLNNHTVHFFYNEHTNDFALYTEAIKFFNHPESMVRIAVRTITLNVYKVSVDNQAMLHYIRDKTAVPYFSNLVWFIGSHVIELDDCVQTDEEHRNRGKLSDLVAEHLDHLHYLNDILIINCEFLNDVLTDHLLNRLFLPLYVYSLENQDKGGERPKISLPVSLYLLSQVFLIIHHAPLVNSLAEVILNGDLSEMYAKTEQDIQRSSAKPSIRCFIKPTETLERSLEMNKHKGKRRVQKRPNYKNVGEEEDEEKGPTEDAQEDAEKAKGTEGGSKGIKTSGESEEIEMVIMERSKLSELAASTSVQEQNTTDEEKSAAATCSESTQWSRPFLDMVYHALDSPDDDYHALFVLCLLYAMSHNKGMDPEKLERIQLPVPNAAEKTTYNHPLAERLIRIMNNAAQPDGKIRLATLELSCLLLKQQVLMSAGCIMKDVHLACLEGAREESVHLVRHFYKGEDIFLDMFEDEYRSMTMKPMNVEYLMMDASILLPPTGTPLTGIDFVKRLPCGDVEKTRRAIRVFFMLRSLSLQLRGEPETQLPLTREEDLIKTDDVLDLNNSDLIACTVITKDGGMVQRFLAVDIYQMSLVEPDVSRLGWGVVKFAGLLQDMQVTGVEDDSRALNITIHKPASSPHSKPFPILQATFIFSDHIRCIIAKQRLAKGRIQARRMKMQRIAALLDLPIQPTTEVLGFGLGSSTSTQHLPFRFYDQGRRGSSDPTVQRSVFASVDKVPGFAVAQCINQHSSPSLSSQSPPSASGSPSGSGSTSHCDSGGTSSSSTPSTAQSPADAPMSPELPKPHLPDQLVIVNETEADSKPSKNVARSAAVETASLSPSLVPARQPTISLLCEDTADTLSVESLTLVPPVDPHSLRSLTGMPPLSTPAAACTEPVGEEAACAEPVGTAED

SEQ ID NO: 185261 - DNA, 3162 bp, Artificial Sequence
  derived and/or modified sequence
atgtttggccgttcccgatcctgggtgggtggaggacacgggaagacttcacggaacatacattcacttgaccatctgaagtatctttaccacgtgttgaccaagaacacaaccgttacggagcagaaccgaaatctcttggtagagaccataagaagcatcactgagatactcatttggggtgatcaaaacgactcctccgtttttgatttttttctcgaaaaaaatatgtttgtgttctttcttaacatcctgagacagaagtcaggccgttatgtgtgcgttcagttacttcagactctcaacattctgttcgaaaatatctcccatgaaacatccctgtattatttgcttagtaataattatgtcaactcaataatcgtgcacaagttcgatttcagcgatgaagagatcatggcatattacattagcttcctcaaaaccttgtcactgaaacttaataatcataccgttcatttcttctataatgagcatacaaatgactttgctctctacactgaggctataaagttcttcaaccatcctgagagcatggtccggatcgcggttagaaccattactctgaatgtgtataaggtttccctcgacaatcaagctatgctgcattacatccgggataaaactgccgtgccctacttttccaatttggtctggtttatcggtagccacgtaatcgagttagacgattgcgtgcaaaccgacgaagaacataggaatcgaggaaagttatctgatctggtcgccgagcacctcgaccatctgcattatctcaacgacatcctgattatcaattgcgaatttctgaacgatgtactgacggaccatctgctcaaccgcctttttctccctttgtatgtgtattcactggagaatcaggataaggggggcgagagacctaagatatcccttccagtgagtctgtatctgctgagtcaggtatttttaattattcaccatgctcctttggtcaactcactggcagaggtcatattgaatggggacttgtcagaaatgtacgcaaaaacagagcaagatatacagcgttcgtccgcaaagccatctatacgctgcttcatcaagccaactgagaccttggagaggagtttagaaatgaacaaacataagggtaaacggagagtgcagaaaagaccgaattacaagaatgtgggcgaagaggaggatgaggagaagggccccacagaggatgcacaggaggatgccgagaaggccaagggaacagaagggggcagtaagggaattaaaacaagcggcgaaagtgaagagatcgagatggtgattatggaaagaagcaagctctctgagctggcggcctctaccagtgtgcaggaacagaatacaacagatgaggagaagagtgcggctgccacatgctctgagagtacacagtggtcaaggcctttccttgacatggtgtatcatgccttggattctcccgacgatgactatcatgcactctttgtactctgcctgttgtacgcaatgagtcacaataagggaatggaccccgaaaagctagaacgtatccagctccctgtcccgaatgccgcagagaagaccacctataaccatccccttgcagaaagactgataagaatcatgaataacgccgcacagcctgacggcaagattagactagccacattggagctttcatgcctgcttctgaaacagcaggttttaatgtcagccggttgcatcatgaaggacgtccacctagcgtgtcttgaaggagctcgcgaggaatccgttcacttggtgcggcatttttacaagggggaggatatatttctggatatgttcgaagatgagtatcgctctatgacaatgaaacctatgaacgtggagtaccttatgatggacgcaagcatcctcctgcctccgaccgggacaccactgacaggcattgacttcgttaaacgcctgccatgtggggacgtggagaaaactagacgggcgattagggtgttcttcatgctgagatccctgtccctccagctgcggggggagcctgaaacccagctccctctaacacgggaggaagacctgatcaagaccgacgacgtgctggatctgaataattccgacctgatcgcttgcactgtgatcacgaaggatggtgggatggttcaaaggttcctggccgtcgatatttatcagatgtctctcgtggagccagacgtttcccgcctgggatggggagttgtcaagtttgcaggcctgctgcaggatatgcaggtcaccggcgtggaggacgatagcagggccctgaacatcaccatacataagcccgctagtagcccgcattcaaagccgtttccaattttacaggccacgttcatatttagcgatcacattcgctgcataattgctaaacaacgcctggcaaaaggccggattcaggctcggcgaatgaaaatgcagcgtatcgcagccctgttggatttgcctatccagcctacgacagaggtgctcggttttggcctaggaagctcaacatctacccaacatttaccgttcaggttctatgaccaggggcggcgaggctcttctgatcccactgtccagaggagcgtgttcgcctcagtggataaggtgcctgggttcgcagtcgctcagtgcattaaccaacatagtagccctagtctgagctcccaaagccccccttccgccagcggaagtccctctggctctggatcaacctcccactgtgacagtggaggaacatccagctcttccactccgtccacagcccagtcccccgctgacgctcctatgagccctgagctgccaaagcctcacttaccggatcagttagtgatagtgaatgaaactgaagccgactcaaagccttcaaaaaatgttgccaggagcgccgctgtagaaacggcctctctgagtccatcactggttccagccagacaacctactatctcgctgttatgcgaagatactgccgacactctctccgtggagtccctgaccctggtgcccccagtggatccccatagcttacggtcccttacagggatgcctccactgtccactccagcagccgcatgtacagagccagtgggcgaggaagcggcatgcgcagagccagtaggcactgcggaagattag

SEQ ID NO: 185262 - DNA, 3162 bp, Artificial Sequence
  derived and/or modified sequence
atgtttggtcgttcaagaagctgggtcggggggggacacggaaagacatctagaaacattcactctcttgaccatcttaaatacctgtatcacgtcctgaccaaaaacacgacagtgacggaacagaacaggaatctgctggtagagaccatacggtcaataaccgagattttaatttggggcgaccagaatgatagctcagtttttgacttcttccttgaaaaaaatatgtttgtgttcttcctaaacattctgcgccaaaaaagtggccgctatgtttgcgtgcagcttctgcaaacgttgaatattctgttcgagaacatatcccacgagacgagcttatactatctgctgtccaacaactacgttaacagcatcattgtccacaagtttgatttttccgatgaggaaattatggcctactatatatcatttctaaaaaccttatccctgaagctaaacaaccacaccgtgcactttttctacaatgagcatacgaacgatttcgccctgtataccgaggcgataaaattttttaaccacccagagagcatggttagaattgcagtccgtactattacattgaacgtgtacaaggtctctgtggataaccaggctatgctgcactacatccgagacaaaacagcagtgccttacttttccaacctagtatggttcatcgggagtcacgttatcgagctcgacgattgcgtgcagacagacgaagagcatcggaatcgagggaaactttctgaccttgtggccgagcatttggaccacttgcactatctgaatgatatactcattataaactgcgaattcttgaatgacgtccttacagaccatctcttgaacaggctgtttctccccttatatgtgtattccctagaaaaccaggacaagggaggggaacggccaaagatttccttacctgtgagtctctatctgttatcccaggtctttctgattatccatcacgcgccgctggtaaatagtctggctgaagttattctgaacggcgacctctctgagatgtacgcaaagaccgaacaggatatacagcggagcagcgccaaaccgagcattcgctgcttcattaaacccaccgagacactagagaggtcgttggaaatgaacaagcataaggggaagcgtagagtccaaaagaggccgaactataagaatgtcggtgaggaggaggacgaggagaagggtccaacagaggacgcgcaagaggatgctgaaaaggccaagggaactgaaggaggttcaaaggggattaaaacatcaggtgaatccgaagagatcgaaatggtcatcatggagaggtccaagctgagcgagctagctgcctccacaagtgttcaggaacaaaacaccaccgacgaagagaagtcagcggccgctacctgttctgagtccacccagtggagcagaccatttcttgacatggtgtaccacgctctcgatagtccagatgatgactatcacgcactcttcgtcctctgtttactttacgcaatgagccacaataaagggatggaccccgaaaagcttgagcgcatccagttacccgtgcctaatgccgccgaaaagacaacctacaatcaccctttggccgaaagattgattaggattatgaacaacgcagcccaaccagacggaaaaatccgattggcgacattggaactgtcctgcctgttactgaagcaacaggtgctgatgtccgccggttgcataatgaaagacgtgcatctggcctgtctcgagggggcccgggaggagtcagtgcacctcgtgcgccatttttataaaggcgaggacatcttcctggacatgttcgaagatgaatacaggtcaatgacgatgaagccaatgaatgtcgagtatctcatgatggacgcctctatactcctccctccgaccggcacccctttgaccggtatcgatttcgtcaagagactgccatgtggggacgtggagaaaacccggcgggccattcgtgttttcttcatgctgaggtccctttcactgcaactgcgaggagagccggagactcaactccctctgaccagagaagaggatctcatcaagacagatgatgtcctcgacctcaataactccgaccttatcgcttgtaccgtgataacaaaggacggaggcatggtgcagcgcttcctggcggtcgatatctaccaaatgtctcttgtcgagccagacgtgtcaaggctgggctggggggtagtcaagttcgctggcctgctgcaggacatgcaggtgactggggtcgaggacgatagtagagccctcaatattaccatccataaacctgccagttccccacactccaagccattccctatcctgcaagccaccttcatctttagcgaccacataagatgtattatcgctaaacagagactggctaaggggagaattcaggcccgccgtatgaagatgcagcgtattgccgcattgctggatctgccgattcagcccaccaccgaggtgttaggcttcgggctgggaagcagcacatcaacccagcatctgccattcagattttacgatcaagggcgccgcggctccagcgatcctaccgtgcaacgcagtgtgtttgccagtgtggacaaggtacctggctttgctgtagcacagtgcattaatcagcactctagccccagtctgtcctcccagagccccccctccgcgagtggttctcctagcggatctggttccacctcccactgtgattcagggggtacgtccagtagctctacgcccagtaccgcccagagccctgctgacgctcctatgtcccccgaacttcctaagcctcatctacccgaccaacttgttattgtcaacgaaactgaagcggattctaaaccaagcaaaaatgttgcacgtagcgctgcagtggaaaccgcttccctttccccctccctggtgcctgcccgtcaacctacaatctcactgctatgtgaggatacagcagatacactgagcgtcgaaagcctgactctggttccacctgtggatccacacagcctgcgttcgctgacaggaatgcctcccttgtcaactcccgcagctgcttgtacagagcccgtgggagaagaggcagcctgtgccgaaccagtggggacagctgaggattag

SEQ ID NO: 185263 - DNA, 3162 bp, Artificial Sequence
  derived and/or modified sequence
atgtttggccgcagccgctcctgggtgggcggcggccacggcaagaccagcaggaacatccacagcctggaccacctgaagtacctgtaccacgtgctgaccaagaacaccaccgtgacagagcagaacagaaacctgctggtggagaccatccgcagcatcacagagatcctgatctggggagaccagaatgacagctctgtgtttgacttcttcctggagaagaacatgtttgtgttcttcctgaacatcctgcggcagaagagcggccgctacgtgtgtgtgcagctgctgcagaccctgaacatcctgtttgagaacatcagccatgagaccagcctgtactacctgctgagcaacaactacgtgaacagcatcatcgtgcacaagtttgacttcagtgatgaggagatcatggcctactacatctccttcctgaagaccctgagcctgaagctgaacaaccacacagtgcacttcttctacaatgagcacaccaatgactttgccctgtacacagaggccatcaagttcttcaaccaccctgagagcatggtgagaattgctgtgaggaccatcaccctgaatgtgtacaaggtgtccctggacaaccaggccatgctgcactacatccgggacaagacagctgtgccctacttcagcaacctggtgtggttcatcggcagccacgtgattgagctggatgactgtgtgcagacagatgaggagcacaggaacagaggcaagctgagtgacctggtggccgagcacctggaccacctgcactacctgaatgacatcctgatcatcaactgtgagttcctgaatgatgtgctgacagaccacctgctgaacagactcttcctgcccctgtatgtgtacagcctggagaaccaggacaagggcggggagcggcccaagatcagcctgcctgtgtccctgtacctgctgagccaggtgttcctgatcatccaccacgcccccctggtgaacagcctggccgaggtgatcctgaatggagacctgtctgagatgtatgccaagacagagcaggacatccagaggagcagcgccaagcccagcatccgctgcttcatcaagcccacagagaccctggagaggagcctggagatgaacaagcacaagggcaagagaagagtgcagaagaggcccaactacaagaatgtgggggaggaggaggatgaggagaagggccccacagaagatgcccaggaggatgctgagaaggccaagggcacagagggcggcagcaagggcatcaagaccagcggggagagcgaggagattgagatggtgatcatggagaggagcaagctgtctgagctggccgccagcacctctgtgcaggagcagaacaccacagatgaggagaagtctgctgctgccacctgcagcgagagcacccagtggagccggcccttcctggacatggtgtaccacgccctggacagcccagatgatgactaccacgccctgtttgtgctgtgcctgctgtatgccatgagccacaacaagggcatggaccctgagaagctggagcgcatccagctgcctgtgcccaatgctgctgagaagaccacctacaaccaccccctggccgagcggctcatccgcatcatgaacaatgctgcccagccagatggcaagatccggctggccaccctggagctgagctgcctgctgctgaagcagcaggtgctgatgtctgctggctgcatcatgaaggatgtgcacctggcctgcctggagggcgcccgggaggagagcgtgcacctggtgcgccacttctacaagggggaggacatcttcctggacatgtttgaagatgagtaccgctccatgaccatgaagcccatgaatgtggagtacctgatgatggatgccagcatcctgctgccccccaccggcacccccctgactggaattgactttgtgaagaggctgccctgtggagatgtggagaagacccggcgggccatccgggtcttcttcatgctgcggagcctgagcctgcagctgcggggggagcctgagacccagctgcccctgacccgggaggaggacctgatcaagacagatgatgtgctggacctgaacaacagcgacctgattgcctgcaccgtcatcaccaaggatggcggcatggtgcagcgcttcctggccgtggacatctaccagatgagcctggtggagccagatgtgtcccggctgggctggggcgtggtgaagtttgctggcctgctgcaggacatgcaggtgactggagtggaggatgacagccgggccctgaacatcaccatccacaagccagccagcagcccccacagcaagcccttccccatcctgcaggccaccttcatcttcagtgaccacatccgctgcatcatcgccaagcagaggctggccaagggccgcatccaggcccggaggatgaagatgcagagaattgctgccctgctggacctgcccatccagcccaccacagaggtgctgggcttcggcctgggcagcagcaccagcacccagcacctgcccttccgcttctatgaccagggccggcggggcagcagtgaccccaccgtgcagaggtctgtgtttgcctctgtggacaaggtgcccggctttgctgtggcccagtgcatcaaccagcacagcagccccagcctgagcagccagagccccccatctgccagcggcagccccagcggcagcggcagcaccagccactgtgacagcggcggcaccagcagcagcagcacccccagcacagcccagagccctgcagatgcccccatgagccctgagctgcccaagccccacctgcctgaccagctggtgattgtgaatgaaacagaggccgacagcaagcccagcaagaatgtggcccggtctgctgctgtggagacagccagcctgagccccagcctggtgcctgcccggcagcccaccatcagcctgctgtgtgaggacacagctgacaccctgtctgtggagagcctgaccctggtgccccctgtggacccccacagcctgcggagcctgaccggcatgccacccctgagcaccccagctgctgcctgcacagagcctgtgggggaggaggccgcctgtgccgagcctgtgggcacagctgaggactag

SEQ ID NO: 185264 - DNA, 3162 bp, Artificial Sequence
  derived and/or modified sequence
atgtttggccgcagccgctcctgggtgggcggcggccacggcaagaccagcaggaacatccacagcctggaccacctgaagtacctgtaccacgtgctgaccaagaacaccaccgtgacagagcagaacagaaacctgctggtggagaccatccgcagcatcacagagatcctgatctggggagaccagaatgacagctctgtgtttgacttcttcctggagaagaacatgtttgtgttcttcctgaacatcctgcggcagaagagcggccgctacgtgtgtgtgcagctgctgcagaccctgaacatcctgtttgagaacatcagccatgagaccagcctgtactacctgctgagcaacaactacgtgaacagcatcatcgtgcacaagtttgacttcagtgatgaggagatcatggcctactacatctccttcctgaagaccctgagcctgaagctgaacaaccacacagtgcacttcttctacaatgagcacaccaatgactttgccctgtacacagaggccatcaagttcttcaaccaccctgagagcatggtgagaattgctgtgaggaccatcaccctgaatgtgtacaaggtgtctgtggacaaccaggccatgctgcactacatccgggacaagacagctgtgccctacttcagcaacctggtgtggttcatcggcagccacgtgattgagctggatgactgtgtgcagacagatgaggagcacaggaacagaggcaagctgagtgacctggtggccgagcacctggaccacctgcactacctgaatgacatcctgatcatcaactgtgagttcctgaatgatgtgctgacagaccacctgctgaacagactcttcctgcccctgtatgtgtacagcctggagaaccaggacaagggcggggagcggcccaagatcagcctgcctgtgtccctgtacctgctgagccaggtgttcctgatcatccaccacgcccccctggtgaacagcctggccgaggtgatcctgaatggagacctgtctgagatgtatgccaagacagagcaggacatccagaggagcagcgccaagcccagcatccgctgcttcatcaagcccacagagaccctggagaggagcctggagatgaacaagcacaagggcaagagaagagtgcagaagaggcccaactacaagaatgtgggggaggaggaggatgaggagaagggccccacagaagatgcccaggaggatgctgagaaggccaagggcacagagggcggcagcaagggcatcaagaccagcggggagagcgaggagattgagatggtgatcatggagaggagcaagctgtctgagctggccgccagcacctctgtgcaggagcagaacaccacagatgaggagaagtctgctgctgccacctgcagcgagagcacccagtggagccggcccttcctggacatggtgtaccacgccctggacagcccagatgatgactaccacgccctgtttgtgctgtgcctgctgtatgccatgagccacaacaagggcatggaccctgagaagctggagcgcatccagctgcctgtgcccaatgctgctgagaagaccacctacaaccaccccctggccgagcggctcatccgcatcatgaacaatgctgcccagccagatggcaagatccggctggccaccctggagctgagctgcctgctgctgaagcagcaggtgctgatgtctgctggctgcatcatgaaggatgtgcacctggcctgcctggagggcgcccgggaggagagcgtgcacctggtgcgccacttctacaagggggaggacatcttcctggacatgtttgaagatgagtaccgctccatgaccatgaagcccatgaatgtggagtacctgatgatggatgccagcatcctgctgccccccaccggcacccccctgactggaattgactttgtgaagaggctgccctgtggagatgtggagaagacccggcgggccatccgggtcttcttcatgctgcggagcctgagcctgcagctgcggggggagcctgagacccagctgcccctgacccgggaggaggacctgatcaagacagatgatgtgctggacctgaacaacagcgacctgattgcctgcaccgtcatcaccaaggatggcggcatggtgcagcgcttcctggccgtggacatctaccagatgagcctggtggagccagatgtgtcccggctgggctggggcgtggtgaagtttgctggcctgctgcaggacatgcaggtgactggagtggaggatgacagccgggccctgaacatcaccatccacaagccagccagcagcccccacagcaagcccttccccatcctgcaggccaccttcatcttcagtgaccacatccgctgcatcatcgccaagcagaggctggccaagggccgcatccaggcccggaggatgaagatgcagagaattgctgccctgctggacctgcccatccagcccaccacagaggtgctgggcttcggcctgggcagcagcaccagcacccagcacctgcccttccgcttctatgaccagggccggcggggcagcagtgaccccaccgtgcagaggtctgtgtttgcctctgtggacaaggtgcccggctttgctgtggcccagtgcatcaaccagcacagcagccccagcctgagcagccagagccccccatctgccagcggcagccccagcggcagcggcagcaccagccactgtgacagcggcggcaccagcagcagcagcacccccagcacagcccagagccctgcagatgcccccatgagccctgagctgcccaagccccacctgcctgaccagctggtgattgtgaatgaaacagaggccgacagcaagcccagcaagaatgtggcccggtctgctgctgtggagacagccagcctgagccccagcctggtgcctgcccggcagcccaccatcagcctgctgtgtgaggacacagctgacaccctgtctgtggagagcctgaccctggtgccccctgtggacccccacagcctgcggagcctgaccggcatgccacccctgagcaccccagctgctgcctgcacagagcctgtgggggaggaggccgcctgtgccgagcctgtgggcacagctgaggactag

SEQ ID NO: 185265 - DNA, 3162 bp, Artificial Sequence
  derived and/or modified sequence
atgttcggccggagccggagctgggtgggcggcggccacggcaagacctctagaaacatacactcactggatcacttaaaatacctgtatcacgttctcacgaagaacactactgtcaccgagcagaacaggaacctgctggtcgaaaccatccggtcaataactgaaatcctgatctggggtgatcagaacgactcatccgtgtttgacttcttcctggagaagaatatgtttgtttttttccttaatattttgaggcaaaaaagcgggcgatatgtgtgtgtgcagctgctgcaaactctgaacattctatttgagaacatttctcatgagacatctctgtattatctgctgtcaaacaactacgtgaattccatcattgtacataaattcgatttctctgacgaggaaatcatggcttactacataagcttcctcaaaactctgtccctgaagctgaataaccatacggtccattttttctataacgagcacaccaatgattttgctctttatactgaggccatcaaatttttcaaccaccccgagtccatggtgaggattgccgtgcgaaccattactctgaacgtttacaaggtctccctggataaccaggcaatgctgcattacattagagataagaccgctgttccttacttcagcaatcttgtgtggtttataggatcccatgtaatcgaactcgacgactgcgtccagacagacgaggagcatcgcaatcgcggaaagctgagtgacctggtagctgaacatctcgatcatcttcactaccttaacgatatcctgatcattaactgcgaattcctgaacgacgttctgactgaccacctgttaaatcgcctgtttctacctctttacgtgtactcacttgaaaatcaagacaaggggggggaacggcccaagatcagcctccccgtctcgctttatctacttagccaggtctttttaataatccaccatgcccccttggtgaattcacttgcagaggtcatcctgaacggcgatttgtctgagatgtacgcgaagaccgaacaggacatacagcgatcatccgccaaacccagcattcgttgcttcataaagcccactgaaaccttggagaggtcattggagatgaataagcacaagggtaagagacgggtgcagaagcggcctaattataagaacgtcggggaagaagaggacgaggaaaaaggccccaccgaggacgcccaggaggacgctgagaaagcaaagggcaccgagggcggttcaaagggcatcaaaactagtggcgagagcgaggagatagaaatggtaataatggaaagatccaagctttccgaattggctgctagcacatctgtgcaggaacaaaatactaccgacgaagaaaagtccgctgccgcaacttgttccgagtccactcagtggtcccggccctttctggatatggtgtatcacgcgctggactctccagacgacgattatcacgccctctttgtcttatgcctactctacgcaatgtcacacaacaagggcatggatccagaaaagttggaacggatacaactccctgtccctaatgctgctgagaaaactacctacaatcatcccctcgctgagaggttgattagaatcatgaataacgccgctcagccagacggcaaaatcagattggccactcttgagttatcatgtctgttgttaaagcagcaggttttaatgagcgccgggtgcattatgaaggacgtacacctggcttgtcttgaaggggcgcgggaagagagcgtgcatctggtcaggcatttctacaaaggcgaggacatttttttggatatgttcgaagacgaataccgtagcatgaccatgaaaccaatgaacgtggaatacctgatgatggatgcatccattcttttgccaccaacaggaacgcctcttactggcattgacttcgtcaagagattgccttgtggagatgtcgagaagacccgtagagccatcagagtgttcttcatgctcagatccctatctctacaactcagaggggaacctgagacgcaactacctctcactagggaggaagacctgatcaaaactgacgacgtgctggatttgaacaattccgatcttatcgcctgcacggtgattacaaaagacggcgggatggtacagcggtttttggctgtagacatctaccaaatgtcgctggttgaacctgacgtaagtcgcctcggttggggcgttgttaagtttgctggtctcttgcaagacatgcaggtcacgggcgtggaggacgatagtagagcgctgaacatcaccattcataagccagcatcttcgcctcacagcaagccgttccctatccttcaggcaacttttattttttcagaccacattcggtgcatcattgccaaacaaaggctagccaaaggcaggattcaggctaggagaatgaaaatgcagcggattgccgctctgctagatctgccaatacagcccacaacagaggtgctcggatttggactcggatcgtctacctccactcagcacctaccgtttagattttatgaccaaggcagacggggtagctctgatcccactgtccagagatccgtatttgcctctgttgacaaggtgcctggattcgccgttgcccaatgtatcaaccagcactccagcccctcactcagctctcagtccccaccttccgcctcaggtagtccgagcgggagtgggtccacatcccactgcgactccggaggaaccagtagctctagtaccccttccactgcccagtcccctgccgacgcacccatgtcaccagagctacccaagccccacctgccagatcagctggtgatcgtaaacgaaacagaagctgatagcaagccatccaagaatgtcgcgcgcagcgctgcagtggagacagcgtcactatctccttcgctggtgcccgcgaggcagcccaccattagtttattgtgcgaggacactgcagatactctctctgtagaatctctaactctggtgccgcccgtcgacccccacagtctccgtagtctgaccggcatgccgccattatccactcctgctgcagcatgcactgaacctgtgggtgaagaagctgcttgtgctgagccagtcggcacagccgaggactag

SEQ ID NO: 185266 - DNA, 3162 bp, Artificial Sequence
  derived and/or modified sequence
atgttcggccggagccggagctgggtgggcggcggccacggcaagacctcaaggaatattcactccctggaccacctgaagtacctgtatcatgtactgactaagaacacaacagtgacagagcagaaccggaaccttctggtagagaccatcagatccattacagagatcctgatctggggtgaccagaatgactcttccgtgttcgattttttcctcgaaaagaacatgttcgtgttcttcctgaatatcctacgtcaaaagagcggcagatatgtgtgtgtccagctcctccaaaccttaaacatcctgttcgagaatatcagccatgagacaagtctctactatcttctttctaacaattatgtgaatagcattattgtccacaagttcgacttttctgacgaggaaatcatggcctactatataagtttccttaagactctgagtctgaaacttaataaccacactgtgcactttttctataatgagcatactaacgacttcgccctatacaccgaagccattaagttcttcaatcacccggagagtatggtgcggatcgcggttcgtacaataaccctcaatgtctacaaagtgtctgtggacaatcaggccatgcttcactatatccgggataaaacagccgttccatatttttcgaacctggtgtggttcattgggagccatgtcattgagcttgacgattgcgtgcaaaccgatgaggaacatagaaacagaggaaagctctccgaccttgtggcagagcacctcgaccacctacattatttgaacgacattttgattataaactgtgaatttctgaacgacgtgctcacggaccacttactgaacagacttttcctgcctctgtacgtttatagtcttgagaatcaggacaagggcggagagagacccaagattagcctacctgttagtctgtacctactttcccaggtgttcctaattatacaccatgcaccccttgtgaattctcttgctgaggtcatccttaacggcgacctatctgagatgtacgcaaagacagaacaggacatccagcggtcgagcgcaaagccttctatacgttgcttcataaagccaaccgagacgcttgaaagatctcttgaaatgaataagcataaaggcaagcggagggtacagaagaggcctaactacaagaacgtaggagaggaagaggatgaggagaaaggtccaacagaggatgcacaggaagatgcagagaaagccaagggtaccgaaggtgggtctaagggcattaagacttccggagagtccgaggagatcgagatggttatcatggaacggagcaaactttccgaactggccgcttccacatcggtgcaagagcagaatacaactgacgaggagaaaagtgccgctgccacttgctccgaaagcactcagtggtcccggcctttcctggatatggtgtaccatgctctggattcaccagacgacgactaccacgccctattcgtcctttgcttgttgtatgccatgtcccacaataaagggatggatcctgaaaagctggaacgaattcagctgcctgttcctaacgcagccgaaaaaaccacctataatcaccctcttgccgaacggcttattcgcatcatgaataatgccgcccaaccagacggtaaaatcaggcttgccacactggagttgagttgcctcctccttaaacagcaagtcctgatgtctgcaggatgcatcatgaaagacgtccacttggcgtgcctggagggagcccgagaggaatccgtgcatcttgtacgacatttctataagggcgaagacatttttctagacatgttcgaggatgagtacagatctatgaccatgaaaccaatgaacgtggagtatctgatgatggacgctagtattctcctgcctcctactggtacccctctgactgggattgacttcgtaaagcgcttaccttgcggtgatgtagaaaagacaaggcgggctataagagttttcttcatgttgcgttcactatctctgcagctgagaggtgagcctgagacccagctacctctgaccagggaagaggatctcataaagacagacgatgtgctcgatctcaacaattccgatctcattgcatgtacagttattacaaaagacggcggaatggtgcagcgattcctggctgtggacatctatcagatgtccctcgtagaacccgatgtgtccagactgggctggggcgttgtaaagtttgccggcctcttgcaggacatgcaggtcacaggagttgaggacgactcgagggccctgaatattacaatccacaagccggcctcgtctccccattcaaaaccattccctattctgcaggccacattcatcttttccgatcacatcagatgcatcattgccaaacaacggctggcaaaagggcgcattcaggctcggcggatgaaaatgcagaggatcgcggcattgttggaccttcccattcaacctacaacagaagtgttaggctttggacttggctctagtacctcgacacagcatctgccctttcgcttctatgatcaagggcgtcggggtagcagtgatcctacagtgcagcgctccgtgttcgcatccgtggataaggtacccgggtttgccgtcgcccagtgcatcaaccaacactcctctccatctctgtctagccagtccccaccaagcgccagcggctcgcctagcggttctggcagcacatcccattgtgatagcggtggcacctccagctcgagtacccccagcaccgctcaatcacccgccgacgctccaatgagtcccgaactgcccaaacctcaccttccagaccagctggtgatcgttaacgagacagaggcagactctaaaccctctaaaaacgtggcccgcagtgccgcggtggaaacagccagcttgtcaccatctctggtgcccgccaggcagcctaccatttctcttctgtgtgaagacaccgccgacacactgtcggtggagagccttacgctcgtccctccagtggatccgcactctcttcggtccctcactgggatgcccccactcagcacacctgccgcagcttgtaccgaacctgtgggtgaggaggctgcctgtgctgaaccagtcggcacggccgaggattag

SEQ ID NO: 185267 - DNA, 3162 bp, Artificial Sequence
  derived and/or modified sequence
atgttcgggagatcacgttcctgggtgggtggcggtcacggcaagacatcgcgaaacatccatagcctggatcacctaaaatatctctatcacgttctcacaaaaaacaccacagtaaccgaacaaaataggaatctgctcgtcgaaactatcagatctatcaccgagatcctcatttggggcgatcagaatgatagcagcgtatttgatttctttctggagaagaacatgttcgttttcttcctcaacatcctgaggcaaaaaagtggtcgctacgtctgcgtgcagctcctgcagacactgaatattctgttcgaaaatataagccacgagaccagcctctattacttgttgtctaataactatgtcaattctatcatcgttcacaaatttgacttctccgatgaagaaattatggcgtactacatatctttcttgaagactttatctcttaaactgaataatcatactgtccactttttctataacgagcatactaacgatttcgctctgtataccgaagctatcaaattttttaatcaccctgagtcaatggtgagaatagcagtgcgcacgattactttgaacgtgtacaaggtgtctcttgacaaccaggccatgctgcattatatcagagacaagacggccgtgccctacttttccaaccttgtatggttcatcgggagtcatgtgatcgaactggatgactgcgtgcagaccgatgaagagcatcgtaataggggcaagctttccgatttagtggctgaacatctggatcaccttcattacctgaacgacatattaatcatcaattgcgagttccttaacgatgtgttgacggaccatcttctcaatcgcctcttcctcccactttatgtgtactctcttgaaaatcaggacaaagggggagaacgaccgaagataagccttccagtgtctctatatttactgtctcaagttttcctgatcatccatcacgcacccctcgttaactcccttgccgaagtaatcctcaacggcgacctgtcggaaatgtacgccaagactgaacaggatatacagcgttcaagcgcgaagccctcgattcggtgtttcattaaacctaccgagactctggagcggagcctggaaatgaacaagcataaaggtaagcgacgcgtgcagaagcgtcccaactataaaaatgtgggagaggaggaagacgaagaaaaaggtccaactgaagacgcccaggaggatgccgaaaaggctaagggtaccgaggggggaagtaagggcatcaagactagcggggagtctgaggagattgagatggtgattatggagagatcaaagctaagtgagctcgccgcttcaacctccgttcaggagcagaatacaaccgatgaggagaagagtgccgcagccacctgcagcgagagcacccagtggtctcgtcccttcttagacatggtgtaccatgccctagatagccccgacgacgactaccacgcgcttttcgtcctgtgtctattatacgctatgagtcacaataagggcatggaccctgagaagctggaacggattcagttacctgtaccaaacgctgccgagaaaaccacttataaccaccccctggccgaaagactgattagaatcatgaataacgccgcacagcccgacggcaaaatccggcttgccacacttgagctgagttgcctcctattgaagcagcaggtgttaatgagcgctggctgtatcatgaaagacgtccatctggcttgcctggagggagcacgggaagagtctgtccatctcgtacgccatttctacaaaggggaggacatctttctggatatgttcgaagacgagtatagatccatgaccatgaagcccatgaacgtggaatatctaatgatggatgcgagcattctgctgccccctacaggcaccccactgactgggatagacttcgtaaagcggttaccttgtggagatgtggaaaagacccgcagggccatccgcgtgttttttatgctcaggtctctgagtctgcaactccgaggggagcccgagacccagctccccctgactcgcgaagaggacctcatcaagacagacgatgtgctggatctgaacaattcagatctcattgcctgcactgtcatcaccaaagacggcggaatggtccaacgcttcttggctgtagatatataccagatgtctctcgtcgagcctgatgtgagtaggctgggatggggggtggtcaaattcgctggcttgctacaggatatgcaggtgaccggagtagaagacgatagccgggctctgaatattactatacataagccagcctcctctccacactctaagccattcccgatcctgcaggcaacattcatctttagcgaccacattaggtgtatcattgctaagcagcgcttggcgaaagggaggattcaggccaggagaatgaagatgcagaggatcgctgctctcctggatctgccaatccagccaaccacggaagtccttggcttcggtcttggaagcagcacgagcacgcagcatctgccattccgcttctacgatcagggcagacgcggaagcagcgatccgaccgtacagcgaagtgtgtttgccagtgtggataaggtgcccggattcgccgtggctcaatgtattaaccagcacagcagccctagccttagcagccaatctcccccatctgcctcaggctctcccagcgggtcagggtctactagccattgtgattcgggcggaacctcaagttcctccactccatctactgcccagagcccagctgacgccccaatgagccctgagcttccaaagcctcacctgcccgatcagctggtgattgtcaatgagaccgaggccgactccaaacccagtaaaaacgtggctcggtcggcagcagtggaaaccgcttctctctcgccttctttggtgccggcacgtcagcctacaatctccctgttatgtgaggatactgcagatacgctgtcagtggagagcctaacactggtgccgccagttgacccgcattctcttcgctctctgactggcatgccacccctgtcgacgcccgcagccgcttgcactgaaccagtaggagaagaggcagcctgtgctgagcctgtcgggactgccgaggattag

SEQ ID NO: 185268 - DNA, 3162 bp, Artificial Sequence
  derived and/or modified sequence
atgtttggcaggtccaggtcgtgggtcgggggagggcatggaaaaaccagccgcaatattcattctttagatcatctcaagtatctgtatcacgttttaaccaaaaacactaccgtcacagaacagaaccggaatctgttagtggaaaccatccgcagcattaccgagattctgatatggggggaccagaatgactcttctgtttttgattttttcctggagaagaacatgttcgtgttctttttaaacatcctaagacagaaaagcggcagatacgtatgcgtgcaactgcttcaaaccttaaatattctgttcgagaacataagccacgaaacttcactgtattatctactgagcaataattatgtgaactctattattgtgcataagttcgactttagtgatgaagagataatggcttattacatatctttcctgaagaccctgtccctgaagctgaataaccacaccgtgcactttttttacaacgaacatacaaatgacttcgcgctctacaccgaagctattaaattctttaaccatccagagtctatggtgaggatcgccgtcagaaccatcaccctcaacgtctacaaagttagcgtcgataatcaggcaatgctgcattacatcagggacaagacagcggtaccctacttttcaaaccttgtgtggttcatcggctctcatgtgatcgagctcgatgactgcgtgcaaacggatgaggaacacagaaataggggaaagttaagcgacctggtagcagagcatctggaccatctccattacctcaatgatatcttgattattaattgcgaatttctgaacgacgttctcaccgatcaccttctcaaccggcttttcctgccgctgtatgtatattctttggaaaatcaggataaagggggtgaacgacctaaaatatctttgcccgttagtctatatcttctgtcacaggtgttcctgatcatccaccatgccccacttgtcaactcactcgcggaggtaatactaaatggtgacctttccgaaatgtacgccaaaactgaacaagatatccaacgatcaagtgcgaaaccatcaatacgctgtttcattaagccaaccgagacactggagcgttcccttgagatgaacaaacataaaggtaaacgtagggtgcagaaacgtcctaactacaagaatgtcggcgaggaggaggatgaggagaaaggacctacggaggatgcacaggaggacgcagagaaggcaaaggggacagaagggggttccaaaggcatcaaaacatccggggagagtgaagagattgagatggtcataatggaacggtccaagctgtccgaactggcagccagcacatcggtccaggaacagaacacgaccgacgaggagaaaagcgccgctgcaacctgttctgaaagtacgcagtggtcacggccatttctggacatggtgtaccacgctttggattctcccgacgatgactatcacgcactgtttgtcttgtgtctcctttatgccatgagtcacaataaaggaatggacccagagaagcttgagcgaatccagctcccagtccccaacgccgcagaaaaaactacctataatcatccgctcgcagaacggctcatccgcattatgaacaacgcggctcagcccgatggtaagatccggctggctactctggaattgtcgtgtcttctcttgaaacagcaggtcctgatgtcagccggatgtattatgaaggacgtccatctagcatgtctggaaggcgcacgtgaggaatccgtacacttggtgaggcacttctacaagggtgaagacatcttcctcgacatgtttgaggatgaatacagatccatgaccatgaagcccatgaatgtagaatatcttatgatggacgcctcaattctgttaccacccacaggcacacccctcacgggcattgacttcgtgaaaagactgccctgcggggacgtcgagaagacccggcgtgccatcagggtctttttcatgctcagatcactgagtcttcagctgcgcggagagcccgagacacagctgcccctcactagggaggaggacctcataaaaactgacgatgttctggacctgaataacagtgatctgatagcctgtactgtgattaccaaggatggcggaatggttcagcgatttttggcagtggatatttaccagatgagtctcgtggaacctgatgtatcccggctcggctggggggtcgtcaagtttgctggcctgttgcaggatatgcaggtgaccggcgtggaagatgattcccgagcactgaacatcacaatccacaagcccgcatcatcgccacattccaaaccctttcccatcctgcaagccaccttcatttttagcgaccacatccgctgcataatcgctaaacagagactcgctaaaggcagaatccaagccagaagaatgaaaatgcaaaggattgctgccctgttagatctgcccattcagcctactaccgaggtgctcggctttggcctggggagcagtacctcgactcagcatctgccatttcggttttacgatcaaggcagaaggggatcatctgaccctactgtgcagaggtccgtgtttgcaagcgtcgacaaagtgcccggattcgctgttgcccagtgtatcaatcaacatagtagtccctcattatcgagtcagagtccaccctcagcatcaggatcacctagtggatccggctcgacatcacattgtgactccgggggaacatcatcatctagtactccgtctaccgcccagtcccctgctgatgcgccaatgtctcccgagctcccgaagcctcatctcccagatcaacttgtgatagtgaacgagaccgaggctgatagtaagccttcgaagaacgtagccaggagcgccgctgtggagacagccagtctgagcccttctctggtacctgcccgtcagcccacaatctccctgctatgtgaagacacggcggataccctttctgtggagtcactgaccttggtgccaccagtggaccctcactccttgcgtagcctgaccggtatgccccctctgtccactcctgcagctgcctgtactgagcccgtcggcgaagaagccgcttgtgccgaacccgttggcaccgccgaagattag

SEQ ID NO: 185269 - DNA, 6891 bp, Artificial Sequence
  derived and/or modified sequence
aactgcatttcccagcgccccacgcggcggcggccgtaaagcgcggcggtcgaacggccggttccggctgaatgtcagtgctgggctgtgggccggggaggaaggcggctcgcggttcctccaccgcctccgccgccgcatcctccgcttgtgctaccgccgcgggcgctgggccgctctgctggtccggcatgagaccgtgagacgagagacgggtcggggccgccgacatgtttggccgctcgcggagctgggtgggcgggggccatggcaagacttcccgcaacatccactccttggaccacctcaagtatctgtaccacgttttgaccaaaaacaccacagtcacagaacagaaccggaacctgctagtggagaccatccgttccatcactgagatcctgatctggggagatcaaaatgacagctctgtatttgacttcttcctggagaagaatatgtttgttttcttcttgaacatcttgcggcaaaagtcgggccgttacgtgtgcgttcagctgctgcagaccttgaacatcctctttgagaacatcagtcacgagacctcactttattatttgctctcaaataactacgtaaattctatcatcgttcataaatttgacttttctgatgaggagattatggcctattatatatcgttcctgaaaacactttcgttaaaactcaacaaccacactgtccatttcttttataatgagcacaccaatgactttgccctgtacacagaagccatcaagtttttcaaccaccctgaaagcatggttagaattgctgtaagaaccataactttgaatgtctataaagtgtcattggataaccaggccatgctgcactacatccgagataaaactgctgttccttacttctccaatttggtctggttcattgggagccatgtgatcgaactcgatgactgcgtgcagactgatgaggagcatcggaatcggggtaaactgagtgatctggtggcagagcacctagaccacctgcactatctcaatgacatcctgatcatcaactgtgagttcctcaacgatgtgctcactgaccacctgctcaacaggctcttcctgcccctctacgtgtactcactggagaaccaggacaagggaggagaacggccgaaaattagcctgccggtgtctctttatcttctgtcacaggtcttcttaattatacatcatgcaccgctggtgaactcgttagctgaagtcattctgaatggtgatctgtctgagatgtacgctaagactgaacaggatattcagagaagttctgccaagcccagcattcggtgcttcattaaacccaccgagacactcgagcggtcccttgagatgaacaagcacaagggcaagaggcgggtgcaaaagagacccaactacaaaaacgttggggaagaagaagatgaggagaaagggcccaccgaggatgcccaagaagacgccgagaaggctaaaggtacagagggtggttcaaaaggcatcaagacgagtggggagagtgaagagatcgagatggtgatcatggagcgtagcaagctctcagagctggccgccagcacctccgtgcaggagcagaacaccacggacgaggagaaaagcgccgccgccacctgctctgagagcacgcaatggagcagacccttcctggatatggtgtaccacgcgctggacagcccggatgatgattaccatgccctgttcgtgctctgcctcctctatgccatgtctcataataaaggcatggatcctgaaaaattagagcgaatccagctccccgtgccaaatgcggccgagaagaccacctacaaccacccgctagctgaaagactcatcaggatcatgaacaacgctgcccagccagatgggaagatccggctggcgacgctggagctgagctgcctgcttctgaagcagcaagtcctgatgagtgctggctgcatcatgaaggacgtgcacctggcctgcctggagggtgcgagagaagaaagtgttcaccttgtacgacatttttataagggagaagacatttttttggacatgtttgaagatgagtataggagcatgacaatgaagcccatgaacgtggaatatctcatgatggacgcctccatcctgctgcccccaacaggcacgccactgacgggcattgacttcgtgaagcggctgccgtgtggcgatgtggagaagacccggcgggccatccgggtgttcttcatgctgcgttccctgtcactgcaattgcgaggggagcctgagacacagttgccgctgactcgggaggaggacctgatcaagactgatgatgtcctggatctgaataacagcgacttgattgcatgtacagtgatcaccaaggatggcggcatggtccagcgattcctggctgtggatatttaccagatgagtttggtggagcctgatgtgtccaggcttggctggggagtggtcaagtttgcaggcctattgcaggacatgcaggtgactggcgtggaggacgacagccgtgccctgaacatcaccatccacaagcctgcgtccagcccccattccaagcccttccccatcctccaggccaccttcatcttctcagaccacatccgctgcatcatcgccaagcagcgcctggccaaaggccgcatccaggcaaggcgcatgaagatgcagagaatagctgccctcctggacctcccaatccagcccaccactgaagtcctggggtttggactcggctcctccacctccactcagcacctgcctttccgcttctacgaccaggggcgccggggcagcagcgaccccacagtgcagcgctccgtgtttgcatcggtggacaaggtgccaggcttcgccgtggcccagtgcataaaccagcacagctccccgtccctgtcctcacagtcgccaccctccgccagcgggagccccagcggcagcgggagcaccagccactgcgactctggaggcaccagctcgtcctccaccccctccacagcccagagtccagcagatgcccccatgagtccagaactgcctaagcctcaccttcctgaccagttggtaatcgtcaacgaaacggaagcagactctaagcccagcaagaacgtggccaggagcgcagccgtggagacagccagcctgtcccccagcctcgtccctgcccggcagcccaccatttccctgctctgcgaggacacggctgacacgctgagcgtcgaatcgctgacccttgtccccccagttgacccccacagcctccgcagcctcaccggcatgcccccgctgtccacgccggctgccgcctgcacagagcccgtgggcgaagaggctgcatgtgctgagcctgtgggcaccgctgaggactgagtcagtgccggggcctccctttgtgtgtgtggccccgctggtagggaccccagtgccgctgactggcaagacacactgggagcacccaccattctgtgcggcccccagcagccatctcaaccacctatccctgcgctcccttgaatgggaagaagccccacgttgtccttgaattcctttttcactttgcatctcttcacgtgcaggctgggaccagcggagacaccgcggcgaatgcagatgactgcaccggccactcagggagctgcctgggctccgtgtctctgagccccgggtggcaggacccaccggcacctctttcttcctctgtcatatggctcctctgtcaccagccccagtgtgcacagaagaattggaccaggtcactgtacgtagaaatttgtagaaaagcagacttagataaacatctcctttggatatttatttccgcttttggcagcaggtgaacatttatttttaaaacttctatttaaaagaagtccaaaaacatcaacactaaggtttgatgtcatgtgaaaagtgtaataataacagttaagatttcatgatcattttcactggacctttcctgatattttgtttcagagttcttagtgtggctttttccatttatttaagtgattctttgttactcactaactctgcaagcctgtggaataatgaagtaccttcctggaaagtttggattattttttaaacaaaaacaagggagatacatgtattctcaggtacacacagagctgagagggctgaatggttttctgctatagcagccgagaggcctcccatcatggaaagatttctccaggaaaaggaggaatgtagccagctccccactcaggacgcttcctcatttctcttcaccaaaaccaaacagagacagcttccagcaccttcttcagtgttaccatctctaagaaggaaccagttgggaccgtgaagactcccgaccctgtggccatgatggaaatcaaaggaagacaccctctacgtcacctgccctcgactgtgtgtgcccacatgtgccgagagatggcccagagccagttcccctccagctgcaagggcatggtgtccccagagctctgagtctgtcactctccctctgctactgctgctgatctgaatatggaaaccccatggttcccttccccattcggactgggtgtgtacaagcaaggacccagatgcatcagacacagcccccaagatgttcctttctactcggccagctcgggagccagacacagcactcacagcccaggccgtgatccaccctccccaagtccaccagggccagcggcccctcacctctctggtcactggtgagaccttccacaactttcctccagacctgccagcagatgtgcccaccaggggcattaggtatccgccggagcctggccatagggtagtctcgggagccgcgctgagatcttttgccacctgcattttagaagaacatggtctctgtctcctcggcccagccagctgtcccggcaaggcctgccgagggcagttttcaacctcatgaaggaaacacagtcctgccaaggagggggagtggcgcccatggggacaggcctcagtccttagaagccctctgggtagctgtgcccacccagccttcatggctgcaggtacaaggacctttgcttccatagagaaaacgcacagctcagaaagggggccacatgggcagaaacccaaaggaaggacaaaccacgaccaccgtggccatctgcagaatccctggaagagaaggaaggcagggtggagcggggggaagaccatcatggagagaaggaccacagcatcaggagacgggacacgccacacccagcaggcagcctgtgtgttgcttaattttttaagagcaagaggggtagagaggatcaagctggccctggctggagatggctagcccctgagacatgcacttctggttttgaaatgactctgtctgtggggcagcagaaactagagaaggcaagtggctgccccaccccaaggcgtgaccaggaggaacagcctgcagctcactccatgccacacgggtgggccaccagcctgctgtcagaagtctctgggctccaactggtcttgtaaccactgagcactgaaggagagaggtcttggtcagggctggacagcatgcccgggaggaccagcagaggattaaaggtgactgggaggaccagcggaggataaaagacactgctcagggcagggcttctaccctgcatccctggccaagaaaagggcagtccccatgtgggcttgcagggtcactctcaggggcctctttcagctggggctggcaacttgcgtctgggggacacctccaggtgtgtggggtgaggatttcctataaccagggctcccagaagctttgcttatgtaaggaggtctgggagccagcccattggaggccaccagccattttggcttcaaaggaccccacctcacccaggtctcagcggcagtgggcacagctatgtcttcaggagctcccgtcaaacctcatagctggggcgctcccagacaggccagtccagacaggacacgctgggcccctggcatccagaggaagagccaggagtgtgggaaggcccacagtgggggctgtggcttctgacactcaggtcatagcctcagaggtctgaggtcagcccccacagacccatccggcccgccccccaagtccctgcagagagcacttagagttatggcccaggccctggtccacccttcccctgtgcacctccggctgggtttgccaagtcagggagcagggctggccgcaggaactcccaaaccttggctttgaatattgttgtggaggtgtgctcgtccctttctggacgtgcaaggtacctgtcccagcaggtcagatggggccagctgaggcgctcccccaggcaggaagggccagccttcaccatcgcgtgggattgggaggaggggcctccgtgagcagcccctcctctgccgctgtcccagcccagtccctctcccggagccttggcagcctcccacaacccagacacttgcgttcacaagcaacctaaggggcaggtgaagaagcgcagccctgccagacgcgctagattcctctaaggtctctgagatgcaccgttttttaaaaaggcgtggggtgaactgattttgatcttcttgtctagatgcaataaataaatctgaagcatttaatgtagtcatcttgacattgggcctacactgtacgagttccttatgtttccttgagctaaaaatatgtaaataatttttgtcccagtgagaaccgagggttagaaaacctcgatgcctctgagcctcgggaccgctctagggaagtacctgctttcgccagcatgactcatgcttcgtgggtactgaacacgagggtggaaatgaaaactggaacttccttgtaaatttaaacttggcaataaaagagaaaaaaagttaccaagaa

SEQ ID NO: 185270 - DNA, 6891 bp, Artificial Sequence
  derived and/or modified sequence
aactgcatttcccagcgccccacgcggcggcggccgtaaagcgcggcggtcgaacggccggttccggctgaatgtcagtgctgggctgtgggccggggaggaaggcggctcgcggttcctccaccgcctccgccgccgcatcctccgcttgtgctaccgccgcgggcgctgggccgctctgctggtccggcatgagaccgtgagacgagagacgggtcggggccgccgacatgtttggccgctcgcggagctgggtgggcgggggccatggcaagacttcccgcaacatccactccttggaccacctcaagtatctgtaccacgttttgaccaaaaacaccacagtcacagaacagaaccggaacctgctagtggagaccatccgttccatcactgagatcctgatctggggagatcaaaatgacagctctgtatttgacttcttcctggagaagaatatgtttgttttcttcttgaacatcttgcggcaaaagtcgggccgttacgtgtgcgttcagctgctgcagaccttgaacatcctctttgagaacatcagtcacgagacctcactttattatttgctctcaaataactacgtaaattctatcatcgttcataaatttgacttttctgatgaggagattatggcctattatatatcgttcctgaaaacactttcgttaaaactcaacaaccacactgtccatttcttttataatgagcacaccaatgactttgccctgtacacagaagccatcaagtttttcaaccaccctgaaagcatggttagaattgctgtaagaaccataactttgaatgtctataaagtctcagtggataaccaggccatgctgcactacatccgagataaaactgctgttccttacttctccaatttggtctggttcattgggagccatgtgatcgaactcgatgactgcgtgcagactgatgaggagcatcggaatcggggtaaactgagtgatctggtggcagagcacctagaccacctgcactatctcaatgacatcctgatcatcaactgtgagttcctcaacgatgtgctcactgaccacctgctcaacaggctcttcctgcccctctacgtgtactcactggagaaccaggacaagggaggagaacggccgaaaattagcctgccggtgtctctttatcttctgtcacaggtcttcttaattatacatcatgcaccgctggtgaactcgttagctgaagtcattctgaatggtgatctgtctgagatgtacgctaagactgaacaggatattcagagaagttctgccaagcccagcattcggtgcttcattaaacccaccgagacactcgagcggtcccttgagatgaacaagcacaagggcaagaggcgggtgcaaaagagacccaactacaaaaacgttggggaagaagaagatgaggagaaagggcccaccgaggatgcccaagaagacgccgagaaggctaaaggtacagagggtggttcaaaaggcatcaagacgagtggggagagtgaagagatcgagatggtgatcatggagcgtagcaagctctcagagctggccgccagcacctccgtgcaggagcagaacaccacggacgaggagaaaagcgccgccgccacctgctctgagagcacgcaatggagcagacccttcctggatatggtgtaccacgcgctggacagcccggatgatgattaccatgccctgttcgtgctctgcctcctctatgccatgtctcataataaaggcatggatcctgaaaaattagagcgaatccagctccccgtgccaaatgcggccgagaagaccacctacaaccacccgctagctgaaagactcatcaggatcatgaacaacgctgcccagccagatgggaagatccggctggcgacgctggagctgagctgcctgcttctgaagcagcaagtcctgatgagtgctggctgcatcatgaaggacgtgcacctggcctgcctggagggtgcgagagaagaaagtgttcaccttgtacgacatttttataagggagaagacatttttttggacatgtttgaagatgagtataggagcatgacaatgaagcccatgaacgtggaatatctcatgatggacgcctccatcctgctgcccccaacaggcacgccactgacgggcattgacttcgtgaagcggctgccgtgtggcgatgtggagaagacccggcgggccatccgggtgttcttcatgctgcgttccctgtcactgcaattgcgaggggagcctgagacacagttgccgctgactcgggaggaggacctgatcaagactgatgatgtcctggatctgaataacagcgacttgattgcatgtacagtgatcaccaaggatggcggcatggtccagcgattcctggctgtggatatttaccagatgagtttggtggagcctgatgtgtccaggcttggctggggagtggtcaagtttgcaggcctattgcaggacatgcaggtgactggcgtggaggacgacagccgtgccctgaacatcaccatccacaagcctgcgtccagcccccattccaagcccttccccatcctccaggccaccttcatcttctcagaccacatccgctgcatcatcgccaagcagcgcctggccaaaggccgcatccaggcaaggcgcatgaagatgcagagaatagctgccctcctggacctcccaatccagcccaccactgaagtcctggggtttggactcggctcctccacctccactcagcacctgcctttccgcttctacgaccaggggcgccggggcagcagcgaccccacagtgcagcgctccgtgtttgcatcggtggacaaggtgccaggcttcgccgtggcccagtgcataaaccagcacagctccccgtccctgtcctcacagtcgccaccctccgccagcgggagccccagcggcagcgggagcaccagccactgcgactctggaggcaccagctcgtcctccaccccctccacagcccagagtccagcagatgcccccatgagtccagaactgcctaagcctcaccttcctgaccagttggtaatcgtcaacgaaacggaagcagactctaagcccagcaagaacgtggccaggagcgcagccgtggagacagccagcctgtcccccagcctcgtccctgcccggcagcccaccatttccctgctctgcgaggacacggctgacacgctgagcgtcgaatcgctgacccttgtccccccagttgacccccacagcctccgcagcctcaccggcatgcccccgctgtccacgccggctgccgcctgcacagagcccgtgggcgaagaggctgcatgtgctgagcctgtgggcaccgctgaggactgagtcagtgccggggcctccctttgtgtgtgtggccccgctggtagggaccccagtgccgctgactggcaagacacactgggagcacccaccattctgtgcggcccccagcagccatctcaaccacctatccctgcgctcccttgaatgggaagaagccccacgttgtccttgaattcctttttcactttgcatctcttcacgtgcaggctgggaccagcggagacaccgcggcgaatgcagatgactgcaccggccactcagggagctgcctgggctccgtgtctctgagccccgggtggcaggacccaccggcacctctttcttcctctgtcatatggctcctctgtcaccagccccagtgtgcacagaagaattggaccaggtcactgtacgtagaaatttgtagaaaagcagacttagataaacatctcctttggatatttatttccgcttttggcagcaggtgaacatttatttttaaaacttctatttaaaagaagtccaaaaacatcaacactaaggtttgatgtcatgtgaaaagtgtaataataacagttaagatttcatgatcattttcactggacctttcctgatattttgtttcagagttcttagtgtggctttttccatttatttaagtgattctttgttactcactaactctgcaagcctgtggaataatgaagtaccttcctggaaagtttggattattttttaaacaaaaacaagggagatacatgtattctcaggtacacacagagctgagagggctgaatggttttctgctatagcagccgagaggcctcccatcatggaaagatttctccaggaaaaggaggaatgtagccagctccccactcaggacgcttcctcatttctcttcaccaaaaccaaacagagacagcttccagcaccttcttcagtgttaccatctctaagaaggaaccagttgggaccgtgaagactcccgaccctgtggccatgatggaaatcaaaggaagacaccctctacgtcacctgccctcgactgtgtgtgcccacatgtgccgagagatggcccagagccagttcccctccagctgcaagggcatggtgtccccagagctctgagtctgtcactctccctctgctactgctgctgatctgaatatggaaaccccatggttcccttccccattcggactgggtgtgtacaagcaaggacccagatgcatcagacacagcccccaagatgttcctttctactcggccagctcgggagccagacacagcactcacagcccaggccgtgatccaccctccccaagtccaccagggccagcggcccctcacctctctggtcactggtgagaccttccacaactttcctccagacctgccagcagatgtgcccaccaggggcattaggtatccgccggagcctggccatagggtagtctcgggagccgcgctgagatcttttgccacctgcattttagaagaacatggtctctgtctcctcggcccagccagctgtcccggcaaggcctgccgagggcagttttcaacctcatgaaggaaacacagtcctgccaaggagggggagtggcgcccatggggacaggcctcagtccttagaagccctctgggtagctgtgcccacccagccttcatggctgcaggtacaaggacctttgcttccatagagaaaacgcacagctcagaaagggggccacatgggcagaaacccaaaggaaggacaaaccacgaccaccgtggccatctgcagaatccctggaagagaaggaaggcagggtggagcggggggaagaccatcatggagagaaggaccacagcatcaggagacgggacacgccacacccagcaggcagcctgtgtgttgcttaattttttaagagcaagaggggtagagaggatcaagctggccctggctggagatggctagcccctgagacatgcacttctggttttgaaatgactctgtctgtggggcagcagaaactagagaaggcaagtggctgccccaccccaaggcgtgaccaggaggaacagcctgcagctcactccatgccacacgggtgggccaccagcctgctgtcagaagtctctgggctccaactggtcttgtaaccactgagcactgaaggagagaggtcttggtcagggctggacagcatgcccgggaggaccagcagaggattaaaggtgactgggaggaccagcggaggataaaagacactgctcagggcagggcttctaccctgcatccctggccaagaaaagggcagtccccatgtgggcttgcagggtcactctcaggggcctctttcagctggggctggcaacttgcgtctgggggacacctccaggtgtgtggggtgaggatttcctataaccagggctcccagaagctttgcttatgtaaggaggtctgggagccagcccattggaggccaccagccattttggcttcaaaggaccccacctcacccaggtctcagcggcagtgggcacagctatgtcttcaggagctcccgtcaaacctcatagctggggcgctcccagacaggccagtccagacaggacacgctgggcccctggcatccagaggaagagccaggagtgtgggaaggcccacagtgggggctgtggcttctgacactcaggtcatagcctcagaggtctgaggtcagcccccacagacccatccggcccgccccccaagtccctgcagagagcacttagagttatggcccaggccctggtccacccttcccctgtgcacctccggctgggtttgccaagtcagggagcagggctggccgcaggaactcccaaaccttggctttgaatattgttgtggaggtgtgctcgtccctttctggacgtgcaaggtacctgtcccagcaggtcagatggggccagctgaggcgctcccccaggcaggaagggccagccttcaccatcgcgtgggattgggaggaggggcctccgtgagcagcccctcctctgccgctgtcccagcccagtccctctcccggagccttggcagcctcccacaacccagacacttgcgttcacaagcaacctaaggggcaggtgaagaagcgcagccctgccagacgcgctagattcctctaaggtctctgagatgcaccgttttttaaaaaggcgtggggtgaactgattttgatcttcttgtctagatgcaataaataaatctgaagcatttaatgtagtcatcttgacattgggcctacactgtacgagttccttatgtttccttgagctaaaaatatgtaaataatttttgtcccagtgagaaccgagggttagaaaacctcgatgcctctgagcctcgggaccgctctagggaagtacctgctttcgccagcatgactcatgcttcgtgggtactgaacacgagggtggaaatgaaaactggaacttccttgtaaatttaaacttggcaataaaagagaaaaaaagttaccaagaa

SEQ ID NO: 185271 - DNA, 3162 bp, Artificial Sequence
  derived and/or modified sequence
atgttcggcagaagcagaagctgggtgggcggcggccacggcaagaccagcagaaacatccacagcctggaccacctgaagtacctgtaccacgtgctgaccaagaacaccaccgtgaccgagcagaacagaaacctgctggtggagaccatcagaagcatcaccgagatcctgatctggggcgaccagaacgacagcagcgtgttcgacttcttcctggagaagaacatgttcgtgttcttcctgaacatcctgagacagaagagcggcagatacgtgtgcgtgcagctgctgcagaccctgaacatcctgttcgagaacatcagccacgagaccagcctgtactacctgctgagcaacaactacgtgaacagcatcatcgtgcacaagttcgacttcagcgacgaggagatcatggcctactacatcagcttcctgaagaccctgagcctgaagctgaacaaccacaccgtgcacttcttctacaacgagcacaccaacgacttcgccctgtacaccgaggccatcaagttcttcaaccaccccgagagcatggtgagaatcgccgtgagaaccatcaccctgaacgtgtacaaggtgagcctggacaaccaggccatgctgcactacatcagagacaagaccgccgtgccctacttcagcaacctggtgtggttcatcggcagccacgtgatcgagctggacgactgcgtgcagaccgacgaggagcacagaaacagaggcaagctgagcgacctggtggccgagcacctggaccacctgcactacctgaacgacatcctgatcatcaactgcgagttcctgaacgacgtgctgaccgaccacctgctgaacagactgttcctgcccctgtacgtgtacagcctggagaaccaggacaagggcggcgagagacccaagatcagcctgcccgtgagcctgtacctgctgagccaggtgttcctgatcatccaccacgcccccctggtgaacagcctggccgaggtgatcctgaacggcgacctgagcgagatgtacgccaagaccgagcaggacatccagagaagcagcgccaagcccagcatcagatgcttcatcaagcccaccgagaccctggagagaagcctggagatgaacaagcacaagggcaagagaagagtgcagaagagacccaactacaagaacgtgggcgaggaggaggacgaggagaagggccccaccgaggacgcccaggaggacgccgagaaggccaagggcaccgagggcggcagcaagggcatcaagaccagcggcgagagcgaggagatcgagatggtgatcatggagagaagcaagctgagcgagctggccgccagcaccagcgtgcaggagcagaacaccaccgacgaggagaagagcgccgccgccacctgcagcgagagcacccagtggagcagacccttcctggacatggtgtaccacgccctggacagccccgacgacgactaccacgccctgttcgtgctgtgcctgctgtacgccatgagccacaacaagggcatggaccccgagaagctggagagaatccagctgcccgtgcccaacgccgccgagaagaccacctacaaccaccccctggccgagagactgatcagaatcatgaacaacgccgcccagcccgacggcaagatcagactggccaccctggagctgagctgcctgctgctgaagcagcaggtgctgatgagcgccggctgcatcatgaaggacgtgcacctggcctgcctggagggcgccagagaggagagcgtgcacctggtgagacacttctacaagggcgaggacatcttcctggacatgttcgaggacgagtacagaagcatgaccatgaagcccatgaacgtggagtacctgatgatggacgccagcatcctgctgccccccaccggcacccccctgaccggcatcgacttcgtgaagagactgccctgcggcgacgtggagaagaccagaagagccatcagagtgttcttcatgctgagaagcctgagcctgcagctgagaggcgagcccgagacccagctgcccctgaccagagaggaggacctgatcaagaccgacgacgtgctggacctgaacaacagcgacctgatcgcctgcaccgtgatcaccaaggacggcggcatggtgcagagattcctggccgtggacatctaccagatgagcctggtggagcccgacgtgagcagactgggctggggcgtggtgaagttcgccggcctgctgcaggacatgcaggtgaccggcgtggaggacgacagcagagccctgaacatcaccatccacaagcccgccagcagcccccacagcaagcccttccccatcctgcaggccaccttcatcttcagcgaccacatcagatgcatcatcgccaagcagagactggccaagggcagaatccaggccagaagaatgaagatgcagagaatcgccgccctgctggacctgcccatccagcccaccaccgaggtgctgggcttcggcctgggcagcagcaccagcacccagcacctgcccttcagattctacgaccagggcagaagaggcagcagcgaccccaccgtgcagagaagcgtgttcgccagcgtggacaaggtgcccggcttcgccgtggcccagtgcatcaaccagcacagcagccccagcctgagcagccagagcccccccagcgccagcggcagccccagcggcagcggcagcaccagccactgcgacagcggcggcaccagcagcagcagcacccccagcaccgcccagagccccgccgacgcccccatgagccccgagctgcccaagccccacctgcccgaccagctggtgatcgtgaacgagaccgaggccgacagcaagcccagcaagaacgtggccagaagcgccgccgtggagaccgccagcctgagccccagcctggtgcccgccagacagcccaccatcagcctgctgtgcgaggacaccgccgacaccctgagcgtggagagcctgaccctggtgccccccgtggacccccacagcctgagaagcctgaccggcatgccccccctgagcacccccgccgccgcctgcaccgagcccgtgggcgaggaggccgcctgcgccgagcccgtgggcaccgccgaggactag

SEQ ID NO: 185272 - DNA, 3162 bp, Artificial Sequence
  derived and/or modified sequence
atgttcggcagaagcagaagctgggtgggcggcggccacggcaagaccagcagaaacatccacagcctggaccacctgaagtacctgtaccacgtgctgaccaagaacaccaccgtgaccgagcagaacagaaacctgctggtggagaccatcagaagcatcaccgagatcctgatctggggcgaccagaacgacagcagcgtgttcgacttcttcctggagaagaacatgttcgtgttcttcctgaacatcctgagacagaagagcggcagatacgtgtgcgtgcagctgctgcagaccctgaacatcctgttcgagaacatcagccacgagaccagcctgtactacctgctgagcaacaactacgtgaacagcatcatcgtgcacaagttcgacttcagcgacgaggagatcatggcctactacatcagcttcctgaagaccctgagcctgaagctgaacaaccacaccgtgcacttcttctacaacgagcacaccaacgacttcgccctgtacaccgaggccatcaagttcttcaaccaccccgagagcatggtgagaatcgccgtgagaaccatcaccctgaacgtgtacaaggtgagcgtggacaaccaggccatgctgcactacatcagagacaagaccgccgtgccctacttcagcaacctggtgtggttcatcggcagccacgtgatcgagctggacgactgcgtgcagaccgacgaggagcacagaaacagaggcaagctgagcgacctggtggccgagcacctggaccacctgcactacctgaacgacatcctgatcatcaactgcgagttcctgaacgacgtgctgaccgaccacctgctgaacagactgttcctgcccctgtacgtgtacagcctggagaaccaggacaagggcggcgagagacccaagatcagcctgcccgtgagcctgtacctgctgagccaggtgttcctgatcatccaccacgcccccctggtgaacagcctggccgaggtgatcctgaacggcgacctgagcgagatgtacgccaagaccgagcaggacatccagagaagcagcgccaagcccagcatcagatgcttcatcaagcccaccgagaccctggagagaagcctggagatgaacaagcacaagggcaagagaagagtgcagaagagacccaactacaagaacgtgggcgaggaggaggacgaggagaagggccccaccgaggacgcccaggaggacgccgagaaggccaagggcaccgagggcggcagcaagggcatcaagaccagcggcgagagcgaggagatcgagatggtgatcatggagagaagcaagctgagcgagctggccgccagcaccagcgtgcaggagcagaacaccaccgacgaggagaagagcgccgccgccacctgcagcgagagcacccagtggagcagacccttcctggacatggtgtaccacgccctggacagccccgacgacgactaccacgccctgttcgtgctgtgcctgctgtacgccatgagccacaacaagggcatggaccccgagaagctggagagaatccagctgcccgtgcccaacgccgccgagaagaccacctacaaccaccccctggccgagagactgatcagaatcatgaacaacgccgcccagcccgacggcaagatcagactggccaccctggagctgagctgcctgctgctgaagcagcaggtgctgatgagcgccggctgcatcatgaaggacgtgcacctggcctgcctggagggcgccagagaggagagcgtgcacctggtgagacacttctacaagggcgaggacatcttcctggacatgttcgaggacgagtacagaagcatgaccatgaagcccatgaacgtggagtacctgatgatggacgccagcatcctgctgccccccaccggcacccccctgaccggcatcgacttcgtgaagagactgccctgcggcgacgtggagaagaccagaagagccatcagagtgttcttcatgctgagaagcctgagcctgcagctgagaggcgagcccgagacccagctgcccctgaccagagaggaggacctgatcaagaccgacgacgtgctggacctgaacaacagcgacctgatcgcctgcaccgtgatcaccaaggacggcggcatggtgcagagattcctggccgtggacatctaccagatgagcctggtggagcccgacgtgagcagactgggctggggcgtggtgaagttcgccggcctgctgcaggacatgcaggtgaccggcgtggaggacgacagcagagccctgaacatcaccatccacaagcccgccagcagcccccacagcaagcccttccccatcctgcaggccaccttcatcttcagcgaccacatcagatgcatcatcgccaagcagagactggccaagggcagaatccaggccagaagaatgaagatgcagagaatcgccgccctgctggacctgcccatccagcccaccaccgaggtgctgggcttcggcctgggcagcagcaccagcacccagcacctgcccttcagattctacgaccagggcagaagaggcagcagcgaccccaccgtgcagagaagcgtgttcgccagcgtggacaaggtgcccggcttcgccgtggcccagtgcatcaaccagcacagcagccccagcctgagcagccagagcccccccagcgccagcggcagccccagcggcagcggcagcaccagccactgcgacagcggcggcaccagcagcagcagcacccccagcaccgcccagagccccgccgacgcccccatgagccccgagctgcccaagccccacctgcccgaccagctggtgatcgtgaacgagaccgaggccgacagcaagcccagcaagaacgtggccagaagcgccgccgtggagaccgccagcctgagccccagcctggtgcccgccagacagcccaccatcagcctgctgtgcgaggacaccgccgacaccctgagcgtggagagcctgaccctggtgccccccgtggacccccacagcctgagaagcctgaccggcatgccccccctgagcacccccgccgccgcctgcaccgagcccgtgggcgaggaggccgcctgcgccgagcccgtgggcaccgccgaggactag

SEQ ID NO: 185273 - protein, 424 aa, Artificial Sequence
  derived and/or modified sequence
MATLSFVFLLLGAVSWPPASASGQEFWPGQSAADILSGAASRRRYLLYDVNPPEGFNLRRDVYIRIASLLKTLLKTEEWVLVLPPWGRLYHWQSPDIHQVRIPWSEFFDLPSLNKNIPVIEYEQFIAESGGPFIDQVYVLQSYAEGWKEGTWEEKVDERPCIDQLLYSQDKHEYYRGWFWGYEETRGLNVSCLSVQGSASIVAPLLLRNTSARSVMLDRAENLLHDHYGGKEYWDTRRSMVFARHLREVGDEFRSRHLNSTDDADRIPFQEDWMKMKVKLGSALGGPYLGVHLRRKDFIWGHRQDVPSLEGAVRKIRSLMKTHRLDKVFVATDAVRKEYEELKKLLPEMVRFEPTWEELELYKDGGVAIIDQWICAHARCLPTSLSAESGSGGFQRFFCPKYSVSEQMVACVHSGHFHTVCLLV

SEQ ID NO: 185274 - DNA, 1275 bp, Artificial Sequence
  derived and/or modified sequence
atggccaccctgagcttcgtgttcctgctgctgggcgccgtgagctggccccccgccagcgccagcggccaggagttctggcccggccagagcgccgccgacatcctgagcggcgccgccagcagaagaagatacctgctgtacgacgtgaacccccccgagggcttcaacctgagaagagacgtgtacatcagaatcgccagcctgctgaagaccctgctgaagaccgaggagtgggtgctggtgctgcccccctggggcagactgtaccactggcagagccccgacatccaccaggtgagaatcccctggagcgagttcttcgacctgcccagcctgaacaagaacatccccgtgatcgagtacgagcagttcatcgccgagagcggcggccccttcatcgaccaggtgtacgtgctgcagagctacgccgagggctggaaggagggcacctgggaggagaaggtggacgagagaccctgcatcgaccagctgctgtacagccaggacaagcacgagtactacagaggctggttctggggctacgaggagaccagaggcctgaacgtgagctgcctgagcgtgcagggcagcgccagcatcgtggcccccctgctgctgagaaacaccagcgccagaagcgtgatgctggacagagccgagaacctgctgcacgaccactacggcggcaaggagtactgggacaccagaagaagcatggtgttcgccagacacctgagagaggtgggcgacgagttcagaagcagacacctgaacagcaccgacgacgccgacagaatccccttccaggaggactggatgaagatgaaggtgaagctgggcagcgccctgggcggcccctacctgggcgtgcacctgagaagaaaggacttcatctggggccacagacaggacgtgcccagcctggagggcgccgtgagaaagatcagaagcctgatgaagacccacagactggacaaggtgttcgtggccaccgacgccgtgagaaaggagtacgaggagctgaagaagctgctgcccgagatggtgagattcgagcccacctgggaggagctggagctgtacaaggacggcggcgtggccatcatcgaccagtggatctgcgcccacgccagatgcctgcccaccagcctgagcgccgagagcggcagcggcggcttccagagattcttctgccccaagtacagcgtgagcgagcagatggtggcctgcgtgcacagcggccacttccacaccgtgtgcctgctggtgtag

SEQ ID NO: 185275 - DNA, 1275 bp, Artificial Sequence
  derived and/or modified sequence
atggcaactctgtcgtttgtctttctcctcctgggagcagttagctggccacctgcctccgcctctgggcaggaattctggcctggtcagtccgcggctgacatcctctccggagcagcatcccgtcgccggtacctactgtacgacgtcaatccccccgaaggattcaacctgagacgagacgtctatatacgaatcgcgtccctgctgaaaactttactaaaaaccgaggaatgggttctcgtgttgcccccttgggggagactctaccactggcagagccccgatatacaccaggtgcgcattccctggtccgagttctttgatttaccttctctgaacaaaaacataccagtgatcgaatacgaacagttcatcgcagagagtggcggcccatttatcgatcaagtatacgtactgcagagctacgccgaggggtggaaagaggggacttgggaggagaaggtcgacgagcgtccctgtatcgaccagctcctgtactctcaggacaaacatgagtattaccgaggttggttttggggatatgaggaaacgagggggttgaatgtgtcctgcctgtccgtccaaggctctgccagcatcgtggctcccttactgctgagaaacactagtgctcggtccgtgatgctggatagagctgaaaacctgttgcacgaccattacggggggaaggaatactgggataccaggaggtctatggtcttcgctaggcacctcagagaagtgggggatgaattccggagtaggcatctcaattctacggacgacgctgatagaatccccttccaggaagactggatgaagatgaaggtgaagctaggaagcgcgttaggtggcccatacctgggggtccacctgcgcagaaaagattttatttggggacatcggcaggatgtgcccagtctagaaggggccgttcgcaaaattcgatcactgatgaagacccatcggttggataaagtgtttgtggccacagacgctgtcaggaaggagtatgaggagctgaaaaagctgctccctgagatggtgagattcgaaccaacctgggaggagctggagctgtacaaagacgggggggtggccattattgatcagtggatctgcgcccatgcccggtgtttgcccacgtctctgtctgctgagtcagggtcaggcgggtttcagcgatttttctgccctaaatattctgtttcagaacagatggtggcatgcgtacactccggtcatttccatacggtctgcctccttgtatag

SEQ ID NO: 185276 - DNA, 1275 bp, Artificial Sequence
  derived and/or modified sequence
atggccaccctgagctttgtgttcctgctgctgggcgctgtgtcctggcccccagccagcgccagcggccaggagttctggccaggccagagcgctgctgacatcctgtctggagctgccagcagaagacgctacctgctgtatgatgtgaaccccccagagggcttcaacctgcggagagatgtgtacatccgcatcgccagcctgctgaagaccctgctgaagacagaggagtgggtgctggtgctgcccccctggggccgcctgtaccactggcagagcccagacatccaccaggtgcgcatcccctggagcgagttctttgacctgcccagcctgaacaagaacatccctgtgattgaatatgagcagttcatcgccgagagcggcggccccttcatcgaccaggtgtatgtgctgcagagctatgcagagggctggaaggagggcacctgggaggagaaggtggatgagcggccctgcatcgaccagctgctgtacagccaggacaagcatgagtactaccggggctggttctggggctatgaggagacccggggcctgaatgtgtcctgcctgtctgtgcagggcagcgccagcatcgtggcccccctgctgctgaggaacaccagcgcccggtctgtgatgctggacagagctgagaacctgctgcatgaccactacggcggcaaggagtactgggacaccaggaggtccatggtgtttgcccggcacctgcgggaggtgggagatgagttccgcagccgccacctgaacagcacagatgatgctgaccgcatccccttccaggaggactggatgaagatgaaggtgaagctgggcagcgccctgggcggcccctacctgggcgtgcacctgcggaggaaggacttcatctggggccaccggcaggatgtgcccagcctggagggcgctgtgaggaagatccgcagcctgatgaagacccaccggctggacaaggtgtttgtggccacagatgctgtgaggaaggagtatgaggagctgaagaagctgctgcctgagatggtgcgctttgagcccacctgggaggagctggagctgtacaaggatggcggcgtggccatcatcgaccagtggatctgtgcccacgcccgctgcctgcccaccagcctgtctgctgagagcggcagcggcggcttccagcgcttcttctgccccaagtacagcgtgtctgagcagatggtggcctgtgtgcacagcggccacttccacacagtgtgcctgctggtgtag

SEQ ID NO: 185277 - DNA, 1275 bp, Artificial Sequence
  derived and/or modified sequence
atggccaccctgagcttcgtgttcctgctgctgggcgccgtgagctggccccccgccagtgcctccggccaggagttttggccaggccagtctgccgcagacatcctgtcaggcgctgcaagccgccggcgctatctcctttacgatgtgaatccacctgaaggtttcaatctgaggcgcgatgtgtacatcagaattgccagcctactaaaaacactgttaaaaactgaagagtgggtattggtgttgccaccatggggccgcctctaccactggcagagtcccgacatacaccaagtgcgaataccctggtccgagtttttcgacctgccttccctaaacaagaatatccctgttattgaatatgaacagtttatcgccgagagcggcggcccttttattgaccaggtatacgtcctgcagagttacgcagaaggctggaaggagggaacctgggaggaaaaggtcgatgaaaggccttgcatcgatcagctcttgtattcacaggacaaacacgagtactatcgaggctggttttggggctacgaagagactaggggtcttaacgtgagctgtctttccgtgcaggggtctgcttcaattgtagccccgctcttgcttcggaatactagcgccaggagtgtgatgcttgatcgcgccgaaaaccttctccatgatcactatggggggaaggagtactgggacacacggaggtcaatggttttcgcccggcatctcagggaagttggtgacgaattccgttcccgccacctgaattctacagacgacgctgataggattccatttcaggaagactggatgaaaatgaaggtcaagctcggctctgcccttggcggcccatacttaggggttcatctgagacgaaaggattttatttggggtcacagacaggatgtgccatcattagaaggcgcggtacgcaaaatcagaagcctcatgaagacccacaggcttgataaggtatttgtggcaaccgacgccgtgcggaaagaatacgaggaattaaagaaactgctgcccgaaatggtgagatttgagcccacctgggaggagctagaactttataaggacgggggcgtcgcgatcattgatcagtggatctgtgctcatgctcgctgtctgccgacttcccttagcgctgaatcaggatccggaggcttccagaggttcttctgtccaaaatattcagtgtcggagcagatggtggcatgtgtgcactccgggcacttccacaccgtatgcctgctcgtgtag

SEQ ID NO: 185278 - DNA, 4825 bp, Artificial Sequence
  derived and/or modified sequence
gccggaagtgcgtggccgcccggggccatggcgacactcagcttcgtcttcctgctgctgggggcagtgtcctggcctccggcttctgcctccggccaggagttctggcccggacaatcggcggccgatattctgtcgggggcggcttcccgcagacggtatcttctgtatgacgtcaaccccccggaaggcttcaacctgcgcagggatgtctatatccgaatcgcctctctcctgaagactctgctgaagacggaggagtgggtgcttgtcctgcctccatggggccgcctctatcactggcagagtcctgacatccaccaggtccggattccctggtctgagttttttgatcttccaagtctcaataaaaacatccccgtcatcgagtatgagcagttcatcgcagaatctggtgggccctttattgaccaggtttacgtcctgcaaagttacgcagaggggtggaaagaagggacctgggaagagaaggtggacgagcggccgtgtattgatcagctcctgtactcccaggacaagcacgagtactacagaggatggttttggggttatgaggagaccaggggtctaaacgtctcctgtctgtccgtccagggctcagcctccatcgtggcgcccctgctgctgagaaacacatcagcccggtccgtgatgttagacagagccgagaacctacttcacgaccactatggagggaaagaatactgggatacccgtcgcagcatggtgtttgccaggcacctgcgggaggtgggagacgagttcaggagcagacatctcaactccacggacgacgcagacaggatccccttccaggaggactggatgaagatgaaggtcaagctgggctccgcgctagggggcccctacctgggagtccacctgagaagaaaagatttcatctggggtcacagacaggatgtacccagtctggaaggggccgtgaggaagatccgcagcctcatgaagacccaccggctggacaaggtgtttgtggccacagatgccgtcagaaaggaatatgaagagctaaaaaagctgttacccgagatggtgaggtttgaacccacgtgggaggagctggagctctacaaggacggaggcgttgcgattattgaccagtggatctgcgcacacgccaggtgcctgcccacgtcactgtcggccgagagcgggtcgggtggctttcaaaggttcttctgtcccaagtactcggtgtcagagcagatggtcgcctgtgttcacagtggtcatttccatactgtttgcctcctcgtctgagtctcctgtagcatctggttcagtgtttccctgggctgaagttaattgttcatcttgcccctttagttctcatgcacagaattcctccatagcaggctgttggcatagctggcctcgtctcagaacctcttcttgtgtcgcattttcccatcattcccggtttctgcccctgtctgccccctgccctgagagttgcccgtgccctggacttgggcatgtccttgttgctgtgttgttgagcatccgtgagcgtccccgaggccgggagcgtgggccctcgtgtgatcattctcgtggggctgccatgagcgtccccaaggctgggagcatgggccctcgtgtgatcgttcttgtggggctgccgtgagcgtccccgaggccgggagcgtgggccctcgtgtgatcattctcgtggggctgccgtgagcgtcccagaggccgggagcgtgggccctgcgtgcagtcattcctctggggttgctgtgggaggtacgcctgggcctctgttcctccaaagacctgcctgcccatctgcataggagatgaaggctggggttagggtgaaacggtttgagttaaatggaaaatgaaagtagagggaatgatcttccccgtggttagcactgtgcacacgcgtgcgtctctgtgggttagtctgtctctctcctgcccgaggaatgctgagcgccctgagccggtgcctcttcacacatctgctatttcctgtggtgttctgggcatggtgtgtaagacccacagaggctccgggtgatgctgtctgctgggtgtgggtccctttccctgttaagcagacaggatgcagcgctgacttcttaggtcagggcggaggtgtgcaggagcccagttacgaactcacccctgcttctcaggtgtggccttgggattttgactgcgaccttggcggtgctgtctccgcagcccaggaagcctgctgtggggaggcttcgcactgagctctcagcctcctgccctcagctgcgcgaagcgctcggcccagctcactgaagctgccctgcctccgggccggcgcggcctgctctggcaggcccctgtgtgtggggtggtgagggtctccccaccagtgctgcaccccgcagcagcatacaggcctgtgtggcctgctggccctgtggctctgtgtacagcgctgtgcatgttacatttgctctggaaacatctctggggtttgcttgttcacgaagttcatgaagtgccgctggagagccagagaccagctgcgcaggagccggaggaacgggcaggccgctgacctgaggtctggagaaacccctggagaagggtgtccccaccagcccatacagcgtgtgtgtggagggggccttgacctccgtgatgtctactgtgcctcaggataaggacccgccatgccctggctagacagtgtgtggttagtaggaatctctcattgttcaccatgtgacccccaggaggtattcgacctgcactggcgtgcctggcctgggatttggtgacggagaggagggctcccagggggacatgcggtgggacaggagcgtggcggctgctgactgtggggtgtggatggggctgcagcaccaggcagagcccctcagggcgccgatgtcgagggcacctgagcgaggggtgccagcaagggggcggccggctggtgggtgctcgggggacggccgtgttggttccatgtaactgtggaactcatttcactcagctgctcctctcagttctccctgactctggaacctctgtgacgccagttctccctgactctggaacctctgtgatcctttgcaggttttttattggcacctcagtctcaacattttcttttcggattcatgaggaaagagaaatcctggggttggaccccaagacgacgtacaacaggttctgcggagaccaagagaaggcgtgtgagcaacccacccactggaagatcacctactgaggaggatcctccagggccgctccccggacccgacaggcgcgggtggatgcaggttctgtcgccgtggagtcaccgtctactgccagccgggagctgggcggacaggaccgtccctcgcagggtcccaggcccagaagaggccccacgcctctagagctgggctccgtcctcggcgttgccagccgccatggctgatgaagaggctccgctgctctcgggggtggcggttgttttcaggcagcgtctgtgaacccacagctcggttgccagcagtgcccgcgtggtgacccagaagcaggagtgtttgtcaggctcccgctctggcctttccagccacctttcatgtcttcatattttaagtgcattgaggatagatgcaggcgggtgagctgccctccgtcaggtggacccgggctgacatttccctgggagctggtgcaaggagaagcgtcattttaaatgtctgcagagcgaccaggggcctcatgaatctctccgttgccctccgcgcagcaggaggctgcctgtgtgtttcctcctgggatgcgtgcaaggcagacctggtgctgcaaaggaaagggcctgaggcctcagggagccccgtggagggatgacagttcaggccctactgctggcacgtcagagcactgggaagtttttcagtgacgtctctggggcactcagtggattgtctgtaggaaacttgcagctctgctcctcacaccaggcccggctggccacccaccctcgcccccactggccacccctccctcgccccgactgccccgccccaccctcaccccgactgccccgccctcgcccggctggccgtccctgccctcgccccggctggcaggtgcacatggggcctccaggtctgccattcgctattgagaactagaaatgaggaaggacagttacgctaactccaaaaggctgtctaggatgagctgctttatcagggagctccttgtacccattttacagaaatcatttttaggtctttgtgccaccaccacgaggggcatctgcaaagagggcaacgctagacacagaatccgtggaaggtgcagcagtgcctcaggggtcctcagggtcagggagcccccctcaccctcttggcccgttaccctttgtgactttccaccatggtgtcgtgtgaccctcagtcaggttggtgggggctgagtcctcactgagcagccactttccacatctgctagaggaacagtgacatggacacctgtgacagagagaggacagttaggagggacagacagctcttcctttcggagcctggctagtctaggacatcaccttgctgtgtcttctcaagcttttaaaattgaccctgaacgtgtgacagggtcctatggtgttactcaaagctgtgcagggtaaatgatgacatatttattctttttccatttgttctagaaacagtgcctttttcatcagttgcattttccaggctgagagctgtataaaacattttggactgtgaccatgtaccttcctttttaagaaaaataaactgctttatggaagttggta

SEQ ID NO: 185279 - DNA, 1275 bp, Artificial Sequence
  derived and/or modified sequence
atggcgaccttgagcttcgtttttctgctcctgggagccgtctcatggcctcccgctagcgcttccggccaggaattctggcccggtcagtccgccgcagatatactgagcggcgcagcctctcggagacgctatctgttgtacgacgtgaatcctcccgaaggctttaacctccgcagagacgtgtatatacgcatcgcctcgttgctcaaaacactcctgaaaaccgaggagtgggtgttggtgctacctccatggggcagactgtatcactggcagtctccagacatacaccaggtccggattccatggtctgagttttttgacctcccatcactcaacaaaaatatccctgtcatcgagtatgagcagtttatcgccgaaagtggcggtccctttattgatcaggtctatgtgctccagtcatacgctgaggggtggaaggaaggcacatgggaagaaaaagtggacgagcgaccttgcatagatcagctcctatatagtcaggacaaacatgagtactaccgcggatggttctggggctatgaggaaactaggggccttaacgtgtcttgccttagcgtccagggcagcgccagcatcgtcgccccacttcttttaaggaacacttcagcacgttccgtcatgctcgatagagctgaaaatctgctccacgatcactatggcggtaaggaatattgggatacccgccgatccatggtctttgctaggcatctccgagaagtgggcgatgagttccggagccgccacttgaattccacagacgacgccgatcgtataccgttccaagaagactggatgaaaatgaaagtgaaactcggtagcgctctgggtggcccatacctgggcgttcatttgagacggaaagactttatctggggccataggcaggacgtccctagcttggaaggggctgtgagaaaaatccggtccctgatgaagacacacagactggataaagtattcgtggcgactgatgctgtgagaaaagaatatgaggagctgaaaaagctcttgcccgaaatggttcgctttgagccaacgtgggaggaattggagctgtacaaagatggaggcgtggcaatcatcgaccagtggatctgcgcgcacgcaaggtgcttgcctacttctctctcagctgaaagtggttccggaggcttccaacgatttttttgtccaaaatacagtgtcagtgagcagatggttgcatgtgtgcattccgggcacttccacaccgtttgcctcctggtttag

SEQ ID NO: 185280 - DNA, 189 bp, Artificial Sequence
  derived and/or modified sequence
atgggcgagctggccgccagcgccaaccacggccacagcccctgctatcctgagagaaagggaaccccaggtgacttgtctaagaggaagatgttggtacatttctatcccagacgccactcccaccctcgcgccacccagcagtggattctaaaaaacaaaacactgtgtcgacgcattaaagaatag

SEQ ID NO: 185281 - protein, 759 aa, Artificial Sequence
  derived and/or modified sequence
MLEHKYGGHLVSRRAACTIQTAFRQYQLSKNFEKIRNSLLESRLPRRISLRKVRSPTAESLAAEKALMEGYGLVGLPLVRSPSLPPTFAGTLTELEDSFTEQVQSLAKSIDDALSTWSLKTMCSLRESGAYQLHQALQAAAGPPGLEAEGRAPESAGPGPGDDAAETPGLPPAHSGTLMMAFRDVTVQIANQNISVSSSTALSVANCLGAQTVQAPAEPAAGKAEQGETSGREAPEAPAVGREDASAEDSCAEAAASGAADGATAPKTEEEEEEEETAEVGRGAEAEAGDLEQLSSSSTSTKSAKSGSEASASASKDALQAMILSLPRYHCENPASCKSPTLSTDTLRKRLYRIGLNLFNINPDKGIQFLISRGFIPDTPIGVAHFLLQRKGLSRQMIGEFLGNSKKQFNRDVLDCVVDEMDFSSMELDEALRKFQAHIRVQGEAQKVERLIEAFSQRYCMCNPEVVQQFHNPDTIFILAFAIILLNTDMYSPNIKPDRKMMLEDFIRNLRGVDDGADIPRELVVGIYERIQQKELKSNEDHVTYVTKVEKSIVGMKTVLSVPHRRLVCCSRLFEVTDVNKLQKQAAHQREVFLFNDLLVILKLCPKKKSSSTYTFCKSVGLLGMQFQLFENEYYSHGITLVTPLSGSEKKQVLHFCALGSDEMQKFVEDLKESIAEVTELEQIRIEWELEKQQGTKTLSFKPCGAQGDPQSKQGSPTAKREAALRERPAESTVEVLINASPARLTILPISRDTIKSYC

SEQ ID NO: 185282 - protein, 348 aa, Artificial Sequence
  derived and/or modified sequence
MGHCCCKPYNCLQCLDKTNESALVKEKELSIELANIRDEVAFHTAKCEKLQKEKEELERRFEDEVKRLGWQQQAELQELEERLQLQFEAEMARLQEEHGDQLLSIRCQHQEQVEDLTASHDAALLEMENNHTVAITILQDDHDHKVQELMSTHELEKKELEENFEKLRLSLQDQVDTLTFQSQSLRDRARRFEEALRKNTEEQLEIALAPYQHLEEDMKSLKQVLEMKNQQIHEQEKKILELEKLAEKNIILEEKIQVLQQQNEDLKARIDQNTVVTRQLSEENANLQEYVEKETQEKKRLSRTNEELLWKLQTGDPTSPIKLSPTSPVYRGSSSGPSSPARVSTTPR

SEQ ID NO: 185283 - DNA, 1047 bp, Artificial Sequence
  derived and/or modified sequence
atgggccactgctgctgcaagccctacaactgcctgcagtgcctggacaagaccaacgagagcgccctggtgaaggagaaggagctgagcatcgagctggccaacatcagagacgaggtggccttccacaccgccaagtgcgagaagctgcagaaggagaaggaggagctggagagaagattcgaggacgaggtgaagagactgggctggcagcagcaggccgagctgcaggagctggaggagagactgcagctgcagttcgaggccgagatggccagactgcaggaggagcacggcgaccagctgctgagcatcagatgccagcaccaggagcaggtggaggacctgaccgccagccacgacgccgccctgctggagatggagaacaaccacaccgtggccatcaccatcctgcaggacgaccacgaccacaaggtgcaggagctgatgagcacccacgagctggagaagaaggagctggaggagaacttcgagaagctgagactgagcctgcaggaccaggtggacaccctgaccttccagagccagagcctgagagacagagccagaagattcgaggaggccctgagaaagaacaccgaggagcagctggagatcgccctggccccctaccagcacctggaggaggacatgaagagcctgaagcaggtgctggagatgaagaaccagcagatccacgagcaggagaagaagatcctggagctggagaagctggccgagaagaacatcatcctggaggagaagatccaggtgctgcagcagcagaacgaggacctgaaggccagaatcgaccagaacaccgtggtgaccagacagctgagcgaggagaacgccaacctgcaggagtacgtggagaaggagacccaggagaagaagagactgagcagaaccaacgaggagctgctgtggaagctgcagaccggcgaccccaccagccccatcaagctgagccccaccagccccgtgtacagaggcagcagcagcggccccagcagccccgccagagtgagcaccacccccagatag

SEQ ID NO: 185284 - DNA, 918 bp, Artificial Sequence
  derived and/or modified sequence
atggaggccgagagcttcccctgcctgctgagacccttcttcaaggagagaagctgcgccctgagacccgccttccacaccgccaagtgcgagaagctgcagaaggagaaggaggagctggagagaagattcgaggccgagatggccagactgcaggaggagcacggcgaccagctgctgagcatcagatgccagcaccaggagcaggtggaggacctgaccgccagccacgacgccgccctgctggagatggagaacaaccacaccgtggccatcaccatcctgcaggacgaccacgaccacaaggtgcaggagctgatgagcacccacgagctggagaagaaggagctggaggagaacttcgagaagctgagactgagcctgcaggaccaggtggacaccctgaccttccagagccagagcctgagagacagagccagaagattcgaggaggccctgagaaagaacaccgaggagcagctggagatcgccctggccccctaccagcacctggaggaggacatgaagagcctgaagcaggtgctggagatgaagaaccagcagatccacgagcaggagaagaagatcctggagctggagaagctggccgagaagaacatcatcctggaggagaagatccaggtgctgcagcagcagaacgaggacctgaaggccagaatcgaccagaacaccgtggtgaccagacagctgagcgaggagaacgccaacctgcaggagtacgtggagaaggagacccaggagaagaagagactgagcagaaccaacgaggagctgctgtggaagctgcagaccggcgaccccaccagccccatcaagctgagccccaccagccccgtgtacagaggcagcagcagcggccccagcagccccgccagagtgagcaccacccccagatag

SEQ ID NO: 185285 - DNA, 777 bp, Artificial Sequence
  derived and/or modified sequence
atggccagactgcaggaggagcacggcgaccagctgctgagcatcagatgccagcaccaggagcaggtggaggacctgaccgccagccacgacgccgccctgctggagatggagaacaaccacaccgtggccatcaccatcctgcaggacgaccacgaccacaaggtgcaggagctgatgagcacccacgagctggagaagaaggagctggaggagaacttcgagaagctgagactgagcctgcaggaccaggtggacaccctgaccttccagagccagagcctgagagacagagccagaagattcgaggaggccctgagaaagaacaccgaggagcagctggagatcgccctggccccctaccagcacctggaggaggacatgaagagcctgaagcaggtgctggagatgaagaaccagcagatccacgagcaggagaagaagatcctggagctggagaagctggccgagaagaacatcatcctggaggagaagatccaggtgctgcagcagcagaacgaggacctgaaggccagaatcgaccagaacaccgtggtgaccagacagctgagcgaggagaacgccaacctgcaggagtacgtggagaaggagacccaggagaagaagagactgagcagaaccaacgaggagctgctgtggaagctgcagaccggcgaccccaccagccccatcaagctgagccccaccagccccgtgtacagaggcagcagcagcggccccagcagccccgccagagtgagcaccacccccagatag

SEQ ID NO: 185286 - DNA, 1047 bp, Artificial Sequence
  derived and/or modified sequence
atgggacactgttgctgcaagccctataattgcctgcagtgtctcgacaagactaacgagtcagccctggtgaaggagaaggaactgtctatcgaactcgccaacattagagacgaggtcgcttttcatactgcaaaatgtgaaaagctgcagaaagaaaaagaggaattagaaaggaggttcgaggatgaggtcaagcgactggggtggcagcaacaggcagaattacaggaactcgaggagaggctgcagctgcagttcgaggccgagatggcgcgcctccaggaagagcacggagatcagcttctgtcaatcagatgccaacatcaggaacaggtagaagatttaacagcttctcatgacgctgctctgttggagatggaaaacaatcacacagtggccatcaccattttacaggacgaccacgatcataaggtccaagaactcatgagtacacatgaactcgagaaaaaggaactcgaggaaaatttcgaaaaacttaggctgtctcttcaggatcaggtggataccctaacttttcagagccaatctctgcgcgatagggccaggcgatttgaggaagccttaagaaagaatacagaggaacagctggaaatagcactggctccctaccagcacctggaggaggatatgaaatcattgaaacaagtgttggaaatgaagaaccagcagatccatgaacaggaaaagaagattttggaactcgagaaattggcggagaagaacatcatcctggaggagaagatccaagtgttgcaacaacagaacgaggaccttaaggccagaattgaccagaatacggtcgtaacccgtcagctctctgaggagaatgccaatcttcaggaatatgtggagaaagaaacccaggagaagaagcgactgtctcggacaaacgaagagctattgtggaagcttcaaaccggtgatcctacctctcctataaagctatcccctaccagccccgtttatcggggaagttcgagcggaccaagttcgccagccagggtgagcacaacacctagatag

SEQ ID NO: 185287 - DNA, 918 bp, Artificial Sequence
  derived and/or modified sequence
atggaggctgaaagctttccctgtctgctgcgtcccttctttaaggaaagatcatgcgcactgagaccggcattccatactgccaagtgtgaaaagctgcagaaagagaaggaggagctcgagcgcagatttgaggcggaaatggcaagactgcaagaagagcacggcgatcaactgctctccattcgctgtcagcatcaagaacaggtggaggatctcactgcctctcacgatgctgctctattggaaatggagaacaaccatacggtggctataaccatcttgcaagacgatcacgatcataaagtccaggaacttatgagcacacatgagctggaaaaaaaagagttagaagaaaattttgaaaaactcaggctgtcactgcaggatcaagttgacaccctcacgttccagtcccaatcgctccgcgatagggcacggcggtttgaggaagcactgcgtaagaatactgaagagcaactcgagattgccctggcaccctatcagcacctggaagaggacatgaagtccttaaagcaggtgcttgaaatgaaaaaccagcagatccacgagcaggaaaaaaaaatcctggagttggagaaattagccgagaaaaacatcatcctggaggagaagatccaggtcttgcagcaacagaacgaggatcttaaggcccgcatcgaccagaatactgtggtaaccagacagctaagtgaggagaatgccaatctgcaggagtacgtggaaaaagaaacacaggagaaaaaaagattaagccgaaccaacgaagaactgttgtggaagcttcagaccggggatccaacatcgccaatcaagttatctcctacctcaccagtgtatcgaggatccagcagtggcccaagctcaccggccagagtgtctaccacgccccggtag

SEQ ID NO: 185288 - DNA, 777 bp, Artificial Sequence
  derived and/or modified sequence
atggcccggctgcaggaggaacacggcgatcagctgctctctatccgctgccagcaccaagaacaggttgaggatctgactgcgtcccacgatgccgctctgcttgaaatggaaaacaaccacactgtggcgataacaatacttcaagatgatcatgatcataaggtgcaggagcttatgagtactcatgagttggaaaagaaggaattggaggagaattttgagaaattaagactgtcgctgcaggaccaggttgatactctgacatttcagtcccaatcgctgcgagaccgcgccaggcgctttgaagaggctctgcgaaagaacacagaagagcaattggagattgcgctagcgccataccagcacttggaagaggacatgaagagcctgaaacaggtattggaaatgaagaaccaacagatccacgagcaggagaagaagatcctcgagttggagaaacttgccgagaagaacattatcctcgaagaaaagatacaagttctccagcaacagaatgaagatctgaaagcgagaatcgaccagaataccgtggtcactaggcagctgtcagaagaaaacgccaacctccaggaatacgttgaaaaggagactcaggaaaagaagcggctcagccgaaccaatgaggagttgctctggaaactccagacgggggatcctacaagcccaattaagctatctccgacaagtccagtctaccgtgggtccagcagcggccccagtagtcctgcaagagtgagcaccacccccagatag

SEQ ID NO: 185289 - DNA, 1047 bp, Artificial Sequence
  derived and/or modified sequence
atgggccactgctgctgcaagccctacaactgcctgcagtgcctggacaagaccaatgaaagtgccctggtgaaggagaaggagctgagcattgagctggccaacatcagagatgaggtggccttccacacagccaagtgtgagaagctgcagaaggagaaggaggagctggagaggagatttgaagatgaggtgaagaggctgggctggcagcagcaggccgagctgcaggagctggaggagcggctgcagctgcagtttgaagctgagatggcccggctgcaggaggagcacggggaccagctgctgagcatccgctgccagcaccaggagcaggtggaggacctgacagccagccatgatgctgccctgctggagatggagaacaaccacacagtggccatcaccatcctgcaggatgaccatgaccacaaggtgcaggagctgatgagcacccatgagctggagaagaaggagctggaggagaactttgagaagctgcggctgagcctgcaggaccaggtggacaccctgaccttccagagccagagcctgcgggaccgggccaggagatttgaggaggccctgaggaagaacacagaggagcagctggagatcgccctggccccctaccagcacctggaggaggacatgaagagcctgaagcaggtgctggagatgaagaaccagcagatccacgagcaggagaagaagatcctggagctggagaagctggccgagaagaacatcatcctggaggagaagatccaggtgctgcagcagcagaatgaagacctgaaggccagaattgaccagaacacagtggtgacccggcagctgtctgaagaaaatgccaacctgcaggagtatgtggagaaggagacccaggagaagaagaggctgagcaggaccaatgaggagctgctgtggaagctgcagacaggagaccccaccagccccatcaagctgagccccaccagccctgtgtaccggggcagcagcagcggccccagcagccctgcccgggtgtccaccacccccaggtag

SEQ ID NO: 185290 - DNA, 918 bp, Artificial Sequence
  derived and/or modified sequence
atggaggccgagagcttcccctgcctgctgcggcccttcttcaaggagaggagctgtgccctgcggcctgccttccacacagccaagtgtgagaagctgcagaaggagaaggaggagctggagaggagatttgaggccgagatggcccggctgcaggaggagcacggggaccagctgctgagcatccgctgccagcaccaggagcaggtggaggacctgacagccagccatgatgctgccctgctggagatggagaacaaccacacagtggccatcaccatcctgcaggatgaccatgaccacaaggtgcaggagctgatgagcacccatgagctggagaagaaggagctggaggagaactttgagaagctgcggctgagcctgcaggaccaggtggacaccctgaccttccagagccagagcctgcgggaccgggccaggagatttgaggaggccctgaggaagaacacagaggagcagctggagatcgccctggccccctaccagcacctggaggaggacatgaagagcctgaagcaggtgctggagatgaagaaccagcagatccacgagcaggagaagaagatcctggagctggagaagctggccgagaagaacatcatcctggaggagaagatccaggtgctgcagcagcagaatgaagacctgaaggccagaattgaccagaacacagtggtgacccggcagctgtctgaggagaatgccaacctgcaggagtatgtggagaaggagacccaggagaagaagaggctgagcaggaccaatgaggagctgctgtggaagctgcagacaggagaccccaccagccccatcaagctgagccccaccagccctgtgtaccggggcagcagcagcggccccagcagccctgcccgggtgtccaccaccccaagatag

SEQ ID NO: 185291 - DNA, 1793 bp, Artificial Sequence
  derived and/or modified sequence
agatctgatcgctgctgccctgctctcctcctcctctcattcctctgcctcctggattcctgaagtttaggagaaataaggtagccaagggaaccacatggaagttgtgacagctcccagcggcgcgcccctttcgtgtgtgccggtacctcggcttaggagttgcccgctgacaccttgaatgaaggaggtccccttgccagccagcctgccgggatgggccattgctgctgcaagccttataactgccttcagtgcctggacaagacgaatgaaagtgcccttgtgaaagaaaaagagctgtcaatcgaacttgcaaacatcagggatgaagttgccttccatacagcaaagtgcgagaaactacaaaaggagaaggaggagctggagaggcggttcgaggacgaggtgaagaggctgggctggcagcagcaggccgagctccaggagctggaggagcggctgcagctgcaattcgaggcggaaatggcgcgcctgcaggaggagcacggtgaccagctgctgagcatccggtgtcaacaccaggagcaggtggaagatctcaccgccagccatgatgctgctctcctagagatggaaaataaccacacagttgccatcacaatcctgcaggatgaccacgaccacaaagtccaagaattgatgtccactcatgagcttgaaaagaaagaattggaagaaaattttgaaaaactgcggctgtcattgcaggaccaggtggacacgctgaccttccagagccagtctctgcgggacagagcccgccgcttcgaagaggccttgaggaagaacacagaggagcagctggagattgcattggctccttatcagcacttggaagaagacatgaagagtctgaagcaggtattagaaatgaagaatcagcaaatacacgagcaagaaaagaagattcttgagctggaaaagctggcagaaaagaacattatcctagaagaaaagatccaggttctccaacagcagaacgaagacctcaaagcaaggattgaccaaaacacagttgtcaccagacagctgtcggaggaaaatgctaacctccaggaatatgttgagaaggaaacccaggagaagaagagattgagccgaaccaatgaagagctgctttggaagctccaaactggggacccgaccagtccgattaaactctcgcccacatctcccgtttaccgcggctcctcctcggggccctcctctccggccagagtcagcacaacacccagatgacgccactacacggcctgcgggagctccggcttctcgtcctccggtctccaccctgagggagcaccgacccggtgccgccggagctggccctgtgcgcatgctcagtagctgcgaatgcatcctaggcgcgtcctcctctgatccccgtgtaagactgccctggtgtcggcacttaggaatgtgtaaatggtaaagtctgatgtgcaaacgttttaccatagttagagccaaaagaaagacacttgcaattgttcttgagcaatgaactttcactgcagaatttcaggttagttacaaaaagctcagttttcaatatacattgaataatcattgtgtactgcaccgatatgtgtgtatatttagatatacgtatatacacatgctgcggttctgaatttcattttttataacatgaagtgctgacatattttagtgaaggtcagcagttttctaacttgtgcctaagaattattgggaaatgaaaatgcatttctatctagcttcccaggaatatttctacccaaaataga

SEQ ID NO: 185292 - DNA, 777 bp, Artificial Sequence
  derived and/or modified sequence
atggcccggctgcaggaggagcacggggaccagctgctgagcatccgctgccagcaccaggagcaggtggaggacctgacagccagccatgatgctgccctgctggagatggagaacaaccacacagtggccatcaccatcctgcaggatgaccatgaccacaaggtgcaggagctgatgagcacccatgagctggagaagaaggagctggaggagaactttgagaagctgcggctgagcctgcaggaccaggtggacaccctgaccttccagagccagagcctgcgggaccgggccaggagatttgaggaggccctgaggaagaacacagaggagcagctggagatcgccctggccccctaccagcacctggaggaggacatgaagagcctgaagcaggtgctggagatgaagaaccagcagatccacgagcaggagaagaagatcctggagctggagaagctggccgagaagaacatcatcctggaggagaagatccaggtgctgcagcagcagaatgaagacctgaaggccagaattgaccagaacacagtggtgacccggcagctgtctgaagaaaatgccaacctgcaggagtatgtggagaaggagacccaggagaagaagaggctgagcaggaccaatgaggagctgctgtggaagctgcagacaggagaccccaccagccccatcaagctgagccccaccagccctgtgtaccggggcagcagcagcggccccagcagccctgcccgggtgtccaccacccccaggtag

SEQ ID NO: 185293 - DNA, 1047 bp, Artificial Sequence
  derived and/or modified sequence
atgggccactgctgctgcaagccctacaactgcctgcagtgcctggataagaccaacgaatccgccctcgtgaaagagaaggagctgtcgatagagctcgccaatattagagatgaggtcgcatttcatacggcaaagtgcgagaaacttcaaaaagaaaaagaagagctcgaacgccgtttcgaggacgaggttaagaggctggggtggcagcagcaggctgaactgcaggagctcgaggagcggctgcagctccagttcgaagctgagatggcccgtcttcaggaggagcacggtgaccagttattaagcattcgttgtcagcatcaggaacaagtggaggatctcactgcaagccacgacgccgcgttgctcgagatggaaaacaaccataccgtggcaataaccatcctacaagacgaccatgaccacaaggtgcaggagttgatgtccactcacgaactggagaaaaaagaacttgaagaaaattttgaaaagttaaggctgagcctgcaggatcaggtcgacaccttaacatttcagagccagtctctgcgggatagggcacgccgtttcgaggaggcgttgcgcaagaataccgaggaacagttggagattgctcttgcaccataccagcacttggaggaagacatgaagtccctcaagcaggtgttagaaatgaaaaatcagcagatacatgaacaggagaaaaaaattcttgaacttgaaaaactggcagagaaaaatatcatcctggaggaaaagatccaggttctacaacagcaaaacgaagatctcaaggcgaggattgatcagaacactgttgtcaccaggcaactctctgaggagaacgcaaacctgcaggaatacgtagagaaggagacacaggagaagaagcgcctttcacggactaatgaggagcttctctggaagctgcagacaggcgacccaacttcaccaatcaaactctcacctacctccccggtttacagaggctccagctccgggcccagttccccagccagggtgagcacaactccgcggtag

SEQ ID NO: 185294 - DNA, 918 bp, Artificial Sequence
  derived and/or modified sequence
atggaggccgagagcttcccctgcctgctgcggcccttcttcaaggagaggagctgtgcacttcgcccggctttccataccgctaagtgcgagaaactgcagaaggaaaaagaagagttggaacggaggtttgaagccgagatggccaggttacaagaggaacatggagaccagctccttagtattcggtgccaacaccaggagcaggttgaagacctgacagcctcacatgacgcagcactcctggagatggagaataaccacacagtggcgattaccatccttcaggacgaccacgaccataaggtccaggaactgatgagtacgcatgagttggagaagaaggagctggaggaaaattttgaaaaactccggttgtctttgcaggaccaggtggacaccttaacgtttcaatcccagagtttaagagatcgggctcgccgtttcgaggaagccctgcggaagaataccgaggagcagctggaaattgcactggctccataccagcacctggaggaggacatgaagagcctgaaacaggttcttgaaatgaagaaccaacagattcacgaacaggaaaaaaaaatcctggaacttgagaagcttgcggaaaagaacattatcttggaagaaaagatccaggtgcttcaacagcagaatgaagatcttaaggcaaggatcgaccaaaacaccgtggtgacccgccagctgagtgaggagaatgccaacctgcaggagtatgttgaaaaggaaacccaggagaaaaaacgcctgagtcggaccaacgaggaactgttatggaaactgcagacaggagatcccaccagtccaataaagctgtcgcccactagccccgtgtacagggggtctagcagcggccccagtagccccgctagagtgagcaccactcccagatag

SEQ ID NO: 185295 - DNA, 777 bp, Artificial Sequence
  derived and/or modified sequence
atggcccggctgcaggaggagcacggcgaccagctgctgagcatccgatgtcagcatcaggagcaagtggaggaccttaccgcttctcatgacgcagcgttgttggaaatggagaacaaccataccgttgcaattacaattctgcaggacgatcatgaccacaaggtccaggagctgatgtctactcatgagctggaaaagaaggaactcgaagagaattttgaaaagttgagattgtctctacaggaccaggttgataccctgacattccagtcccagagcctaagggatcgggccaggagattcgaagaagccctgaggaagaataccgaggagcagctggaaatcgcactggctccctatcagcacctcgaggaagacatgaaatccctgaaacaggtcctcgaaatgaaaaatcagcagatccatgagcaggagaagaagatcctggaattggaaaaacttgcagaaaagaatattattctggaagagaagatccaggtgctccagcagcagaacgaagatttgaaagcccgaatcgatcagaataccgtggtcactcggcagctgtccgaggagaacgccaatctgcaagaatatgttgagaaggagacacaagaaaaaaagagactttcgaggactaacgaagagctgttgtggaaactgcaaaccggcgaccccacttcacctattaaactgtccccaaccagtccggtctaccgcggatcttcctccggcccaagtagtccagcccgcgtctccaccacgcccaggtag

SEQ ID NO: 185296 - DNA, 1289 bp, Artificial Sequence
  derived and/or modified sequence
acgccagccttgatgatctgaccatggaggctgagtccttcccatgcctcctacggccattttttaaagaaagatcttgtgctttgcgcccagccttccatacagcaaagtgcgagaaactacaaaaggagaaggaggagctggagaggcggttcgaggcggaaatggcgcgcctgcaggaggagcacggtgaccagctgctgagcatccggtgtcaacaccaggagcaggtggaagatctcaccgccagccatgatgctgctctcctagagatggaaaataaccacacagttgccatcacaatcctgcaggatgaccacgaccacaaagtccaagaattgatgtccactcatgagcttgaaaagaaagaattggaagaaaattttgaaaaactgcggctgtcattgcaggaccaggtggacacgctgaccttccagagccagtctctgcgggacagagcccgccgcttcgaagaggccttgaggaagaacacagaggagcagctggagattgcattggctccttatcagcacttggaagaagacatgaagagtctgaagcaggtattagaaatgaagaatcagcaaatacacgagcaagaaaagaagattcttgagctggaaaagctggcagaaaagaacattatcctagaagaaaagatccaggttctccaacagcagaacgaagacctcaaagcaaggattgaccaaaacacagttgtcaccagacagctgtcggaggaaaatgctaacctccaggaatatgttgagaaggaaacccaggagaagaagagattgagccgaaccaatgaagagctgctttggaagctccaaactggggacccgaccagtccgattaaactctcgcccacatctcccgtttaccgcggctcctcctcggggccctcctctccggccagagtcagcacaacacccagatgacgccactacacggcctgcgggagctccggcttctcgtcctccggtctccaccctgagggagcaccgacccggtgccgccggagctggccctgtgcgcatgctcagtagctgcgaatgcatcctaggcgcgtcctcctctgatccccgtgtaagactgccctggtgtcggcacttaggaatgtgtaaatggtaaagtctgatgtgcaaacgttttaccatagttagagccaaaagaaagacacttgcaattgttcttgagcaatgaactttcactgcagaatttcaggttagttacaaaaagctcagttttcaatatacattgaataatcattgtgtactgcaccgata

SEQ ID NO: 185297 - DNA, 1047 bp, Artificial Sequence
  derived and/or modified sequence
atggggcattgctgctgtaaaccctacaattgcctccaatgtctggataagactaacgagtcagctcttgtcaaggaaaaggagctcagcattgagctggccaatattcgggacgaggttgcattccataccgcgaagtgtgaaaaacttcagaaagagaaagaagaactggagcgtaggttcgaggacgaagttaaaagactgggctggcagcagcaggcagagctccaggagctggaggagaggttgcagctccaattcgaggctgagatggctagactgcaggaagaacatggggaccagctgctctctattcgatgtcagcaccaggagcaggtagaagatctgactgcctctcacgacgcagcactcctagaaatggagaataaccacaccgtggctataaccatactgcaggacgaccacgatcacaaagtgcaagaacttatgtcgacacatgaacttgaaaaaaaggaactggaagagaattttgagaaattgagactgtctttgcaagaccaagtggacacactgacctttcaatcacaatccttgcgtgaccgagccaggagatttgaggaggcgctgcggaagaatactgaagagcaactggagatcgccctggccccttatcagcatctggaggaggatatgaagtctctcaaacaagtgcttgagatgaagaaccaacagatacacgaacaggaaaagaagatcctggagctggagaaattagctgagaaaaacatcatcctggaagaaaagatccaggttcttcagcagcagaatgaggatcttaaggcccgaatcgaccagaatactgtagtcaccagacagctttccgaggaaaacgccaatcttcaggaatacgtcgaaaaagaaacacaagaaaagaaaaggctgagcaggaccaatgaggagctgctgtggaagctgcagacaggcgatcctacgtctcccatcaagctaagcccaacaagccccgtttaccgagggtcaagctcagggcctagctctccagctcgtgtgagtacaactcctcgatag

SEQ ID NO: 185298 - DNA, 918 bp, Artificial Sequence
  derived and/or modified sequence
atggaagcagaaagctttccctgtctgttgaggccatttttcaaggaaagatcctgcgcacttcggccagcttttcatactgccaaatgcgagaaacttcagaaagagaaggaggaattagagcggaggttcgaagccgaaatggcacgcctacaggaggaacatggtgaccagcttctgtccatacgatgtcagcaccaggagcaggtggaggaccttactgcctcgcatgacgccgcactgctggagatggagaacaaccacaccgtggccattacaatacttcaggatgatcacgatcataaagtgcaagaactcatgagcacgcacgaactggaaaagaaagaattggaagagaacttcgagaaactccgcttgagcctccaggatcaggtcgacactctgacctttcaatcccagagcctcagggaccgcgcaagacgtttcgaggaggccctgcggaaaaacacggaggagcagctcgagatcgctctggctccttatcaacacctggaggaagatatgaagtcactgaagcaagtgcttgagatgaagaatcagcagattcacgagcaggagaagaagatcctggagttggaaaagctggctgaaaagaacatcatactcgaagagaagatacaagtgctccagcagcagaatgaggatctgaaagcccgaatcgaccaaaatacagttgtgactaggcagttgagcgaggagaatgctaacttgcaggaatacgtggagaaagaaacccaggaaaagaaaaggctatctcgaactaacgaggaactgctttggaagctccagacgggtgaccccacctcccctattaagttatcgcccacatcacccgtgtacagaggcagttcatccggccctagctcccccgctagagttagcactacccctaggtag

SEQ ID NO: 185299 - DNA, 777 bp, Artificial Sequence
  derived and/or modified sequence
atggctcgcctgcaggaggagcatggcgaccagctactttccattcgctgtcaacatcaagagcaagttgaagatttgactgcttcccatgatgccgcactgctcgaaatggagaacaaccacaccgtggccataaccatactgcaggatgaccacgaccataaggtacaggaactgatgagtacacacgagctggaaaagaaggagctggaggagaatttcgagaaattgcgactgagcctacaggatcaggttgatactcttacctttcaaagtcaaagccttcgggacagggcacgccgatttgaagaggcactgaggaagaacacagaggaacagctagaaattgcactggccccttaccagcaccttgaggaggacatgaaatcgttgaagcaagtgcttgaaatgaagaatcagcagatccacgaacaggaaaagaagatcctggagttagaaaagctggctgagaaaaatatcatattggaagagaaaattcaggtgttgcaacagcagaatgaagacttaaaggcaaggatcgaccagaacacagtggttacgcggcagctttcagaagaaaatgccaacctgcaggagtacgtggagaaggaaactcaggagaaaaaaaggctcagtcgaacaaatgaagagcttttgtggaagttacagaccggcgatcccacctctcctatcaaacttagtcctactagtccagtgtatcgagggagtagctctgggcctagttcccctgctagggtcagcaccaccccacggtag

SEQ ID NO: 185300 - DNA, 1165 bp, Artificial Sequence
  derived and/or modified sequence
agccaagggaaccacatggaagttgtgacagctcccagcggcgcgcccctttcgtgtgtgccggtacctcggcttaggagttgcccgctgacaccttgaatgaaggaggtccccttgccagccagcctgccgggatgggccattgctgctgcaagccttataactgccttcagtgcctggacaagacgccttccatacagcaaagtgcgagaaactacaaaaggagaaggaggagctggagaggcggttcgaggacgaggtgaagaggctgggctggcagcagcaggccgagctccaggagctggaggagcggctgcagctgcaattcgaggcggaaatggcgcgcctgcaggaggagcacggtgaccagctgctgagcatccggtgtcaacaccaggagcaggtggaagatctcaccgccagccatgatgctgctctcctagagatggaaaataaccacacagttgccatcacaatcctgcaggatgaccacgaccacaaagtccaagaattgatgtccactcatgagcttgaaaagaaagaattggaagaaaattttgaaaaactgcggctgtcattgcaggaccaggtggacacgctgaccttccagagccagtctctgcgggacagagcccgccgcttcgaagaggccttgaggaagaacacagaggagcagctggagattgcattggctccttatcagcacttggaagaagacatgaagagtctgaagcaggtattagaaatgaagaatcagcaaatacacgagcaagaaaagaagattcttgagctggaaaagctggcagaaaagaacattatcctagaagaaaagatccaggttctccaacagcagaacgaagacctcaaagcaaggattgaccaaaacacagttgtcaccagacagctgtcggaggaaaatgctaacctccaggaatatgttgagaaggaaacccaggagaagaagagattgagccgaaccaatgaagagctgctttggaagctccaaactggggacccgaccagtccgattaaactctcgcccacatctcccgtttaccgcggctcctcctcggggccctcctctccggccagagtcagcacaacacccagatgacgccactacacggcctgcgggagctccggcttctcgtcctccggtctccac

SEQ ID NO: 185301 - protein, 1346 aa, Artificial Sequence
  derived and/or modified sequence
MKSPRRTTLCLMFIVIYSSKAALNWNYESTIHPLSLHEHEPAGEEALRQKRAVATKSPTAEEYTVNIEISFENASFLDPIKAYLNSLSFPIHGNNTDQITDILSINVTTVCRPAGNEIWCSCETGYGWPRERCLHNLICQERDVFLPGHHCSCLKELPPNGPFCLLQEDVTLNMRVRLNVGFQEDLMNTSSALYRSYKTDLETAFRKGYGILPGFKGVTVTGFKSGSVVVTYEVKTTPPSLELIHKANEQVVQSLNQTYKMDYNSFQAVTINESNFFVTPEIIFEGDTVSLVCEKEVLSSNVSWRYEEQQLEIQNSSRFSIYTALFNNMTSVSKLTIHNITPGDAGEYVCKLILDIFEYECKKKIDVMPIQILANEEMKVMCDNNPVSLNCCSQGNVNWSKVEWKQEGKINIPGTPETDIDSSCSRYTLKADGTQCPSGSSGTTVIYTCEFISAYGARGSANIKVTFISVANLTITPDPISVSEGQNFSIKCISDVSNYDEVYWNTSAGIKIYQRFYTTRRYLDGAESVLTVKTSTREWNGTYHCIFRYKNSYSIATKDVIVHPLPLKLNIMVDPLEATVSCSGSHHIKCCIEEDGDYKVTFHTGSSSLPAAKEVNKKQVCYKHNFNASSVSWCSKTVDVCCHFTNAANNSVWSPSMKLNLVPGENITCQDPVIGVGEPGKVIQKLCRFSNVPSSPESPIGGTITYKCVGSQWEEKRNDCISAPINSLLQMAKALIKSPSQDEMLPTYLKDLSISIDKAEHEISSSPGSLGAIINILDLLSTVPTQVNSEMMTHVLSTVNVILGKPVLNTWKVLQQQWTNQSSQLLHSVERFSQALQSGDSPPLSFSQTNVQMSSMVIKSSHPETYQQRFVFPYFDLWGNVVIDKSYLENLQSDSSIVTMAFPTLQAILAQDIQENNFAESLVMTTTVSHNTTMPFRISMTFKNNSPSGGETKCVFWNFRLANNTGGWDSSGCYVEEGDGDNVTCICDHLTSFSILMSPDSPDPSSLLGILLDIISYVGVGFSILSLAACLVVEAVVWKSVTKNRTSYMRHTCIVNIAASLLVANTWFIVVAAIQDNRYILCKTACVAATFFIHFFYLSVFFWMLTLGLMLFYRLVFILHETSRSTQKAIAFCLGYGCPLAISVITLGATQPREVYTRKNVCWLNWEDTKALLAFAIPALIIVVVNITITIVVITKILRPSIGDKPCKQEKSSLFQISKSIGVLTPLLGLTWGFGLTTVFPGTNLVFHIIFAILNVFQGLFILLFGCLWDLKVQEALLNKFSLSRWSSQHSKSTSLGSSTPVFSMSSPISRRFNNLFGKTGTYNVSTPEATSSSLENSSSASSLLN

SEQ ID NO: 185302 - protein, 1326 aa, Artificial Sequence
  derived and/or modified sequence
MKSPRRTTLCLMFIVIYSSKAALNWNYESTIHPLSLHEHEPAGEEALRQKRAVATKSPTAEEYTVNIEISFENASFLDPIKAYLNSLSFPIHGNNTDQITDILSINVTTVCRPAGNEIWCSCETGYGWPRERCLHNLICQERDVFLPGHHCSCLKELPPNGPFCLLQEDVTLNMRVRLNVGFQEDLMNTSSALYRSYKTDLETAFRKGYGILPGFKGVTVTGFKSGSVVVTYEVKTTPPSLELIHKANEQVVQSLNQTYKMDYNSFQAVTINESNFFVTPEIIFEGDTVSLVCEKEVLSSNVSWRYEEQQLEIQNSSRFSIYTALFNNMTSVSKLTIHNITPGDAGEYVCKLILDIFEYECKKKIDVMPIQILANEEMKVMCDNNPVSLNCCSQGNVNWSKVEWKQEGKINIPGTPETDIDSSCSRYTLKADGTQCPSGSSGTTVIYTCEFISAYGARGSANIKVTFISVANLTITPDPISVSEGQNFSIKCISDVSNYDEVYWNTSAGIKIYQRFYTTRRYLDGAESVLTVKTSTREWNGTYHCIFRYKNSYSIATKDVIVHPLPLKLNIMVDPLEATVSCSGSHHIKCCIEEDGDYKVTFHTGSSSLPAAKEVNKKQVCYKHNFNASSVSWCSKTVDVCCHFTNAANNSVWSPSMKLNLVPGENITCQDPVIGVGEPGKVIQKLCRFSNVPSSPESPIGGTITYKCVGSQWEEKRNDCISAPINSLLQMAKALIKSPSQDEMLPTYLKDLSISIDKAEHEISSSPGSLGAIINILDLLSTVPTQVNSEMMTHVLSTVNVILGKPVLNTWKVLQQQWTNQSSQLLHSVERFSQALQSGDSPPLSFSQTNVQMSSMVIKSSHPETYQQRFVFPYFDLWGNVVIDKSYLENLQSDSSIVTMAFPTLQAILAQDIQENNFAESLVMTTTVSHNTTMPFRISMTFKNNSPSGGETKCVFWNFRLANNTGGWDSSGCYVEEGDGDNVTCICDHLTSFSILMSPDSPDPSSLLGILLDIISYVGVGFSILSLAACLVVEAVVWKSVTKNRTSYMRHTCIVNIAASLLVANTWFIVVAAIQDNRYILCKTACVAATFFIHFFYLSVFFWMLTLGLMLFYRLVFILHETSRSTQKAIAFCLGYGCPLAISVITLGATQPREVYTRKNVCWLNWEDTKALLAFAIPALIIVVVNITITIVVITKILRPSIGDKPCKQEKSSLFQISKSIGVLTPLLGLTWGFGLTTVFPGTNLVFHIIFAILNVFQGLFILLFGCLWDLKSTSLGSSTPVFSMSSPISRRFNNLFGKTGTYNVSTPEATSSSLENSSSASSLLN

SEQ ID NO: 185303 - protein, 1204 aa, Artificial Sequence
  derived and/or modified sequence
MKSPRRTTLCLMFIVIYSSKAALNWNYESTIHPLSLHEHEPAGEEALRQKRAVATKSPTAEEYTVNIEISFENASFLDPIKAYLNSLSFPIHGNNTDQITDILSINVTTVCRPAGNEIWCSCETGYGWPRERCLHNLICQERDVFLPGHHCSCLKELPPNGPFCLLQEDVTLNMRVRLNVGFQEDLMNTSSALYRSYKTDLETAFRKGYGILPGFKGVTVTGFKSGSVVVTYEVKTTPPSLELIHKANEQVVQSLNQTYKMDYNSFQAVTIRTPETDIDSSCSRYTLKADGTQCPSGSSGTTVIYTCEFISAYGARGSANIKVTFISVANLTITPDPISVSEGQNFSIKCISDVSNYDEVYWNTSAGIKIYQRFYTTRRYLDGAESVLTVKTSTREWNGTYHCIFRYKNSYSIATKDVIVHPLPLKLNIMVDPLEATVSCSGSHHIKCCIEEDGDYKVTFHTGSSSLPAAKEVNKKQVCYKHNFNASSVSWCSKTVDVCCHFTNAANNSVWSPSMKLNLVPGENITCQDPVIGVGEPGKVIQKLCRFSNVPSSPESPIGGTITYKCVGSQWEEKRNDCISAPINSLLQMAKALIKSPSQDEMLPTYLKDLSISIDKAEHEISSSPGSLGAIINILDLLSTVPTQVNSEMMTHVLSTVNVILGKPVLNTWKVLQQQWTNQSSQLLHSVERFSQALQSGDSPPLSFSQTNVQMSSMVIKSSHPETYQQRFVFPYFDLWGNVVIDKSYLENLQSDSSIVTMAFPTLQAILAQDIQENNFAESLVMTTTVSHNTTMPFRISMTFKNNSPSGGETKCVFWNFRLANNTGGWDSSGCYVEEGDGDNVTCICDHLTSFSILMSPDSPDPSSLLGILLDIISYVGVGFSILSLAACLVVEAVVWKSVTKNRTSYMRHTCIVNIAASLLVANTWFIVVAAIQDNRYILCKTACVAATFFIHFFYLSVFFWMLTLGLMLFYRLVFILHETSRSTQKAIAFCLGYGCPLAISVITLGATQPREVYTRKNVCWLNWEDTKALLAFAIPALIIVVVNITITIVVITKILRPSIGDKPCKQEKSSLFQISKSIGVLTPLLGLTWGFGLTTVFPGTNLVFHIIFAILNVFQGLFILLFGCLWDLKVQEALLNKFSLSRWSSQHSKSTSLGSSTPVFSMSSPISRRFNNLFGKTGTYNVSTPEATSSSLENSSSASSLLN

SEQ ID NO: 185304 - DNA, 4041 bp, Artificial Sequence
  derived and/or modified sequence
atgaagagccccagaagaaccaccctgtgcctgatgttcatcgtgatctacagcagcaaggccgccctgaactggaactacgagagcaccatccaccccctgagcctgcacgagcacgagcccgccggcgaggaggccctgagacagaagagagccgtggccaccaagagccccaccgccgaggagtacaccgtgaacatcgagatcagcttcgagaacgccagcttcctggaccccatcaaggcctacctgaacagcctgagcttccccatccacggcaacaacaccgaccagatcaccgacatcctgagcatcaacgtgaccaccgtgtgcagacccgccggcaacgagatctggtgcagctgcgagaccggctacggctggcccagagagagatgcctgcacaacctgatctgccaggagagagacgtgttcctgcccggccaccactgcagctgcctgaaggagctgccccccaacggccccttctgcctgctgcaggaggacgtgaccctgaacatgagagtgagactgaacgtgggcttccaggaggacctgatgaacaccagcagcgccctgtacagaagctacaagaccgacctggagaccgccttcagaaagggctacggcatcctgcccggcttcaagggcgtgaccgtgaccggcttcaagagcggcagcgtggtggtgacctacgaggtgaagaccaccccccccagcctggagctgatccacaaggccaacgagcaggtggtgcagagcctgaaccagacctacaagatggactacaacagcttccaggccgtgaccatcaacgagagcaacttcttcgtgacccccgagatcatcttcgagggcgacaccgtgagcctggtgtgcgagaaggaggtgctgagcagcaacgtgagctggagatacgaggagcagcagctggagatccagaacagcagcagattcagcatctacaccgccctgttcaacaacatgaccagcgtgagcaagctgaccatccacaacatcacccccggcgacgccggcgagtacgtgtgcaagctgatcctggacatcttcgagtacgagtgcaagaagaagatcgacgtgatgcccatccagatcctggccaacgaggagatgaaggtgatgtgcgacaacaaccccgtgagcctgaactgctgcagccagggcaacgtgaactggagcaaggtggagtggaagcaggagggcaagatcaacatccccggcacccccgagaccgacatcgacagcagctgcagcagatacaccctgaaggccgacggcacccagtgccccagcggcagcagcggcaccaccgtgatctacacctgcgagttcatcagcgcctacggcgccagaggcagcgccaacatcaaggtgaccttcatcagcgtggccaacctgaccatcacccccgaccccatcagcgtgagcgagggccagaacttcagcatcaagtgcatcagcgacgtgagcaactacgacgaggtgtactggaacaccagcgccggcatcaagatctaccagagattctacaccaccagaagatacctggacggcgccgagagcgtgctgaccgtgaagaccagcaccagagagtggaacggcacctaccactgcatcttcagatacaagaacagctacagcatcgccaccaaggacgtgatcgtgcaccccctgcccctgaagctgaacatcatggtggaccccctggaggccaccgtgagctgcagcggcagccaccacatcaagtgctgcatcgaggaggacggcgactacaaggtgaccttccacaccggcagcagcagcctgcccgccgccaaggaggtgaacaagaagcaggtgtgctacaagcacaacttcaacgccagcagcgtgagctggtgcagcaagaccgtggacgtgtgctgccacttcaccaacgccgccaacaacagcgtgtggagccccagcatgaagctgaacctggtgcccggcgagaacatcacctgccaggaccccgtgatcggcgtgggcgagcccggcaaggtgatccagaagctgtgcagattcagcaacgtgcccagcagccccgagagccccatcggcggcaccatcacctacaagtgcgtgggcagccagtgggaggagaagagaaacgactgcatcagcgcccccatcaacagcctgctgcagatggccaaggccctgatcaagagccccagccaggacgagatgctgcccacctacctgaaggacctgagcatcagcatcgacaaggccgagcacgagatcagcagcagccccggcagcctgggcgccatcatcaacatcctggacctgctgagcaccgtgcccacccaggtgaacagcgagatgatgacccacgtgctgagcaccgtgaacgtgatcctgggcaagcccgtgctgaacacctggaaggtgctgcagcagcagtggaccaaccagagcagccagctgctgcacagcgtggagagattcagccaggccctgcagagcggcgacagcccccccctgagcttcagccagaccaacgtgcagatgagcagcatggtgatcaagagcagccaccccgagacctaccagcagagattcgtgttcccctacttcgacctgtggggcaacgtggtgatcgacaagagctacctggagaacctgcagagcgacagcagcatcgtgaccatggccttccccaccctgcaggccatcctggcccaggacatccaggagaacaacttcgccgagagcctggtgatgaccaccaccgtgagccacaacaccaccatgcccttcagaatcagcatgaccttcaagaacaacagccccagcggcggcgagaccaagtgcgtgttctggaacttcagactggccaacaacaccggcggctgggacagcagcggctgctacgtggaggagggcgacggcgacaacgtgacctgcatctgcgaccacctgaccagcttcagcatcctgatgagccccgacagccccgaccccagcagcctgctgggcatcctgctggacatcatcagctacgtgggcgtgggcttcagcatcctgagcctggccgcctgcctggtggtggaggccgtggtgtggaagagcgtgaccaagaacagaaccagctacatgagacacacctgcatcgtgaacatcgccgccagcctgctggtggccaacacctggttcatcgtggtggccgccatccaggacaacagatacatcctgtgcaagaccgcctgcgtggccgccaccttcttcatccacttcttctacctgagcgtgttcttctggatgctgaccctgggcctgatgctgttctacagactggtgttcatcctgcacgagaccagcagaagcacccagaaggccatcgccttctgcctgggctacggctgccccctggccatcagcgtgatcaccctgggcgccacccagcccagagaggtgtacaccagaaagaacgtgtgctggctgaactgggaggacaccaaggccctgctggccttcgccatccccgccctgatcatcgtggtggtgaacatcaccatcaccatcgtggtgatcaccaagatcctgagacccagcatcggcgacaagccctgcaagcaggagaagagcagcctgttccagatcagcaagagcatcggcgtgctgacccccctgctgggcctgacctggggcttcggcctgaccaccgtgttccccggcaccaacctggtgttccacatcatcttcgccatcctgaacgtgttccagggcctgttcatcctgctgttcggctgcctgtgggacctgaaggtgcaggaggccctgctgaacaagttcagcctgagcagatggagcagccagcacagcaagagcaccagcctgggcagcagcacccccgtgttcagcatgagcagccccatcagcagaagattcaacaacctgttcggcaagaccggcacctacaacgtgagcacccccgaggccaccagcagcagcctggagaacagcagcagcgccagcagcctgctgaactag

SEQ ID NO: 185305 - DNA, 3981 bp, Artificial Sequence
  derived and/or modified sequence
atgaagagccccagaagaaccaccctgtgcctgatgttcatcgtgatctacagcagcaaggccgccctgaactggaactacgagagcaccatccaccccctgagcctgcacgagcacgagcccgccggcgaggaggccctgagacagaagagagccgtggccaccaagagccccaccgccgaggagtacaccgtgaacatcgagatcagcttcgagaacgccagcttcctggaccccatcaaggcctacctgaacagcctgagcttccccatccacggcaacaacaccgaccagatcaccgacatcctgagcatcaacgtgaccaccgtgtgcagacccgccggcaacgagatctggtgcagctgcgagaccggctacggctggcccagagagagatgcctgcacaacctgatctgccaggagagagacgtgttcctgcccggccaccactgcagctgcctgaaggagctgccccccaacggccccttctgcctgctgcaggaggacgtgaccctgaacatgagagtgagactgaacgtgggcttccaggaggacctgatgaacaccagcagcgccctgtacagaagctacaagaccgacctggagaccgccttcagaaagggctacggcatcctgcccggcttcaagggcgtgaccgtgaccggcttcaagagcggcagcgtggtggtgacctacgaggtgaagaccaccccccccagcctggagctgatccacaaggccaacgagcaggtggtgcagagcctgaaccagacctacaagatggactacaacagcttccaggccgtgaccatcaacgagagcaacttcttcgtgacccccgagatcatcttcgagggcgacaccgtgagcctggtgtgcgagaaggaggtgctgagcagcaacgtgagctggagatacgaggagcagcagctggagatccagaacagcagcagattcagcatctacaccgccctgttcaacaacatgaccagcgtgagcaagctgaccatccacaacatcacccccggcgacgccggcgagtacgtgtgcaagctgatcctggacatcttcgagtacgagtgcaagaagaagatcgacgtgatgcccatccagatcctggccaacgaggagatgaaggtgatgtgcgacaacaaccccgtgagcctgaactgctgcagccagggcaacgtgaactggagcaaggtggagtggaagcaggagggcaagatcaacatccccggcacccccgagaccgacatcgacagcagctgcagcagatacaccctgaaggccgacggcacccagtgccccagcggcagcagcggcaccaccgtgatctacacctgcgagttcatcagcgcctacggcgccagaggcagcgccaacatcaaggtgaccttcatcagcgtggccaacctgaccatcacccccgaccccatcagcgtgagcgagggccagaacttcagcatcaagtgcatcagcgacgtgagcaactacgacgaggtgtactggaacaccagcgccggcatcaagatctaccagagattctacaccaccagaagatacctggacggcgccgagagcgtgctgaccgtgaagaccagcaccagagagtggaacggcacctaccactgcatcttcagatacaagaacagctacagcatcgccaccaaggacgtgatcgtgcaccccctgcccctgaagctgaacatcatggtggaccccctggaggccaccgtgagctgcagcggcagccaccacatcaagtgctgcatcgaggaggacggcgactacaaggtgaccttccacaccggcagcagcagcctgcccgccgccaaggaggtgaacaagaagcaggtgtgctacaagcacaacttcaacgccagcagcgtgagctggtgcagcaagaccgtggacgtgtgctgccacttcaccaacgccgccaacaacagcgtgtggagccccagcatgaagctgaacctggtgcccggcgagaacatcacctgccaggaccccgtgatcggcgtgggcgagcccggcaaggtgatccagaagctgtgcagattcagcaacgtgcccagcagccccgagagccccatcggcggcaccatcacctacaagtgcgtgggcagccagtgggaggagaagagaaacgactgcatcagcgcccccatcaacagcctgctgcagatggccaaggccctgatcaagagccccagccaggacgagatgctgcccacctacctgaaggacctgagcatcagcatcgacaaggccgagcacgagatcagcagcagccccggcagcctgggcgccatcatcaacatcctggacctgctgagcaccgtgcccacccaggtgaacagcgagatgatgacccacgtgctgagcaccgtgaacgtgatcctgggcaagcccgtgctgaacacctggaaggtgctgcagcagcagtggaccaaccagagcagccagctgctgcacagcgtggagagattcagccaggccctgcagagcggcgacagcccccccctgagcttcagccagaccaacgtgcagatgagcagcatggtgatcaagagcagccaccccgagacctaccagcagagattcgtgttcccctacttcgacctgtggggcaacgtggtgatcgacaagagctacctggagaacctgcagagcgacagcagcatcgtgaccatggccttccccaccctgcaggccatcctggcccaggacatccaggagaacaacttcgccgagagcctggtgatgaccaccaccgtgagccacaacaccaccatgcccttcagaatcagcatgaccttcaagaacaacagccccagcggcggcgagaccaagtgcgtgttctggaacttcagactggccaacaacaccggcggctgggacagcagcggctgctacgtggaggagggcgacggcgacaacgtgacctgcatctgcgaccacctgaccagcttcagcatcctgatgagccccgacagccccgaccccagcagcctgctgggcatcctgctggacatcatcagctacgtgggcgtgggcttcagcatcctgagcctggccgcctgcctggtggtggaggccgtggtgtggaagagcgtgaccaagaacagaaccagctacatgagacacacctgcatcgtgaacatcgccgccagcctgctggtggccaacacctggttcatcgtggtggccgccatccaggacaacagatacatcctgtgcaagaccgcctgcgtggccgccaccttcttcatccacttcttctacctgagcgtgttcttctggatgctgaccctgggcctgatgctgttctacagactggtgttcatcctgcacgagaccagcagaagcacccagaaggccatcgccttctgcctgggctacggctgccccctggccatcagcgtgatcaccctgggcgccacccagcccagagaggtgtacaccagaaagaacgtgtgctggctgaactgggaggacaccaaggccctgctggccttcgccatccccgccctgatcatcgtggtggtgaacatcaccatcaccatcgtggtgatcaccaagatcctgagacccagcatcggcgacaagccctgcaagcaggagaagagcagcctgttccagatcagcaagagcatcggcgtgctgacccccctgctgggcctgacctggggcttcggcctgaccaccgtgttccccggcaccaacctggtgttccacatcatcttcgccatcctgaacgtgttccagggcctgttcatcctgctgttcggctgcctgtgggacctgaagagcaccagcctgggcagcagcacccccgtgttcagcatgagcagccccatcagcagaagattcaacaacctgttcggcaagaccggcacctacaacgtgagcacccccgaggccaccagcagcagcctggagaacagcagcagcgccagcagcctgctgaactag

SEQ ID NO: 185306 - DNA, 3615 bp, Artificial Sequence
  derived and/or modified sequence
atgaagagccccagaagaaccaccctgtgcctgatgttcatcgtgatctacagcagcaaggccgccctgaactggaactacgagagcaccatccaccccctgagcctgcacgagcacgagcccgccggcgaggaggccctgagacagaagagagccgtggccaccaagagccccaccgccgaggagtacaccgtgaacatcgagatcagcttcgagaacgccagcttcctggaccccatcaaggcctacctgaacagcctgagcttccccatccacggcaacaacaccgaccagatcaccgacatcctgagcatcaacgtgaccaccgtgtgcagacccgccggcaacgagatctggtgcagctgcgagaccggctacggctggcccagagagagatgcctgcacaacctgatctgccaggagagagacgtgttcctgcccggccaccactgcagctgcctgaaggagctgccccccaacggccccttctgcctgctgcaggaggacgtgaccctgaacatgagagtgagactgaacgtgggcttccaggaggacctgatgaacaccagcagcgccctgtacagaagctacaagaccgacctggagaccgccttcagaaagggctacggcatcctgcccggcttcaagggcgtgaccgtgaccggcttcaagagcggcagcgtggtggtgacctacgaggtgaagaccaccccccccagcctggagctgatccacaaggccaacgagcaggtggtgcagagcctgaaccagacctacaagatggactacaacagcttccaggccgtgaccatcagaacccccgagaccgacatcgacagcagctgcagcagatacaccctgaaggccgacggcacccagtgccccagcggcagcagcggcaccaccgtgatctacacctgcgagttcatcagcgcctacggcgccagaggcagcgccaacatcaaggtgaccttcatcagcgtggccaacctgaccatcacccccgaccccatcagcgtgagcgagggccagaacttcagcatcaagtgcatcagcgacgtgagcaactacgacgaggtgtactggaacaccagcgccggcatcaagatctaccagagattctacaccaccagaagatacctggacggcgccgagagcgtgctgaccgtgaagaccagcaccagagagtggaacggcacctaccactgcatcttcagatacaagaacagctacagcatcgccaccaaggacgtgatcgtgcaccccctgcccctgaagctgaacatcatggtggaccccctggaggccaccgtgagctgcagcggcagccaccacatcaagtgctgcatcgaggaggacggcgactacaaggtgaccttccacaccggcagcagcagcctgcccgccgccaaggaggtgaacaagaagcaggtgtgctacaagcacaacttcaacgccagcagcgtgagctggtgcagcaagaccgtggacgtgtgctgccacttcaccaacgccgccaacaacagcgtgtggagccccagcatgaagctgaacctggtgcccggcgagaacatcacctgccaggaccccgtgatcggcgtgggcgagcccggcaaggtgatccagaagctgtgcagattcagcaacgtgcccagcagccccgagagccccatcggcggcaccatcacctacaagtgcgtgggcagccagtgggaggagaagagaaacgactgcatcagcgcccccatcaacagcctgctgcagatggccaaggccctgatcaagagccccagccaggacgagatgctgcccacctacctgaaggacctgagcatcagcatcgacaaggccgagcacgagatcagcagcagccccggcagcctgggcgccatcatcaacatcctggacctgctgagcaccgtgcccacccaggtgaacagcgagatgatgacccacgtgctgagcaccgtgaacgtgatcctgggcaagcccgtgctgaacacctggaaggtgctgcagcagcagtggaccaaccagagcagccagctgctgcacagcgtggagagattcagccaggccctgcagagcggcgacagcccccccctgagcttcagccagaccaacgtgcagatgagcagcatggtgatcaagagcagccaccccgagacctaccagcagagattcgtgttcccctacttcgacctgtggggcaacgtggtgatcgacaagagctacctggagaacctgcagagcgacagcagcatcgtgaccatggccttccccaccctgcaggccatcctggcccaggacatccaggagaacaacttcgccgagagcctggtgatgaccaccaccgtgagccacaacaccaccatgcccttcagaatcagcatgaccttcaagaacaacagccccagcggcggcgagaccaagtgcgtgttctggaacttcagactggccaacaacaccggcggctgggacagcagcggctgctacgtggaggagggcgacggcgacaacgtgacctgcatctgcgaccacctgaccagcttcagcatcctgatgagccccgacagccccgaccccagcagcctgctgggcatcctgctggacatcatcagctacgtgggcgtgggcttcagcatcctgagcctggccgcctgcctggtggtggaggccgtggtgtggaagagcgtgaccaagaacagaaccagctacatgagacacacctgcatcgtgaacatcgccgccagcctgctggtggccaacacctggttcatcgtggtggccgccatccaggacaacagatacatcctgtgcaagaccgcctgcgtggccgccaccttcttcatccacttcttctacctgagcgtgttcttctggatgctgaccctgggcctgatgctgttctacagactggtgttcatcctgcacgagaccagcagaagcacccagaaggccatcgccttctgcctgggctacggctgccccctggccatcagcgtgatcaccctgggcgccacccagcccagagaggtgtacaccagaaagaacgtgtgctggctgaactgggaggacaccaaggccctgctggccttcgccatccccgccctgatcatcgtggtggtgaacatcaccatcaccatcgtggtgatcaccaagatcctgagacccagcatcggcgacaagccctgcaagcaggagaagagcagcctgttccagatcagcaagagcatcggcgtgctgacccccctgctgggcctgacctggggcttcggcctgaccaccgtgttccccggcaccaacctggtgttccacatcatcttcgccatcctgaacgtgttccagggcctgttcatcctgctgttcggctgcctgtgggacctgaaggtgcaggaggccctgctgaacaagttcagcctgagcagatggagcagccagcacagcaagagcaccagcctgggcagcagcacccccgtgttcagcatgagcagccccatcagcagaagattcaacaacctgttcggcaagaccggcacctacaacgtgagcacccccgaggccaccagcagcagcctggagaacagcagcagcgccagcagcctgctgaactag

SEQ ID NO: 185307 - DNA, 2154 bp, Artificial Sequence
  derived and/or modified sequence
gactacagaagccaggtgcacgtggagagcagagagggcctgtggaagatcaagggcaagatcaagaagctgggcagcagcgagaaggtgaccgagagcaagggcgagaacatcacctgccaggaccccgtgatcggcgtgggcgagcccggcaaggtgatccagaagctgtgcagattcagcaacgtgcccagcagccccgagagccccatcggcggcaccatcacctacaagtgcgtgggcagccagtgggaggagaagagaaacgactgcatcagcgcccccatcaacagcctgctgcagatggccaaggccctgatcaagagccccagccaggacgagatgctgcccacctacctgaaggacctgagcatcagcatcgacaaggccgagcacgagatcagcagcagccccggcagcctgggcgccatcatcaacatcctggacctgctgagcaccgtgcccacccaggtgaacagcgagatgatgacccacgtgctgagcaccgtgaacgtgatcctgggcaagcccgtgctgaacacctggaaggtgctgcagcagcagtggaccaaccagagcagccagctgctgcacagcgtggagagattcagccaggccctgcagagcggcgacagcccccccctgagcttcagccagaccaacgtgcagatgagcagcatggtgatcaagagcagccaccccgagacctaccagcagagattcgtgttcccctacttcgacctgtggggcaacgtggtgatcgacaagagctacctggagaacctgcagagcgacagcagcatcgtgaccatggccttccccaccctgcaggccatcctggcccaggacatccaggagaacaacttcgccgagagcctggtgatgaccaccaccgtgagccacaacaccaccatgcccttcagaatcagcatgaccttcaagaacaacagccccagcggcggcgagaccaagtgcgtgttctggaacttcagactggccaacaacaccggcggctgggacagcagcggctgctacgtggaggagggcgacggcgacaacgtgacctgcatctgcgaccacctgaccagcttcagcatcctgatgagccccgacagccccgaccccagcagcctgctgggcatcctgctggacatcatcagctacgtgggcgtgggcttcagcatcctgagcctggccgcctgcctggtggtggaggccgtggtgtggaagagcgtgaccaagaacagaaccagctacatgagacacacctgcatcgtgaacatcgccgccagcctgctggtggccaacacctggttcatcgtggtggccgccatccaggacaacagatacatcctgtgcaagaccgcctgcgtggccgccaccttcttcatccacttcttctacctgagcgtgttcttctggatgctgaccctgggcctgatgctgttctacagactggtgttcatcctgcacgagaccagcagaagcacccagaaggccatcgccttctgcctgggctacggctgccccctggccatcagcgtgatcaccctgggcgccacccagcccagagaggtgtacaccagaaagaacgtgtgctggctgaactgggaggacaccaaggccctgctggccttcgccatccccgccctgatcatcgtggtggtgaacatcaccatcaccatcgtggtgatcaccaagatcctgagacccagcatcggcgacaagccctgcaagcaggagaagagcagcctgttccagatcagcaagagcatcggcgtgctgacccccctgctgggcctgacctggggcttcggcctgaccaccgtgttccccggcaccaacctggtgttccacatcatcttcgccatcctgaacgtgttccagggcctgttcatcctgctgttcggctgcctgtgggacctgaaggtgcaggaggccctgctgaacaagttcagcctgagcagatggagcagccagcacagcaagagcaccagcctgggcagcagcacccccgtgttcagcatgagcagccccatcagcagaagattcaacaacctgttcggcaagaccggcacctacaacgtgagcacccccgaggccaccagcagcagcctggagaacagcagcagcgccagcagcctgctgaactag

SEQ ID NO: 185308 - DNA, 5641 bp, Artificial Sequence
  derived and/or modified sequence
agagaacagaaggcagttcacctctgctcccgacagcctgggaacccgcaagagccccagcatttgaagtctggtcttgtgaaaccccaccctcctctggctgtgtgattgaatgggatgccctcgaggttcacctcacctgagagggttttgggcagatcagcagtaaggtgttaaattttagaagcctgaaaactccagaagagaaagatgaaatccccaaggagaaccactttgtgcctcatgtttattgtgatttattcttccaaagctgcactgaactggaattacgagtctactattcatcctttgagtcttcatgaacatgaaccagctggtgaagaggcactgaggcaaaaacgagccgttgccacaaaaagtcctacggctgaagaatacactgttaatattgagatcagttttgaaaatgcatccttcctggatcctatcaaagcctacttgaacagcctcagttttccaattcatgggaataacactgaccaaattaccgacattttgagcataaatgtgacaacagtctgcagacctgctggaaatgaaatctggtgctcctgcgagacaggttatgggtggcctcgggaaaggtgtcttcacaatctcatttgtcaagagcgtgacgtcttcctcccagggcaccattgcagttgccttaaagaactgcctcccaatggacctttttgcctgcttcaggaagatgttaccctgaacatgagagtcagactaaatgtaggctttcaagaagacctcatgaacacttcctccgccctctataggtcctacaagaccgacttggaaacagcgttccggaagggttacggaattttaccaggcttcaagggcgtgactgtgacagggttcaagtctggaagtgtggttgtgacatatgaagtcaagactacaccaccatcacttgagttaatacataaagccaatgaacaagttgtacagagcctcaatcagacctacaaaatggactacaactcctttcaagcagttactatcaatgaaagcaatttctttgtcacaccagaaatcatctttgaaggggacacagtcagtctggtgtgtgaaaaggaagttttgtcctccaatgtgtcttggcgctatgaagaacagcagttggaaatccagaacagcagcagattctcgatttacaccgcacttttcaacaacatgacttcggtgtccaagctcaccatccacaacatcactccaggtgatgcaggtgaatatgtttgcaaactgatattagacatttttgaatatgagtgcaagaagaaaatagatgttatgcccatccaaattttggcaaatgaagaaatgaaggtgatgtgcgacaacaatcctgtatctttgaactgctgcagtcagggtaatgttaattggagcaaagtagaatggaagcaggaaggaaaaataaatattccaggaacccctgagacagacatagattctagctgcagcagatacaccctcaaggctgatggaacccagtgcccaagcgggtcgtctggaacaacagtcatctacacttgtgagttcatcagtgcctatggagccagaggcagtgcaaacataaaagtgacattcatctctgtggccaatctaacaataaccccggacccaatttctgtttctgagggacaaaacttttctataaaatgcatcagtgatgtgagtaactatgatgaggtttattggaacacttctgctggaattaaaatataccaaagattttataccacgaggaggtatcttgatggagcagaatcagtactgacagtcaagacctcgaccagggagtggaatggaacctatcactgcatatttagatataagaattcatacagtattgcaaccaaagacgtcattgttcacccgctgcctctaaagctgaacatcatggttgatcctttggaagctactgtttcatgcagtggttcccatcacatcaagtgctgcatagaggaggatggagactacaaagttactttccatacgggttcctcatcccttcctgctgcaaaagaagttaacaaaaaacaagtgtgctacaaacacaatttcaatgcaagctcagtttcctggtgttcaaaaactgttgatgtgtgttgtcactttaccaatgctgctaataattcagtctggagcccatctatgaagctgaatctggttcctggggaaaacatcacatgccaggatcccgtaataggtgtcggagagccggggaaagtcatccagaagctatgccggttctcaaacgttcccagcagccctgagagtcccattggcgggaccatcacttacaaatgtgtaggctcccagtgggaggagaagagaaatgactgcatctctgccccaataaacagtctgctccagatggctaaggctttgatcaagagcccctctcaggatgagatgctccctacatacctgaaggatctttctattagcatagacaaagcggaacatgaaatcagctcttctcctgggagtctgggagccattattaacatccttgatctgctctcaacagttccaacccaagtaaattcagaaatgatgacgcacgtgctctctacggttaatgtcatccttggcaagcccgtcttgaacacctggaaggttttacaacagcaatggaccaatcagagttcacagctactacattcagtggaaagattttcccaagcattacagtcgggagatagccctcctttgtccttctcccaaactaatgtgcagatgagcagcatggtaatcaagtccagccacccagaaacctatcaacagaggtttgttttcccatactttgacctctggggcaatgtggtcattgacaagagctatctagaaaacttgcagtcggattcgtctattgtcaccatggctttcccaactctccaagccatccttgcccaggatatccaggaaaataactttgcagagagcttagtgatgacaaccactgtcagccacaatacaactatgccattcaggatttcaatgacttttaagaacaatagcccttcaggcggcgaaacgaagtgtgtcttctggaacttcaggcttgccaacaacacaggggggtgggacagcagtgggtgctatgtagaagaaggtgatggggacaatgtcacctgtatctgtgaccacctaacatcattctccatcctcatgtcccctgactccccagatcctagttctctcctgggaatactcctggatattatttcttatgttggggtgggcttttccatcttgagcttggcagcctgtctagttgtggaagctgtggtgtggaaatcggtgaccaagaaccggacttcttatatgcgccacacctgcatagtgaatatcgctgcctcccttctggtcgccaacacctggttcattgtggtcgctgccatccaggacaatcgctacatactctgcaagacagcctgtgtggctgccaccttcttcatccacttcttctacctcagcgtcttcttctggatgctgacactgggcctcatgctgttctatcgcctggttttcattctgcatgaaacaagcaggtccactcagaaagccattgccttctgtcttggctatggctgcccacttgccatctcggtcatcacgctgggagccacccagccccgggaagtctatacgaggaagaatgtctgttggctcaactgggaggacaccaaggccctgctggctttcgccatcccagcactgatcattgtggtggtgaacataaccatcactattgtggtcatcaccaagatcctgaggccttccattggagacaagccatgcaagcaggagaagagcagcctgtttcagatcagcaagagcattggggtcctcacaccactcttgggcctcacttggggttttggtctcaccactgtgttcccagggaccaaccttgtgttccatatcatatttgccatcctcaatgtcttccagggattattcattttactctttggatgcctctgggatctgaaggtacaggaagctttgctgaataagttttcattgtcgagatggtcttcacagcactcaaagtcaacatccctgggttcatccacacctgtgttttctatgagttctccaatatcaaggagatttaacaatttgtttggtaaaacaggaacgtataatgtttccaccccagaagcaaccagctcatccctggaaaactcatccagtgcttcttcgttgctcaactaagaacaggataatccaacctacgtgacctcccggggacagtggctgtgcttttaaaaagagatgcttgcaaagcaatggggaacgtgttctcggggcaggtttccgggagcagatgccaaaaagactttttcatagagaagaggctttcttttgtaaagacagaataaaaataattgttatgtttctgtttgttccctccccctcccccttgtgtgataccacatgtgtatagtatttaagtgaaactcaagccctcaaggcccaacttctctgtctatattgtaatatagaatttcgaagagacattttcactttttacacattgggcacaaagataagctttgattaaagtagtaagtaaaaggctacctaggaaatacttcagtgaattctaagaaggaaggaaggaagaaaggaaggaaagaagggagggaaacagggagaaagggaaaaagaagaaaaagagaaagatgaaaataggaacaaataaagacaaacaacattaagggccatattgtaagatttccatgttaatgatctaatataatcactcagtgcaacattgagaatttttttttaatggctcaaaaatggaaactgaaagcaagtcatggggaatgaatactttgggcagtatcttcctgatgtcttcttagctaagaggaggaaaaaaaggctgaaaaaatagggaggaaattccttcatcagaacgacttcaagtggataacaatatttataagaaatgaatggaaggaaatatgatcctcctgagactaactttgtatgttaaggtttgaactaagtgaatgtatctgcagaggaagtattacaaagatatgtcattagatccaagtgctgattaaatttttatagtttatcagaaaagccttatattttagtttgttccacattttgaaagcaaaaaatatatatttgatatacccttcaattgccaaatttgatatgttgcactgaagacagaccctgtcatatatttaatggcttcaagcaggtacttctctgtgcattatagaatagattttaataatcttatagcattgtatattattattgctgttgtcactgttattattattgtggatactggcccttggtgtgttgcatagctccctatgtattctctgtttccatctttaagttcccagaccaatatacattaagagttttgcatggtctaaattgtgtttattccaaccacgtggaaagctcctggaaagaaattttacattcggttgttctgtgctcctaatgacacttgaccttgttgaacaaatggcagagcctttcccaaggatttgattgtttgtgaattatctgcatgtgtgcttttttttggtgtgtatttcattaaaaaatataaatatttatg

SEQ ID NO: 185309 - DNA, 5810 bp, Artificial Sequence
  derived and/or modified sequence
actttttgtttttaaaacagcagcgcggctctcagggatgactctgtgagactgggaggatcatagctgggggaggctgagcgtgggagcggtgctgccagtcctgcctgaaaacgcgaaatgagtcttgcttggttctccctccactgggcgtgagagcccctgcccaggaggcccaggacaaatggccccatagtggaaactgggaagcttttaggcatctgatcagagcgggagccagccgggggaccacagtgctggacaggccaaccaactcaaacttgaagacatgaaatccccaaggagaaccactttgtgcctcatgtttattgtgatttattcttccaaagctgcactgaactggaattacgagtctactattcatcctttgagtcttcatgaacatgaaccagctggtgaagaggcactgaggcaaaaacgagccgttgccacaaaaagtcctacggctgaagaatacactgttaatattgagatcagttttgaaaatgcatccttcctggatcctatcaaagcctacttgaacagcctcagttttccaattcatgggaataacactgaccaaattaccgacattttgagcataaatgtgacaacagtctgcagacctgctggaaatgaaatctggtgctcctgcgagacaggttatgggtggcctcgggaaaggtgtcttcacaatctcatttgtcaagagcgtgacgtcttcctcccagggcaccattgcagttgccttaaagaactgcctcccaatggacctttttgcctgcttcaggaagatgttaccctgaacatgagagtcagactaaatgtaggctttcaagaagacctcatgaacacttcctccgccctctataggtcctacaagaccgacttggaaacagcgttccggaagggttacggaattttaccaggcttcaagggcgtgactgtgacagggttcaagtctggaagtgtggttgtgacatatgaagtcaagactacaccaccatcacttgagttaatacataaagccaatgaacaagttgtacagagcctcaatcagacctacaaaatggactacaactcctttcaagcagttactatcaatgaaagcaatttctttgtcacaccagaaatcatctttgaaggggacacagtcagtctggtgtgtgaaaaggaagttttgtcctccaatgtgtcttggcgctatgaagaacagcagttggaaatccagaacagcagcagattctcgatttacaccgcacttttcaacaacatgacttcggtgtccaagctcaccatccacaacatcactccaggtgatgcaggtgaatatgtttgcaaactgatattagacatttttgaatatgagtgcaagaagaaaatagatgttatgcccatccaaattttggcaaatgaagaaatgaaggtgatgtgcgacaacaatcctgtatctttgaactgctgcagtcagggtaatgttaattggagcaaagtagaatggaagcaggaaggaaaaataaatattccaggaacccctgagacagacatagattctagctgcagcagatacaccctcaaggctgatggaacccagtgcccaagcgggtcgtctggaacaacagtcatctacacttgtgagttcatcagtgcctatggagccagaggcagtgcaaacataaaagtgacattcatctctgtggccaatctaacaataaccccggacccaatttctgtttctgagggacaaaacttttctataaaatgcatcagtgatgtgagtaactatgatgaggtttattggaacacttctgctggaattaaaatataccaaagattttataccacgaggaggtatcttgatggagcagaatcagtactgacagtcaagacctcgaccagggagtggaatggaacctatcactgcatatttagatataagaattcatacagtattgcaaccaaagacgtcattgttcacccgctgcctctaaagctgaacatcatggttgatcctttggaagctactgtttcatgcagtggttcccatcacatcaagtgctgcatagaggaggatggagactacaaagttactttccatacgggttcctcatcccttcctgctgcaaaagaagttaacaaaaaacaagtgtgctacaaacacaatttcaatgcaagctcagtttcctggtgttcaaaaactgttgatgtgtgttgtcactttaccaatgctgctaataattcagtctggagcccatctatgaagctgaatctggttcctggggaaaacatcacatgccaggatcccgtaataggtgtcggagagccggggaaagtcatccagaagctatgccggttctcaaacgttcccagcagccctgagagtcccattggcgggaccatcacttacaaatgtgtaggctcccagtgggaggagaagagaaatgactgcatctctgccccaataaacagtctgctccagatggctaaggctttgatcaagagcccctctcaggatgagatgctccctacatacctgaaggatctttctattagcatagacaaagcggaacatgaaatcagctcttctcctgggagtctgggagccattattaacatccttgatctgctctcaacagttccaacccaagtaaattcagaaatgatgacgcacgtgctctctacggttaatgtcatccttggcaagcccgtcttgaacacctggaaggttttacaacagcaatggaccaatcagagttcacagctactacattcagtggaaagattttcccaagcattacagtcgggagatagccctcctttgtccttctcccaaactaatgtgcagatgagcagcatggtaatcaagtccagccacccagaaacctatcaacagaggtttgttttcccatactttgacctctggggcaatgtggtcattgacaagagctatctagaaaacttgcagtcggattcgtctattgtcaccatggctttcccaactctccaagccatccttgcccaggatatccaggaaaataactttgcagagagcttagtgatgacaaccactgtcagccacaatacaactatgccattcaggatttcaatgacttttaagaacaatagcccttcaggcggcgaaacgaagtgtgtcttctggaacttcaggcttgccaacaacacaggggggtgggacagcagtgggtgctatgtagaagaaggtgatggggacaatgtcacctgtatctgtgaccacctaacatcattctccatcctcatgtcccctgactccccagatcctagttctctcctgggaatactcctggatattatttcttatgttggggtgggcttttccatcttgagcttggcagcctgtctagttgtggaagctgtggtgtggaaatcggtgaccaagaaccggacttcttatatgcgccacacctgcatagtgaatatcgctgcctcccttctggtcgccaacacctggttcattgtggtcgctgccatccaggacaatcgctacatactctgcaagacagcctgtgtggctgccaccttcttcatccacttcttctacctcagcgtcttcttctggatgctgacactgggcctcatgctgttctatcgcctggttttcattctgcatgaaacaagcaggtccactcagaaagccattgccttctgtcttggctatggctgcccacttgccatctcggtcatcacgctgggagccacccagccccgggaagtctatacgaggaagaatgtctgttggctcaactgggaggacaccaaggccctgctggctttcgccatcccagcactgatcattgtggtggtgaacataaccatcactattgtggtcatcaccaagatcctgaggccttccattggagacaagccatgcaagcaggagaagagcagcctgtttcagatcagcaagagcattggggtcctcacaccactcttgggcctcacttggggttttggtctcaccactgtgttcccagggaccaaccttgtgttccatatcatatttgccatcctcaatgtcttccagggattattcattttactctttggatgcctctgggatctgaaggtacaggaagctttgctgaataagttttcattgtcgagatggtcttcacagcactcaaagtcaacatccctgggttcatccacacctgtgttttctatgagttctccaatatcaaggagatttaacaatttgtttggtaaaacaggaacgtataatgtttccaccccagaagcaaccagctcatccctggaaaactcatccagtgcttcttcgttgctcaactaagaacaggataatccaacctacgtgacctcccggggacagtggctgtgcttttaaaaagagatgcttgcaaagcaatggggaacgtgttctcggggcaggtttccgggagcagatgccaaaaagactttttcatagagaagaggctttcttttgtaaagacagaataaaaataattgttatgtttctgtttgttccctccccctcccccttgtgtgataccacatgtgtatagtatttaagtgaaactcaagccctcaaggcccaacttctctgtctatattgtaatatagaatttcgaagagacattttcactttttacacattgggcacaaagataagctttgattaaagtagtaagtaaaaggctacctaggaaatacttcagtgaattctaagaaggaaggaaggaagaaaggaaggaaagaagggagggaaacagggagaaagggaaaaagaagaaaaagagaaagatgaaaataggaacaaataaagacaaacaacattaagggccatattgtaagatttccatgttaatgatctaatataatcactcagtgcaacattgagaatttttttttaatggctcaaaaatggaaactgaaagcaagtcatggggaatgaatactttgggcagtatcttcctgatgtcttcttagctaagaggaggaaaaaaaggctgaaaaaatagggaggaaattccttcatcagaacgacttcaagtggataacaatatttataagaaatgaatggaaggaaatatgatcctcctgagactaactttgtatgttaaggtttgaactaagtgaatgtatctgcagaggaagtattacaaagatatgtcattagatccaagtgctgattaaatttttatagtttatcagaaaagccttatattttagtttgttccacattttgaaagcaaaaaatatatatttgatatacccttcaattgccaaatttgatatgttgcactgaagacagaccctgtcatatatttaatggcttcaagcaggtacttctctgtgcattatagaatagattttaataatcttatagcattgtatattattattgctgttgtcactgttattattattgtggatactggcccttggtgtgttgcatagctccctatgtattctctgtttccatctttaagttcccagaccaatatacattaagagttttgcatggtctaaattgtgtttattccaaccacgtggaaagctcctggaaagaaattttacattcggttgttctgtgctcctaatgacacttgaccttgttgaacaaatggcagagcctttcccaaggatttgattgtttgtgaattatctgcatgtgtgcttttttttggtgtgtatttcattaaaaaatataaatatttatgaaaattgcacgcatattagagttaaccatgtactattgatacagcaacgctacattgcaaataaaagtccgatcccaaaaggagaatgag

SEQ ID NO: 185310 - DNA, 5750 bp, Artificial Sequence
  derived and/or modified sequence
actttttgtttttaaaacagcagcgcggctctcagggatgactctgtgagactgggaggatcatagctgggggaggctgagcgtgggagcggtgctgccagtcctgcctgaaaacgcgaaatgagtcttgcttggttctccctccactgggcgtgagagcccctgcccaggaggcccaggacaaatggccccatagtggaaactgggaagcttttaggcatctgatcagagcgggagccagccgggggaccacagtgctggacaggccaaccaactcaaacttgaagacatgaaatccccaaggagaaccactttgtgcctcatgtttattgtgatttattcttccaaagctgcactgaactggaattacgagtctactattcatcctttgagtcttcatgaacatgaaccagctggtgaagaggcactgaggcaaaaacgagccgttgccacaaaaagtcctacggctgaagaatacactgttaatattgagatcagttttgaaaatgcatccttcctggatcctatcaaagcctacttgaacagcctcagttttccaattcatgggaataacactgaccaaattaccgacattttgagcataaatgtgacaacagtctgcagacctgctggaaatgaaatctggtgctcctgcgagacaggttatgggtggcctcgggaaaggtgtcttcacaatctcatttgtcaagagcgtgacgtcttcctcccagggcaccattgcagttgccttaaagaactgcctcccaatggacctttttgcctgcttcaggaagatgttaccctgaacatgagagtcagactaaatgtaggctttcaagaagacctcatgaacacttcctccgccctctataggtcctacaagaccgacttggaaacagcgttccggaagggttacggaattttaccaggcttcaagggcgtgactgtgacagggttcaagtctggaagtgtggttgtgacatatgaagtcaagactacaccaccatcacttgagttaatacataaagccaatgaacaagttgtacagagcctcaatcagacctacaaaatggactacaactcctttcaagcagttactatcaatgaaagcaatttctttgtcacaccagaaatcatctttgaaggggacacagtcagtctggtgtgtgaaaaggaagttttgtcctccaatgtgtcttggcgctatgaagaacagcagttggaaatccagaacagcagcagattctcgatttacaccgcacttttcaacaacatgacttcggtgtccaagctcaccatccacaacatcactccaggtgatgcaggtgaatatgtttgcaaactgatattagacatttttgaatatgagtgcaagaagaaaatagatgttatgcccatccaaattttggcaaatgaagaaatgaaggtgatgtgcgacaacaatcctgtatctttgaactgctgcagtcagggtaatgttaattggagcaaagtagaatggaagcaggaaggaaaaataaatattccaggaacccctgagacagacatagattctagctgcagcagatacaccctcaaggctgatggaacccagtgcccaagcgggtcgtctggaacaacagtcatctacacttgtgagttcatcagtgcctatggagccagaggcagtgcaaacataaaagtgacattcatctctgtggccaatctaacaataaccccggacccaatttctgtttctgagggacaaaacttttctataaaatgcatcagtgatgtgagtaactatgatgaggtttattggaacacttctgctggaattaaaatataccaaagattttataccacgaggaggtatcttgatggagcagaatcagtactgacagtcaagacctcgaccagggagtggaatggaacctatcactgcatatttagatataagaattcatacagtattgcaaccaaagacgtcattgttcacccgctgcctctaaagctgaacatcatggttgatcctttggaagctactgtttcatgcagtggttcccatcacatcaagtgctgcatagaggaggatggagactacaaagttactttccatacgggttcctcatcccttcctgctgcaaaagaagttaacaaaaaacaagtgtgctacaaacacaatttcaatgcaagctcagtttcctggtgttcaaaaactgttgatgtgtgttgtcactttaccaatgctgctaataattcagtctggagcccatctatgaagctgaatctggttcctggggaaaacatcacatgccaggatcccgtaataggtgtcggagagccggggaaagtcatccagaagctatgccggttctcaaacgttcccagcagccctgagagtcccattggcgggaccatcacttacaaatgtgtaggctcccagtgggaggagaagagaaatgactgcatctctgccccaataaacagtctgctccagatggctaaggctttgatcaagagcccctctcaggatgagatgctccctacatacctgaaggatctttctattagcatagacaaagcggaacatgaaatcagctcttctcctgggagtctgggagccattattaacatccttgatctgctctcaacagttccaacccaagtaaattcagaaatgatgacgcacgtgctctctacggttaatgtcatccttggcaagcccgtcttgaacacctggaaggttttacaacagcaatggaccaatcagagttcacagctactacattcagtggaaagattttcccaagcattacagtcgggagatagccctcctttgtccttctcccaaactaatgtgcagatgagcagcatggtaatcaagtccagccacccagaaacctatcaacagaggtttgttttcccatactttgacctctggggcaatgtggtcattgacaagagctatctagaaaacttgcagtcggattcgtctattgtcaccatggctttcccaactctccaagccatccttgcccaggatatccaggaaaataactttgcagagagcttagtgatgacaaccactgtcagccacaatacaactatgccattcaggatttcaatgacttttaagaacaatagcccttcaggcggcgaaacgaagtgtgtcttctggaacttcaggcttgccaacaacacaggggggtgggacagcagtgggtgctatgtagaagaaggtgatggggacaatgtcacctgtatctgtgaccacctaacatcattctccatcctcatgtcccctgactccccagatcctagttctctcctgggaatactcctggatattatttcttatgttggggtgggcttttccatcttgagcttggcagcctgtctagttgtggaagctgtggtgtggaaatcggtgaccaagaaccggacttcttatatgcgccacacctgcatagtgaatatcgctgcctcccttctggtcgccaacacctggttcattgtggtcgctgccatccaggacaatcgctacatactctgcaagacagcctgtgtggctgccaccttcttcatccacttcttctacctcagcgtcttcttctggatgctgacactgggcctcatgctgttctatcgcctggttttcattctgcatgaaacaagcaggtccactcagaaagccattgccttctgtcttggctatggctgcccacttgccatctcggtcatcacgctgggagccacccagccccgggaagtctatacgaggaagaatgtctgttggctcaactgggaggacaccaaggccctgctggctttcgccatcccagcactgatcattgtggtggtgaacataaccatcactattgtggtcatcaccaagatcctgaggccttccattggagacaagccatgcaagcaggagaagagcagcctgtttcagatcagcaagagcattggggtcctcacaccactcttgggcctcacttggggttttggtctcaccactgtgttcccagggaccaaccttgtgttccatatcatatttgccatcctcaatgtcttccagggattattcattttactctttggatgcctctgggatctgaagtcaacatccctgggttcatccacacctgtgttttctatgagttctccaatatcaaggagatttaacaatttgtttggtaaaacaggaacgtataatgtttccaccccagaagcaaccagctcatccctggaaaactcatccagtgcttcttcgttgctcaactaagaacaggataatccaacctacgtgacctcccggggacagtggctgtgcttttaaaaagagatgcttgcaaagcaatggggaacgtgttctcggggcaggtttccgggagcagatgccaaaaagactttttcatagagaagaggctttcttttgtaaagacagaataaaaataattgttatgtttctgtttgttccctccccctcccccttgtgtgataccacatgtgtatagtatttaagtgaaactcaagccctcaaggcccaacttctctgtctatattgtaatatagaatttcgaagagacattttcactttttacacattgggcacaaagataagctttgattaaagtagtaagtaaaaggctacctaggaaatacttcagtgaattctaagaaggaaggaaggaagaaaggaaggaaagaagggagggaaacagggagaaagggaaaaagaagaaaaagagaaagatgaaaataggaacaaataaagacaaacaacattaagggccatattgtaagatttccatgttaatgatctaatataatcactcagtgcaacattgagaatttttttttaatggctcaaaaatggaaactgaaagcaagtcatggggaatgaatactttgggcagtatcttcctgatgtcttcttagctaagaggaggaaaaaaaggctgaaaaaatagggaggaaattccttcatcagaacgacttcaagtggataacaatatttataagaaatgaatggaaggaaatatgatcctcctgagactaactttgtatgttaaggtttgaactaagtgaatgtatctgcagaggaagtattacaaagatatgtcattagatccaagtgctgattaaatttttatagtttatcagaaaagccttatattttagtttgttccacattttgaaagcaaaaaatatatatttgatatacccttcaattgccaaatttgatatgttgcactgaagacagaccctgtcatatatttaatggcttcaagcaggtacttctctgtgcattatagaatagattttaataatcttatagcattgtatattattattgctgttgtcactgttattattattgtggatactggcccttggtgtgttgcatagctccctatgtattctctgtttccatctttaagttcccagaccaatatacattaagagttttgcatggtctaaattgtgtttattccaaccacgtggaaagctcctggaaagaaattttacattcggttgttctgtgctcctaatgacacttgaccttgttgaacaaatggcagagcctttcccaaggatttgattgtttgtgaattatctgcatgtgtgcttttttttggtgtgtatttcattaaaaaatataaatatttatgaaaattgcacgcatattagagttaaccatgtactattgatacagcaacgctacattgcaaataaaagtccgatcccaaaaggagaatgag

SEQ ID NO: 185311 - DNA, 5750 bp, Artificial Sequence
  derived and/or modified sequence
acagaaggcagttcacctctgctcccgacagcctgggaacccgcaagagccccagcatttgaagtctggtcttgtgaaaccccaccctcctctggctgtgtgattgaatgggatgccctcgaggttcacctcacctgagagggttttgggcagatcagcagtaaggtgttaaattttagaagcctgaaaactccagaagagaaaggccaaccaactcaaacttgaagacatgaaatccccaaggagaaccactttgtgcctcatgtttattgtgatttattcttccaaagctgcactgaactggaattacgagtctactattcatcctttgagtcttcatgaacatgaaccagctggtgaagaggcactgaggcaaaaacgagccgttgccacaaaaagtcctacggctgaagaatacactgttaatattgagatcagttttgaaaatgcatccttcctggatcctatcaaagcctacttgaacagcctcagttttccaattcatgggaataacactgaccaaattaccgacattttgagcataaatgtgacaacagtctgcagacctgctggaaatgaaatctggtgctcctgcgagacaggttatgggtggcctcgggaaaggtgtcttcacaatctcatttgtcaagagcgtgacgtcttcctcccagggcaccattgcagttgccttaaagaactgcctcccaatggacctttttgcctgcttcaggaagatgttaccctgaacatgagagtcagactaaatgtaggctttcaagaagacctcatgaacacttcctccgccctctataggtcctacaagaccgacttggaaacagcgttccggaagggttacggaattttaccaggcttcaagggcgtgactgtgacagggttcaagtctggaagtgtggttgtgacatatgaagtcaagactacaccaccatcacttgagttaatacataaagccaatgaacaagttgtacagagcctcaatcagacctacaaaatggactacaactcctttcaagcagttactatcaatgaaagcaatttctttgtcacaccagaaatcatctttgaaggggacacagtcagtctggtgtgtgaaaaggaagttttgtcctccaatgtgtcttggcgctatgaagaacagcagttggaaatccagaacagcagcagattctcgatttacaccgcacttttcaacaacatgacttcggtgtccaagctcaccatccacaacatcactccaggtgatgcaggtgaatatgtttgcaaactgatattagacatttttgaatatgagtgcaagaagaaaatagatgttatgcccatccaaattttggcaaatgaagaaatgaaggtgatgtgcgacaacaatcctgtatctttgaactgctgcagtcagggtaatgttaattggagcaaagtagaatggaagcaggaaggaaaaataaatattccaggaacccctgagacagacatagattctagctgcagcagatacaccctcaaggctgatggaacccagtgcccaagcgggtcgtctggaacaacagtcatctacacttgtgagttcatcagtgcctatggagccagaggcagtgcaaacataaaagtgacattcatctctgtggccaatctaacaataaccccggacccaatttctgtttctgagggacaaaacttttctataaaatgcatcagtgatgtgagtaactatgatgaggtttattggaacacttctgctggaattaaaatataccaaagattttataccacgaggaggtatcttgatggagcagaatcagtactgacagtcaagacctcgaccagggagtggaatggaacctatcactgcatatttagatataagaattcatacagtattgcaaccaaagacgtcattgttcacccgctgcctctaaagctgaacatcatggttgatcctttggaagctactgtttcatgcagtggttcccatcacatcaagtgctgcatagaggaggatggagactacaaagttactttccatacgggttcctcatcccttcctgctgcaaaagaagttaacaaaaaacaagtgtgctacaaacacaatttcaatgcaagctcagtttcctggtgttcaaaaactgttgatgtgtgttgtcactttaccaatgctgctaataattcagtctggagcccatctatgaagctgaatctggttcctggggaaaacatcacatgccaggatcccgtaataggtgtcggagagccggggaaagtcatccagaagctatgccggttctcaaacgttcccagcagccctgagagtcccattggcgggaccatcacttacaaatgtgtaggctcccagtgggaggagaagagaaatgactgcatctctgccccaataaacagtctgctccagatggctaaggctttgatcaagagcccctctcaggatgagatgctccctacatacctgaaggatctttctattagcatagacaaagcggaacatgaaatcagctcttctcctgggagtctgggagccattattaacatccttgatctgctctcaacagttccaacccaagtaaattcagaaatgatgacgcacgtgctctctacggttaatgtcatccttggcaagcccgtcttgaacacctggaaggttttacaacagcaatggaccaatcagagttcacagctactacattcagtggaaagattttcccaagcattacagtcgggagatagccctcctttgtccttctcccaaactaatgtgcagatgagcagcatggtaatcaagtccagccacccagaaacctatcaacagaggtttgttttcccatactttgacctctggggcaatgtggtcattgacaagagctatctagaaaacttgcagtcggattcgtctattgtcaccatggctttcccaactctccaagccatccttgcccaggatatccaggaaaataactttgcagagagcttagtgatgacaaccactgtcagccacaatacaactatgccattcaggatttcaatgacttttaagaacaatagcccttcaggcggcgaaacgaagtgtgtcttctggaacttcaggcttgccaacaacacaggggggtgggacagcagtgggtgctatgtagaagaaggtgatggggacaatgtcacctgtatctgtgaccacctaacatcattctccatcctcatgtcccctgactccccagatcctagttctctcctgggaatactcctggatattatttcttatgttggggtgggcttttccatcttgagcttggcagcctgtctagttgtggaagctgtggtgtggaaatcggtgaccaagaaccggacttcttatatgcgccacacctgcatagtgaatatcgctgcctcccttctggtcgccaacacctggttcattgtggtcgctgccatccaggacaatcgctacatactctgcaagacagcctgtgtggctgccaccttcttcatccacttcttctacctcagcgtcttcttctggatgctgacactgggcctcatgctgttctatcgcctggttttcattctgcatgaaacaagcaggtccactcagaaagccattgccttctgtcttggctatggctgcccacttgccatctcggtcatcacgctgggagccacccagccccgggaagtctatacgaggaagaatgtctgttggctcaactgggaggacaccaaggccctgctggctttcgccatcccagcactgatcattgtggtggtgaacataaccatcactattgtggtcatcaccaagatcctgaggccttccattggagacaagccatgcaagcaggagaagagcagcctgtttcagatcagcaagagcattggggtcctcacaccactcttgggcctcacttggggttttggtctcaccactgtgttcccagggaccaaccttgtgttccatatcatatttgccatcctcaatgtcttccagggattattcattttactctttggatgcctctgggatctgaaggtacaggaagctttgctgaataagttttcattgtcgagatggtcttcacagcactcaaagtcaacatccctgggttcatccacacctgtgttttctatgagttctccaatatcaaggagatttaacaatttgtttggtaaaacaggaacgtataatgtttccaccccagaagcaaccagctcatccctggaaaactcatccagtgcttcttcgttgctcaactaagaacaggataatccaacctacgtgacctcccggggacagtggctgtgcttttaaaaagagatgcttgcaaagcaatggggaacgtgttctcggggcaggtttccgggagcagatgccaaaaagactttttcatagagaagaggctttcttttgtaaagacagaataaaaataattgttatgtttctgtttgttccctccccctcccccttgtgtgataccacatgtgtatagtatttaagtgaaactcaagccctcaaggcccaacttctctgtctatattgtaatatagaatttcgaagagacattttcactttttacacattgggcacaaagataagctttgattaaagtagtaagtaaaaggctacctaggaaatacttcagtgaattctaagaaggaaggaaggaagaaaggaaggaaagaagggagggaaacagggagaaagggaaaaagaagaaaaagagaaagatgaaaataggaacaaataaagacaaacaacattaagggccatattgtaagatttccatgttaatgatctaatataatcactcagtgcaacattgagaatttttttttaatggctcaaaaatggaaactgaaagcaagtcatggggaatgaatactttgggcagtatcttcctgatgtcttcttagctaagaggaggaaaaaaaggctgaaaaaatagggaggaaattccttcatcagaacgacttcaagtggataacaatatttataagaaatgaatggaaggaaatatgatcctcctgagactaactttgtatgttaaggtttgaactaagtgaatgtatctgcagaggaagtattacaaagatatgtcattagatccaagtgctgattaaatttttatagtttatcagaaaagccttatattttagtttgttccacattttgaaagcaaaaaatatatatttgatatacccttcaattgccaaatttgatatgttgcactgaagacagaccctgtcatatatttaatggcttcaagcaggtacttctctgtgcattatagaatagattttaataatcttatagcattgtatattattattgctgttgtcactgttattattattgtggatactggcccttggtgtgttgcatagctccctatgtattctctgtttccatctttaagttcccagaccaatatacattaagagttttgcatggtctaaattgtgtttattccaaccacgtggaaagctcctggaaagaaattttacattcggttgttctgtgctcctaatgacacttgaccttgttgaacaaatggcagagcctttcccaaggatttgattgtttgtgaattatctgcatgtgtgcttttttttggtgtgtatttcattaaaaaatataaatatttatgaaaattgcacgcatattagagttaaccatgtactattgatacagcaacgctacattgcaaataaaagtccgatcccaaaaggagaatgag

SEQ ID NO: 185312 - DNA, 5384 bp, Artificial Sequence
  derived and/or modified sequence
actttttgtttttaaaacagcagcgcggctctcagggatgactctgtgagactgggaggatcatagctgggggaggctgagcgtgggagcggtgctgccagtcctgcctgaaaacgcgaaatgagtcttgcttggttctccctccactgggcgtgagagcccctgcccaggaggcccaggacaaatggccccatagtggaaactgggaagcttttaggcatctgatcagagcgggagccagccgggggaccacagtgctggacaggccaaccaactcaaacttgaagacatgaaatccccaaggagaaccactttgtgcctcatgtttattgtgatttattcttccaaagctgcactgaactggaattacgagtctactattcatcctttgagtcttcatgaacatgaaccagctggtgaagaggcactgaggcaaaaacgagccgttgccacaaaaagtcctacggctgaagaatacactgttaatattgagatcagttttgaaaatgcatccttcctggatcctatcaaagcctacttgaacagcctcagttttccaattcatgggaataacactgaccaaattaccgacattttgagcataaatgtgacaacagtctgcagacctgctggaaatgaaatctggtgctcctgcgagacaggttatgggtggcctcgggaaaggtgtcttcacaatctcatttgtcaagagcgtgacgtcttcctcccagggcaccattgcagttgccttaaagaactgcctcccaatggacctttttgcctgcttcaggaagatgttaccctgaacatgagagtcagactaaatgtaggctttcaagaagacctcatgaacacttcctccgccctctataggtcctacaagaccgacttggaaacagcgttccggaagggttacggaattttaccaggcttcaagggcgtgactgtgacagggttcaagtctggaagtgtggttgtgacatatgaagtcaagactacaccaccatcacttgagttaatacataaagccaatgaacaagttgtacagagcctcaatcagacctacaaaatggactacaactcctttcaagcagttactatcagaacccctgagacagacatagattctagctgcagcagatacaccctcaaggctgatggaacccagtgcccaagcgggtcgtctggaacaacagtcatctacacttgtgagttcatcagtgcctatggagccagaggcagtgcaaacataaaagtgacattcatctctgtggccaatctaacaataaccccggacccaatttctgtttctgagggacaaaacttttctataaaatgcatcagtgatgtgagtaactatgatgaggtttattggaacacttctgctggaattaaaatataccaaagattttataccacgaggaggtatcttgatggagcagaatcagtactgacagtcaagacctcgaccagggagtggaatggaacctatcactgcatatttagatataagaattcatacagtattgcaaccaaagacgtcattgttcacccgctgcctctaaagctgaacatcatggttgatcctttggaagctactgtttcatgcagtggttcccatcacatcaagtgctgcatagaggaggatggagactacaaagttactttccatacgggttcctcatcccttcctgctgcaaaagaagttaacaaaaaacaagtgtgctacaaacacaatttcaatgcaagctcagtttcctggtgttcaaaaactgttgatgtgtgttgtcactttaccaatgctgctaataattcagtctggagcccatctatgaagctgaatctggttcctggggaaaacatcacatgccaggatcccgtaataggtgtcggagagccggggaaagtcatccagaagctatgccggttctcaaacgttcccagcagccctgagagtcccattggcgggaccatcacttacaaatgtgtaggctcccagtgggaggagaagagaaatgactgcatctctgccccaataaacagtctgctccagatggctaaggctttgatcaagagcccctctcaggatgagatgctccctacatacctgaaggatctttctattagcatagacaaagcggaacatgaaatcagctcttctcctgggagtctgggagccattattaacatccttgatctgctctcaacagttccaacccaagtaaattcagaaatgatgacgcacgtgctctctacggttaatgtcatccttggcaagcccgtcttgaacacctggaaggttttacaacagcaatggaccaatcagagttcacagctactacattcagtggaaagattttcccaagcattacagtcgggagatagccctcctttgtccttctcccaaactaatgtgcagatgagcagcatggtaatcaagtccagccacccagaaacctatcaacagaggtttgttttcccatactttgacctctggggcaatgtggtcattgacaagagctatctagaaaacttgcagtcggattcgtctattgtcaccatggctttcccaactctccaagccatccttgcccaggatatccaggaaaataactttgcagagagcttagtgatgacaaccactgtcagccacaatacaactatgccattcaggatttcaatgacttttaagaacaatagcccttcaggcggcgaaacgaagtgtgtcttctggaacttcaggcttgccaacaacacaggggggtgggacagcagtgggtgctatgtagaagaaggtgatggggacaatgtcacctgtatctgtgaccacctaacatcattctccatcctcatgtcccctgactccccagatcctagttctctcctgggaatactcctggatattatttcttatgttggggtgggcttttccatcttgagcttggcagcctgtctagttgtggaagctgtggtgtggaaatcggtgaccaagaaccggacttcttatatgcgccacacctgcatagtgaatatcgctgcctcccttctggtcgccaacacctggttcattgtggtcgctgccatccaggacaatcgctacatactctgcaagacagcctgtgtggctgccaccttcttcatccacttcttctacctcagcgtcttcttctggatgctgacactgggcctcatgctgttctatcgcctggttttcattctgcatgaaacaagcaggtccactcagaaagccattgccttctgtcttggctatggctgcccacttgccatctcggtcatcacgctgggagccacccagccccgggaagtctatacgaggaagaatgtctgttggctcaactgggaggacaccaaggccctgctggctttcgccatcccagcactgatcattgtggtggtgaacataaccatcactattgtggtcatcaccaagatcctgaggccttccattggagacaagccatgcaagcaggagaagagcagcctgtttcagatcagcaagagcattggggtcctcacaccactcttgggcctcacttggggttttggtctcaccactgtgttcccagggaccaaccttgtgttccatatcatatttgccatcctcaatgtcttccagggattattcattttactctttggatgcctctgggatctgaaggtacaggaagctttgctgaataagttttcattgtcgagatggtcttcacagcactcaaagtcaacatccctgggttcatccacacctgtgttttctatgagttctccaatatcaaggagatttaacaatttgtttggtaaaacaggaacgtataatgtttccaccccagaagcaaccagctcatccctggaaaactcatccagtgcttcttcgttgctcaactaagaacaggataatccaacctacgtgacctcccggggacagtggctgtgcttttaaaaagagatgcttgcaaagcaatggggaacgtgttctcggggcaggtttccgggagcagatgccaaaaagactttttcatagagaagaggctttcttttgtaaagacagaataaaaataattgttatgtttctgtttgttccctccccctcccccttgtgtgataccacatgtgtatagtatttaagtgaaactcaagccctcaaggcccaacttctctgtctatattgtaatatagaatttcgaagagacattttcactttttacacattgggcacaaagataagctttgattaaagtagtaagtaaaaggctacctaggaaatacttcagtgaattctaagaaggaaggaaggaagaaaggaaggaaagaagggagggaaacagggagaaagggaaaaagaagaaaaagagaaagatgaaaataggaacaaataaagacaaacaacattaagggccatattgtaagatttccatgttaatgatctaatataatcactcagtgcaacattgagaatttttttttaatggctcaaaaatggaaactgaaagcaagtcatggggaatgaatactttgggcagtatcttcctgatgtcttcttagctaagaggaggaaaaaaaggctgaaaaaatagggaggaaattccttcatcagaacgacttcaagtggataacaatatttataagaaatgaatggaaggaaatatgatcctcctgagactaactttgtatgttaaggtttgaactaagtgaatgtatctgcagaggaagtattacaaagatatgtcattagatccaagtgctgattaaatttttatagtttatcagaaaagccttatattttagtttgttccacattttgaaagcaaaaaatatatatttgatatacccttcaattgccaaatttgatatgttgcactgaagacagaccctgtcatatatttaatggcttcaagcaggtacttctctgtgcattatagaatagattttaataatcttatagcattgtatattattattgctgttgtcactgttattattattgtggatactggcccttggtgtgttgcatagctccctatgtattctctgtttccatctttaagttcccagaccaatatacattaagagttttgcatggtctaaattgtgtttattccaaccacgtggaaagctcctggaaagaaattttacattcggttgttctgtgctcctaatgacacttgaccttgttgaacaaatggcagagcctttcccaaggatttgattgtttgtgaattatctgcatgtgtgcttttttttggtgtgtatttcattaaaaaatataaatatttatgaaaattgcacgcatattagagttaaccatgtactattgatacagcaacgctacattgcaaataaaagtccgatcccaaaaggagaatgag

SEQ ID NO: 185313 - DNA, 3634 bp, Artificial Sequence
  derived and/or modified sequence
gattacagaagtcaggttcatgtggaaagcagagaggggctttggaaaatcaagggcaaaattaagaaattgggtagttctgaaaaggtgacggaaagtaaaggggaaaacatcacatgccaggatcccgtaataggtgtcggagagccggggaaagtcatccagaagctatgccggttctcaaacgttcccagcagccctgagagtcccattggcgggaccatcacttacaaatgtgtaggctcccagtgggaggagaagagaaatgactgcatctctgccccaataaacagtctgctccagatggctaaggctttgatcaagagcccctctcaggatgagatgctccctacatacctgaaggatctttctattagcatagacaaagcggaacatgaaatcagctcttctcctgggagtctgggagccattattaacatccttgatctgctctcaacagttccaacccaagtaaattcagaaatgatgacgcacgtgctctctacggttaatgtcatccttggcaagcccgtcttgaacacctggaaggttttacaacagcaatggaccaatcagagttcacagctactacattcagtggaaagattttcccaagcattacagtcgggagatagccctcctttgtccttctcccaaactaatgtgcagatgagcagcatggtaatcaagtccagccacccagaaacctatcaacagaggtttgttttcccatactttgacctctggggcaatgtggtcattgacaagagctatctagaaaacttgcagtcggattcgtctattgtcaccatggctttcccaactctccaagccatccttgcccaggatatccaggaaaataactttgcagagagcttagtgatgacaaccactgtcagccacaatacaactatgccattcaggatttcaatgacttttaagaacaatagcccttcaggcggcgaaacgaagtgtgtcttctggaacttcaggcttgccaacaacacaggggggtgggacagcagtgggtgctatgtagaagaaggtgatggggacaatgtcacctgtatctgtgaccacctaacatcattctccatcctcatgtcccctgactccccagatcctagttctctcctgggaatactcctggatattatttcttatgttggggtgggcttttccatcttgagcttggcagcctgtctagttgtggaagctgtggtgtggaaatcggtgaccaagaaccggacttcttatatgcgccacacctgcatagtgaatatcgctgcctcccttctggtcgccaacacctggttcattgtggtcgctgccatccaggacaatcgctacatactctgcaagacagcctgtgtggctgccaccttcttcatccacttcttctacctcagcgtcttcttctggatgctgacactgggcctcatgctgttctatcgcctggttttcattctgcatgaaacaagcaggtccactcagaaagccattgccttctgtcttggctatggctgcccacttgccatctcggtcatcacgctgggagccacccagccccgggaagtctatacgaggaagaatgtctgttggctcaactgggaggacaccaaggccctgctggctttcgccatcccagcactgatcattgtggtggtgaacataaccatcactattgtggtcatcaccaagatcctgaggccttccattggagacaagccatgcaagcaggagaagagcagcctgtttcagatcagcaagagcattggggtcctcacaccactcttgggcctcacttggggttttggtctcaccactgtgttcccagggaccaaccttgtgttccatatcatatttgccatcctcaatgtcttccagggattattcattttactctttggatgcctctgggatctgaaggtacaggaagctttgctgaataagttttcattgtcgagatggtcttcacagcactcaaagtcaacatccctgggttcatccacacctgtgttttctatgagttctccaatatcaaggagatttaacaatttgtttggtaaaacaggaacgtataatgtttccaccccagaagcaaccagctcatccctggaaaactcatccagtgcttcttcgttgctcaactaagaacaggataatccaacctacgtgacctcccggggacagtggctgtgcttttaaaaagagatgcttgcaaagcaatggggaacgtgttctcggggcaggtttccgggagcagatgccaaaaagactttttcatagagaagaggctttcttttgtaaagacagaataaaaataattgttatgtttctgtttgttccctccccctcccccttgtgtgataccacatgtgtatagtatttaagtgaaactcaagccctcaaggcccaacttctctgtctatattgtaatatagaatttcgaagagacattttcactttttacacattgggcacaaagataagctttgattaaagtagtaagtaaaaggctacctaggaaatacttcagtgaattctaagaaggaaggaaggaagaaaggaaggaaagaagggagggaaacagggagaaagggaaaaagaagaaaaagagaaagatgaaaataggaacaaataaagacaaacaacattaagggccatattgtaagatttccatgttaatgatctaatataatcactcagtgcaacattgagaatttttttttaatggctcaaaaatggaaactgaaagcaagtcatggggaatgaatactttgggcagtatcttcctgatgtcttcttagctaagaggaggaaaaaaaggctgaaaaaatagggaggaaattccttcatcagaacgacttcaagtggataacaatatttataagaaatgaatggaaggaaatatgatcctcctgagactaactttgtatgttaaggtttgaactaagtgaatgtatctgcagaggaagtattacaaagatatgtcattagatccaagtgctgattaaatttttatagtttatcagaaaagccttatattttagtttgttccacattttgaaagcaaaaaatatatatttgatatacccttcaattgccaaatttgatatgttgcactgaagacagaccctgtcatatatttaatggcttcaagcaggtacttctctgtgcattatagaatagattttaataatcttatagcattgtatattattattgctgttgtcactgttattattattgtggatactggcccttggtgtgttgcatagctccctatgtattctctgtttccatctttaagttcccagaccaatatacattaagagttttgcatggtctaaattgtgtttattccaaccacgtggaaagctcctggaaagaaattttacattcggttgttctgtgctcctaatgacacttgaccttgttgaacaaatggcagagcctttcccaaggatttgattgtttgtgaattatctgcatgtgtgcttttttttggtgtgtatttcattaaaaaatataaatatttatgaaaattgcacgcatattagagttaaccatgtactattgatacagcaacgctacattgcaaataaaagtccgatcccaaaaggagaatgag

SEQ ID NO: 185314 - DNA, 4041 bp, Artificial Sequence
  derived and/or modified sequence
atgaagtcgccgaggcgaacgaccctgtgcctgatgttcatcgttatatatagttcaaaagctgctcttaactggaattatgagagtacaattcatccactctctctacatgagcacgagcctgcaggagaggaagctctgagacagaaacgggcagtcgctacaaagagcccaacagctgaagaatataccgttaacattgaaatcagttttgaaaatgcgagcttcttagatcctattaaagcctacctgaatagtctcagcttcccaatacacgggaataacacagaccagatcacagatatcctgtctattaacgtgactaccgtgtgcaggcccgccggtaatgaaatctggtgttcctgtgaaacagggtatgggtggcctcgcgaaagatgcttgcacaacttaatctgtcaggaaagagacgttttcctgcctggccaccattgtagttgcctgaaagaacttcctccaaatgggccattctgcttattgcaggaagacgtcaccttaaacatgcgtgtcagactcaatgtcgggttccaggaggacctcatgaataccagtagcgctctgtaccgcagctacaagacagacctcgagactgcgttccgtaaggggtatggtatcctccccgggtttaaaggcgtgacagtcaccggctttaagtcaggaagcgttgtggtgacctatgaggtcaagactactcctcctagtttggaacttattcataaagccaacgaacaggtcgttcaatccctgaaccagacgtacaaaatggattataactcattccaggccgtgactatcaacgagagcaacttcttcgtgacccccgaaattatctttgagggagatactgtgtcccttgtctgtgagaaggaggtactcagctcaaatgtttcatggcgctatgaggaacaacagttagagatacagaattccagtagattcagcatctatacggcactcttcaataatatgaccagcgtctccaagttaacaattcataatatcacccccggggacgcgggcgaatacgtgtgtaagctaattctggatatctttgaatacgagtgcaagaagaaaatcgacgtaatgcccatccaaatccttgccaatgaggaaatgaaggtgatgtgcgataacaacccggtcagtttgaactgctgttcccaggggaatgtcaactggagtaaggtggaatggaagcaagaaggcaaaattaatattcccggaaccccggagaccgatatagactctagttgctctcggtacacattgaaggctgatgggacccaatgtccgtccgggtcgtcaggtaccacagttatctatacttgtgaattcatctccgcttatggcgcccggggctccgcaaatatcaaggttacattcatctccgtggccaatttgaccatcactccggatccgatctccgtcagtgagggtcaaaacttcagtataaagtgcatatcagatgtgagcaattacgatgaggtctactggaacacgtccgcgggaattaagatttatcagaggttctacacgacgaggcgctatcttgatggagccgaaagcgtactgaccgtcaagacaagtaccagagagtggaatggtacttatcattgtatcttccggtacaaaaactcctactctatagcaaccaaagatgttatcgtgcacccacttccgctcaaactgaacataatggtcgatcccctggaagccactgtgtcctgctctggctctcaccacattaagtgctgtatagaagaagacggcgattataaggttacgtttcatacaggctcgagttccttacccgcagctaaggaggtaaacaagaagcaggtgtgttacaaacataatttcaacgcgagttctgtgagctggtgctctaaaacagtggacgtttgttgtcacttcactaacgcagccaacaattcggtttggtctccctccatgaagctgaacctggttcccggtgagaatattacttgtcaagatcccgtgattggggtgggagaaccaggaaaggtaatccagaagctgtgccgcttttcgaatgttcccagcagccccgagtcaccaattggagggacgatcacctacaagtgtgtggggtctcagtgggaagagaagagaaatgattgcatctccgccccaatcaattctctgctgcagatggcgaaagcactgatcaaaagcccgtcacaggatgaaatgcttcctacctatctgaaagacctgtccatcagtatagataaggccgagcacgagatcagcagctcgccgggatcccttggagcgattattaacatcctggatctgctgagcactgtgccaacccaagtcaattccgagatgatgacccacgtgctttcaacagtgaacgtgatcctgggcaagcctgtgctgaacacctggaaggttctacagcagcagtggacaaatcagtcgtcccaactcctgcattcagtggagcggttttcccaggctctacagagcggcgatagccctcctctttccttcagtcagacgaatgtgcagatgtcaagtatggtcatcaagagctctcaccctgagacctatcagcagaggttcgtgttcccctactttgacctgtgggggaacgtagtcattgacaagtcatacctcgaaaacttacagagcgacagtagtatcgttacaatggcatttcctacgctgcaagctattttagcccaggacattcaggagaacaactttgctgagtcactggtcatgacaaccacagttagtcacaatacaacaatgccatttaggatcagcatgacctttaaaaataattcccccagtggaggggagaccaaatgtgtgttttggaactttcggctcgcaaataacactgggggttgggacagtagcggatgttacgttgaggaaggggacggtgataatgtgacctgtatatgtgatcatctgacaagtttttctatcctcatgagtcctgacagcccagatcccagctcgctgctcggaatcctgctggacataatttcctatgttggcgtgggatttagtattctgtcgctggcggcctgtctcgtggtcgaggctgtcgtatggaagtccgtgacaaagaaccgcacttcttacatgcgccatacatgcatcgtgaacattgcagcatctctgttggtggccaacacgtggtttatagtcgttgcagcaatccaggacaatagatacattctctgcaagactgcatgtgtagctgctaccttcttcatccactttttctacctgtcagtatttttttggatgctgactctaggattgatgctcttctaccgtctagtgttcattctccatgaaacatcaaggtcaacacagaaagctatcgcattctgcctcggctacggttgtcctctggccatcagcgtgatcaccctaggtgcaacccagccgagagaagtttacacacggaagaatgtgtgttggctgaattgggaggacacaaaagctttgcttgccttcgctatacccgccctgattattgtggtcgtcaatatcaccataaccattgtcgtgattactaagatattacggccatccatcggggataagccttgtaagcaagaaaaatcatcactgttccaaatctctaaatctataggcgttttgacacccctgctgggcttgacctgggggtttgggcttacaaccgtattccccgggacgaatttagtttttcatattattttcgcgattttgaatgttttccaggggctgtttattctgctgttcggctgtctctgggatcttaaagtacaagaggcactgctgaataaatttagcttgagccgctggagttctcagcattccaaatctacatccctcgggtccagcactcccgtcttttctatgtcatctccaatctcccgacgttttaacaatctgtttggaaaaaccggaacctataatgtttcaacaccagaggccacttcttcttcactggaaaacagctcttccgcgagttcactgctcaattag

SEQ ID NO: 185315 - DNA, 4041 bp, Artificial Sequence
  derived and/or modified sequence
atgaagagcccaagaaggactacactgtgcttgatgttcattgttatctactcgtccaaggcagccctgaactggaactatgagtctaccatacaccctttgtcactgcacgaacatgagcccgcaggcgaggaggctttacgacagaaaagagccgtggcaaccaaaagccccacagccgaagagtatacggtgaacatagagatctctttcgagaacgcttcttttctggaccccataaaagcttacctcaattcccttagcttccctatccacgggaacaacacggaccagattacagatatcctgagtatcaacgtgaccaccgtgtgccggcccgcggggaatgagatctggtgcagctgtgagacaggatacgggtggccacgggagcggtgtctgcacaatctcatttgccaggagcgtgatgtttttctgccaggccaccactgttcctgtctgaaggagttacctccgaacggacctttttgtctgctccaggaggacgtcactctgaacatgcgtgtgagattaaatgttggcttccaggaggacctaatgaacacttcctctgcactatatcgtagttacaagacagatttggagacagcgttccgcaagggctacgggatcctgcccggattcaagggcgttacagttacaggtttcaagtccggctccgtcgtggtcacctacgaggtgaagacaacgccgccaagcctggaattgattcacaaagccaatgagcaagtggtacagagccttaatcaaacatacaagatggattacaattctttccaagctgtaactattaatgagtctaactttttcgtgacacccgaaattattttcgagggagatacagtgagcctggtttgtgagaaggaagtgttgagcagcaacgtgagctggagatacgaagaacagcagctggagattcaaaactcaagtcgtttttccatatacacagccctgttcaataatatgacaagcgtatccaagctgacaatccacaatataacacccggtgacgccggagagtatgtttgtaaactcattctggatatcttcgagtatgaatgtaaaaaaaagatcgacgtcatgcctatccagatcttggcaaacgaggaaatgaaggttatgtgtgataacaatcctgtctcactcaactgttgcagtcagggaaacgtaaactggtccaaggtggaatggaaacaggagggcaaaatcaatattccaggtactcccgagacggacatcgattcttcctgttcaagatatacccttaaggcagacggaacgcagtgtccaagtggctccagcggtaccactgtaatatacacctgcgagttcattagtgcatatggagcgcggggatctgctaacatcaaagtgaccttcatttcagttgccaatctgacaattacaccggatccaatatctgtgagcgagggtcagaatttctccatcaagtgtatttccgatgtgtccaattacgatgaagtctactggaacacaagcgctgggattaagatctatcaaagattttataccacccggaggtacctcgacggagctgagagcgtattgactgttaagaccagcacccgcgagtggaacgggacttatcactgcatattcaggtataagaactcttatagtatagcaacgaaggatgtgattgtccacccgttgccgctgaagctgaatataatggtcgatcccctcgaggctacagtctcctgctccgggagccatcatattaagtgttgtatagaggaagacggcgactacaaagttacttttcacactgggagttcgtcactgccggccgcaaaggaggttaataaaaagcaggtgtgttacaagcataatttcaacgccagtagcgtttcctggtgtagtaagaccgtcgatgtttgctgtcactttactaatgctgctaataacagcgtatggagcccatctatgaaactgaatctggtgcctggagaaaacatcacctgtcaggatccagttataggtgtcggagagccgggaaaagtaatacaaaaactgtgtcggttttctaacgtgccctcctctccagagtcacccataggcggcactataacatacaaatgcgttggcagccagtgggaagagaagagaaacgattgcatttccgctcctattaactcgttacttcagatggctaaggctctgatcaagtccccctcacaagatgagatgctcccgacatacctgaaggatctgagcatcagtatcgacaaggccgaacacgaaattagttcttcccctggctcactgggagcaatcatcaatatccttgatttgctgtccacggtgcccactcaggtgaacagcgaaatgatgacgcatgtgttgagtactgttaacgttatcctaggcaaaccggtcctgaacacctggaaagtgcttcagcaacaatggacgaaccaatcttctcaattgctccacagtgtcgagaggttctcccaggccctgcagagcggtgattcgcctcccttatcgttctcccagacgaatgtccagatgagtagtatggttattaagagctcacaccccgagacataccagcaaaggttcgtttttccatattttgatctgtggggaaatgtggtgatcgataagagttatctggaaaatctgcagtccgactcctcgatcgtgactatggcatttcccaccctgcaggctattctggctcaggacatccaggagaacaactttgccgaaagcctggtgatgactacaaccgtgtctcacaacaccacaatgccctttcgaatttccatgactttcaaaaataactctccctccgggggagagaccaagtgcgtgttttggaactttagactggcaaataacacagggggttgggattcttctgggtgttacgtggaggaaggtgacggtgacaacgttacctgcatttgcgatcatctgacatccttcagtatcttaatgtccccagatagccccgacccgagcagcctgctcgggatcttgctagacattataagctatgtcggagtcggtttcagcattctgtctcttgctgcttgcctagtcgtggaagccgtggtttggaaatccgtcaccaagaaccggacgagctatatgaggcatacgtgtattgttaacatcgccgcctcactgctggttgcgaacacatggttcatcgtagtagcagctatccaagacaacaggtatatcctatgtaagaccgcctgtgtcgccgccacatttttcatccacttcttttatctatccgtttttttttggatgctgactctgggcctgatgcttttttatcgcctcgtatttattctccacgaaacctcccgttccacccagaaagccatcgcgttctgtctgggctatggatgccctctcgccataagcgtaattacactcggcgccacacagccaagggaggtctacactagaaaaaatgtttgttggctgaattgggaagatacaaaggcactgttagctttcgctatccccgccctcatcatcgttgttgtgaatatcaccattactatcgtggttatcactaaaatcctgcggccctcaatcggggataagccctgcaagcaagagaaaagctctttgttccagatatccaaatctatcggggtcctgacacctctgctggggctcacttggggttttggacttacgaccgtcttcccgggtacaaacctcgtgttccacattatcttcgcaattctgaatgttttccagggcctgttcatcctcctgttcgggtgtctgtgggacctcaaggtgcaggaggccctgcttaacaagttcagcctgtcaaggtggtcaagtcaacactctaagagcacctccctggggtcctcaacgcccgtgttcagtatgtcctctcccatttctaggaggtttaataatctgttcggcaaaactggtacttacaacgtgtccactccggaggccactagctcctccctggagaactcatctagtgctagttccctgctgaactag

SEQ ID NO: 185316 - DNA, 3981 bp, Artificial Sequence
  derived and/or modified sequence
atgaagagccctcgtcggacgacactctgcctgatgttcatcgtgatatactccagtaaggcggctcttaattggaattatgagtctactattcaccctttgagcctccatgagcacgaacctgccggcgaagaggcactgcgccaaaaaagggctgtggcgaccaagagtcccactgccgaggagtacacggtcaatattgagatctcctttgaaaatgcttcttttttggatccaataaaggcatatcttaacagcctctcctttcccatccacggcaataacacagaccagatcaccgacattttaagcatcaacgtgaccactgtatgccggccggccggtaatgaaatttggtgttcttgtgaaaccggctatggctggcctagggagcgttgcctacacaatctaatctgtcaggagagagatgtgttcctcccaggacatcattgtagttgtcttaaagaactaccgccaaacggccccttttgcttgctacaggaggacgttaccctgaacatgcgggttaggcttaacgtcgggttccaggaggacttgatgaacacttcatcagctctttacagatcttacaagaccgacctggagaccgcttttagaaaggggtatgggattttgcctgggtttaagggtgtgactgtgacggggtttaaatcagggtcagtggtggtaacgtacgaggtgaagaccacccctcccagcctggagctgatacataaagcgaacgagcaagtggtccagagcttgaatcagacgtacaaaatggactataatagcttccaggccgtgacaatcaatgaatcaaatttctttgtgactcctgaaattattttcgaaggcgatacggtgagtctggtctgtgaaaaagaagtgctgtcttcaaacgtgagctggaggtacgaagaacagcaactggagatccagaacagttcgcggttcagcatttacactgcattattcaacaacatgacatctgtgtccaagttgaccattcacaacataaccccaggcgacgcaggtgagtacgtgtgcaagctgattctcgatatcttcgagtatgagtgtaaaaagaaaatcgatgtgatgcctattcagattctggcaaacgaggaaatgaaggtgatgtgtgacaacaatccggtgagtctgaattgctgcagccagggcaacgtaaattggtccaaagtggaatggaagcaggagggcaaaattaatattccaggcactcccgagacggacattgacagctcgtgtagtcggtacacactcaaggctgatgggacccagtgtccaagtgggtcctctggcactaccgtgatttatacatgtgagttcatttcagcctatggcgctagaggttctgctaacattaaagtgacttttatttcggtcgcaaatcttacaataactccagaccctatcagcgtgtctgaagggcagaatttcagcatcaaatgcatcagcgacgtttcaaactatgacgaagtctactggaacacatcagctgggattaaaatataccagcgattctatactactcgccggtacctggacggcgcagagagcgtgctgaccgttaaaaccagtactcgagagtggaacggcacataccactgcatctttcggtataaaaattcctactctatcgccaccaaagacgttattgtacaccccctgcctcttaagctcaatatcatggttgacccactcgaagcaaccgtgtcctgttccggctctcatcacatcaaatgctgcattgaagaagacggcgactacaaggtgacatttcacacggggtcctcaagtttaccagcagccaaggaggttaataaaaaacaagtttgttataaacacaacttcaatgcctctagtgtgtcttggtgcagcaagacggtcgatgtttgttgccatttcaccaatgctgctaataatagcgtgtggagtccaagtatgaagctcaacttggtgcctggcgagaacattacgtgccaggaccccgtgatcggggtcggcgagccaggcaaagtcattcagaagttatgtcggttcagtaacgttccgtcctctcccgaatcacccattgggggcactatcacgtataagtgcgtgggctctcaatgggaggaaaagcgaaatgactgtatttcggcacccattaacagcttgttacagatggccaaggcactgattaagtcgccatcgcaggacgagatgctgccaacctatctgaaagacttgtcgatctccatagacaaagccgagcacgagatttcatccagcccaggatctctaggcgctatcatcaacatactggatctcctgagcaccgtccctacacaggttaacagcgagatgatgacccatgttctgtcgaccgttaatgtaattctgggcaagccagtgttgaatacttggaaagtcctgcagcagcaatggaccaaccagagctcccagttgttgcactcggtggaaagattctcacaagccctgcagtccggcgattctccaccgctctccttctcacagacaaacgtccagatgtcatccatggtcattaagagcagtcacccagaaacataccaacagagatttgtgtttccttactttgatctctggggtaacgtggtgatcgataagtcttacctcgagaatctgcaaagtgatagctctatcgtgaccatggctttcccgaccctgcaggccatcctggcccaggacatccaggaaaataacttcgcagagtccctcgtgatgactactacggtgtcccacaacaccaccatgccttttcgcatctctatgacctttaaaaacaacagcccttccggcggggagaccaaatgcgtgttttggaatttccggttggcgaataatactggcgggtgggacagtagcggttgctacgttgaggagggcgatggtgacaacgtcacctgcatctgcgaccatcttacctcatttagtattcttatgtctcccgactcacccgatccttcctctttactgggaatcttgctagacattatctcatacgtgggagtcggcttctcaatcttatctcttgctgcgtgtctcgtggtggaggcggtggtgtggaagagcgtgacaaagaatcgaacctcttatatgcgccacacctgcatcgtaaacatcgctgccagtctccttgtggccaacacatggtttattgttgttgctgctattcaggataatcgctacatcctgtgcaagaccgcatgcgtggccgcaacatttttcatacactttttttacctgtctgtttttttctggatgcttactcttggcttaatgctcttttaccgactggtgttcatcctgcatgagacatcgagatcgactcagaaggcgatcgcgttctgtctcggctacggctgtccattggcaattagtgttattaccctgggagctacccagcctcgggaagtgtacaccaggaagaacgtctgttggctcaattgggaagatacaaaggccctcttggcgtttgccattcctgctctgatcatcgttgtggtgaatattacgatcacgatcgtggtaattactaagatcctgcgtcctagtatcggggataaaccctgtaaacaggagaagtctagccttttccagatatcaaagagcatcggggtgctcactccccttctcggcctgacttggggatttggcctgaccacagtctttcccggtacaaaccttgtgttccacatcatcttcgcaatcctgaacgtctttcaggggcttttcattttgttatttggatgtttatgggatcttaaatccaccagcctgggatcctccactcctgtcttcagcatgtcttcccccatttccaggcgctttaacaatctattcgggaaaacaggcacttacaacgttagcacccccgaggcgacatcctcttctctggagaatagctcttccgcgagctccctgctcaactag

SEQ ID NO: 185317 - DNA, 4041 bp, Artificial Sequence
  derived and/or modified sequence
atgaaaagtcctcgacgcaccactttgtgcctgatgttcatcgtgatttacagtagcaaggccgcactgaactggaactacgagagcaccatccatccgttgagcctgcatgagcacgaacccgccggtgaggaggcgctgcgacagaagagagctgttgccactaaaagtccgacagctgaagagtacactgtgaacatcgaaatctctttcgagaacgctagctttctggaccccattaaggcctacctgaacagtttgtccttccccattcacggcaacaataccgaccagataactgatatcttgtctatcaacgtgacaacagtctgtagacccgcaggaaacgagatatggtgcagttgcgagacgggttatggttggcctcgggaacgctgtcttcacaacttgatttgccaagagcgggatgtcttcttgccgggacatcactgctcttgcctgaaagagttgccaccaaatggccctttctgtctcctgcaggaagacgtgacactgaacatgcgggtcagacttaacgtgggcttccaggaggacctcatgaatacttctagcgccctctacaggagttacaagaccgacctcgaaaccgcattccggaagggctacggaattcttcctggtttcaaaggggtgactgttaccggctttaaaagtgggtctgtagtggtcacctacgaggtcaagaccactcccccgagcctagaacttattcataaagcaaatgaacaggttgtgcagagtctaaatcagacttacaagatggactacaacagttttcaagcagtcaccatcaatgaatccaacttcttcgtgactccggagataatcttcgagggtgacaccgtctctctcgtgtgtgaaaaagaggtcctgagctccaacgtctcctggcggtatgaggaacagcagctcgagatccagaactctagccgcttcagtatctacaccgccctgttcaacaacatgacatccgtctcaaagctgacaattcataatattacacctggtgatgcgggtgagtacgtttgtaagttgatcttagacatctttgagtacgaatgcaaaaagaaaattgacgtgatgccgattcaaatcttagccaacgaggaaatgaaagtgatgtgcgataacaaccccgtgagcctaaactgttgcagccagggcaatgtcaactggtcaaaagttgagtggaagcaggagggaaaaatcaacatccccggaacccccgagacggatatcgattccagttgctctcggtatactcttaaggctgacggaacgcaatgccctagtggaagttcgggaacaaccgtcatttacacatgtgagttcatcagcgcctacggtgctcgtggctctgctaatattaaagttacattcatttctgtggcaaacctcacgatcacacccgacccaatctccgtgtcagagggccagaacttttcaatcaagtgtatctctgacgtgtcgaactacgacgaagtctactggaatacgtcagcagggattaagatttaccagcggttttacacgactagacgctacttggatggtgctgaatctgtattgaccgtgaagactagcacacgcgagtggaacggcacttatcactgtatcttccgctataagaatagctacagcatcgcgaccaaggacgtgattgtgcaccctctgcctttgaagctgaacattatggttgaccctcttgaggctaccgtgtcttgctccggatcccaccacatcaagtgctgtattgaggaagacggtgattataaagtcaccttccatacaggaagttccagtttgcctgccgctaaggaggtgaataaaaaacaggtctgttacaagcataacttcaacgcaagcagtgtcagctggtgctctaaaacagtggacgtctgctgccacttcaccaatgctgccaacaacagcgtctggagccctagcatgaaactgaacctagttcctggtgagaatattacttgtcaagaccctgtcatcggcgtgggcgagcctggaaaggtaattcagaagctctgcaggtttagtaacgttccttcctcccccgaaagcccaatcgggggcaccataacctacaaatgcgtaggtagccagtgggaagagaaacgtaacgactgtatctcggcgccgattaacagcttgttgcaaatggccaaagccctcatcaagtccccaagccaggacgaaatgctccccacatacctgaaagacttgagcattagtatagacaaggccgaacatgagatctcaagcagtccaggaagtctgggtgctattattaacatactggaccttttgagcaccgtgcccacacaggtgaacagcgaaatgatgacccacgtgctgtctacagtgaacgtgatcctcgggaagcctgtgctgaatacctggaaggtcctgcagcagcagtggacgaatcagagctctcaactgctccatagcgtcgaacgtttcagccaggcgctgcagagtggagacagtccgccactatcctttagtcagacaaatgtgcagatgtccagcatggtaatcaagtcttcccatcccgaaacgtatcaacagcgcttcgtatttccttattttgacctttggggaaatgtggtaatcgacaaaagctatcttgagaatctgcaatccgactcttcgatagtcacgatggcatttccgacactgcaagccattttagctcaagacattcaagagaacaacttcgccgaatctctcgtaatgaccacaaccgtcagtcacaatactacgatgccttttcggatctccatgacatttaagaacaatagcccatccggcggcgagactaagtgtgttttttggaattttcggctggcgaataataccggaggttgggactcttcagggtgctacgtggaggaaggggatggcgacaacgtaacatgcatctgtgatcatcttactagcttttctatcctgatgtctcccgattcaccggatccctccagcttgctcggcatattgctggatataatatcctatgtgggtgtcggcttttcgatcttgtcccttgccgcctgcttggtggtggaggcagtggtctggaagtcagtcaccaagaacagaacttcttacatgagacacacctgcatagtgaacatcgctgcttctctgcttgtggctaacacctggtttatcgtggtggccgcaattcaggataatcgatatattttatgcaaaactgcctgcgtcgcagccacatttttcatccattttttctatttgtcggtgtttttctggatgctcaccttaggtcttatgctcttttacagactcgtgtttatcctgcacgaaacttcaagatctacacagaaagctatcgctttctgtctcggctatggttgccccctagctatctcagtaataacactgggagccacacagcccagagaggtgtacacccgtaagaacgtgtgttggctaaattgggaggacacaaaagcactcctcgcgtttgcaattccggcactcatcatcgtggtggtaaacatcaccatcaccatcgtggtcataacaaaaatcttgcgtccttcaattggcgacaagccctgcaaacaggagaaatcatccctcttccaaatctcgaagtccataggcgtcctcactcccctgctgggactcacctggggatttggattgactaccgtgttccctggcaccaacctggtgttccacatcatctttgcaattcttaatgtcttccagggattattcatcctgctttttggatgtctctgggatctcaaggttcaggaagccctgcttaacaaattttctctgagccgctggagtagccagcattctaagtcaacatcactcggatcaagtaccccagtgttttctatgagtagccctatctcaagacggtttaataacctgtttggcaagactgggacctataacgtcagcactcctgaggccaccagcagctcgttggagaattcttcatctgcttccagtctgctgaattag

SEQ ID NO: 185318 - DNA, 3615 bp, Artificial Sequence
  derived and/or modified sequence
atgaaatccccgagaagaacaacactctgcctaatgtttatagtgatttattcatctaaagccgcattgaactggaattacgagagtacaattcaccccctttccctgcacgaacatgaacccgcaggagaagaggcattgcgccaaaaacgcgcggtagctactaagagcccgacggctgaggagtacactgtcaacatcgaaatctctttcgaaaacgcttctttcctggatcctatcaaagcttacctgaactctctctctttccccattcatgggaacaacaccgaccaaattacagacatccttagcattaatgtcactaccgtgtgccgacccgccgggaatgagatttggtgttcctgtgagacaggttacgggtggcctcgagaaagatgcctccataacttaatttgccaggagcgcgacgtgttcctacccgggcaccactgtagttgtctcaaggaactgccaccaaatggacctttttgtctgctgcaggaagatgtaacacttaatatgagagtgagactgaacgtgggtttccaagaagacttaatgaacacatcctccgccctgtataggtcttacaaaacagatctcgagactgccttccggaaggggtatggcatcctccctggatttaagggcgtcacagtgacaggttttaagagcggctcagtggtggtgacttatgaggttaagaccaccccacccagcctggaactgatccacaaggccaacgaacaggttgtacagtctctcaatcagacatataaaatggactacaattcattccaggcggtgacaatcaggacacccgagaccgacattgatagcagttgctcaaggtataccctgaaggcagatggcacacagtgtccctctggaagctctggcaccaccgtgatctacacttgcgaattcatttcagcctacggagcgcggggttccgccaacatcaaggtgacatttatttccgtggctaacctgactattacacccgatcctatctccgtgtccgaaggtcaaaacttctctattaaatgtataagcgatgtatccaattacgacgaggtctattggaataccagtgcgggcattaagatttaccagcggttttacactactcgtcgataccttgatggcgccgagagtgtattaaccgttaaaacctcaactagggagtggaatggaacttatcactgcatatttagatataaaaacagttattcaatcgcaacaaaggatgtgattgttcaccctctccctctgaaactcaatattatggtagaccccctcgaggcaacagtttcctgttcaggctcacatcatattaagtgctgtatagaggaagatggcgactacaaggtcactttccacactggctcctcctctctccccgctgcaaaggaagttaacaagaagcaggtctgctacaagcacaatttcaatgcttcgtcagtatcttggtgtagcaaaactgtcgacgtgtgctgccacttcacaaacgcagcgaataacagcgtctggtcccccagcatgaagctcaacctggtccctggcgaaaatatcacttgccaggatccagtcatcggagtgggcgaacccggcaaggtcattcagaagctgtgcaggtttagcaacgtgccttcctctccagagtccccgattggagggactatcacgtataagtgcgtgggatcccagtgggaagagaaaaggaatgactgtatctccgcacctataaactctctgttgcagatggccaaagcgctgatcaagtctccaagtcaagatgaaatgctccctacatatctcaaggacctctccataagcatcgacaaagcagagcatgagatttcttctagtccgggaagtttaggcgccattattaacattctggatctgctcagcactgtgccaacccaggttaattctgaaatgatgactcatgtcctttccaccgtgaatgtaattctcggaaaacctgtcctcaatacatggaaagtcttacagcagcaatggacaaaccaatcctctcagttgcttcactctgtcgagagattctcgcaggcattacaaagcggtgatagcccaccgctgtccttcagccagaccaacgtgcagatgagctctatggtcattaagtcttcgcaccctgaaacgtaccagcagcgattcgtgtttccctatttcgacctatggggcaatgtggtgattgataaaagctatctggaaaacttgcagtcagattcaagtatcgtcaccatggctttccctacactccaggccattctggcccaagatatccaggaaaacaacttcgccgagtcattggtgatgaccactaccgtctcccacaacaccaccatgccgttcaggatttccatgacatttaaaaataactcccctagcggtggcgagacgaaatgcgtattttggaactttagacttgccaataacactgggggatgggacagctccggctgttatgtagaagagggcgacggggacaacgtcacctgcatatgtgaccacctgacatctttctcaatcctcatgtcccccgacagtcctgacccctcgagcctacttgggatattgttagatataatctcttacgtcggagtgggattctcaatcttgtcgctggctgcgtgtcttgtggtggaggcggtggtatggaaaagcgtgaccaagaatcggacttcatacatgcgccatacgtgcatcgttaacatcgctgcctcactgctcgtggccaacacttggtttatcgtcgtagccgcaatccaggacaacagatatatcctgtgcaaaactgcctgcgtcgccgcaacatttttcatccatttcttctatctttctgtgtttttttggatgctgacgctaggtctgatgctattctatcggcttgtttttattctgcatgagacatcgagatcaactcagaaggctattgccttctgtctgggctacggttgtcccttagccatatccgtaatcaccctcggcgcaactcagcctcgggaggtgtatacaaggaaaaacgtatgctggctgaactgggaggacactaaagcactgctcgcttttgcaattcccgctctgattatcgttgtcgtcaacataaccattacaatcgtcgttataaccaaaatcctgcgcccaagtatcggcgacaagccctgcaagcaggagaagtcttccctgttccagattagcaaatccattggtgtcttgaccccgctcttgggactcacatggggatttggcctgaccactgtcttcccaggaacaaacctggtgtttcacattatctttgctatcctgaacgtgtttcagggcctctttatattgctgttcggctgtctgtgggaccttaaggtgcaggaggcccttctgaacaagttttccctgtccaggtggtccagccagcatagcaaaagtacgtcattaggatctagcacgcccgtgtttagcatgtcgtcacccatatcaaggaggttcaataatctttttggcaaaaccgggacatacaacgtgagcacaccggaggccactagcagttccctggagaattctagctctgcttcttcactgttgaattag

SEQ ID NO: 185319 - DNA, 2154 bp, Artificial Sequence
  derived and/or modified sequence
gattacagatcccaagtccacgttgagtccagagaaggactgtggaagatcaaagggaaaataaagaaacttggatcatcagagaaagttacagagtcgaagggagaaaacattacgtgccaagatcccgttatcggtgtgggggaaccaggcaaggtcattcagaagctctgtcgcttttccaacgtcccctcaagccctgaaagccccattggggggacaattacttataagtgcgtgggcagccaatgggaagaaaaaagaaacgactgcattagcgcaccaattaattcactgctccaaatggcaaaggcactgatcaagtcaccctcacaggacgagatgctccccacctacctgaaggatctgtccatctctattgataaggccgagcatgagatctcttcctcacctggctcactgggcgcaattattaatatactggatttactgtcgaccgtcccaacacaggtaaacagtgaaatgatgactcatgtcctgagtaccgtgaatgtgatactgggaaagccagtgctgaacacctggaaagttctgcaacaacagtggactaatcagagtagccagctgctgcacagcgtagagcggttttctcaggccttacagagtggggatagtccgcctttgagtttctctcaaacgaacgtgcagatgtcatcaatggtgattaagtcttctcaccccgagacctatcagcagagattcgtctttccttatttcgacctctggggtaacgttgtcatcgataagtcttatctcgaaaacctgcagtccgactcttccatagtgaccatggccttcccaaccttacaggccatactggcccaagatatccaggagaataactttgcagaaagtcttgtcatgacaacaaccgtctcacataataccactatgccttttaggatcagtatgacattcaagaataatagcccgtccggaggagagacaaagtgcgtgttttggaactttagactggccaataacaccggtgggtgggactcctctggctgttatgtggaggaaggcgatggggataacgtcacttgcatctgcgaccatctcacgagcttttcgatactcatgagccctgattcccccgatccatcatcgcttctcgggatcttactggatatcattagctatgtaggagtgggcttcagtatactcagtcttgcagcatgcctggtggtggaagcagtcgtgtggaagtcagtcacgaagaacaggacaagctacatgagacacacctgtattgtgaacatcgcggcctcattgcttgtggcaaatacatggttcatagtggtagccgcgatacaggataaccgctatatcctttgcaaaaccgcttgtgtcgccgctacattttttatccatttcttctatctttcagtgtttttttggatgcttaccttgggcctgatgctattttacaggctcgtctttattcttcatgagacgtcacgctctacacagaaagcaattgctttctgtctgggctacggttgcccgctcgcaatctctgtaatcacgttgggagccacgcagccacgcgaagtgtacacccggaagaatgtgtgttggttgaattgggaggacaccaaagccctgcttgcttttgccatacctgctcttatcatcgttgtagttaacattactatcaccattgttgtgataaccaagatactccgtccgagtattggagacaagccctgcaaacaggagaagagctccttgttccagatctctaagagcatcggcgtgcttactcctctgctcggcctgacctgggggtttgggctgacaactgtctttccggggacaaacctggttttccacatcatatttgcgattctgaacgtgttccaaggactcttcatactgctgttcgggtgtctgtgggatttgaaagtgcaggaggctctgctcaacaagtttagcctgtcacgctggagcagccaacactctaagagcacctcactggggagcagcaccccagtttttagtatgtctagccctatctccagaagattcaacaacttgttcggaaaaaccggcacttacaacgtcagtacacccgaagctacctcgagttctttggaaaactctagctctgcctcaagcctactaaactag

SEQ ID NO: 185320 - DNA, 4041 bp, Artificial Sequence
  derived and/or modified sequence
atgaagagccccaggaggaccaccctgtgcctgatgttcatcgtcatctacagcagcaaggccgccctgaactggaactatgagagcaccatccaccccctgagcctgcatgaacatgagcctgctggggaggaggccctgcggcagaagagagctgtggccaccaagagccccacagctgaggagtacacagtgaacatcgagatcagctttgaaaatgccagcttcctggaccccatcaaggcctacctgaacagcctgtccttccccatccacggcaacaacacagaccagatcacagacatcctgagcatcaacgtgaccaccgtgtgcaggcctgctggaaatgagatctggtgcagctgtgagaccggctacggctggccccgggagcgctgcctgcacaacctgatctgccaggagagagatgtgttcctgcccggccaccactgcagctgcctgaaggagctgccccccaacggccccttctgcctgctgcaggaggatgtgaccctgaacatgagggtgcggctgaatgtgggcttccaggaggacctgatgaacaccagcagcgccctgtaccgcagctacaagacagacctggagacagccttcaggaagggctacggcatcctgcccggcttcaagggcgtgacagtgacaggcttcaagagcggctctgtggtggtgacctatgaggtgaagaccaccccacccagcctggagctgatccacaaggccaatgagcaggtggtgcagagcctgaaccagacctacaagatggactacaacagcttccaggccgtgaccatcaatgaaagcaacttctttgtgaccccagagatcatctttgaaggagacacagtgtccctggtgtgtgagaaggaggtgctgagcagcaatgtgtcctggaggtatgaggagcagcagctggagatccagaacagcagccgcttcagcatctacacagccctcttcaacaacatgacctctgtgtccaagctgaccatccacaacatcaccccaggagatgctggggagtatgtgtgcaagctgatcctggacatctttgaatatgagtgcaagaagaagattgatgtgatgcccatccagatcctggccaatgaggagatgaaggtgatgtgtgacaacaaccctgtgtccctgaactgctgcagccagggcaatgtgaactggagcaaggtggagtggaagcaggagggcaagatcaacatccctggcaccccagagacagacatcgacagcagctgcagccgctacaccctgaaggcagatggcacccagtgccccagcggcagcagcggcaccaccgtcatctacacctgtgagttcatcagcgcctatggagcccggggcagcgccaacatcaaggtgaccttcatctctgtggccaacctgaccatcaccccagaccccatctctgtgtctgagggccagaacttcagcatcaagtgcatcagtgatgtgagcaactatgatgaggtgtactggaacaccagcgctggcatcaagatctaccagcgcttctacaccacccggcgctacctggatggagctgagagcgtgctgactgtgaagaccagcacccgggagtggaatggcacctaccactgcatcttccgctacaagaacagctacagcatcgccaccaaggatgtgattgtgcaccccctgcccctgaagctgaacatcatggtggaccccctggaggccaccgtgtcctgcagcggcagccaccacatcaagtgctgcatcgaggaggatggagactacaaggtgaccttccacacaggcagcagcagcctgcctgctgccaaggaggtgaacaagaagcaggtgtgctacaagcacaacttcaatgccagctctgtgtcctggtgcagcaagacagtggatgtgtgctgccacttcaccaatgctgccaacaacagcgtgtggagccccagcatgaagctgaacctggtgcctggagagaacatcacctgccaggaccccgtcatcggcgtgggggagcccgggaaggtgatccagaagctgtgccgcttcagcaatgtgcccagcagccctgagagccccatcggcggcaccatcacctacaagtgtgtgggcagccagtgggaggagaagagaaatgactgcatcagcgcccccatcaacagcctgctgcagatggccaaggccctgatcaagagccccagccaggatgagatgctgcccacctacctgaaggacctgagcatcagcattgacaaggccgagcacgagatcagcagcagccctggcagcctgggcgccatcatcaacatcctggacctgctgagcacagtgcccacccaggtgaacagcgagatgatgacccacgtgctgagcacagtgaatgtcatcctgggcaagcctgtgctgaacacctggaaggtgctgcagcagcagtggaccaaccagagcagccagctgctgcacagcgtggagcgcttcagccaggccctgcagagcggggacagcccccccctgtccttcagccagaccaacgtgcagatgagctccatggtgatcaagagcagccaccctgagacctaccagcagagatttgtgttcccctactttgacctgtggggcaatgtggtgattgacaagagctacctggagaacctgcagagcgacagcagcatcgtgaccatggccttccccaccctgcaggccatcctggcccaggacatccaggagaacaactttgctgagagcctggtgatgaccaccaccgtgagccacaacaccaccatgcccttccgcatctccatgaccttcaagaacaacagccccagcggcggggagaccaagtgtgtgttctggaacttccggctggccaacaacacaggaggctgggacagcagcggctgctacgtggaggagggagatggagacaacgtgacctgcatctgtgaccacctgaccagcttcagcatcctgatgagcccagacagcccagaccccagcagcctgctgggcatcctgctggacatcatctcctatgtgggcgtgggcttcagcatcctgagcctggccgcctgcctggtggtggaggccgtggtgtggaagtctgtgaccaagaacagaaccagctacatgaggcacacctgcatcgtgaacattgctgccagcctgctggtggccaacacctggttcatcgtggtggccgccatccaggacaaccgctacatcctgtgcaagacagcctgtgtggccgccaccttcttcatccacttcttctacctgtctgtgttcttctggatgctgaccctgggcctgatgctgttctaccgcctggtgttcatcctgcacgagaccagccgcagcacccagaaggccatcgccttctgcctgggctacggctgccccctggccatcagcgtcatcaccctgggcgccacccagccccgggaggtgtacaccaggaagaatgtgtgctggctgaactgggaggacaccaaggccctgctggcctttgccatcccagccctgatcatcgtggtggtgaacatcaccatcaccatcgtggtgatcaccaagatcctgcggcccagcatcggggacaagccctgcaagcaggagaagagcagcctcttccagatcagcaagagcattggagtgctgacccccctgctgggcctgacctggggcttcggcctgaccaccgtcttccctggcaccaacctggtgttccacatcatctttgccatcctgaatgtgttccagggcctcttcatcctgctgtttggctgcctgtgggacctgaaggtgcaggaggccctgctgaacaagttcagcctgagccgctggagcagccagcacagcaagagcaccagcctgggcagcagcacccctgtgttctccatgagcagccccatcagccgccgcttcaacaacctgtttgggaagacaggcacctacaacgtgtccaccccagaggccaccagcagcagcctggagaacagcagcagcgccagcagcctgctgaactag

SEQ ID NO: 185321 - DNA, 3981 bp, Artificial Sequence
  derived and/or modified sequence
atgaagagccccaggaggaccaccctgtgcctgatgttcatcgtcatctacagcagcaaggccgccctgaactggaactatgagagcaccatccaccccctgagcctgcatgaacatgagcctgctggggaggaggccctgcggcagaagagagctgtggccaccaagagccccacagctgaggagtacacagtgaacatcgagatcagctttgaaaatgccagcttcctggaccccatcaaggcctacctgaacagcctgtccttccccatccacggcaacaacacagaccagatcacagacatcctgagcatcaacgtgaccaccgtgtgcaggcctgctggaaatgagatctggtgcagctgtgagaccggctacggctggccccgggagcgctgcctgcacaacctgatctgccaggagagagatgtgttcctgcccggccaccactgcagctgcctgaaggagctgccccccaacggccccttctgcctgctgcaggaggatgtgaccctgaacatgagggtgcggctgaatgtgggcttccaggaggacctgatgaacaccagcagcgccctgtaccgcagctacaagacagacctggagacagccttcaggaagggctacggcatcctgcccggcttcaagggcgtgacagtgacaggcttcaagagcggctctgtggtggtgacctatgaggtgaagaccaccccacccagcctggagctgatccacaaggccaatgagcaggtggtgcagagcctgaaccagacctacaagatggactacaacagcttccaggccgtgaccatcaatgaaagcaacttctttgtgaccccagagatcatctttgaaggagacacagtgtccctggtgtgtgagaaggaggtgctgagcagcaatgtgtcctggaggtatgaggagcagcagctggagatccagaacagcagccgcttcagcatctacacagccctcttcaacaacatgacctctgtgtccaagctgaccatccacaacatcaccccaggagatgctggggagtatgtgtgcaagctgatcctggacatctttgaatatgagtgcaagaagaagattgatgtgatgcccatccagatcctggccaatgaggagatgaaggtgatgtgtgacaacaaccctgtgtccctgaactgctgcagccagggcaatgtgaactggagcaaggtggagtggaagcaggagggcaagatcaacatccctggcaccccagagacagacatcgacagcagctgcagccgctacaccctgaaggcagatggcacccagtgccccagcggcagcagcggcaccaccgtcatctacacctgtgagttcatcagcgcctatggagcccggggcagcgccaacatcaaggtgaccttcatctctgtggccaacctgaccatcaccccagaccccatctctgtgtctgagggccagaacttcagcatcaagtgcatcagtgatgtgagcaactatgatgaggtgtactggaacaccagcgctggcatcaagatctaccagcgcttctacaccacccggcgctacctggatggagctgagagcgtgctgactgtgaagaccagcacccgggagtggaatggcacctaccactgcatcttccgctacaagaacagctacagcatcgccaccaaggatgtgattgtgcaccccctgcccctgaagctgaacatcatggtggaccccctggaggccaccgtgtcctgcagcggcagccaccacatcaagtgctgcatcgaggaggatggagactacaaggtgaccttccacacaggcagcagcagcctgcctgctgccaaggaggtgaacaagaagcaggtgtgctacaagcacaacttcaatgccagctctgtgtcctggtgcagcaagacagtggatgtgtgctgccacttcaccaatgctgccaacaacagcgtgtggagccccagcatgaagctgaacctggtgcctggagagaacatcacctgccaggaccccgtcatcggcgtgggggagcccgggaaggtgatccagaagctgtgccgcttcagcaatgtgcccagcagccctgagagccccatcggcggcaccatcacctacaagtgtgtgggcagccagtgggaggagaagagaaatgactgcatcagcgcccccatcaacagcctgctgcagatggccaaggccctgatcaagagccccagccaggatgagatgctgcccacctacctgaaggacctgagcatcagcattgacaaggccgagcacgagatcagcagcagccctggcagcctgggcgccatcatcaacatcctggacctgctgagcacagtgcccacccaggtgaacagcgagatgatgacccacgtgctgagcacagtgaatgtcatcctgggcaagcctgtgctgaacacctggaaggtgctgcagcagcagtggaccaaccagagcagccagctgctgcacagcgtggagcgcttcagccaggccctgcagagcggggacagcccccccctgtccttcagccagaccaacgtgcagatgagctccatggtgatcaagagcagccaccctgagacctaccagcagagatttgtgttcccctactttgacctgtggggcaatgtggtgattgacaagagctacctggagaacctgcagagcgacagcagcatcgtgaccatggccttccccaccctgcaggccatcctggcccaggacatccaggagaacaactttgctgagagcctggtgatgaccaccaccgtgagccacaacaccaccatgcccttccgcatctccatgaccttcaagaacaacagccccagcggcggggagaccaagtgtgtgttctggaacttccggctggccaacaacacaggaggctgggacagcagcggctgctacgtggaggagggagatggagacaacgtgacctgcatctgtgaccacctgaccagcttcagcatcctgatgagcccagacagcccagaccccagcagcctgctgggcatcctgctggacatcatctcctatgtgggcgtgggcttcagcatcctgagcctggccgcctgcctggtggtggaggccgtggtgtggaagtctgtgaccaagaacagaaccagctacatgaggcacacctgcatcgtgaacattgctgccagcctgctggtggccaacacctggttcatcgtggtggccgccatccaggacaaccgctacatcctgtgcaagacagcctgtgtggccgccaccttcttcatccacttcttctacctgtctgtgttcttctggatgctgaccctgggcctgatgctgttctaccgcctggtgttcatcctgcacgagaccagccgcagcacccagaaggccatcgccttctgcctgggctacggctgccccctggccatcagcgtcatcaccctgggcgccacccagccccgggaggtgtacaccaggaagaatgtgtgctggctgaactgggaggacaccaaggccctgctggcctttgccatcccagccctgatcatcgtggtggtgaacatcaccatcaccatcgtggtgatcaccaagatcctgcggcccagcatcggggacaagccctgcaagcaggagaagagcagcctcttccagatcagcaagagcattggagtgctgacccccctgctgggcctgacctggggcttcggcctgaccaccgtcttccctggcaccaacctggtgttccacatcatctttgccatcctgaatgtgttccagggcctcttcatcctgctgtttggctgcctgtgggacctgaagagcaccagcctgggcagcagcacccctgtgttctccatgagcagccccatcagccgccgcttcaacaacctgtttgggaagacaggcacctacaacgtgtccaccccagaggccaccagcagcagcctggagaacagcagcagcgccagcagcctgctgaactag

SEQ ID NO: 185322 - DNA, 3615 bp, Artificial Sequence
  derived and/or modified sequence
atgaagagccccaggaggaccaccctgtgcctgatgttcatcgtcatctacagcagcaaggccgccctgaactggaactatgagagcaccatccaccccctgagcctgcatgaacatgagcctgctggggaggaggccctgcggcagaagagagctgtggccaccaagagccccacagctgaggagtacacagtgaacatcgagatcagctttgaaaatgccagcttcctggaccccatcaaggcctacctgaacagcctgtccttccccatccacggcaacaacacagaccagatcacagacatcctgagcatcaacgtgaccaccgtgtgcaggcctgctggaaatgagatctggtgcagctgtgagaccggctacggctggccccgggagcgctgcctgcacaacctgatctgccaggagagagatgtgttcctgcccggccaccactgcagctgcctgaaggagctgccccccaacggccccttctgcctgctgcaggaggatgtgaccctgaacatgagggtgcggctgaatgtgggcttccaggaggacctgatgaacaccagcagcgccctgtaccgcagctacaagacagacctggagacagccttcaggaagggctacggcatcctgcccggcttcaagggcgtgacagtgacaggcttcaagagcggctctgtggtggtgacctatgaggtgaagaccaccccacccagcctggagctgatccacaaggccaatgagcaggtggtgcagagcctgaaccagacctacaagatggactacaacagcttccaggccgtgaccatccgcaccccagagacagacatcgacagcagctgcagccgctacaccctgaaggcagatggcacccagtgccccagcggcagcagcggcaccaccgtcatctacacctgtgagttcatcagcgcctatggagcccggggcagcgccaacatcaaggtgaccttcatctctgtggccaacctgaccatcaccccagaccccatctctgtgtctgagggccagaacttcagcatcaagtgcatcagtgatgtgagcaactatgatgaggtgtactggaacaccagcgctggcatcaagatctaccagcgcttctacaccacccggcgctacctggatggagctgagagcgtgctgactgtgaagaccagcacccgggagtggaatggcacctaccactgcatcttccgctacaagaacagctacagcatcgccaccaaggatgtgattgtgcaccccctgcccctgaagctgaacatcatggtggaccccctggaggccaccgtgtcctgcagcggcagccaccacatcaagtgctgcatcgaggaggatggagactacaaggtgaccttccacacaggcagcagcagcctgcctgctgccaaggaggtgaacaagaagcaggtgtgctacaagcacaacttcaatgccagctctgtgtcctggtgcagcaagacagtggatgtgtgctgccacttcaccaatgctgccaacaacagcgtgtggagccccagcatgaagctgaacctggtgcctggagagaacatcacctgccaggaccccgtcatcggcgtgggggagcccgggaaggtgatccagaagctgtgccgcttcagcaatgtgcccagcagccctgagagccccatcggcggcaccatcacctacaagtgtgtgggcagccagtgggaggagaagagaaatgactgcatcagcgcccccatcaacagcctgctgcagatggccaaggccctgatcaagagccccagccaggatgagatgctgcccacctacctgaaggacctgagcatcagcattgacaaggccgagcacgagatcagcagcagccctggcagcctgggcgccatcatcaacatcctggacctgctgagcacagtgcccacccaggtgaacagcgagatgatgacccacgtgctgagcacagtgaatgtcatcctgggcaagcctgtgctgaacacctggaaggtgctgcagcagcagtggaccaaccagagcagccagctgctgcacagcgtggagcgcttcagccaggccctgcagagcggggacagcccccccctgtccttcagccagaccaacgtgcagatgagctccatggtgatcaagagcagccaccctgagacctaccagcagagatttgtgttcccctactttgacctgtggggcaatgtggtgattgacaagagctacctggagaacctgcagagcgacagcagcatcgtgaccatggccttccccaccctgcaggccatcctggcccaggacatccaggagaacaactttgctgagagcctggtgatgaccaccaccgtgagccacaacaccaccatgcccttccgcatctccatgaccttcaagaacaacagccccagcggcggggagaccaagtgtgtgttctggaacttccggctggccaacaacacaggaggctgggacagcagcggctgctacgtggaggagggagatggagacaacgtgacctgcatctgtgaccacctgaccagcttcagcatcctgatgagcccagacagcccagaccccagcagcctgctgggcatcctgctggacatcatctcctatgtgggcgtgggcttcagcatcctgagcctggccgcctgcctggtggtggaggccgtggtgtggaagtctgtgaccaagaacagaaccagctacatgaggcacacctgcatcgtgaacattgctgccagcctgctggtggccaacacctggttcatcgtggtggccgccatccaggacaaccgctacatcctgtgcaagacagcctgtgtggccgccaccttcttcatccacttcttctacctgtctgtgttcttctggatgctgaccctgggcctgatgctgttctaccgcctggtgttcatcctgcacgagaccagccgcagcacccagaaggccatcgccttctgcctgggctacggctgccccctggccatcagcgtcatcaccctgggcgccacccagccccgggaggtgtacaccaggaagaatgtgtgctggctgaactgggaggacaccaaggccctgctggcctttgccatcccagccctgatcatcgtggtggtgaacatcaccatcaccatcgtggtgatcaccaagatcctgcggcccagcatcggggacaagccctgcaagcaggagaagagcagcctcttccagatcagcaagagcattggagtgctgacccccctgctgggcctgacctggggcttcggcctgaccaccgtcttccctggcaccaacctggtgttccacatcatctttgccatcctgaatgtgttccagggcctcttcatcctgctgtttggctgcctgtgggacctgaaggtgcaggaggccctgctgaacaagttcagcctgagccgctggagcagccagcacagcaagagcaccagcctgggcagcagcacccctgtgttctccatgagcagccccatcagccgccgcttcaacaacctgtttgggaagacaggcacctacaacgtgtccaccccagaggccaccagcagcagcctggagaacagcagcagcgccagcagcctgctgaactag

SEQ ID NO: 185323 - DNA, 2154 bp, Artificial Sequence
  derived and/or modified sequence
gactaccgcagccaggtgcacgtggagagccgggagggcctgtggaagatcaagggcaagatcaagaagctgggcagcagcgagaaggtgacagagagcaagggggagaacatcacctgccaggaccctgtgattggagtgggggagcccgggaaggtgatccagaagctgtgccgcttcagcaatgtgcccagcagccctgagagccccatcggcggcaccatcacctacaagtgtgtgggcagccagtgggaggagaagagaaatgactgcatcagcgcccccatcaacagcctgctgcagatggccaaggccctgatcaagagccccagccaggatgagatgctgcccacctacctgaaggacctgagcatcagcattgacaaggccgagcacgagatcagcagcagccctggcagcctgggcgccatcatcaacatcctggacctgctgagcacagtgcccacccaggtgaacagcgagatgatgacccacgtgctgagcacagtgaatgtcatcctgggcaagcctgtgctgaacacctggaaggtgctgcagcagcagtggaccaaccagagcagccagctgctgcacagcgtggagcgcttcagccaggccctgcagagcggggacagcccccccctgtccttcagccagaccaacgtgcagatgagctccatggtgatcaagagcagccaccctgagacctaccagcagagatttgtgttcccctactttgacctgtggggcaatgtggtgattgacaagagctacctggagaacctgcagagcgacagcagcatcgtgaccatggccttccccaccctgcaggccatcctggcccaggacatccaggagaacaactttgctgagagcctggtgatgaccaccaccgtgagccacaacaccaccatgcccttccgcatctccatgaccttcaagaacaacagccccagcggcggggagaccaagtgtgtgttctggaacttccggctggccaacaacacaggaggctgggacagcagcggctgctacgtggaggagggagatggagacaacgtgacctgcatctgtgaccacctgaccagcttcagcatcctgatgagcccagacagcccagaccccagcagcctgctgggcatcctgctggacatcatctcctatgtgggcgtgggcttcagcatcctgagcctggccgcctgcctggtggtggaggccgtggtgtggaagtctgtgaccaagaacagaaccagctacatgaggcacacctgcatcgtgaacattgctgccagcctgctggtggccaacacctggttcatcgtggtggccgccatccaggacaaccgctacatcctgtgcaagacagcctgtgtggccgccaccttcttcatccacttcttctacctgagcgtcttcttctggatgctgaccctgggcctgatgctgttctaccgcctggtgttcatcctgcacgagaccagccgcagcacccagaaggccatcgccttctgcctgggctacggctgccccctggccatcagcgtcatcaccctgggcgccacccagccccgggaggtgtacaccaggaagaatgtgtgctggctgaactgggaggacaccaaggccctgctggcctttgccatcccagccctgatcatcgtggtggtgaacatcaccatcaccatcgtggtgatcaccaagatcctgcggcccagcattggagacaagccctgcaagcaggagaagagcagcctcttccagatcagcaagagcattggagtgctgacccccctgctgggcctgacctggggcttcggcctgaccaccgtcttccctggcaccaacctggtgttccacatcatctttgccatcctgaatgtgttccagggcctcttcatcctgctgtttggctgcctgtgggacctgaaggtgcaggaggccctgctgaacaagttcagcctgagccgctggagcagccagcacagcaagagcaccagcctgggcagcagcacccctgtgttctccatgagcagccccatcagccgccgcttcaacaacctgtttgggaagacaggcacctacaacgtgtccaccccagaggccaccagcagcagcctggagaacagcagcagcgccagcagcctgctgaactag

SEQ ID NO: 185324 - DNA, 4041 bp, Artificial Sequence
  derived and/or modified sequence
atgaagagcccccggcggaccaccctgtgcctgatgttcatcgtgatatactcatcaaaagccgctctgaactggaactacgagtcaactatccatccactgtcgcttcatgagcatgagcccgcaggcgaagaagcgctacgccagaaaagagccgtggccaccaaatccccaactgctgaagagtatacggttaacattgagatatccttcgagaacgcttcttttctggaccctatcaaggcctacctgaacagtttatcattccccatccacggcaacaacacagaccagataaccgatatactgtccatcaacgttaccaccgtgtgccggcctgcaggtaacgaaatctggtgctcgtgcgagactgggtatggttggccaagggaaagatgcctgcacaatcttatatgccaggaacgggatgtcttcctgcccggccatcactgtagttgtcttaaagaattgcctcccaacggaccattttgtctcctgcaggaggatgttacgctaaacatgagagtcaggctgaatgttgggtttcaggaggacctgatgaatactagttccgccctgtaccgaagttacaagactgatctagagaccgcgtttagaaagggctacggcatcctaccaggatttaaaggagtcactgttaccggatttaaaagcggttctgtggtggtgacgtatgaagtaaaaaccaccccaccttctctcgagctgattcataaggctaacgagcaagtggtgcagagcctaaaccagacctataaaatggattacaattcattccaggcagtgactatcaacgagtcgaatttctttgtcactcccgagatcatcttcgaaggcgataccgtatccttagtgtgtgaaaaagaggtcctgtcctccaatgtgtcctggagatatgaggaacagcagttagagattcaaaatagctctcgtttttctatttatacagccctctttaataacatgacctctgtgtccaagctaactattcacaatattacgcccggagacgcaggcgagtatgtttgtaagcttatactcgatatctttgaatatgaatgcaagaaaaagattgatgtgatgccgattcaaatactcgcaaacgaggaaatgaaagtaatgtgcgacaacaaccctgtttcattaaattgttgtagccaggggaatgttaattggtccaaggtagagtggaagcaggaaggcaagattaatattccgggcacccccgagactgatatcgactccagctgtagtcgatacacactgaaggcggatggcacccagtgcccctccgggtccagtggaacaaccgtaatctatacatgtgaattcatctctgcttatggcgccagggggtcagcgaatattaaggtcacgtttatctcagtggccaacctgactatcacccctgacccaatatctgttagcgaagggcaaaacttcagtatcaaatgcattagtgatgtgtcgaattatgacgaggtctattggaacaccagtgctggcatcaaaatttaccagcgcttctatacaacacgtaggtatctcgacggtgcagaaagcgtcctcactgttaagacaagcacaagagagtggaacgggacttatcactgtatctttcgctataagaactcttactccatcgccaccaaagacgtgatcgtgcatcccctgcctctgaaactgaatatcatggtggacccactggaagcaactgtttcttgttccggctcccatcatataaagtgctgcatcgaggaagacggtgattataaggtgacattccacaccgggtcttcatctctgccagcagcaaaggaagtcaacaaaaagcaagtatgttacaaacacaatttcaacgccagtagcgtgagttggtgctcaaaaacagttgacgtgtgctgccactttacaaacgctgctaacaattctgtctggtcaccctcaatgaaactcaatctggtgccaggcgagaacattacttgtcaggatcccgtgattggcgtgggggaacctggcaaggtgattcagaagctttgccggttttcgaacgttcctagtagccctgaatcacctattggaggtaccatcacttacaagtgcgtcggctctcagtgggaagagaaacggaatgactgtattagcgcccctatcaacagcctgctccagatggccaaggccctgatcaagtccccttctcaggatgagatgctgccaacatatctaaaagatctgagcatcagcatcgataaggccgagcatgagatcagctcatctcctgggtccctgggcgccatcattaatattctggacttgttaagtacagtgcccacacaggtcaatagcgagatgatgacccatgtgctgagtaccgttaatgtcatattgggcaagccagtcctaaacacttggaaggtcctccagcaacagtggactaaccaatcctcacagctgttgcatagcgtggaaagattttcacaggctctccagtcgggggactctccaccactaagtttcagtcaaactaatgtgcagatgagttccatggtgattaagtccagtcaccctgagacctatcaacagaggttcgtgtttccgtatttcgacctctggggcaatgtcgttatcgataaatcctatctggagaatctgcagagcgatagcagcatcgtgactatggcctttcccactttgcaggcgattcttgctcaagacatccaagaaaataactttgccgagtccctggtgatgaccactaccgtttcacacaacacgactatgccattcaggatttccatgaccttcaagaacaactctccttctggtggagagaccaagtgcgtgttctggaatttccgactggctaacaatacaggcgggtgggactccagtggatgttatgttgaggaaggcgacggtgacaacgtaacgtgcatttgcgatcacttgaccagtttcagcatcctcatgtcaccagattcccctgatccgtcaagcctgcttggaatcctgctggacatcatcagctacgttggggtcggcttctctattctgtccttggcagcctgcctcgtcgtcgaggccgtggtgtggaagtccgtgactaagaataggacttcctacatgaggcacacatgcatcgttaatattgccgcctcactgctggtagccaatacatggtttatcgtcgtggccgctatccaggataatcgatacattctctgtaaaacagcttgcgtggctgctaccttttttatccactttttttacttgtctgttttcttctggatgctgactctgggattaatgctattttaccggctggtcttcatccttcacgaaaccagtcgatctacacagaaagcgattgctttttgtttagggtacggttgccccctggcgatctctgtgatcacgctcggtgccactcagccgagggaggtatatacaaggaagaatgtttgttggttaaactgggaggatactaaagcactcctggcattcgcaattccagctctgataatcgtggttgtaaatattaccatcacaattgtggttattacaaaaattctgcgcccttccatcggcgataagccctgcaagcaggaaaagtctagcctttttcaaataagcaaatctattggggtgctgaccccactcctgggcttgacttgggggttcggccttacaaccgtgtttcctggaacgaacctggtgtttcacatcatttttgctatcctgaacgtttttcagggtctctttatactgctcttcggatgtctctgggatttgaaggtccaggaagccctgctgaacaagtttagtctcagtcgctggtccagtcagcattcaaagagcacctccctgggcagtagcactccagtgtttagtatgagctcaccgattagccgaaggttcaacaacctgttcggcaaaaccggtacatataacgtgagcacacccgaggccactagctcttcccttgaaaatagtagcagcgccagctctctcctcaactag

SEQ ID NO: 185325 - DNA, 4041 bp, Artificial Sequence
  derived and/or modified sequence
atgaagagcccccggcggaccaccctgtgcctgatgttcatcgtgatttatagttccaaggcggccctgaattggaactacgaaagtacaattcaccccctgtcacttcacgaacacgaacccgccggcgaggaggccttgaggcaaaagcgggcagtggcaacgaagagtcctactgcagaagagtatacagtaaatatcgaaatctcgtttgaaaacgcatcatttcttgatccgataaaagcctatctaaatagcctgagtttcccaattcacggcaataataccgaccagataaccgatatacttagtatcaatgtgacaacagtctgtagaccagctggcaatgaaatctggtgtagctgtgaaacaggatatggctggccacgtgagagatgcctgcacaatttgatatgtcaggaaagggatgtcttcctaccaggacaccactgctcttgtctgaaagagctgcctcccaacgggccgttctgccttctgcaggaggacgtgactcttaatatgcgagtcaggctgaacgtggggttccaggaagacctgatgaacacgtcctcagccttgtaccgcagctataagactgatttagaaaccgctttccgcaagggctacgggattcttcccgggttcaagggagtcactgtgaccgggttcaagtctggctctgtggttgtgacatacgaagttaaaacaactccccctagcctggagctgattcataaagccaacgaacaggtggtgcagtctctgaatcagacctataaaatggactacaatagcttccaggctgtgacaattaacgaatcgaattttttcgtcactcctgaaatcatctttgagggcgacacggtttccttagtctgcgagaaagaggtgctgagcagcaacgtgagctggcgctatgaggagcagcagttagagatccagaacagctccaggttttccatctacactgccttgttcaacaatatgacctctgtatccaagctaacaatccacaacattacaccaggagatgctggcgaatacgtatgtaagctgatcttggatatttttgaatatgaatgcaaaaaaaaaatcgatgtgatgcccattcaaattttagcaaacgaggaaatgaaggtcatgtgcgataacaacccggtctccctgaactgttgtagccaggggaatgtcaattggtctaaagtggagtggaaacaggagggtaaaatcaacatcccgggcacccctgaaactgatatagattcctcctgttctcggtatactctgaaggcagatggcacacaatgcccgtccgggtcatcagggactacggtcatttatacttgtgaatttatctccgcatacggggccaggggaagcgcgaacatcaaggtgacgtttatttctgtcgccaatctgactattacacctgatccaatttctgtcagcgaaggtcagaactttagtatcaaatgtattagcgatgttagcaactacgacgaggtctactggaatacatcagccgggatcaagatctatcaacgtttctataccacccgccggtatttagacggcgctgagagtgtgcttaccgtcaaaacgagcacccgagagtggaacgggacataccattgcatttttaggtataagaatagctattccatcgctactaaggacgtcatagtgcaccccctgccgctgaagctgaatatcatggtggacccgctcgaggccacagtcagttgtagtggctcccatcacatcaagtgttgcattgaagaggacggagattacaaggtgaccttccacaccggcagctcgtctctacctgcagctaaggaggtaaataagaagcaagtttgctataagcataactttaatgcctcaagcgtgtcttggtgtagcaaaaccgtagacgtatgctgccactttacaaatgcagcgaacaattcagtgtggtcaccctcaatgaagctaaatctcgtgccaggtgaaaacatcacttgccaggaccccgtaatcggcgtcggagaacccgggaaagttatccagaaattatgcaggttcagtaacgtaccttcttcaccagaatcccctatcggaggcaccattacttacaagtgcgtgggcagccagtgggaggagaaacgaaatgactgtatttctgcccctatcaactctttgttgcagatggccaaggcattgatcaaaagcccctcccaggacgaaatgctgccaacctacctcaaggacctctccattagtatcgacaaggctgagcacgaaatttcatccagccctggttctcttggcgccattatcaacattttagacctgctgagcaccgttcctacccaagtcaatagcgagatgatgacccatgtattgagtacagttaatgtgatcctgggcaagccagtcctcaacacttggaaggtgcttcaacagcagtggaccaaccagagcagccagttactgcattctgttgagcgcttttcacaggcactacagagtggagactccccacccctgagcttttcacagaccaatgtgcagatgagctctatggtgataaaaagttcccatcccgagacttaccagcaacgtttcgtgttcccctatttcgatctctgggggaacgtcgtgatcgacaagagttatctggaaaatctgcagagtgattcaagcatcgtgacgatggcatttccaacacttcaagccatcctcgcacaggatattcaggaaaacaacttcgcagagtccctcgtgatgaccactactgtatcccataacacaactatgcccttccgcatatctatgacgtttaagaacaactctccgagcgggggcgagacaaagtgtgttttctggaatttcagactagctaacaatactggcggttgggacagctcagggtgttacgttgaggaaggagacggggacaatgtcacctgcatctgtgatcacctgactagtttttcgatactgatgagcccagattcccccgatccttcctctctccttggaatcctcttggacatcatctcatacgtgggcgtgggcttctccatactgtctctcgcagcctgcctggtcgttgaagccgttgtttggaaatcagttacaaaaaatagaacttcttacatgaggcatacttgtattgtaaacatcgccgcctctcttcttgtggccaatacatggttcattgtcgttgcagccattcaggacaatagatacatcctgtgcaaaactgcctgtgttgcggccacgttttttatccatttcttctatctgtccgtgttcttttggatgctcacactgggtctaatgttattttacaggttggtcttcattcttcatgagacctcccgttcaacacaaaaagcaatcgccttttgcctgggctacggttgcccactggccatttccgtgatcaccctgggggcaacgcaaccgcgcgaggtgtacacccggaagaacgtgtgttggctcaattgggaggataccaaggccttactcgcctttgcaattcctgctctgatcatagtggtggtcaatatcacaataaccatcgtggtcatcaccaagattttgcgccccagcattggagataaaccttgtaaacaagaaaaatccagcctctttcagatttcaaaatcaatcggggttctcacccccttactcggcctgacatggggttttgggctgaccacagtgtttccgggaaccaacttggtgtttcacattatatttgccattttaaatgtcttccaggggctcttcattttgctcttcggctgcctgtgggatctcaaggtacaagaggcactcttaaataaatttagtctgtcgaggtggagcagccagcactccaaaagcacttcccttggctctagcactccagtcttttccatgtcttcccccatcagcagacgttttaacaatttgtttggtaagacggggacctacaatgtcagcactcccgaagcaaccagttcttcactggagaattcaagttccgcctcttccctgctgaactag

SEQ ID NO: 185326 - DNA, 3981 bp, Artificial Sequence
  derived and/or modified sequence
atgaagagcccccggcggaccaccctgtgcctgatgttcatcgtgatttactcttccaaggccgcactcaattggaattatgaaagcacgattcatcccctttccctgcacgagcacgaacccgccggggaagaagctctgagacagaagagggccgtggccactaagagcccgacggcagaagagtacaccgtcaatatagagattagtttcgaaaacgcctcgttcctggatcccattaaggcgtatttgaactctctctcattccccatccacggcaataatactgatcaaatcacagacattctgtccatcaacgtgacaacagtctgccgacctgctgggaatgagatatggtgtagctgcgaaactggatatgggtggcctcgagaacggtgcctgcacaatcttatttgtcaggagcgggacgtttttctccccgggcatcactgttcttgtctgaaggagctccccccgaatggccccttctgtctgctccaggaagatgtgacccttaacatgagggtgagactcaacgttgggtttcaggaagacttgatgaatacttccagcgccctgtacaggtcatataaaactgaccttgaaacggccttccggaaaggctacggcatcttgcctggctttaagggtgtaacagtcactgggtttaaatccgggtccgtagttgttacgtacgaagttaagaccacccctccttctctggaactgattcacaaagctaacgagcaggttgttcaaagcctcaaccaaacctataaaatggactataactcctttcaggccgtgaccatcaacgagagcaatttcttcgtgacgccagagattatcttcgaaggcgatacagttagcctagtgtgcgaaaaggaggtcctaagttctaatgttagctggcgctatgaagaacagcagcttgagatccagaattcatcgcggttctcaatatatactgctttgttcaacaacatgacatctgtaagcaaactgactatccacaatataactcctggcgacgctggtgagtacgtgtgcaagctgatcctggacattttcgaatatgaatgcaagaagaaaatcgatgtgatgcctattcagatcctggccaacgaggaaatgaaagtgatgtgtgacaataacccagtaagcttgaactgttgttctcaaggcaatgtgaactggtccaaggttgagtggaaacaggagggaaaaatcaatatccctggcacaccggagacagatatcgatagttcttgttctcggtatacccttaaagcagacggaacccagtgtccttccgggtccagcggcaccaccgttatatatacttgtgaattcattagtgcctacggtgcgcgcggttccgccaacatcaaagtgacgttcataagtgtagccaacctgacaatcactcctgacccgatctccgtcagtgaaggccagaatttttcgatcaaatgcatttccgatgtgtctaattacgacgaagtgtactggaatacgtctgcgggcattaaaatctaccagcggttttatactactagacgctacctggatggcgccgaaagtgtccttacagtaaaaacttcgactcgcgagtggaacggaacctaccattgcatcttccgatacaagaactcttatagtatcgccacgaaggacgtgatagtgcacccactgcccctcaaactgaacatcatggtcgacccgctggaggcaacagtgtcctgttcaggctctcatcatatcaagtgctgtattgaggaggatggcgattataaggtaaccttccacactgggtccagtagcttgccagcggctaaagaagtaaacaaaaagcaggtgtgttacaagcacaatttcaatgccagttccgtatcttggtgtagtaaaactgtagatgtctgctgtcacttcaccaacgccgccaacaactcagtttggagcccatcaatgaagctgaatctcgttcccggggagaatataacatgccaggaccctgtgataggggttggtgaacctggaaaagtgatacaaaagttatgtaggttcagtaatgtcccctcatcaccggaatcccccattggaggcacgattacttacaagtgtgtggggagccaatgggaagagaaacgaaacgactgcatctctgctcctatcaactccctgttacagatggcaaaggcgctgatcaagtccccttcccaggacgaaatgttgcctacgtacttgaaggatctcagcattagtatcgacaaagctgagcacgagattagcagtagcccaggcagcctgggagcaatcatcaacattcttgacctactgagcactgtgcccacacaggtgaattcagagatgatgacgcacgttcttagcaccgtgaacgtgattctggggaaacccgtactcaacacctggaaggtgcttcaacaacagtggaccaaccagtcttcccagctgctccatagtgtggagcggttcagccaggcattgcagagtggagactcccctcctctcagtttctctcagacaaacgtgcaaatgtctagtatggtcataaaatcatcccacccagagacataccaacagcgctttgttttcccttacttcgacctgtggggaaatgtggttatcgataaatcttacctggaaaatctgcagtccgattctagcatcgtgactatggccttccctactctgcaggcgatcctggcccaggatattcaggagaacaattttgcagaatccctggtcatgacaactaccgtgagtcacaatacaacgatgccctttaggatcagcatgacgtttaaaaataattcacctagcggaggggagaccaagtgcgtattctggaacttccgcctcgctaataacacaggcggctgggactcaagcggctgttacgttgaagagggagacggtgataatgtcacttgcatctgtgatcatctgactagcttttctatcctaatgagtcctgatagccctgatccatcatccctgctgggaatcctcctggacataattagttatgttggagtaggatttagcattctgtcactcgccgcttgcctagtggtggaagcagtggtctggaagagtgtgaccaagaataggacatcctatatgaggcacacctgtattgtcaatattgcagcatccctcctcgtcgcgaacacttggtttatagtggttgcagccatccaagacaaccgatacattctgtgcaagactgcttgtgtggcagccacattttttatacacttcttctatctctccgtttttttttggatgttgaccctcgggctgatgcttttctaccgtcttgtgtttattttgcatgaaacttctcggagcactcaaaaggcgatcgctttttgccttgggtacgggtgtcccttggccatttctgtcataactttaggagctacacaacccagggaggtgtacacaagaaagaacgtctgctggttaaactgggaagacacaaaggccctgcttgcattcgcaatccccgccctgattatcgtggttgtaaatatcaccataactatcgtggtcattactaagattttacgccccagcattggcgataaaccttgcaaacaggaaaagagctctctgtttcagatctctaaaagcatcggggttctgacaccattgcttggtctcacttgggggttcgggctgaccacagtgtttccaggcaccaacctggttttccatataatttttgccatattaaatgtcttccagggtctctttattctgctttttggctgcctctgggacttaaagagcactagtttgggctctagcacacccgttttcagtatgtcaagtcctattagtagaaggttcaacaacctgttcggcaaaaccggcacttacaacgtcagcacaccggaagcaactagcagctcccttgaaaacagctcctccgcaagtagtttgttgaactag

SEQ ID NO: 185327 - DNA, 4041 bp, Artificial Sequence
  derived and/or modified sequence
atgaagagcccccggcggaccaccctgtgcctgatgttcatcgtgatctatagttcaaaagccgccctgaactggaattacgaaagcacaattcatccactttccctccatgagcacgagccggctggcgaggaagccttacgccagaagcgcgccgtggccacgaaatctcccacggccgaggagtacacggtgaatattgagatctctttcgaaaacgcatcctttctagatcccatcaaagcctatcttaattccttgtcctttcccatccacggtaataatacggaccagatcacggatatccttagtattaatgttacaactgtttgccgcccagctggcaatgagatctggtgcagttgcgagaccgggtacggatggcctcgcgagcggtgtctccataatctgatctgtcaggagagagacgtgttcctccctggacaccattgcagttgtcttaaagagctgccccccaacgggcctttttgccttctgcaggaggacgtgacattgaacatgcgcgtgaggctcaatgtggggttccaagaggacctgatgaacacctcatctgccttataccggagttacaaaacagacttggagactgcttttagaaagggatacggaatcttaccagggtttaagggcgtcactgtgactggctttaaatccgggtcagtcgtggttacctacgaggtgaaaacaactccgcccagcctggaactgattcacaaggccaacgagcaggttgttcaaagcttgaatcaaacctacaaaatggactacaacagcttccaggccgtgacaataaacgagagcaactttttcgtaacgccagaaataatcttcgaaggcgacactgttagtcttgtgtgtgagaaggaggtcttatccagcaacgttagttggaggtacgaggaacagcagctggaaatacaaaacagtagcagattcagcatttatactgcattgttcaacaatatgacatccgtttctaaactgacaatccacaacatcacccccggggacgccggcgaatatgtgtgtaaacttattttagatatctttgagtatgagtgcaagaaaaaaatagatgtgatgcctattcagattctggccaacgaggagatgaaggttatgtgcgacaacaacccagtttctctgaactgctgctcacagggaaacgtgaactggagtaaggttgagtggaagcaggaaggaaaaatcaacattcctgggactcccgaaacagacattgattcaagttgttcaaggtacacgctgaaggcggacgggactcagtgtccttccggtagctccggtaccacagtgatatatacatgtgaattcatctccgcctatggcgcgagagggtcggctaatatcaaggtgactttcatttctgtcgcgaatttgacgattacccctgaccctattagcgtctctgaaggccaaaatttcagcattaagtgcattagcgatgtgagcaactatgatgaggtgtattggaacacgtccgccggcatcaaaatttaccagcgcttttataccactagacgatatctggacggggccgaaagtgtcctaacagttaagacctcaaccagagagtggaatggcacttatcactgcatcttccgctataaaaacagctattctatcgcaaccaaggacgtaatcgttcatccattgcctctaaaattgaacattatggtggacccactagaggctactgtgagttgttcaggatctcaccatatcaaatgttgcatcgaagaagacggcgactataaagtgacattccataccggcagttcctctctcccagccgctaaggaggtgaacaaaaagcaggtctgctacaaacacaatttcaacgcatcttccgtgtcctggtgttctaagacagtcgatgtgtgctgccacttcaccaacgccgctaataattcggtgtggagcccctcaatgaaactgaacctggtcccgggcgagaatattacgtgccaggatcccgttattggcgtaggggaacctgggaaggtgatccaaaagttgtgccgtttctccaacgtcccatcgtctcccgaaagcccaattggcggtaccattacctataaatgtgtaggatcccagtgggaggaaaaaagaaacgattgtatctcggccccaattaacagtctcttgcagatggcgaaggctcttatcaagagtccttcccaggacgagatgctgccgacatacctgaaggacctaagcatctcgatcgacaaagccgaacatgaaatatcctcctcccctggcagtctgggcgccatcatcaacattttagacctgctgtcaacggtccccactcaggtcaactccgagatgatgactcacgttctgagtaccgtgaacgtcatccttggcaaacccgtcctgaatacttggaaggtgctacagcagcagtggacaaaccagtcaagccaactactccatagcgtcgaacgcttcagtcaggccctgcagagcggtgatagcccgccactcagcttttcccagaccaatgttcaaatgtctagcatggttattaaatctagtcaccctgagacatatcagcaaaggttcgtgttcccttatttcgatttgtggggtaacgttgtaattgataagagttatctggaaaacttacagagcgattcttcaattgtgacaatggcgttcccgacactgcaagccatcctggcccaagacattcaagagaataacttcgcagagtcactggtcatgactacaacagtctctcacaacaccacgatgccatttcggatttcaatgacgttcaagaataattcgccttctgggggcgagacaaagtgtgtgttttggaattttcggctggccaataacactggcgggtgggattcatccggctgttacgtcgaggagggggatggcgataatgtcacttgcatctgcgatcacttaacttccttttctatcctcatgtcgcctgattcaccggatccgtcaagcctgctaggaatcctgctggatatcatcagctatgtgggggttggattctctatacttagcttagccgcatgcctcgtcgttgaggccgtggtgtggaagtcagtgacaaagaaccgcacctcttatatgcggcacacatgcattgtgaatatagcagcctcgctgctcgtggccaatacatggtttattgtggtcgcagccatccaggacaatcggtatattctctgtaaaactgcctgtgtagccgccactttctttatccacttcttttacttatctgtgtttttctggatgctgacattaggcttgatgcttttctatcggttggtttttattctccacgaaacctcccggagtacacaaaaagccatcgctttttgcttgggctacggctgtccactggctatctccgtgataacgttaggcgccacgcagcccagagaagtgtacacacgaaaaaatgtttgttggctgaattgggaggacaccaaggccctactggcgttcgctattccagccctcataattgtggtcgtgaacattaccataactatcgtcgtgataaccaaaatcctacgcccctcaattggcgacaagccatgtaaacaagagaagagctctttgtttcagatctctaagtcgatcggggtcttaacccctctgctgggcctaacttgggggtttggcctgacgactgtgttccctggaactaatttagtgtttcatatcatctttgccatactgaatgtgtttcagggactctttatactgttatttggttgcttgtgggacctgaaggttcaagaagctctgttgaataaattctccttgtccaggtggtcctcacagcattcaaagtccacatctctgggatcctcgacacccgtctttagtatgtcatcaccgatctctcgtaggttcaataatcttttcggcaaaacgggaacttacaatgtatcaactcctgaggccacctctagtagtcttgagaattctagctcagctagttcactgcttaattag

SEQ ID NO: 185328 - DNA, 3615 bp, Artificial Sequence
  derived and/or modified sequence
atgaagagcccccggcggaccaccctgtgcctgatgttcatcgtgatatatagcagcaaagctgcattgaactggaactatgagtcaacaatccatcccttatccctccacgaacacgaacctgccggtgaggaagcattacgccaaaagagggcggtggccacaaaaagtccaaccgccgaggaatatacagtcaacatcgagattagcttcgagaatgcttcatttttagaccctatcaaagcatatttgaacagcctgagcttcccgatccacggcaataacactgatcagattaccgatattctttcaattaacgtcacgacagtgtgtagacccgccggaaatgaaatttggtgtagctgcgagacaggatatggctggcccagagaacggtgcctgcacaaccttatttgccaggagagagatgtgttcttaccagggcaccactgctcctgcttgaaagagcttccgccaaatggaccattttgcctactgcaggaagatgtgacattgaatatgcgagtgcggctgaacgtcggctttcaggaggatctgatgaatacttcttctgctttgtacaggagttataagacggacttagagaccgccttccggaaaggttatggaattctgcctgggtttaagggagtcacagtgactgggttcaaaagcgggtcagtcgtcgtgacctatgaagttaaaacaactccaccgtctctagaactgattcacaaggctaacgagcaagtcgtccagagcctgaatcagacatacaaaatggattacaatagctttcaggcggtcacgatcaggaccccagaaacagatatagactccagctgctccagatacactcttaaggccgacgggacacaatgtccgagcggatcttcgggaactactgtgatctatacttgcgagttcattagtgcatatggggcacgtggctctgccaacatcaaggtgacatttattagtgtagccaatttgaccattacgcctgacccaatcagcgtgagcgagggtcagaacttctcaattaaatgtatctctgacgtgtccaactacgatgaggtttactggaataccagcgccggaatcaagatttaccagcgcttctatactacccgcaggtacttggatggtgccgaatcggtcctgactgtgaagacgtcaactagagagtggaatggaacgtatcactgcatcttccgatataaaaatagttattcgatagccaccaaagacgtgatagttcatcctctccctctcaagctcaacatcatggtggatcccctggaggccactgtttcttgctccgggtcacaccacataaaatgctgcatagaggaggacggcgattacaaggtcactttccatacggggagctcctccctgcctgccgcaaaggaagttaacaaaaaacaggtgtgctataagcacaactttaacgccagctctgtgagctggtgtagcaaaacggttgatgtgtgttgccatttcaccaatgccgccaacaacagtgtttggagcccctctatgaagctgaacctagtaccgggggagaacataacttgtcaggatcccgtgataggcgtgggggagccgggtaaagttatccagaaactttgccgtttttccaatgtcccatcaagtccagagagccccattgggggaaccatcacctacaaatgcgtgggctctcagtgggaggaaaagcggaacgattgtatcagcgcgccaattaattccctgctccagatggccaaggcgctgataaaatccccttcccaggatgaaatgctgcccacgtacctaaaagatctgagcatatcaattgataaagcagagcacgagatttcatcttcgccaggctctcttggtgcaatcatcaacatcctggatttactaagcacggtacctacgcaggtgaactcggagatgatgacacatgtgctgagcactgtcaacgtgatcctcgggaagcccgtgcttaacacgtggaaggtgctccagcagcaatggacgaatcagtctagtcagttgctccactcagtggagcgattctcccaggccctgcagtccggagatagccccccactgagtttctcacaaacaaacgtacagatgtcctcgatggtgatcaagtcgtcccacccagagacatatcagcagcgatttgtgtttccgtactttgatctctgggggaacgtggtgattgacaaatcatatctagagaacttacaaagtgatagctccattgtgacaatggcctttcccaccctccaagcaattctggctcaagacatacaagaaaataattttgcagagtcactggtcatgaccaccaccgtttcccataacaccactatgcctttcaggatttccatgacctttaagaacaatagccctagtgggggcgagacaaaatgtgtgttttggaactttcgcttagctaacaatactggagggtgggacagcagcggttgttacgtggaggagggagatggagacaatgtgacatgcatttgtgaccacctaacctctttttccattttaatgtcccctgacagccctgacccaagttctctgcttgggatactcctggacatcattagctatgtgggcgttggcttcagcatcctgtctctcgcagcctgtctggtggttgaagccgtcgtgtggaagtcagtcacaaagaaccggacctcttacatgcggcacacctgcatcgttaatattgcagcatccctgttggttgccaatacgtggtttatcgtagtggcggccatccaagacaatagatacatcctttgcaaaactgcctgcgttgccgccacctttttcatccattttttctacctctctgtgttcttttggatgctcaccctagggctaatgctgttttacaggttggtgttcatcctacacgaaacgagtcgctcaactcagaaagctatcgcattctgtttgggatacggctgccccctcgcaatcagtgtgattacactgggcgccacccagccacgggaagtctatacacggaagaacgtctgttggctgaattgggaagacacaaaagctctgctcgcctttgccattcccgcacttattattgttgtggtaaacatcaccatcacaattgttgtcattacgaaaatactaaggcctagtattggcgataagccctgcaagcaagagaaatcaagcctgtttcagattagcaagtctattggtgtcctgaccccattgctgggacttacctgggggttcggattaaccaccgtgtttcctggcactaacctggttttccatattattttcgcaatactcaatgtgtttcagggcctcttcattcttctcttcggctgcttatgggacctgaaggttcaggaagccttactgaataagttcagtctcagccggtggagttcccagcactctaaaagtacatcgctagggagttcaaccccagtttttagcatgtcctcccccatatcacgacgcttcaataacctgtttgggaaaaccggtacatacaatgtttctacaccggaagcaactagctcttccttggagaatagtagcagcgcatcctccctgcttaattag

SEQ ID NO: 185329 - DNA, 2154 bp, Artificial Sequence
  derived and/or modified sequence
gactaccggagccaggtgcacgtggagagccgggagggcctgtggaagatcaaagggaagatcaaaaaactggggagcagcgaaaaagtgactgagagcaagggggaaaatattacctgtcaggacccagtgataggcgttggggaacctggtaaagtaattcagaaattgtgccgcttctctaacgtgccctcaagcccggaatcccctattggcggtacgattacatacaagtgcgtcgggagccagtgggaagaaaagcgcaacgattgtatttctgccccaatcaatagcctgcttcagatggccaaagcattaattaagagtccatcgcaggatgagatgctcccaacttaccttaaggacctctctattagcatagacaaggctgagcatgaaatatcatcctctcctggcagcctgggagcaataattaacattttggatctgctttcaacagtccctacccaagtgaatagcgagatgatgacgcacgtactgtcaactgtgaacgtgattctggggaagccagtcttgaacacctggaaggtactccagcagcagtggaccaaccagtcctcccagctgttgcactctgtggaaagattctcacaggcgttgcaatctggcgattctccccctctaagcttctcccagacaaacgtacagatgtcaagcatggtgattaaatcatcacaccctgagacatatcagcaaaggtttgtgttcccttactttgatctgtggggcaacgtggtgattgacaagtcctatttggaaaacctacagagcgattcttcaattgttacgatggcatttccaaccctccaggctattctggctcaagacatccaggaaaataacttcgctgagagtttggtgatgactaccaccgtgagccacaacacaaccatgccttttcgtatcagcatgaccttcaagaacaattctcccagtgggggagaaactaaatgtgtcttctggaatttcagactggccaacaacacaggcggctgggattctagtgggtgctatgtggaggagggtgacggagacaatgtcacatgtatttgcgaccacctaaccagtttcagcatcctgatgagtccagactcacccgacccatctagtctgttaggcattctcctggatattatcagctatgttggtgtgggcttttctattctttctctagcggcctgtctggtggtggaagccgtggtttggaagagtgtaacgaagaatcggacttcctacatgagacatacatgtattgtgaacatagctgctagcctgctggtcgccaacacatggttcattgtcgtggccgcgatccaggacaatagatatattctctgtaaaactgcgtgcgtggccgcaacattttttattcactttttttacctatcagtgtttttttggatgctgacgctgggccttatgctgttttaccgactcgtatttatcctgcacgaaacatctcgaagtacacagaaggctatcgcattctgtttggggtatgggtgccccctcgcaatctcagtgatcaccctcggcgcaacacagccgagagaagtttacacccgaaagaacgtctgttggctcaattgggaagataccaaggcacttctggcatttgcgatccctgctctgattatcgtcgtggtcaatatcacaatcacaatcgtggtcatcactaagatcctgcgcccttctattggcgacaagccatgcaaacaggagaagtcgtctctgtttcagatctctaagtctatcggcgtcctgacgccccttttgggacttacatggggatttggcctgacaaccgtgtttcccggtaccaatctagtgtttcacataattttcgctatcttaaacgttttccagggtctgttcattctgctgtttgggtgcctctgggatttgaaagttcaggaggccctactgaacaagttctctcttagtcgctggagctctcagcatagtaagtccaccagtcttgggagcagcacaccagtcttcagcatgagctctccaatcagccgacggtttaacaacctgttcggcaagacggggacctataacgtgtctacccccgaggccacatcgtcttcgctggagaactccagtagcgcatcttctttactaaattag

SEQ ID NO: 185330 - DNA, 4041 bp, Artificial Sequence
  derived and/or modified sequence
atgaagagtccaagaagaaccaccctctgtctaatgtttatagtaatttactcttctaaagcagcattaaattggaattatgagtctaccattcaccctctgtcactccacgaacatgagcctgctggcgaggaggcactgaggcagaaaagagccgtggccacaaaatcccccactgctgaggagtacacagtgaacatcgagatatcgttcgaaaacgctagcttcctggacccaatcaaggcctacctcaactctctctcttttccaatccatggcaacaacacagaccagattaccgatatcttaagcatcaacgtgaccactgtgtgccgtccagcagggaatgaaatctggtgttcatgcgagacaggttatgggtggccaagagagaggtgtctgcacaacttaatctgtcaggagagggacgtgtttctgcccggacaccattgcagttgtttgaaagagctgccccctaatggacctttctgcctcctgcaagaggacgtgactttaaacatgcgggtcagactgaatgtggggttccaggaggatcttatgaatacatcttccgcactataccgcagctacaagactgatcttgaaactgcattcaggaagggctatgggattctcccgggtttcaaaggcgtcactgtgactggattcaaatccggcagcgtcgtggtgacttacgaggtgaaaactaccccaccctcgctggagctcattcataaagcaaacgaacaggtcgtgcagagcctgaaccagacatacaagatggattataactcttttcaagcggtgacgattaacgagtccaatttctttgtcactcccgagattatcttcgagggcgacacagtgagcctggtgtgtgagaaagaagtattgtctagtaatgtatcttggcgatacgaggaacaacagctcgaaatccaaaattctagtcgcttctcaatttacaccgccttatttaacaacatgacctcagtgtccaagcttactatacataatattacacccggagatgccggtgagtacgtgtgcaagctgattctagatatcttcgaatacgaatgtaaaaaaaagatcgatgttatgccgatacagatcttagcaaacgaagaaatgaaagtgatgtgcgataacaaccccgtcagcttaaactgttgctctcagggcaatgttaattggagcaaggtggagtggaagcaagagggaaaaattaacattccaggcacccccgagaccgatatagattcgagctgctcacgctacacacttaaagccgatggcacacagtgcccatcaggatcatcaggcaccactgtgatttacacatgcgagttcatctctgcctatggcgctcgcggttctgccaatataaaggtgacatttatctcagtcgccaatctcactatcaccccagatccgatcagcgtcagcgaaggtcagaatttctctatcaagtgtatttcagacgtttctaactacgatgaggtgtattggaataccagcgctggaatcaaaatatatcagaggttttacacgaccagaaggtacctagatggcgcagagagcgtccttaccgtgaagacatctacgcgcgaatggaatggcacctatcattgcatctttcgttacaagaacagctactccatagcgaccaaagacgtcattgtccatccactccctctcaagttgaacattatggtcgatcccctggaggccacagtgagctgtagcggctcacatcacattaaatgctgcattgaggaagacggagattataaggtcacattccacactggtagctcgagtcttccggcagcgaaagaggtaaataaaaaacaagtgtgctacaagcataacttcaacgcatcatctgtgtcttggtgttccaaaacagtggacgtctgctgtcatttcacaaatgcagccaataacagcgtatggtcaccttccatgaaactgaacctggtgccaggcgagaatatcacttgtcaagacccagtgatcggcgtgggagagccaggaaaagtgatccagaagttgtgcaggttttcaaatgtccctagttctcctgaatccccaattgggggtacaatcacctacaagtgcgttggctctcaatgggaggagaagcggaacgactgcatctccgcgcctatcaactctttgcttcagatggctaaggcgctaattaagtccccctcacaagacgagatgttacctacttatctgaaagatctgtccattagcatcgacaaagcagagcacgagataagctcgtctccaggctcactaggtgctatcatcaacatcctggatctgctgagtactgtgccaacccaggtgaactctgaaatgatgacccacgtcctgtcaactgtcaatgttatcctgggcaaacctgtcctcaacacttggaaggtcctccagcagcaatggacaaaccaaagctctcagttgttacactccgtggaacggtttagccaggctctgcagtccggtgactctccccctctctcttttagtcaaaccaatgtccagatgagcagcatggttatcaaaagtagccaccctgagacttatcagcagcgatttgtcttcccctacttcgacttatggggtaatgtcgtgattgataagtcatacctcgaaaacctgcaatctgattcatcgatagtgactatggcatttcctaccctgcaggccatcttggcccaggatatccaggaaaataacttcgccgagtccctggtgatgacgactaccgtctcacacaacacgaccatgccgtttcgcatttccatgacttttaagaataactccccctcaggcggtgagacgaaatgcgtgttttggaatttccgactcgctaacaacacaggcggttgggactcgagcggctgttacgtagaggagggtgacggcgacaacgtgacttgcatctgtgatcaccttaccagctttagcatcctgatgtctccggacagtcctgacccgagcagcctcttgggaatcctgctggatatcataagttacgtgggcgtcggattcagcatcctgtctctggccgcttgcctggtggtggaagctgtagtttggaagtccgtgaccaagaaccgaaccagctacatgaggcacacttgcatcgtcaatattgccgcaagcctcctggtggccaacacttggttcatcgtcgtcgccgcaattcaggacaacagatacattctatgcaagactgcttgtgtagcagcaaccttctttatccatttcttttatctgtctgtgttcttttggatgctgacccttggactgatgctgttttatagactagtgttcattcttcatgagacctcgaggagtacacagaaagccattgcattctgcctcggctatggttgccctctggctatttccgtgataacactaggcgctactcaaccacgagaggtgtacactagaaaaaatgtttgttggttaaattgggaggatactaaggcattgctggccttcgctataccagcactgatcatagtcgtggtgaacatcactattacgatcgttgtcatcacaaagatcctgagaccttctatcggagataaaccctgcaaacaggagaagagtagcctgtttcagatttctaagtctattggggtgcttacgcctctcctcggccttacatggggatttgggctcaccactgtgtttccaggcactaatctggtattccatatcatcttcgctattctgaatgtattccagggacttttcatattgctattcggctgtttgtgggatctcaaggtgcaggaagctttgcttaataagttttcgctgtcgcgctggtcatctcagcattccaagagtaccagcttgggtagtagcacacccgtgtttagtatgagtagtcccatcagtagacgctttaacaacctcttcgggaaaaccggaacatataacgtcagcacccctgaagccactagctcatcgctagagaattcatccagcgcaagtagtctgctcaattag

SEQ ID NO: 185331 - DNA, 4041 bp, Artificial Sequence
  derived and/or modified sequence
atgaagtcacccaggcgcactactttatgtctgatgttcatcgttatctactcgtccaaagctgctctaaattggaattacgagtcgaccatccatcctttgtcgttgcacgaacacgaacccgctggggaggaggcactccggcagaaaagagccgtagcaactaagtcccctaccgcagaagagtacactgtgaacatcgagatatcattcgaaaacgcatcctttctcgaccctatcaaggcctacttgaattccctctccttcccaattcacggaaataacaccgaccaaattaccgatatcctgtcaatcaatgtgacaacagtgtgccgaccagcaggcaatgaaatctggtgtagttgtgaaaccgggtacggctggcccagagagcggtgtttgcataacctgatttgtcaggagcgcgacgtgttcctgcctggccaccactgtagctgtctgaaggagctgccgccaaacgggcctttctgcctattgcaggaagacgttacactcaacatgagggtgcgccttaatgtggggtttcaagaggatttaatgaacaccagctctgccctgtatcggagttataagactgatctcgagacagctttccggaaaggttacggaattttgccaggttttaagggagtgactgttaccggttttaaaagtggctctgtcgtcgtgacctacgaggtgaaaaccacacctccttccctggagctaatccataaagctaacgaacaggtggtgcagagcttgaatcagacttacaagatggattataatagttttcaagcagttactattaacgagtctaattttttcgtgacccctgagataatttttgagggcgataccgtgagcctcgtgtgcgagaaggaagtcctctcatctaatgtgagctggagatacgaagagcagcaattggaaatccagaacagcagccggttttcgatatacaccgctttgttcaataatatgacaagcgtaagtaaacttactattcacaacataactccgggagatgctggggagtacgtttgtaagctgatcctggacatctttgaatatgagtgcaagaaaaagatagatgtgatgccaattcagatcctggctaatgaagaaatgaaagtcatgtgtgacaacaatccagtctctctgaactgttgcagccaagggaatgtcaattggtcgaaagtggagtggaagcaggaggggaagattaacatcccagggacgcccgaaaccgatatcgattcttcctgctcccgatatacacttaaggctgatggcacacagtgcccctcaggatctagcgggactacggttatctatacatgtgaatttatctccgcatatggcgctaggggctccgcaaacatcaaagtgacgttcatatccgtcgcaaacctgacaatcacccccgacccaataagtgtgtctgagggccagaatttcagtatcaaatgcattagtgacgtgtctaattatgacgaggtgtactggaatacatctgctggcataaagatctaccagagattttataccacccggcgatatctagacggcgcagaatctgtcttaacggtgaaaacctccactcgcgagtggaatggcacataccactgtatctttaggtacaaaaactcctactctatcgccacaaaggatgtgattgtacacccgctgcctttgaagctgaacataatggtggacccgctggaggcaaccgtatcttgctcaggatcacatcatattaaatgctgtatcgaggaggacggcgactataaagtaacatttcacacagggtcaagctccctgcctgcggctaaagaagtcaacaagaagcaggtatgttacaagcacaatttcaatgcaagctccgtgagctggtgttcaaagactgtggatgtttgctgccactttacgaacgctgccaacaattcagtgtggtcacctagcatgaaactgaacctggtacctggcgagaacattacctgccaagatcccgtgataggtgtcggcgagcctggcaaggtgatccagaaactttgtcggttctctaacgtaccatcgagcccagaaagccccattgggggtaccattacttataagtgcgtggggtcacagtgggaagagaaacgtaacgactgtataagtgcgcctataaattctttactccagatggctaaagctctcatcaaaagccccagccaggacgagatgttaccgacttacttgaaagatttgtccatttcgatagataaggctgaacatgaaattagctcttcacccggatctttgggcgcaatcatcaacattttggacctgttgtccacagtacctacccaggtgaacagtgaaatgatgacccatgtcctttcgaccgtgaatgtgattctcggtaaacccgtactgaatacctggaaggtcctacagcagcagtggacaaaccaatcttcccagttactccacagtgtcgaacggttctctcaggcgctccagtccggcgactcgccgccattatccttcagccagaccaatgttcagatgtcatcgatggttatcaaatcgtcacaccccgaaacataccaacagcgatttgtttttccctattttgatctttggggaaatgtcgtgatcgacaaaagttacctggagaatctgcagtcggatagctctatagtgaccatggccttccccaccctgcaggctatcttggcacaggacattcaggaaaataactttgccgaaagcttggtcatgacaactaccgtgtcccacaatactacaatgcccttccgtatttctatgactttcaagaacaacagtccttcaggcggagagactaagtgtgtattttggaacttcaggttagcgaacaacactgggggttgggactcctcagggtgttatgtcgaggaaggggacggcgacaacgttacctgtatttgcgatcacctgacttcattctccatcttgatgagtcccgatagccccgacccctccagtctccttggaatcctgctggatataatcagctacgtgggagtgggtttctctatcctttctttggctgcatgccttgtcgtcgaggctgtggtctggaagtccgtcacaaagaacagaactagttacatgaggcacacctgcatcgtgaacatcgccgcttctcttctggtagcaaatacctggtttattgtggtggctgcaattcaggataatcggtacattctgtgtaaaacagcttgtgttgccgcaaccttttttatacactttttttacctttctgtgtttttttggatgctgaccctaggtctcatgctgttttatcggcttgtcttcattttacacgagacctccaggagcactcagaaagcgatcgccttctgcttgggctatggctgccccctggcaatttcagtaatcacactcggtgctactcagcccagagaggtatatacacggaaaaatgtttgctggctgaactgggaagatactaaagccctccttgcctttgcaattcctgcgttaattatcgtcgtcgtaaacatcaccataactatagtcgtcatcacaaagatcttacgtccctcaattggagacaagccatgcaaacaggaaaaatcgtcacttttccagattagcaagagtattggagtgcttacccccctgctgggccttacctggggattcggcctcacaacggtctttcccggaaccaatctcgtcttccacatcatatttgccatcttgaacgtgttccagggcctgtttattttgctcttcgggtgcctgtgggatctcaaggtacaagaagcattgctgaacaaattctccctctctcgctggagctctcagcactccaaatccacgtccctgggctccagcaccccagtgttttccatgtcatcccctattagccgcagatttaataatctctttggaaaaactggcacttacaacgtttctacaccagaagccactagctcaagcctagagaattcttctagcgcttccagcttgctgaactag

SEQ ID NO: 185332 - DNA, 3981 bp, Artificial Sequence
  derived and/or modified sequence
atgaagagccctcgcaggactactctgtgccttatgttcattgtgatctacagcagcaaggcggcactcaattggaattatgagagcacaatacatcccctgtccttacacgagcacgagcccgcaggagaggaggccctgcgccagaaaagagctgttgctacaaagtcaccaacagcagaggagtacaccgtcaacatcgagataagctttgaaaatgcatccttcctcgatccaatcaaagcctatttaaactcactgtccttcccaatccacggaaataatactgatcaaatcacagacatattgtccatcaatgtcaccacggtgtgtaggcctgccggaaacgagatttggtgtagctgcgagaccggatacgggtggcctcgagagcgatgcctacacaacttaatttgccaggagagagacgtcttcttgcctggacaccactgcagttgcctcaaggagctgcccccaaatggaccattttgtctcctccaggaggatgtcaccctgaacatgcgcgtgcgtttaaatgtcgggtttcaggaggatctgatgaatacatcctccgcactttacagatcttataagaccgacttagaaaccgccttcaggaaggggtatggaatcttacccggattcaagggagttactgtgacaggattcaaaagtggtagtgtggtggtgacctacgaggttaagacaactccgcctagccttgaattgatccacaaggctaacgagcaagtggtgcagagtctgaatcagacttataaaatggactataattcgttccaggccgtaaccatcaatgaaagcaatttcttcgttacccccgagattatttttgagggcgatactgtgtcgctggtatgcgagaaggaggttctcagctcaaatgtcagctggcgctatgaggagcagcagctagaaatccagaatagctcgcggtttagtatttatactgctttattcaacaacatgacctctgtatccaaactcacaattcacaacattacccctggagacgccggtgaatatgtgtgcaaacttatcttggacatctttgagtacgagtgcaagaagaagatagatgttatgccgatacagatcttagccaacgaggagatgaaggttatgtgcgataacaacccagtgtccctcaattgttgttctcagggcaatgttaattggtccaaagtggagtggaaacaggaagggaagattaatatccctggaacacccgagacggatattgactccagttgctctagatacaccctgaaagccgacggaacccagtgtcccagcgggagctcaggtacaactgtgatctacacatgtgagttcatctcagcctacggtgctagagggtctgcgaacattaaagtaacgtttatctccgtcgccaatctgacaattacccctgatcctatttctgtgagcgagggccagaacttttcgatcaaatgtatctctgatgtgtcaaattacgacgaggtgtactggaacacaagtgctggaattaagatctatcagcggttctatactacccggcgttacctcgacggcgctgaatcggtgctcacagtgaaaacatccacaagagagtggaacggtacttaccattgtatcttccgatacaagaatagctactccatcgcaaccaaggatgtcatcgtgcatcccctgccgctcaaattaaatattatggtggaccctctggaagccacagtctcgtgctccggatctcatcacatcaagtgctgcatcgaagaagacggtgattataaggttacgtttcatacaggctcaagttcactgcccgctgcaaaggaagtaaataagaagcaagtctgctataagcataactttaacgcctcatctgttagctggtgcagcaagaccgtcgacgtttgctgccatttcacaaatgccgcaaacaacagcgtatggtcacctagcatgaagttgaatctggtgccaggagaaaacataacatgccaagatccggtcattggcgtgggggagccgggtaaggtcattcagaaactctgcagattcagtaacgtgccatcctcccctgagtcccccataggcggaactatcacttacaagtgcgttggtagtcagtgggaagaaaagcggaacgattgcatatcggcccctattaattcactcctccagatggcaaaggctctgataaagtctccttctcaggacgagatgctccccacttacctgaaggatttgtccatttccatcgacaaagccgaacatgagattagctcatcccccggtagcttaggtgctatcattaacattttagaccttctttcaactgtgccaacccaagtgaactccgaaatgatgacacacgtacttagcacagtcaatgtgattttaggaaaacccgttctgaatacctggaaagtccttcagcaacagtggactaaccagtcgtctcaactgctccactcagtcgagcggttctctcaggcactgcagagtggcgactccccccctttatcttttagtcaaacaaacgtccaaatgagctcaatggtgatcaaatcttctcaccctgagacctatcagcaaagatttgtgtttccttactttgacctctgggggaatgtggtgattgataaatcttatttggaaaatttgcagtccgattcgagtattgtaaccatggcattcccaactctccaggccatcctggctcaggatatccaggagaataattttgccgagagcctggtgatgaccactaccgtctcacataacacaactatgccattcagaatatctatgacgttcaagaacaactctccaagcggcggagaaactaaatgtgtgttttggaactttcggctcgccaataacactggcggatgggactcttcagggtgctatgtggaggaaggggacggggacaacgtaacctgtatctgcgatcatctcacttcattttcaattctgatgtctccagactcacccgaccccagttctctgctgggcatcttgctagacattattagttacgtgggcgtgggattttccatcttaagcctggctgcttgcctggttgtggaggccgtggtgtggaagtccgtaaccaagaatcggacgtcctatatgcgacacacctgcatcgtcaacatcgctgcttctctcctggtggccaatacatggttcattgtggtcgccgctatccaagacaatcggtacatcctttgcaaaaccgcctgtgtcgcagcaacattctttatccactttttctacctgtcagtcttcttctggatgctcacactcgggctgatgttattttatcggctggtcttcattctgcatgagacatcacggtcaactcaaaaggcaatcgccttttgtctgggctacggatgtcctttagcaataagtgtcatcacactaggcgcaacccagcctcgagaggtctacactagaaaaaacgtgtgttggctgaactgggaggacacaaaagctctgctcgcattcgccatccctgccttgatcatcgtggtggtcaatatcaccatcacaatcgtcgtgatcaccaagattttgagacccagcatcggcgataaaccttgtaaacaggaaaaatcgagtctgttccagatctcgaaatcaattggagttcttaccccactacttggactgacctggggatttgggcttaccactgtgtttccagggaccaacttggtctttcatattatcttcgccattctgaatgtgttccagggcttgtttatcttgttattcggttgcctctgggacctaaagtccacttctcttggcagctcaactcccgttttcagtatgagttccccaattagtagacgtttcaacaacctgttcggcaagactggcacttacaatgtttcaactcctgaagccacttcttcatctttggagaactcgagcagcgcctcctcgcttctgaactag

SEQ ID NO: 185333 - DNA, 4041 bp, Artificial Sequence
  derived and/or modified sequence
atgaaatccccccgacgaaccaccctttgtctgatgtttatcgtcatttacagttcgaaagcagcgctcaactggaactatgagtctacaattcaccctctctctttgcacgagcatgagccagcgggagaggaggccctcaggcagaagcgagccgtggcgaccaagtcgccaactgcggaggaatacactgtgaacatcgagatctctttcgagaatgcgtcttttctggatccaataaaggcttacttgaacagcttgagttttccaattcacgggaataataccgaccaaatcacagatatcctgagcatcaacgttaccaccgtctgtagaccagcagggaatgagatctggtgctcatgcgagaccggctacggatggccgagagagaggtgtttacacaacctgatctgtcaagagcgagatgtctttctcccagggcaccattgtagttgcctgaaagagctgcctcccaacggtccattctgtctcctccaggaagatgtgacgctcaatatgagggtcaggctgaacgtgggtttccaggaggaccttatgaacaccagttctgctctctaccgctcatacaagacagatttggaaactgcatttaggaaaggctatgggatcctgccaggctttaagggtgtgactgtgaccggatttaaatctggcagcgtggtggtgacatacgaagtcaaaaccactcctcctagtctggagttgatccataaagccaatgagcaagtagtgcagagtctgaatcagacctataagatggattataattccttccaggccgtgacgattaatgaatctaatttctttgtgacacccgaaatcatttttgagggcgacaccgtaagccttgtgtgtgagaaagaggtactgagctccaacgtgtcatggcggtatgaggagcagcaattagaaattcagaacagttccaggtttagcatttacaccgcgctcttcaacaatatgacatcagtgtccaagctgacaattcacaatatcacaccgggagatgctggggagtacgtgtgcaaactgatcctcgacatatttgagtacgaatgcaaaaagaagatcgacgtaatgcccatacagatactggcgaatgaggagatgaaggtgatgtgcgacaataaccctgtgagccttaattgttgttctcagggaaatgtcaactggtccaaagtggaatggaaacaggagggaaagattaacattcccggaactcctgagaccgacattgacagcagctgctctcgatacactctcaaggcagacgggacccagtgtccgagcggcagttcgggaacaaccgtcatttatacctgcgaatttatctctgcttacggggcacgcggttccgccaacattaaggtaacattcatctctgttgctaatttaaccattaccccagaccccatctcagtgtctgaaggacagaacttctcaatcaaatgtatttctgatgtcagcaactatgatgaagtgtattggaatacctcagctggaataaagatttatcagcggttctatacaacacgcagatatctggatggagccgagagcgtgctgaccgtgaagacctctacccgcgagtggaatggcacataccactgtatttttagatataagaatagttatagcatcgctaccaaagacgtgatcgtccaccctcttccactgaagctcaatattatggtggaccctcttgaggccaccgtgagctgcagtgggagccaccacatcaaatgttgcatcgaggaagacggtgactataaagtaacatttcacacggggtcgtccagcctcccagccgctaaggaggtcaataaaaagcaggtctgctacaagcataactttaatgcgtccagtgtgtcctggtgctccaaaactgtggacgtgtgttgccacttcacaaacgcagctaacaactccgtgtggtctccatccatgaaactgaatttagtcccgggtgagaacatcacctgtcaggatcctgtgatcggagtcggagaacctggaaaggtcattcaaaaactctgtcggtttagcaacgtgccaagttctcctgagagtccaattggaggaactattacctataaatgcgtcggctcacagtgggaagagaagaggaatgactgcatatcggcacccattaatagcttgttgcagatggcaaaggcacttatcaaatctccttcccaggatgagatgctaccgacttacttgaaagacctgtctatctccattgacaaggcagagcatgaaatctcaagctctcctggatccctgggggctattatcaacattctggatctcctttctacagtgcctacccaagtaaactctgagatgatgactcacgtcctgtcgactgttaatgttatcctgggaaagcctgtgcttaacacttggaaggtgcttcagcagcaatggaccaatcagtcctctcagctccttcactccgtggagcgcttctcgcaggccctccagtccggagactccccaccactctcattttctcagacaaatgtgcaaatgagcagtatggtcattaagtccagccatccagagacttatcaacagcgctttgtttttccctattttgacctgtggggcaacgtggtcatcgacaagtcctatctagaaaacctgcagagcgattctagtatcgtgactatggcctttccaacgctgcaagcgatcttagcgcaggacatccaggagaataattttgcagagagcctggtcatgactacaacggtcagccacaatacgactatgcccttccggatctctatgacattcaaaaacaacagcccgtcgggtggtgaaacaaaatgcgtcttttggaacttccgactcgccaacaataccggcggatgggactcgtccggctgttatgtggaggagggcgatggagataatgttacttgtatctgtgaccacctcactagcttcagcatacttatgagtccagacagtcccgacccttcatccctcctgggcattctactggacatcatctcctatgttggagtcgggttttccattctttccctggcagcctgtctcgtggtggaggccgtagtctggaagtcggtgacaaaaaataggacgagttacatgcggcacacatgcatcgtgaatattgcagcctctctcttggtagcaaatacttggttcattgtcgtagccgctattcaggataacagatacattctctgcaaaacagcatgcgtggcggcaacattctttattcatttcttctacctgagtgtgttcttttggatgcttaccctgggcctaatgctcttttatcgactggtctttatcctccacgagacatcccggagcactcagaaagctatagctttttgcctgggatatggatgccctctcgcaatttctgtgattacactaggcgctacccagccacgggaagtgtacacgcgaaagaacgtatgctggctgaattgggaagacactaaggctctgctggccttcgcgatacctgcactcatcatagtcgtggtgaacatcacaatcaccattgtggtgatcacaaaaatcttgaggccaagcataggagataaaccttgtaagcaggagaagtcctcactgttccaaatatcaaagtctataggagttttaactccgctgctgggactgacctggggattcgggctgaccactgtatttccaggaactaacctcgtttttcatatcattttcgccatcctcaacgtgtttcaggggctgttcatcttgctattcggctgcctttgggatctaaaggtgcaggaagctctgctaaacaagttttccttgtctcgatggagctcacagcattcgaaatcgacgagtctgggatcttctacaccagtgttctcaatgtcttcccccatctcccggagattcaataatctgttcgggaagaccgggacatacaacgtatccactccagaagccacatcctcatctctggaaaacagctcatcggctagctcactgctgaactag

SEQ ID NO: 185334 - DNA, 3615 bp, Artificial Sequence
  derived and/or modified sequence
atgaaatcaccacggcgtactactctctgtttaatgttcattgttatctatagcagtaaagcagccctgaactggaactatgagtcaactattcacccactaagcctgcacgaacatgagcctgccggagaggaagccctaaggcagaaacgggcagtggccacaaaaagccccactgccgaagagtacaccgttaacattgaaatcagctttgagaacgcatctttcttggacccaatcaaagcttacctcaattctctgagcttcccaattcacgggaacaacaccgatcagatcaccgacattctgtctatcaatgtaacaaccgtctgccggcctgccggtaatgaaatctggtgcagctgtgaaaccggctacggctggcccagggagcgatgcctgcataacctgatttgtcaagagcgtgatgtattcctacccggtcatcactgttcctgcctgaaggaactgcccccaaatggccctttctgtctgctccaggaagacgtcaccctgaatatgcgggtcagactcaatgttggctttcaagaagacctgatgaacacaagttcagccctctatcgcagctataagacggacctggagacggcctttaggaagggatacggtatcctgccgggtttcaaaggggttacggtcactggatttaaaagcggctctgttgtggtgacctacgaagtaaagaccacaccaccctcactggaactgatacacaaggctaacgagcaggtggtccagtcactgaaccaaacctacaagatggactacaactcgtttcaagccgtcacaatccggaccccagaaactgacatcgactcctcctgcagtcgctataccctgaaggcggacgggacgcagtgtccaagcggatctagcgggaccacagtcatttacacgtgtgagtttatcagtgcctacggtgctcgcggatccgccaacattaaagtgacatttattagtgttgccaatctaacaatcacgccagaccctatatctgtcagcgaagggcaaaacttttcaatcaagtgcataagcgatgtgagcaactatgacgaggtatactggaacacatccgccggaatcaaaatttaccagaggttttataccacaaggaggtacctggacggggctgagtccgttctcactgtgaagacctcaaccagggagtggaacgggacctaccattgtatcttccgttataaaaactcttatagcatcgcaaccaaggatgtcatcgtccaccctctgcccttgaaacttaatatcatggtcgatcctttagaagctactgtaagttgctcaggatcccaccatataaaatgttgtatcgaggaagatggcgactacaaggttacctttcacacagggagctccagcttacctgctgccaaagaggtgaataagaagcaggtctgctacaagcacaatttcaacgcatcaagcgtgtcctggtgttcaaagactgtggatgtatgttgccactttaccaacgccgctaataattcagtgtggagcccgtccatgaaactgaatctggtcccaggggagaacataacttgccaggaccccgtgatcggagtaggggagccgggtaaagtcatccagaagctatgtcggttctctaacgttccttcgtcccccgaatctcctataggcggtactattacttataagtgtgtggggagtcaatgggaggaaaaacgcaatgactgcatctcagcccctattaactctttgttacagatggcgaaagcactgattaaatcgccttcgcaggacgagatgctgcccacctatctgaaagacctatctatttctattgataaagccgaacatgaaatttctagcagtccaggatcactaggcgctatcattaatatactcgatctgttgtcaaccgtccctacccaggttaatagcgaaatgatgacacacgtgcttagcacagtgaacgtcattcttggtaagccagtgctgaacacctggaaggtgctacagcagcagtggactaatcaaagctcgcagctgctccactccgttgaacggttctcacaggccttgcagtcaggggatagcccgcctctgagcttctcacagaccaatgtacagatgagtagcatggtcattaagagttcacacccagagacctatcagcaacgattcgtgttcccctatttcgatttgtggggcaacgtggtgatcgacaaaagctacctggaaaatttgcagagtgattccagtattgtcacaatggcattcccaacactgcaggccatactggcacaggatattcaagagaacaactttgcagaatccctggtgatgacaacaacagtgagccacaataccacgatgcctttcaggatttccatgacctttaagaataacagcccatcagggggagagacgaagtgtgtgttctggaacttccgcttggcaaataatactggcggatgggactctagcggctgctatgtggaagaaggcgacggagacaatgttacatgtatctgcgatcaccttacctcattctccatcctcatgtcgcctgatagtccagatccaagtagtcttctggggatccttttagatattatttcgtacgttggcgtcggctttagcatattgagcttagctgcctgcttggtggtagaggccgttgtctggaagtctgtgacaaagaaccgaactagctatatgaggcacacatgtattgttaacatagccgcatcattgctggtagcaaacacatggtttatcgtagtggctgctatacaggacaatcggtacatcctgtgcaaaacagcctgcgtggccgcaacctttttcatacacttcttctatctgagtgtcttcttctggatgcttacattgggcctcatgttattttaccgcctggttttcatcctgcacgagactagcagaagtacccagaaagccattgccttctgcctcgggtacgggtgtcctttggctatttccgtgattaccctcggggcaacgcagcctcgtgaggtctatacgcggaagaatgtttgttggctcaactgggaagataccaaggccctcctcgcctttgctatcccagctctgattattgtagtcgttaatattaccattaccattgtggtaatcacaaaaatcctcagaccctcaattggtgataaaccatgtaagcaggaaaagtcatcactctttcagatttctaaatctatcggcgtcctcaccccactgctaggcctcacgtggggtttcggcctgactacagtgttccctggaactaatcttgttttccacatcatcttcgccattttgaacgtgtttcagggcttattcattcttttatttgggtgcctgtgggacttgaaagttcaggaagctctcctgaataagttctctctgagtcgctggagctcacagcactctaagtctacgtccctggggagctccacacctgtattcagcatgtcaagtcccatctccagaaggtttaataatctgttcggaaaaaccggtacatataacgtttctaccccggaggcaacatcgtcttccctggagaattcctcaagcgcctcgagcctgttaaactag

SEQ ID NO: 185335 - DNA, 2154 bp, Artificial Sequence
  derived and/or modified sequence
gattaccgttcacaggtgcatgtggagagtcgggagggcctgtggaaaatcaaaggcaagataaagaaactcgggtcaagtgagaaggtaacagagtctaagggcgaaaacattacttgccaggatcccgttattggtgtgggcgagcctgggaaagtgatccagaaattgtgccggttttctaatgttccttcttctccggagtctcccatcggaggcacgatcacatataaatgtgttggctcccagtgggaagagaagcgtaacgactgcatatctgcacccattaatagcctgctccagatggctaaggccctgattaagtccccgtctcaggacgagatgcttcctacatacctgaaggacctatcgattagcatcgacaaggccgaacacgagatctctagcagccccggatccctgggcgctattataaatatccttgacttactcagtactgtgcctactcaggtgaactctgagatgatgacccacgtgctgtcaactgtgaatgtcattctcggcaaacctgtcctcaatacatggaaggttctgcaacagcaatggaccaaccagagttcccagctgctgcactcggtggaaaggttcagccaggctcttcagagcggtgattctcctcctctgagtttctcacaaaccaacgtacagatgagcagtatggtgattaagagtagtcatcctgagacctatcagcagcgctttgtcttcccctattttgatctgtgggggaatgtggtcatagacaagtcctacctggagaacctgcagagcgactcaagcatcgtaacaatggcattccctaccttgcaggcaatcctagcccaagatattcaggaaaataacttcgcagagtccctggttatgacaacaacggttagccacaacaccacaatgccatttcgaatttctatgacgttcaagaataactcaccatcggggggagaaaccaaatgtgtgttttggaactttaggttagctaacaatacagggggatgggacagctcagggtgctacgtggaggagggggatggggacaacgtcacatgcatctgtgaccatctgaccagcttttccatcctcatgagtccagattctcccgacccctcgagcctcctggggatcctattggatatcatctcatatgtcggtgtgggcttctcaattctgtctctggcagcctgtctagtagtggaggctgttgtctggaaatcggtcacaaaaaatcgaacgagttacatgcgacacacgtgcattgtgaatatcgccgcatcactactcgtcgcgaacacctggttcattgtcgtggctgccattcaggacaatcgatatatactttgtaaaacagcgtgcgtcgccgcaacgtttttcatacacttcttttatttaagtgtgttcttctggatgctgactctcggactgatgcttttttacagactggtattcatcctgcatgaaacaagtcggtccacacagaaggccatcgcattttgcctgggctatggttgccccttggctatctctgtgatcacgctcggcgcaacccagcctcgcgaggtgtatacaagaaaaaatgtgtgttggctgaactgggaagataccaaagctctgctcgcatttgcaatacccgcattgataatcgtagttgtgaacatcacaatcacgatcgttgttattacaaagattttacgaccctctataggggataagccctgcaaacaggagaagtcatcactgtttcagatctctaagtcaataggcgtcctgacaccgcttctgggcctgacttggggattcggtcttaccaccgttttcccaggcaccaacctggtgtttcacataattttcgccatccttaacgttttccaggggctgttcattctgctctttgggtgcctgtgggatctgaaggtgcaagaggctctcctgaacaaattctccttatcacgttggtcgagtcagcactctaagtcaacaagcttagggtccagtacccctgtcttctcaatgagtagccctattagccggagattcaataatctgtttggaaagaccggcacctataacgtgtccacgcccgaagctacctcatccagcctcgaaaatagcagcagcgcgtcttctctgctgaactag

SEQ ID NO: 185336 - protein, 616 aa, Artificial Sequence
  derived and/or modified sequence
MSSLAVRDPAMDRSLRSVFVGNIPYEATEEQLKDIFSEVGSVVSFRLVYDRETGKPKGYGFCEYQDQETALSAMRNLNGREFSGRALRVDNAASEKNKEELKSLGPAAPIIDSPYGDPIDPEDAPESITRAVASLPPEQMFELMKQMKLCVQNSHQEARNMLLQNPQLAYALLQAQVVMRIMDPEIALKILHRKIHVTPLIPGKSQSVSVSGPGPGPGPGLCPGPNVLLNQQNPPAPQPQHLARRPVKDIPPLMQTPIQGGIPAPGPIPAAVPGAGPGSLTPGGAMQPQLGMPGVGPVPLERGQVQMSDPRAPIPRGPVTPGGLPPRGLLGDAPNDPRGGTLLSVTGEVEPRGYLGPPHQGPPMHHASGHDTRGPSSHEMRGGPLGDPRLLIGEPRGPMIDQRGLPMDGRGGRDSRAMETRAMETEVLETRVMERRGMETCAMETRGMEARGMDARGLEMRGPVPSSRGPMTGGIQGPGPINIGAGGPPQGPRQVPGISGVGNPGAGMQGTGIQGTGMQGAGIQGGGMQGAGIQGVSIQGGGIQGGGIQGASKQGGSQPSSFSPGQSQVTPQDQEKAALIMQVLQLTADQIAMLPPEQRQSILILKEQIQKSTGAS

SEQ ID NO: 185337 - DNA, 75 bp, Artificial Sequence
  derived and/or modified sequence
aaagaaatggaatcgaagagaatggaaacaaatggaatggaattgaatggaatggaattgaatggaatgggaacg

SEQ ID NO: 185338 - DNA, 71 bp, Artificial Sequence
  derived and/or modified sequence
gaatggaatggaaaggaatcgaaacgaaaggaatggagacagatggaatggaatggaacagagagcaatgg

SEQ ID NO: 185339 - DNA, 107 bp, Artificial Sequence
  derived and/or modified sequence
ggaatggaatgaacacgaatgtaatgcaacccaatagaatggaatcgaatggcatggaatataaagaaatggaatcgaagagaatggaaacaaatggaatggaattg

SEQ ID NO: 185340 - DNA, 63 bp, Artificial Sequence
  derived and/or modified sequence
atggaatggaatggaatggaattaaatggaatggaaaggaatggaatcgaatggaaaggaatc

SEQ ID NO: 185341 - DNA, 82 bp, Artificial Sequence
  derived and/or modified sequence
ggaagggaatcaaatgcaacagaatgtaatggaatggaatgcaatggaatgcaatggaatggaatggaatgcaatggaatgg

SEQ ID NO: 185342 - DNA, 97 bp, Artificial Sequence
  derived and/or modified sequence
tggaatggaatcaaatcgcatggaatcgaatggaatagaaaagaatcaaacagagtggaatggaatggaatggaatggaatcatgccgaatggaatg

SEQ ID NO: 185343 - DNA, 114 bp, Artificial Sequence
  derived and/or modified sequence
atgaacacgaatgtaatgcaatccaatagaatggaatcgaatggcatggaatataaagaaatggaatcgaagagaatggaaacaaatggaatggaattgaatggaatggaattg

SEQ ID NO: 185344 - DNA, 94 bp, Artificial Sequence
  derived and/or modified sequence
aatggaaaggaatcaaatggaatataatggaatgcaatggactcgaatggaatggaatggaatggacccaaatggaatggaatggaatggaatg

SEQ ID NO: 185345 - DNA, 91 bp, Artificial Sequence
  derived and/or modified sequence
ggaatacaacggaatggaatcgaaaaaaatggaaaggaatgaaatgaatggaatggaatggaatggaatggatgggaatggaatggaatgg

SEQ ID NO: 185346 - DNA, 98 bp, Artificial Sequence
  derived and/or modified sequence
aatcgaatgaaatggagtcaaaaggaatggaatcgaatggcaagaaatcgaatgtaatggaatcgcaaggaattgatgtgaacggaacggaatggaat

SEQ ID NO: 185347 - DNA, 150 bp, Artificial Sequence
  derived and/or modified sequence
aatcgaatggaacggaatagaatagactcgaatgtaatggattgctatgtaattgattcgaatggaatggaatcgaatggaatgcaatccaatggaatggaatgcaatgcaatggaatggaatcgaacggaatgcagtggaagggaatgg

SEQ ID NO: 185348 - DNA, 141 bp, Artificial Sequence
  derived and/or modified sequence
aacacgaatgtaatgcaatccaatagaatggaatcgaatggcatggaatataaagaaatggaatcgaagagaatggaaacaaacggaatggaattgaatggaatggaattgaatggaatgggaacgaatggagtgaaattg

SEQ ID NO: 185349 - DNA, 146 bp, Artificial Sequence
  derived and/or modified sequence
gaatggaacggaatagaacagactcgaatgtaatggattgctatgtaattgattcgaatggaatggaatcgaatggaatgcaatccaatggaatggaatgcaatgcaatggaatggaatcgaatggaatgcagtggaagggaatgg

SEQ ID NO: 185350 - DNA, 148 bp, Artificial Sequence
  derived and/or modified sequence
ggaacgaaatcgaatggaacggaatagaatagactcgaatgtaatggattgctatgtaattgattcgaatggaatggaatcgaatggaatgcaatccaatggaatggaatgcaatgcaatgaatggaatggaatggaatggaatggaa

SEQ ID NO: 185351 - DNA, 147 bp, Artificial Sequence
  derived and/or modified sequence
ggaacgaaatcgaatggaacggaatagaatagactcgaatgtaatggattgctatgtaattgattcgaatggaatggaatcgaatggaatgcaatccaatggaatggaatgcaatgcaatgaatggaatggaatggaatggaatgga

SEQ ID NO: 185352 - DNA, 101 bp, Artificial Sequence
  derived and/or modified sequence
gaatggaatcgaaaggaatgtcatcgaatggaatggaatggaacggaatggaatcgaatggaatggactcgaatggaatagaatcgaatgcaatggcatcg

SEQ ID NO: 185353 - DNA, 97 bp, Artificial Sequence
  derived and/or modified sequence
tagaacagaattgaatggaatggcatcaaatggaatggaaacgaaaggaatggaattgaatggactcaaatgttatggaatcaaagggaatggactc

SEQ ID NO: 185354 - DNA, 85 bp, Artificial Sequence
  derived and/or modified sequence
aatggaaaggaatcgaatggaagggaatgaaattgaatcaacaggaatggaagggaatagaatagacggcaatggaatggactcg

SEQ ID NO: 185355 - DNA, 71 bp, Artificial Sequence
  derived and/or modified sequence
aagaaatggaatcgaagagaatggaaacaaacggaatggaattgaatggaatggaattgaatggaatggga

SEQ ID NO: 185356 - DNA, 94 bp, Artificial Sequence
  derived and/or modified sequence
aatggagactaatgtaatagaatcaaatggaatggcatcgaatggaatggactggaatggaatgtgcatgaatggaatggaatcgaatggattg

SEQ ID NO: 185357 - DNA, 151 bp, Artificial Sequence
  derived and/or modified sequence
aaatcgaatggaacgcaatagaatagactcgaatgtaatggattgctatgtaattgattcgaatggaatggaatcgactggaatgcaatccaatggaatggaatgcaatgcaatggaatggaatcgaacggaatgcagtggaagggaatgg

SEQ ID NO: 185358 - DNA, 131 bp, Artificial Sequence
  derived and/or modified sequence
gattggaacgaaatcgaatggaacggaatagaatagactcgaatgtaatggattgctatgtaattgattcgaatggaatggaatcgaatggaatgcaatccaatggaatggaatgcaatgcaatggaatgg

SEQ ID NO: 185359 - DNA, 73 bp, Artificial Sequence
  derived and/or modified sequence
agaaatggaatcggagagaatggaaacaaatggaatggaattgaatggaatggaattgaatggaatgggaacg

SEQ ID NO: 185360 - DNA, 83 bp, Artificial Sequence
  derived and/or modified sequence
aatcaacacgaatagaatggaacggaatggaatggaatggaatggaatggaatggagtggaatggaacagaatggagtggaat

SEQ ID NO: 185361 - DNA, 70 bp, Artificial Sequence
  derived and/or modified sequence
gaatcaaatggaatggactgtaatggaatggattcgaatggaatcgaatggagtggactcaaatggaatg

SEQ ID NO: 185362 - DNA, 96 bp, Artificial Sequence
  derived and/or modified sequence
ggaatcaactcgattgcaatggaatgcaatggaaaggaatggaatgcaattaaagcgaatagaatggaatggaatggaatggaacggaatggaatg

SEQ ID NO: 185363 - DNA, 285 bp, Artificial Sequence
  derived and/or modified sequence
tgcaccagcagctgcacccccagctgctgccagcagagcagctgccaaccggcatgttgcactagcagtccctgccaacaggcatgttgtgtgcctgtgtgctgcaaaacggtgtgctgcaaaccgtcgtcctgccagccagcatgctgtatctcgagcccttgtcagcagtcatgctgcgtccccgtgtgttgtaagccaatatgttgcgtcccacctgcatgttgcacgacaagctgctgtaggcccagttcatctgttagtctgctctgcaggcccgtctag

SEQ ID NO: 185364 - DNA, 1851 bp, Artificial Sequence
  derived and/or modified sequence
atgtcgtccctggctgtgcgcgacccagccatggaccgatcgctacgctccgtgttcgtggggaatatcccgtacgaagcaacagaggaacagctcaaggatatcttctccgaagttgggagcgtggtcagtttcagactggtgtacgacagagaaaccggcaagccaaaagggtatggtttttgcgagtatcaggaccaggaaaccgccctcagcgcaatgcggaacctgaacggacgggaatttagcgggagagctctgcgggtggataacgccgccagtgagaaaaacaaggaagaattgaagagcctgggacctgcagctccaattattgacagtccgtacggcgatcctatcgatccggaagatgcccctgaaagcatcactcgagctgttgccagccttccaccagagcagatgttcgagttaatgaaacagatgaagctctgcgtgcaaaactcccaccaggaagcccggaatatgctcttacaaaatccacagctggcgtacgcccttctgcaggcacaggtggttatgagaattatggaccctgaaatcgctctcaagatattgcaccggaaaatccacgttacaccacttatccccggaaagtctcagtcggtcagcgtgtccggaccagggccgggcccaggcccgggactgtgcccgggccctaacgtgctactcaatcagcaaaacccccctgcacctcagccccaacatttggctcgccgcccggtgaaagatattcccccccttatgcagacccccatccaggggggcataccagcccctggccctattcccgctgccgtgcccggagctggtcccgggtctttaacacccggaggagcgatgcagcctcagttgggtatgcctggcgttgggccggtgccacttgaaaggggacaggtgcagatgtcagaccctagggccccaattcctcggggtcctgttactccaggtggcctaccacctagaggactgcttggcgacgcccccaatgaccctcgcggtgggacgctgctgagcgtaaccggagaggtggaacctcgcggatatcttggtcccccgcatcaaggcccacctatgcaccacgcctccgggcatgacactaggggaccaagctcgcatgagatgcgaggcggacccctgggtgacccacggctgcttatcggggaaccccgcggccccatgatcgatcagaggggcttaccaatggatgggagggggggccgagattctcgagctatggagactcgggcgatggagactgaggtgctggaaacgcgggtcatggaaagaaggggaatggaaacgtgcgcaatggagacacgaggaatggaggcccggggcatggatgctcggggtctcgaaatgcggggcccggtcccgagctcccgcggtcccatgacaggtggcattcagggtccgggaccaatcaacattggagccggtggaccacctcaaggtccgagacaggtccccggaatttcgggtgttgggaaccctggcgccgggatgcaggggaccgggattcagggtactggcatgcagggagcggggatccagggagggggtatgcagggggcaggtattcagggggtttcgatccaagggggaggcattcaggggggaggtatacaaggtgccagcaagcagggggggtctcagccaagcagcttcagccctgggcagagccaagttacccctcaggatcaggagaaagcagctctgattatgcaggtgcttcagttaacggccgatcagatagctatgttgccaccagaacagagacagtcaatcctgatcctgaaggagcaaatccagaaatcaactggagccagctag

SEQ ID NO: 185365 - DNA, 1851 bp, Artificial Sequence
  derived and/or modified sequence
atgagcagcctggccgtgcgggaccctgccatggacaggagcctgcggtctgtgtttgtgggcaacatcccctatgaggccacagaggagcagctgaaggacatcttcagcgaggtgggctctgtggtgtccttccggctggtgtatgaccgggagaccgggaagcccaagggctacggcttctgtgagtaccaggaccaggagacagccctgagcgccatgaggaacctgaatggccgggagttcagcggccgggccctgcgggtggacaatgctgccagcgagaagaacaaggaggagctgaagagcctgggccctgctgcccccatcatcgacagcccctatggagaccccattgatcctgaagatgcccctgagagcatcaccagggctgtggccagcctgcccccagagcagatgtttgagctgatgaagcagatgaagctgtgtgtgcagaacagccaccaggaggccaggaacatgctgctgcagaacccccagctggcctatgccctgctgcaggcccaggtggtgatgaggatcatggaccctgagatcgccctgaagatcctgcacaggaagatccacgtgacccccctcatccctgggaagagccagagcgtgtctgtgtctggccctggccctggccctggccctggcctgtgccccggccccaacgtgctgctgaaccagcagaaccccccagccccccagccccagcacctggcccggcggcctgtgaaggacatcccccccctgatgcagacccccatccagggcggcatcccagcccctggccccatcccagctgctgtgcctggagctggccctggcagcctgacccctgggggcgccatgcagccccagctgggcatgcctggggtgggccctgtgcccctggagcggggccaggtgcagatgtctgacccccgggcccccatcccccggggccctgtgaccccaggcggcctgcccccccggggcctgctgggagatgccccaaatgacccccggggcggcaccctgctgtctgtgactggagaggtggagccccggggctacctgggccccccccaccagggcccccccatgcaccacgccagcggccatgacacccggggccccagcagccatgagatgaggggcggccccctgggggacccccggctgctgattggagagccccggggccccatgattgaccagaggggcctgcccatggatggccggggcggccgggacagccgggccatggagacccgggccatggagacagaggtgctggagaccagggtgatggagcggcggggcatggagacctgtgccatggagacccggggcatggaggcccggggcatggatgcccggggcctggagatgaggggccctgtgcccagcagccggggccccatgactggaggcatccagggccctggccccatcaacattggagctgggggccccccccagggcccccggcaggtgcccggcatctctggagtgggcaaccctggggccggcatgcagggcaccggcatccagggcaccggcatgcagggcgccggcatccagggcggcggcatgcagggcgccggcatccagggcgtgtccatccagggcggcggcatccagggcggcggcatccagggcgccagcaagcagggcggcagccagcccagcagcttcagccctggccagagccaggtgaccccccaggaccaggagaaggccgccctgatcatgcaggtgctgcagctgacagctgaccagatcgccatgctgcccccagagcagaggcagagcatcctgatcctgaaggagcagatccagaagagcactggagccagctag

SEQ ID NO: 185366 - DNA, 1851 bp, Artificial Sequence
  derived and/or modified sequence
atgagcagcctggccgtgcgggaccccgccatggaccggagcctgagatccgtgtttgtgggaaatatcccttacgaagcaactgaggaacagctaaaagacatattcagtgaggtgggttctgtggttagcttcagattagtctatgatagggagaccggcaagcccaagggctacggattttgcgagtaccaggaccaggagaccgccttgtctgctatgcgaaatctaaatggccgggagttctccggaagagccttgagggtggacaacgctgcctctgagaagaataaagaagagctcaagtcacttggccccgccgcacctattattgactctccatatggcgaccctatcgaccctgaagacgcacctgaatccattacccgggccgttgccagtttgcctcctgagcagatgttcgaattaatgaagcagatgaaactatgtgtgcagaattctcaccaggaggcgcgcaacatgcttctgcagaaccctcagctggcctacgctctgctccaggctcaggtagtaatgagaattatggatcccgaaattgcactgaaaattttacaccgtaagatccacgttacaccactaatcccggggaagtctcagtctgtctccgtctctggccctggaccgggccccggtcctggactatgtccagggccgaacgtacttctgaatcaacagaatccacccgctccccaaccccagcatttagcacgccggcccgtgaaggatatcccgccactgatgcaaacccctatccaaggggggattccagccccgggccccataccagcagccgtacctggtgctggccctgggtccctgaccccaggaggcgctatgcaaccccaactgggaatgccaggagttgggcccgttcccctggaacgcggccaggtgcagatgtcagacccaagggcacctattcctcgggggccagtgacaccagggggcctgcccccaaggggtctgttgggagacgccccaaacgatccacgcggaggtacactgttgagcgtgacgggagaggtcgagccccgcggctatctcggcccgccccatcaaggaccaccaatgcaccacgcctctgggcacgatactcgtggaccaagttctcatgagatgagggggggacccctgggggacccacggcttctgatcggggagccgcgaggtcctatgattgatcagagagggcttccgatggacggtcggggcgggagggatagccgagccatggaaacaagggctatggagacagaagtcctcgagactagagtgatggaacgacgcggcatggagacatgcgcaatggaaacccgggggatggaggcccgcggcatggatgcgcgaggtctggagatgcgtggacccgtcccctcctcaaggggccccatgactgggggtatccagggaccagggcccatcaacataggggccggcggtcccccgcagggcccccgccaagtccccggcatttctggagttgggaatcctggcgctggaatgcagggtacaggaatccaagggaccgggatgcagggcgcaggaatccaaggcggcggaatgcagggcgcgggcattcagggggtgagcattcaaggcggcgggattcaaggaggcggcattcagggtgccagcaagcaaggcggttcccagcccagtagcttttctcccggacagagccaggtgacccctcaagaccaggagaaggccgccttgataatgcaggtccttcaattgactgctgaccaaatcgcaatgctgccgcctgaacagcggcagtccatactcattctgaaggaacaaattcagaaatctactggtgcttcttag

SEQ ID NO: 185367 - DNA, 1851 bp, Artificial Sequence
  derived and/or modified sequence
atgagcagcctggccgtgcgggatcccgctatggatcgcagcctgagatcagtgttcgtggggaatattccatacgaggccactgaagagcagctgaaagatattttcagtgaagtcggcagtgtggtgagtttccgccttgtgtacgacagagagaccgggaagccaaaagggtacggattttgcgagtaccaagatcaggaaactgctttatcagccatgcgcaacctcaatgggcgtgagttctctggacgggctctacgcgtggacaatgccgcatccgaaaagaataaagaagaactgaaatccctggggccagctgctccgatcatagattcaccatacggcgacccaatcgacccagaagacgcccctgaaagcataacccgcgcagtggcaagtctgccgcctgaacaaatgttcgaactaatgaagcagatgaaactatgtgtgcagaacagccatcaggaggctcgcaacatgttgttacaaaatccccagctggcctacgccctccttcaagcccaggtggttatgcgaataatggaccctgaaatagcgctcaagatcctacacagaaagatccatgtgacaccactgatccctggcaaatcgcaatctgtgtcagtgtcaggacctggccctggccctggtcccggattgtgccctggccctaacgttctgctcaaccagcagaatccacctgcccctcagccccaacacctagctcgtaggcccgttaaggacatcccccctctaatgcaaacccccattcagggcggaatccctgcccctgggccaattcccgcagcggtgcccggagcaggacccggttccttgacgcccggaggagccatgcaaccccagctggggatgcccggtgtgggacccgttcctttggaacgtggtcaggtgcaaatgtctgacccgagggctccaatccctaggggcccagtgaccccgggtggccttcctccaagaggtctcctgggcgatgcccctaacgaccctaggggaggcacacttctgtcagtgacaggcgaggttgagccaaggggctacttaggtcctccccatcaggggcctcccatgcaccacgcatccggtcacgatactcgaggccctagcagccacgaaatgagggggggtcccctgggcgacccgagacttttgatcggtgagccgaggggcccaatgattgatcaacgcggactgcccatggatggcagggggggtcgagactcccgcgcaatggaaaccagggccatggagaccgaggtgttagagacccgagtaatggagcgcagagggatggagacttgcgccatggagactagaggtatggaagccagaggcatggatgctcgcggactggagatgcgtggccctgtaccttcatctcggggtccaatgaccgggggaatacagggccctggccctattaacatcggggctggtggccctcctcagggccctcgccaagtccccggaatctccggggtgggaaaccccggagccggaatgcagggcacaggaatccagggcacagggatgcagggggctggcatccaggggggtgggatgcagggggctggcatccagggcgtcagcattcaggggggtgggatacagggaggcggtattcagggggcttcaaaacaaggcggaagccaaccttcgagctttagtcccggacaatcccaggttacaccacaggaccaggagaaagccgcactgataatgcaagtcctgcagctgactgccgaccaaatcgccatgttgccaccagaacagaggcaaagtattctgattctgaaggagcaaatccaaaaatccaccggggcatcatag

SEQ ID NO: 185368 - DNA, 4109 bp, Artificial Sequence
  derived and/or modified sequence
agacgcctcgaagaatccgctatcggctgtctgcacaaccggaatcatgtcgagtttggcggtgagagacccggcaatggatcgatcactgcgttccgtgttcgtggggaacattccatatgaggcaactgaggagcagttaaaggacattttctcggaggttggttctgttgtcagtttccggctggtatacgatagagagacgggaaaacccaagggctatggcttctgcgaataccaagaccaggagaccgcgcttagtgccatgcggaacctcaatgggcgggagttcagtgggagagcgcttcgggtggacaatgctgccagtgaaaagaataaggaggagttaaagagccttgggcctgcagcgcccattattgactcaccctatggggatcccatcgatccagaagatgcccctgaatcgattaccagagcagtagccagtctccccccggagcagatgtttgagctgatgaagcagatgaagctctgtgtccaaaacagccaccaggaagctcgaaacatgttacttcaaaatccacaactggcttatgcactgttgcaggcacaagtagtgatgagaatcatggatccagagattgctctgaaaattctgcatcggaagatacatgtcacaccactgatcccaggcaaatctcagtctgtgtctgtctctggccctggccctggccctggccctgggctctgcccaggacctaatgttctgctgaaccagcagaatcctccagctcctcagcctcagcatttggctagaagacctgtgaaggacattcctcctctgatgcagactcctatccagggtggaattccagctccagggccaataccagctgcagttcccggagctggtcctggttccttaactcctggaggagcaatgcagccccaacttggaatgccaggggttggcccagtgcctttagagcggggacaagtgcagatgtcagatcctagagctcctatacctcgcggacccgtgactcctggtggtctgcctcctcgaggactgttaggagatgctccaaatgacccacgtggagggactttgctttcagtcactggagaagtggagcccagaggttatctgggtccaccccatcagggtccccccatgcatcatgcctctggtcatgacactcgtggcccttcctcacatgagatgaggggagggccattaggagatcccagactgctaattggagagcccagaggccccatgatagatcaaaggggtctacctatggatggtagaggtggtagagattctcgagcgatggagactcgtgccatggaaactgaggtcttagagacacgtgtaatggagaggagaggaatggagacctgtgcgatggaaaccagagggatggaagcaaggggcatggatgcaagaggattggagatgaggggccctgtccccagttcaagaggccctatgactggtggaattcagggtcctggtcccattaatataggggcaggtggccctcctcagggacccagacaggtcccaggcatttcaggggtggggaatcctggagctggtatgcagggtacaggcatacaaggaacaggcatgcagggagcaggcatacaaggaggagggatgcagggggcaggcatacaaggagtcagtatacaaggaggaggtatacaaggaggaggtatacagggggcaagcaagcaaggtggaagccagcctagcagttttagtcctgggcagagccaggtcactccacaggatcaggagaaggcagctttgatcatgcaggttcttcaactgactgcagatcagattgccatgctgccccctgagcaaaggcagagtatcctgattttaaaggaacaaatccagaaatccactggagcgtcttgaaaggttttagaaaatatttggctgtagtctcaaattttattctgtagcatggagaatgggtgcaaaaagctgacttctgtatccccacacttggattagggtttccctcctcctagaacctaatcttattttttgttctttttctttctttctgttttccttttttttttaattgagggtggggggaggagggagtgcgtctgttcactttaagttactttaaaataactctgaacatgattatattatgccaaataagattacaaagaataagcagcaatattgaagcatctacagtatgttaactacattttttaaatgtcgagtaaaacttcgtgaaaactgctcataaagactaaaagttgacctgttaaaacgttaatgtactaagatagttttaagatttttggttgtataacaaaataaaagtttacccaaaagtataagatacattttttggtaaaccatttaaaatacaaaatcctattttggaggcaataggataagcattgtcttagtgttttagaattatttttgaaacagagttaacaggataaggttacacttgtattagaattgtttttttctaaagttatgttacctgaaaaatcaaggagtgcacctgatttactgttgcttcatttatcccatccttcagagaccagcaaggttctgccaggccccaagcatctgagcatgatgattttgctgtgacaattctaagatcaaccaggttacttaagtccgctctgatgaaacccagtctctcaataccttcctatttctcaatagtctttaagccctaaatctgagtcagtaattctctaaaaatccttcccaaaaatcagtgtctagggactggttgatctagatgagttataaatggtatttgacttttcataagtagtggaaggtttcactaagtaaagatctgagtttcttggtatctgacgtttgtatacagatggtgtccatttgctcaaccagacaggagttaacttgtattagaattgttttttctaaagttatgttacctgagaaattaaggactgcacctggtttaatgttgcttcacttatcccaccctacagagaccagcaaggttctgccaggcctcgagcatccaagcatgattttgctgtgacaaatctaaaatcaaccaggctacttaagtctgctctgatgaaacccaataatctctcaataccttcctatttctcaatagtctttaaaccctaaatctgagtcagtaattctcttacatccttcccaaaaatcagtgtctagggactagttgatctggatgagttatacatgatatttgacttttcataagtagtggaaggtttcactaagtaaaactctcagtttcttggtatctggctttcttatacagatggtgtccatttgctccaccagacaggagttaaaaacctttaaagagcatttaacatgccttttagttttcttatttcataatctacttttctatcattaatcatcttaccaggaataatcaaggcccaggtaggtagaagtttttatatagcctgaatactcacttgacttactgctcattttactttttgcatggaatacagccatttagtcctaatatacataccaatgagacaattaaaaattggttggaagatggagcttatcacattgtgctactacgactttattttttcttgaaaataaagccttgaggatgtgaacataaatgttggtatcataaaacaagtagtaataaaagcataaattatcaaatatcaggtgatcttactatggagaagaaaaaccaatatctagttacagatgaaaaaatgtttaatacaaagagctgaaaatgtagaaattgagttatcttccctttgcaaaatttttacactttaaattagtaattctttgtttgcaaggttttcatccctatgctgttgttttctactacctgttttactcttgttcatactgctactttcccatgtttcctatatgcctcccctatattggagaggataactcgcgtttacatatgtgatagttatgcttaatactaattcacagagttggctcgatcattttgagattctagttgctttatctcaaagctttcactgaagggctgtaactgaaaattattaaatgttagtctttagtcaaatctctgcattgtttcatgcagaaaataaagatacaattaaggctg

SEQ ID NO: 185369 - DNA, 1851 bp, Artificial Sequence
  derived and/or modified sequence
atgagcagcctggccgtgagagaccccgccatggacagaagcctgagaagcgtgttcgtgggcaacatcccctacgaggccaccgaggagcagctgaaggacatcttcagcgaggtgggcagcgtggtgagcttcagactggtgtacgacagagagaccggcaagcccaagggctacggcttctgcgagtaccaggaccaggagaccgccctgagcgccatgagaaacctgaacggcagagagttcagcggcagagccctgagagtggacaacgccgccagcgagaagaacaaggaggagctgaagagcctgggccccgccgcccccatcatcgacagcccctacggcgaccccatcgaccccgaggacgcccccgagagcatcaccagagccgtggccagcctgccccccgagcagatgttcgagctgatgaagcagatgaagctgtgcgtgcagaacagccaccaggaggccagaaacatgctgctgcagaacccccagctggcctacgccctgctgcaggcccaggtggtgatgagaatcatggaccccgagatcgccctgaagatcctgcacagaaagatccacgtgacccccctgatccccggcaagagccagagcgtgagcgtgagcggccccggccccggccccggccccggcctgtgccccggccccaacgtgctgctgaaccagcagaacccccccgccccccagccccagcacctggccagaagacccgtgaaggacatcccccccctgatgcagacccccatccagggcggcatccccgcccccggccccatccccgccgccgtgcccggcgccggccccggcagcctgacccccggcggcgccatgcagccccagctgggcatgcccggcgtgggccccgtgcccctggagagaggccaggtgcagatgagcgaccccagagcccccatccccagaggccccgtgacccccggcggcctgccccccagaggcctgctgggcgacgcccccaacgaccccagaggcggcaccctgctgagcgtgaccggcgaggtggagcccagaggctacctgggccccccccaccagggcccccccatgcaccacgccagcggccacgacaccagaggccccagcagccacgagatgagaggcggccccctgggcgaccccagactgctgatcggcgagcccagaggccccatgatcgaccagagaggcctgcccatggacggcagaggcggcagagacagcagagccatggagaccagagccatggagaccgaggtgctggagaccagagtgatggagagaagaggcatggagacctgcgccatggagaccagaggcatggaggccagaggcatggacgccagaggcctggagatgagaggccccgtgcccagcagcagaggccccatgaccggcggcatccagggccccggccccatcaacatcggcgccggcggccccccccagggccccagacaggtgcccggcatcagcggcgtgggcaaccccggcgccggcatgcagggcaccggcatccagggcaccggcatgcagggcgccggcatccagggcggcggcatgcagggcgccggcatccagggcgtgagcatccagggcggcggcatccagggcggcggcatccagggcgccagcaagcagggcggcagccagcccagcagcttcagccccggccagagccaggtgaccccccaggaccaggagaaggccgccctgatcatgcaggtgctgcagctgaccgccgaccagatcgccatgctgccccccgagcagagacagagcatcctgatcctgaaggagcagatccagaagagcaccggcgccagctag

SEQ ID NO: 185370 - protein, 1447 aa, Artificial Sequence
  derived and/or modified sequence
MWPSQLLIFMMLLAPIIHAFSRAPIPMAVVRRELSCESYPIELRCPGTDVIMIESANYGRTDDKICDSDPAQMENIRCYLPDAYKIMSQRCNNRTQCAVVAGPDVFPDPCPGTYKYLEVQYECVPYRVDQKVFLCPGLLKGVYQSEHLFESDHQSGAWCKDPLQASDKIYYMPWTPYRTDTLTEYSSKDDFIAGRPTTTYKLPHRVDGTGFVVYDGALFFNKERTRNIVKFDLRTRIKSGEAIIANANYHDTSPYRWGGKSDIDLAVDENGLWVIYATEQNNGKIVISQLNPYTLRIEGTWDTAYDKRSASNAFMICGILYVVKSVYEDDDNEATGNKIDYIYNTDQSKDSLVDVPFPNSYQYIAAVDYNPRDNLLYVWNNYHVVKYSLDFGPLDSRSGQAHHGQVSYISPPIHLDSELERPSVKDISTTGPLGMGSTTTSTTLRTTTLSPGRSTTPSVSGRRNRSTSTPSPAVEVLDDMTTHLPSASSQIPALEESCEAVEAREIMWFKTRQGQIAKQPCPAGTIGVSTYLCLAPDGIWDPQGPDLSNCSSPWVNHITQKLKSGETAANIARELAEQTRNHLNAGDITYSVRAMDQLVGLLDVQLRNLTPGGKDSAARSLNKAMVETVNNLLQPQALNAWRDLTTSDQLRAATMLLHTVEESAFVLADNLLKTDIVRENTDNIKLEVARLSTEGNLEDLKFPENMGHGSTIQLSANTLKQNGRNGEIRVAFVLYNNLGPYLSTENASMKLGTEALSTNHSVIVNSPVITAAINKEFSNKVYLADPVVFTVKHIKQSEENFNPNCSFWSYSKRTMTGYWSTQGCRLLTTNKTHTTCSCNHLTNFAVLMAHVEVKHSDAVHDLLLDVITWVGILLSLVCLLICIFTFCFFRGLQSDRNTIHKNLCISLFVAELLFLIGINRTDQPIACAVFAALLHFFFLAAFTWMFLEGVQLYIMLVEVFESEHSRRKYFYLVGYGMPALIVAVSAAVDYRSYGTDKVCWLRLDTYFIWSFIGPATLIIMLNVIFLGIALYKMFHHTAILKPESGCLDNIKSWVIGAIALLCLLGLTWAFGLMYINESTVIMAYLFTIFNSLQGMFIFIFHCVLQKKVRKEYGKCLRTHCCSGKSTESSIGSGKTSGSRTPGRYSTGSQSRIRRMWNDTVRKQSESSFITGDINSSASLNREGLLNNARDTSVMDTLPLNGNHGNSYSIASGEYLSNCVQIIDRGYNHNETALEKKILKELTSNYIPSYLNNHERSSEQNRNLMNKLVNNLGSGREDDAIVLDDATSFNHEESLGLELIHEESDAPLLPPRVYSTENHQPHHYTRRRIPQDHSESFFPLLTNEHTEDLQSPHRDSLYTSMPTLAGVAATESVTTSTQTEPPPAKCGDAEDVYYKSMPNLGSRNHVHQLHTYYQLGRGSSDGFIVPPNKDGTPPEGSSKGPAHLVTSL

SEQ ID NO: 185371 - protein, 1469 aa, Artificial Sequence
  derived and/or modified sequence
MWPSQLLIFMMLLAPIIHAFSRAPIPMAVVRRELSCESYPIELRCPGTDVIMIESANYGRTDDKICDSDPAQMENIRCYLPDAYKIMSQRCNNRTQCAVVAGPDVFPDPCPGTYKYLEVQYECVPYKVEQKVFLCPGLLKGVYQSEHLFESDHQSGAWCKDPLQASDKIYYMPWTPYRTDTLTEYSSKDDFIAGRPTTTYKLPHRVDGTGFVVYDGALFFNKERTRNIVKFDLRTRIKSGEAIIANANYHDTSPYRWGGKSDIDLAVDENGLWVIYATEQNNGKIVISQLNPYTLRIEGTWDTAYDKRSASNAFMICGILYVVKSVYEDDDNEATGNKIDYIYNTDQSKDSLVDVPFPNSYQYIAAVDYNPRDNLLYVWNNYHVVKYSLDFGPLDSRSGQAHHGQVSYISPPIHLDSELERPSVKDISTTGPLGMGSTTTSTTLRTTTLSPGRSTTPSVSGRRNRSTSTPSPAVEVLDDMTTHLPSASSQIPALEESCEAVEAREIMWFKTRQGQIAKQPCPAGTIGVSTYLCLAPDGIWDPQGPDLSNCSSPWVNHITQKLKSGETAANIARELAEQTRNHLNAGDITYSVRAMDQLVGLLDVQLRNLTPGGKDSAARSLNKLQKRERSCRAYVQAMVETVNNLLQPQALNAWRDLTTSDQLRAATMLLHTVEESAFVLADNLLKTDIVRENTDNIKLEVARLSTEGNLEDLKFPENMGHGSTIQLSANTLKQNGRNGEIRVAFVLYNNLGPYLSTENASMKLGTEALSTNHSVIVNSPVITAAINKEFSNKVYLADPVVFTVKHIKQSEENFNPNCSFWSYSKRTMTGYWSTQGCRLLTTNKTHTTCSCNHLTNFAVLMAHVEVKHSDAVHDLLLDVITWVGILLSLVCLLICIFTFCFFRGLQSDRNTIHKNLCISLFVAELLFLIGINRTDQPIACAVFAALLHFFFLAAFTWMFLEGVQLYIMLVEVFESEHSRRKYFYLVGYGMPALIVAVSAAVDYRSYGTDKVCWLRLDTYFIWSFIGPATLIIMLNVIFLGIALYKMFHHTAILKPESGCLDNINYEDNRPFIKSWVIGAIALLCLLGLTWAFGLMYINESTVIMAYLFTIFNSLQGMFIFIFHCVLQKKVRKEYGKCLRTHCCSGKSTESSIGSGKTSGSRTPGRYSTGSQSRIRRMWNDTVRKQSESSFITGDINSSASLNREGLLNNARDTSVMDTLPLNGNHGNSYSIASGEYLSNCVQIIDRGYNHNETALEKKILKELTSNYIPSYLNNHERSSEQNRNLMNKLVNNLGSGREDDAIVLDDATSFNHEESLGLELIHEESDAPLLPPRVYSTENHQPHHYTRRRIPQDHSESFFPLLTNEHTEDLQSPHRDSLYTSMPTLAGVAATESVTTSTQTEPPPAKCGDAEDVYYKSMPNLGSRNHVHQLHTYYQLGRGSSDGFIVPPNKDGTPPEGSSKGPAHLVTSL

SEQ ID NO: 185372 - protein, 707 aa, Artificial Sequence
  derived and/or modified sequence
MWPSQLLIFMMLLAPIIHAFSRAPIPMAVVRRELSCESYPIELRCPGTDVIMIESANYGRTDDKICDSDPAQMENIRCYLPDAYKIMSQRCNNRTQCAVVAGPDVFPDPCPGTYKYLEVQYECVPYRVDQKVFLCPGLLKGVYQSEHLFESDHQSGAWCKDPLQASDKIYYMPWTPYRTDTLTEYSSKDDFIAGRPTTTYKLPHRVDGTGFVVYDGALFFNKERTRNIVKFDLRTRIKSGEAIIANANYHDTSPYRWGGKSDIDLAVDENGLWVIYATEQNNGKIVISQLNPYTLRIEGTWDTAYDKRSASNAFMICGILYVVKSVYEDDDNEATGNKIDYIYNTDQSKDSLVDVPFPNSYQYIAAVDYNPRDNLLYVWNNYHVVKYSLDFGPLDSRSGQAHHGQVSYISPPIHLDSELERPSVKDISTTGPLGMGSTTTSTTLRTTTLSPGRSTTPSVSGRRNRSTSTPSPAVEVLDDMTTHLPSASSQIPALEESCEAVEAREIMWFKTRQGQIAKQPCPAGTIGVSTYLCLAPDGIWDPQGPDLSNCSSPWVNHITQKLKSGETAANIARELAEQTRNHLNAGDITYSVRAMDQLVGLLDVQLRNLTPGGKDSAARSLNKAMVETVNNLLQPQALNAWRDLTTSDQLRAATMLLHTVEESAFVLVLQVCLPVREQSFLPFFSFFIFFFSFLPFIPLKFRLAKNK

SEQ ID NO: 185373 - DNA, 4344 bp, Artificial Sequence
  derived and/or modified sequence
atgtggcccagccagctgctgatcttcatgatgctgctggcccccatcatccacgccttcagcagagcccccatccccatggccgtggtgagaagagagctgagctgcgagagctaccccatcgagctgagatgccccggcaccgacgtgatcatgatcgagagcgccaactacggcagaaccgacgacaagatctgcgacagcgaccccgcccagatggagaacatcagatgctacctgcccgacgcctacaagatcatgagccagagatgcaacaacagaacccagtgcgccgtggtggccggccccgacgtgttccccgacccctgccccggcacctacaagtacctggaggtgcagtacgagtgcgtgccctacagagtggaccagaaggtgttcctgtgccccggcctgctgaagggcgtgtaccagagcgagcacctgttcgagagcgaccaccagagcggcgcctggtgcaaggaccccctgcaggccagcgacaagatctactacatgccctggaccccctacagaaccgacaccctgaccgagtacagcagcaaggacgacttcatcgccggcagacccaccaccacctacaagctgccccacagagtggacggcaccggcttcgtggtgtacgacggcgccctgttcttcaacaaggagagaaccagaaacatcgtgaagttcgacctgagaaccagaatcaagagcggcgaggccatcatcgccaacgccaactaccacgacaccagcccctacagatggggcggcaagagcgacatcgacctggccgtggacgagaacggcctgtgggtgatctacgccaccgagcagaacaacggcaagatcgtgatcagccagctgaacccctacaccctgagaatcgagggcacctgggacaccgcctacgacaagagaagcgccagcaacgccttcatgatctgcggcatcctgtacgtggtgaagagcgtgtacgaggacgacgacaacgaggccaccggcaacaagatcgactacatctacaacaccgaccagagcaaggacagcctggtggacgtgcccttccccaacagctaccagtacatcgccgccgtggactacaaccccagagacaacctgctgtacgtgtggaacaactaccacgtggtgaagtacagcctggacttcggccccctggacagcagaagcggccaggcccaccacggccaggtgagctacatcagcccccccatccacctggacagcgagctggagagacccagcgtgaaggacatcagcaccaccggccccctgggcatgggcagcaccaccaccagcaccaccctgagaaccaccaccctgagccccggcagaagcaccacccccagcgtgagcggcagaagaaacagaagcaccagcacccccagccccgccgtggaggtgctggacgacatgaccacccacctgcccagcgccagcagccagatccccgccctggaggagagctgcgaggccgtggaggccagagagatcatgtggttcaagaccagacagggccagatcgccaagcagccctgccccgccggcaccatcggcgtgagcacctacctgtgcctggcccccgacggcatctgggacccccagggccccgacctgagcaactgcagcagcccctgggtgaaccacatcacccagaagctgaagagcggcgagaccgccgccaacatcgccagagagctggccgagcagaccagaaaccacctgaacgccggcgacatcacctacagcgtgagagccatggaccagctggtgggcctgctggacgtgcagctgagaaacctgacccccggcggcaaggacagcgccgccagaagcctgaacaaggccatggtggagaccgtgaacaacctgctgcagccccaggccctgaacgcctggagagacctgaccaccagcgaccagctgagagccgccaccatgctgctgcacaccgtggaggagagcgccttcgtgctggccgacaacctgctgaagaccgacatcgtgagagagaacaccgacaacatcaagctggaggtggccagactgagcaccgagggcaacctggaggacctgaagttccccgagaacatgggccacggcagcaccatccagctgagcgccaacaccctgaagcagaacggcagaaacggcgagatcagagtggccttcgtgctgtacaacaacctgggcccctacctgagcaccgagaacgccagcatgaagctgggcaccgaggccctgagcaccaaccacagcgtgatcgtgaacagccccgtgatcaccgccgccatcaacaaggagttcagcaacaaggtgtacctggccgaccccgtggtgttcaccgtgaagcacatcaagcagagcgaggagaacttcaaccccaactgcagcttctggagctacagcaagagaaccatgaccggctactggagcacccagggctgcagactgctgaccaccaacaagacccacaccacctgcagctgcaaccacctgaccaacttcgccgtgctgatggcccacgtggaggtgaagcacagcgacgccgtgcacgacctgctgctggacgtgatcacctgggtgggcatcctgctgagcctggtgtgcctgctgatctgcatcttcaccttctgcttcttcagaggcctgcagagcgacagaaacaccatccacaagaacctgtgcatcagcctgttcgtggccgagctgctgttcctgatcggcatcaacagaaccgaccagcccatcgcctgcgccgtgttcgccgccctgctgcacttcttcttcctggccgccttcacctggatgttcctggagggcgtgcagctgtacatcatgctggtggaggtgttcgagagcgagcacagcagaagaaagtacttctacctggtgggctacggcatgcccgccctgatcgtggccgtgagcgccgccgtggactacagaagctacggcaccgacaaggtgtgctggctgagactggacacctacttcatctggagcttcatcggccccgccaccctgatcatcatgctgaacgtgatcttcctgggcatcgccctgtacaagatgttccaccacaccgccatcctgaagcccgagagcggctgcctggacaacatcaagagctgggtgatcggcgccatcgccctgctgtgcctgctgggcctgacctgggccttcggcctgatgtacatcaacgagagcaccgtgatcatggcctacctgttcaccatcttcaacagcctgcagggcatgttcatcttcatcttccactgcgtgctgcagaagaaggtgagaaaggagtacggcaagtgcctgagaacccactgctgcagcggcaagagcaccgagagcagcatcggcagcggcaagaccagcggcagcagaacccccggcagatacagcaccggcagccagagcagaatcagaagaatgtggaacgacaccgtgagaaagcagagcgagagcagcttcatcaccggcgacatcaacagcagcgccagcctgaacagagagggcctgctgaacaacgccagagacaccagcgtgatggacaccctgcccctgaacggcaaccacggcaacagctacagcatcgccagcggcgagtacctgagcaactgcgtgcagatcatcgacagaggctacaaccacaacgagaccgccctggagaagaagatcctgaaggagctgaccagcaactacatccccagctacctgaacaaccacgagagaagcagcgagcagaacagaaacctgatgaacaagctggtgaacaacctgggcagcggcagagaggacgacgccatcgtgctggacgacgccaccagcttcaaccacgaggagagcctgggcctggagctgatccacgaggagagcgacgcccccctgctgccccccagagtgtacagcaccgagaaccaccagccccaccactacaccagaagaagaatcccccaggaccacagcgagagcttcttccccctgctgaccaacgagcacaccgaggacctgcagagcccccacagagacagcctgtacaccagcatgcccaccctggccggcgtggccgccaccgagagcgtgaccaccagcacccagaccgagcccccccccgccaagtgcggcgacgccgaggacgtgtactacaagagcatgcccaacctgggcagcagaaaccacgtgcaccagctgcacacctactaccagctgggcagaggcagcagcgacggcttcatcgtgccccccaacaaggacggcaccccccccgagggcagcagcaagggccccgcccacctggtgaccagcctgtag

SEQ ID NO: 185374 - DNA, 4410 bp, Artificial Sequence
  derived and/or modified sequence
atgtggcccagccagctgctgatcttcatgatgctgctggcccccatcatccacgccttcagcagagcccccatccccatggccgtggtgagaagagagctgagctgcgagagctaccccatcgagctgagatgccccggcaccgacgtgatcatgatcgagagcgccaactacggcagaaccgacgacaagatctgcgacagcgaccccgcccagatggagaacatcagatgctacctgcccgacgcctacaagatcatgagccagagatgcaacaacagaacccagtgcgccgtggtggccggccccgacgtgttccccgacccctgccccggcacctacaagtacctggaggtgcagtacgagtgcgtgccctacaaggtggagcagaaggtgttcctgtgccccggcctgctgaagggcgtgtaccagagcgagcacctgttcgagagcgaccaccagagcggcgcctggtgcaaggaccccctgcaggccagcgacaagatctactacatgccctggaccccctacagaaccgacaccctgaccgagtacagcagcaaggacgacttcatcgccggcagacccaccaccacctacaagctgccccacagagtggacggcaccggcttcgtggtgtacgacggcgccctgttcttcaacaaggagagaaccagaaacatcgtgaagttcgacctgagaaccagaatcaagagcggcgaggccatcatcgccaacgccaactaccacgacaccagcccctacagatggggcggcaagagcgacatcgacctggccgtggacgagaacggcctgtgggtgatctacgccaccgagcagaacaacggcaagatcgtgatcagccagctgaacccctacaccctgagaatcgagggcacctgggacaccgcctacgacaagagaagcgccagcaacgccttcatgatctgcggcatcctgtacgtggtgaagagcgtgtacgaggacgacgacaacgaggccaccggcaacaagatcgactacatctacaacaccgaccagagcaaggacagcctggtggacgtgcccttccccaacagctaccagtacatcgccgccgtggactacaaccccagagacaacctgctgtacgtgtggaacaactaccacgtggtgaagtacagcctggacttcggccccctggacagcagaagcggccaggcccaccacggccaggtgagctacatcagcccccccatccacctggacagcgagctggagagacccagcgtgaaggacatcagcaccaccggccccctgggcatgggcagcaccaccaccagcaccaccctgagaaccaccaccctgagccccggcagaagcaccacccccagcgtgagcggcagaagaaacagaagcaccagcacccccagccccgccgtggaggtgctggacgacatgaccacccacctgcccagcgccagcagccagatccccgccctggaggagagctgcgaggccgtggaggccagagagatcatgtggttcaagaccagacagggccagatcgccaagcagccctgccccgccggcaccatcggcgtgagcacctacctgtgcctggcccccgacggcatctgggacccccagggccccgacctgagcaactgcagcagcccctgggtgaaccacatcacccagaagctgaagagcggcgagaccgccgccaacatcgccagagagctggccgagcagaccagaaaccacctgaacgccggcgacatcacctacagcgtgagagccatggaccagctggtgggcctgctggacgtgcagctgagaaacctgacccccggcggcaaggacagcgccgccagaagcctgaacaagctgcagaagagagagagaagctgcagagcctacgtgcaggccatggtggagaccgtgaacaacctgctgcagccccaggccctgaacgcctggagagacctgaccaccagcgaccagctgagagccgccaccatgctgctgcacaccgtggaggagagcgccttcgtgctggccgacaacctgctgaagaccgacatcgtgagagagaacaccgacaacatcaagctggaggtggccagactgagcaccgagggcaacctggaggacctgaagttccccgagaacatgggccacggcagcaccatccagctgagcgccaacaccctgaagcagaacggcagaaacggcgagatcagagtggccttcgtgctgtacaacaacctgggcccctacctgagcaccgagaacgccagcatgaagctgggcaccgaggccctgagcaccaaccacagcgtgatcgtgaacagccccgtgatcaccgccgccatcaacaaggagttcagcaacaaggtgtacctggccgaccccgtggtgttcaccgtgaagcacatcaagcagagcgaggagaacttcaaccccaactgcagcttctggagctacagcaagagaaccatgaccggctactggagcacccagggctgcagactgctgaccaccaacaagacccacaccacctgcagctgcaaccacctgaccaacttcgccgtgctgatggcccacgtggaggtgaagcacagcgacgccgtgcacgacctgctgctggacgtgatcacctgggtgggcatcctgctgagcctggtgtgcctgctgatctgcatcttcaccttctgcttcttcagaggcctgcagagcgacagaaacaccatccacaagaacctgtgcatcagcctgttcgtggccgagctgctgttcctgatcggcatcaacagaaccgaccagcccatcgcctgcgccgtgttcgccgccctgctgcacttcttcttcctggccgccttcacctggatgttcctggagggcgtgcagctgtacatcatgctggtggaggtgttcgagagcgagcacagcagaagaaagtacttctacctggtgggctacggcatgcccgccctgatcgtggccgtgagcgccgccgtggactacagaagctacggcaccgacaaggtgtgctggctgagactggacacctacttcatctggagcttcatcggccccgccaccctgatcatcatgctgaacgtgatcttcctgggcatcgccctgtacaagatgttccaccacaccgccatcctgaagcccgagagcggctgcctggacaacatcaactacgaggacaacagacccttcatcaagagctgggtgatcggcgccatcgccctgctgtgcctgctgggcctgacctgggccttcggcctgatgtacatcaacgagagcaccgtgatcatggcctacctgttcaccatcttcaacagcctgcagggcatgttcatcttcatcttccactgcgtgctgcagaagaaggtgagaaaggagtacggcaagtgcctgagaacccactgctgcagcggcaagagcaccgagagcagcatcggcagcggcaagaccagcggcagcagaacccccggcagatacagcaccggcagccagagcagaatcagaagaatgtggaacgacaccgtgagaaagcagagcgagagcagcttcatcaccggcgacatcaacagcagcgccagcctgaacagagagggcctgctgaacaacgccagagacaccagcgtgatggacaccctgcccctgaacggcaaccacggcaacagctacagcatcgccagcggcgagtacctgagcaactgcgtgcagatcatcgacagaggctacaaccacaacgagaccgccctggagaagaagatcctgaaggagctgaccagcaactacatccccagctacctgaacaaccacgagagaagcagcgagcagaacagaaacctgatgaacaagctggtgaacaacctgggcagcggcagagaggacgacgccatcgtgctggacgacgccaccagcttcaaccacgaggagagcctgggcctggagctgatccacgaggagagcgacgcccccctgctgccccccagagtgtacagcaccgagaaccaccagccccaccactacaccagaagaagaatcccccaggaccacagcgagagcttcttccccctgctgaccaacgagcacaccgaggacctgcagagcccccacagagacagcctgtacaccagcatgcccaccctggccggcgtggccgccaccgagagcgtgaccaccagcacccagaccgagcccccccccgccaagtgcggcgacgccgaggacgtgtactacaagagcatgcccaacctgggcagcagaaaccacgtgcaccagctgcacacctactaccagctgggcagaggcagcagcgacggcttcatcgtgccccccaacaaggacggcaccccccccgagggcagcagcaagggccccgcccacctggtgaccagcctgtag

SEQ ID NO: 185375 - DNA, 2124 bp, Artificial Sequence
  derived and/or modified sequence
atgtggcccagccagctgctgatcttcatgatgctgctggcccccatcatccacgccttcagcagagcccccatccccatggccgtggtgagaagagagctgagctgcgagagctaccccatcgagctgagatgccccggcaccgacgtgatcatgatcgagagcgccaactacggcagaaccgacgacaagatctgcgacagcgaccccgcccagatggagaacatcagatgctacctgcccgacgcctacaagatcatgagccagagatgcaacaacagaacccagtgcgccgtggtggccggccccgacgtgttccccgacccctgccccggcacctacaagtacctggaggtgcagtacgagtgcgtgccctacagagtggaccagaaggtgttcctgtgccccggcctgctgaagggcgtgtaccagagcgagcacctgttcgagagcgaccaccagagcggcgcctggtgcaaggaccccctgcaggccagcgacaagatctactacatgccctggaccccctacagaaccgacaccctgaccgagtacagcagcaaggacgacttcatcgccggcagacccaccaccacctacaagctgccccacagagtggacggcaccggcttcgtggtgtacgacggcgccctgttcttcaacaaggagagaaccagaaacatcgtgaagttcgacctgagaaccagaatcaagagcggcgaggccatcatcgccaacgccaactaccacgacaccagcccctacagatggggcggcaagagcgacatcgacctggccgtggacgagaacggcctgtgggtgatctacgccaccgagcagaacaacggcaagatcgtgatcagccagctgaacccctacaccctgagaatcgagggcacctgggacaccgcctacgacaagagaagcgccagcaacgccttcatgatctgcggcatcctgtacgtggtgaagagcgtgtacgaggacgacgacaacgaggccaccggcaacaagatcgactacatctacaacaccgaccagagcaaggacagcctggtggacgtgcccttccccaacagctaccagtacatcgccgccgtggactacaaccccagagacaacctgctgtacgtgtggaacaactaccacgtggtgaagtacagcctggacttcggccccctggacagcagaagcggccaggcccaccacggccaggtgagctacatcagcccccccatccacctggacagcgagctggagagacccagcgtgaaggacatcagcaccaccggccccctgggcatgggcagcaccaccaccagcaccaccctgagaaccaccaccctgagccccggcagaagcaccacccccagcgtgagcggcagaagaaacagaagcaccagcacccccagccccgccgtggaggtgctggacgacatgaccacccacctgcccagcgccagcagccagatccccgccctggaggagagctgcgaggccgtggaggccagagagatcatgtggttcaagaccagacagggccagatcgccaagcagccctgccccgccggcaccatcggcgtgagcacctacctgtgcctggcccccgacggcatctgggacccccagggccccgacctgagcaactgcagcagcccctgggtgaaccacatcacccagaagctgaagagcggcgagaccgccgccaacatcgccagagagctggccgagcagaccagaaaccacctgaacgccggcgacatcacctacagcgtgagagccatggaccagctggtgggcctgctggacgtgcagctgagaaacctgacccccggcggcaaggacagcgccgccagaagcctgaacaaggccatggtggagaccgtgaacaacctgctgcagccccaggccctgaacgcctggagagacctgaccaccagcgaccagctgagagccgccaccatgctgctgcacaccgtggaggagagcgccttcgtgctggtgctgcaggtgtgcctgcccgtgagagagcagagcttcctgcccttcttcagcttcttcatcttcttcttcagcttcctgcccttcatccccctgaagttcagactggccaagaacaagtag

SEQ ID NO: 185376 - DNA, 4344 bp, Artificial Sequence
  derived and/or modified sequence
atgtggccatctcagcttctgattttcatgatgctgctggcccctatcattcacgctttctccagggcacccatccccatggctgtcgtgcgaagagagctgtcatgtgaatcctacccgatcgagttgagatgcccggggactgatgtgattatgattgaaagtgctaactatgggagaacggacgacaagatttgtgattccgaccctgcccaaatggaaaatataaggtgctatcttcccgatgcttacaaaatcatgtcgcagagatgcaataatcgcactcaatgtgccgttgttgcaggcccagatgtctttccggatccatgccccgggacatacaagtacctggaggtgcagtacgagtgcgtcccgtatcgagtcgatcaaaaagtattcctgtgtccagggctgctcaagggggtatatcagagtgaacatctgtttgagagcgaccatcagagcggcgcatggtgtaaggacccactacaggcatccgataaaatatactatatgccttggactccctacaggacggacaccctcactgagtattcatcaaaggacgacttcatcgcaggcagaccgactaccacctacaagctgccacatcgcgtcgacggaacagggttcgtcgtttacgatggagctctgtttttcaataaggagagaacccgcaatatagtcaagttcgatctgcgaacacgcataaagagcggcgaagccatcattgctaatgccaattatcacgatactagcccctacaggtggggagggaagagcgacatcgacttggcagtcgatgaaaacgggttgtgggtcatttacgctacagagcagaacaacgggaaaattgttatctcccagctcaatccgtacacactgaggatcgagggcacatgggatacagcttatgacaaaaggtcagcaagcaacgccttcatgatctgcgggatactgtatgtagtgaagtcggtgtacgaagacgacgataatgaggcgacaggtaataagattgattacatttataatacagatcaatccaaggactctcttgttgacgtaccgtttcccaatagttatcagtacattgccgccgtggattataatccccgcgacaatctactatacgtctggaacaattatcacgtcgtcaaatacagcctggacttcggccctctagatagccgatccggccaggctcaccacgggcaggtgtcctatatctccccacccatccatctagatagcgagctggagaggcccagcgttaaggacatttctaccactggtccgctgggaatgggaagcaccacgaccagtacaactttgaggaccaccactcttagccccgggcggagcaccaccccgtccgtgagcggcaggcgtaaccgcagcacatctacccccagtccagctgtcgaagtgctggatgacatgacaactcatcttccctcggctagttctcagattcctgccctcgaagagtcttgcgaagctgtcgaggcaagggaaattatgtggtttaagacacggcagggccagattgccaagcagccttgcccggctggaacaattggcgtttcaacatatctctgccttgcccctgacgggatttgggacccccaaggtcccgacctctctaactgcagctccccatgggtgaatcatattacgcagaaacttaagagcggagagacagcagccaacatcgcccgcgagctggccgaacagactcgaaatcacttaaatgcgggggacatcacatactccgtgagagctatggaccagctcgtggggttactcgatgtgcagctgcgcaatctgactcctggcggcaaggactctgcagctcgctccctaaataaagccatggtggagaccgtgaacaacctgctgcagccccaggccctcaatgcttggagggatctgactacttcagaccagcttagagccgcaaccatgcttctgcacactgttgaggagagtgcatttgtccttgccgataatctgttgaagacagatatcgtgcgcgagaataccgacaacatcaaactggaggtcgcccggctgagcaccgaggggaacctggaggacttgaagtttccagagaacatggggcatgggagtaccatccagctgagcgctaacacgttgaagcagaacggtaggaatggggagattagagtggcttttgttctgtacaacaatcttggaccttacctctctaccgagaacgctagtatgaagttaggaactgaagctctgtcaacaaatcacagtgtcattgtcaatagtcccgtgatcacggccgcgatcaataaggaattttccaacaaggtatacctcgccgacccagtcgtgtttaccgtgaaacatattaaacagagcgaagaaaatttcaacccaaactgtagtttttggtcttacagtaagaggacaatgaccggttattggagcacacagggctgtaggctgctcacgacaaacaagacacatacaacatgctcttgtaatcatctaactaatttcgcagtgctcatggctcatgtcgaagttaaacattccgatgcagtccatgacctcttactggacgtgatcacgtgggtgggcatcctgctgagcctggtgtgcctgctaatctgtatcttcactttctgtttctttcgagggctgcagagcgatcggaacacaatccacaagaacttgtgtattagcctcttcgtggctgagcttctttttctgatcggcattaatagaacagaccaacctatcgcttgcgccgtcttcgccgctttgttacactttttctttctcgctgcattcacctggatgttcctggaaggggtgcagctgtatataatgttggtggaggtttttgagagcgaacactccaggcggaagtacttctatctcgtgggctatggcatgcctgcgcttattgttgcagtgagtgccgccgtagactatcgatcttatgggaccgacaaggtctgttggttgcggctggatacctattttatatggtcttttataggccctgccaccttgatcatcatgttgaatgtgatcttcttaggcatcgcgttgtacaagatgtttcatcatacagcgatcctgaaacccgagagcggatgtctggacaacattaagagctgggtcatcggcgcaatagccctgttgtgtctgctcggcctcacatgggcattcggcttgatgtacattaacgagagcactgtaataatggcatatctgttcacaatctttaactcgttacagggcatgttcattttcatatttcattgtgtccttcaaaaaaaggtcagaaaggagtacggaaagtgcctgagaactcactgctgttctgggaagtccacagagagcagcattggatccggaaagacaagcgggtctcggacgcccggccggtattctacgggcagccagtctcggatccgccggatgtggaatgatactgtcagaaaacagtctgagtcctcctttatcaccggagacattaatagctctgcttccttaaaccgggaaggcttgttaaataacgcccgggacaccagcgtgatggatacactgccgcttaatgggaatcatggaaactcttacagcatcgcctctggagagtacctgagcaactgtgtccaaataatcgaccgaggctataatcacaacgaaaccgctctagagaaaaaaatccttaaagagcttacatctaactacataccttcgtacctgaacaaccacgagagatccagcgagcaaaatcgtaatttaatgaacaaattagttaacaacttgggctcaggtagagaggacgacgccatcgtgctcgatgacgcgacgtcattcaaccatgaagagtccctaggcctggagttgatccacgaggagagcgacgcccctctcctcccccctcgcgtgtattctactgagaaccatcagccacaccactatacacggagacggatcccccaggatcactctgagtcgttttttccccttctcactaatgagcataccgaggatctacagagcccacatagagactccctgtatacgagcatgcccactctggccggagtggcagctacagaaagcgtgaccacgtcaacacaaacagagccgccccctgccaaatgtggtgacgctgaagacgtgtactataaatcaatgcccaacctcgggtcccgcaaccacgtgcaccagttacacacctactatcagctaggtagggggtctagtgacggttttattgtgccccctaacaaagacggcaccccacctgaaggttcaagcaagggccctgcccatctggtgactagcctctag

SEQ ID NO: 185377 - DNA, 4410 bp, Artificial Sequence
  derived and/or modified sequence
atgtggcctagccagcttttaatctttatgatgcttctggcacctattattcatgccttttccagggctccaatccccatggccgtcgtacgccgcgagctgtcctgtgagtcgtacccaatcgaacttagatgtcccggcacagatgtaatcatgatcgaatctgccaattacggaaggactgatgataaaatctgcgacagcgatcccgcacagatggagaacatcagatgctacctgcccgacgcatataagatcatgtctcagaggtgtaacaatcggacccagtgcgcagtggtcgccggaccagatgtgtttcccgatccctgccctggaacatataagtatctggaggtacagtatgaatgcgtcccctacaaggtggaacaaaaagtgttcctgtgcccgggcctgctcaagggcgtgtaccagagcgagcaccttttcgaaagcgaccaccaatctggcgcgtggtgcaaggatcctctccaggcttccgacaaaatctactacatgccttggaccccctaccgaacggatacacttacggaatatagcagcaaggacgattttattgcaggacgccccacaacaacctacaaactgccccaccgggtggacggaaccggatttgtggtgtacgacggcgctttgtttttcaataaggaaagaacacgaaacatcgtaaagtttgacctacgaacacgaataaagagtggtgaagctatcatagcaaatgcaaactatcacgacacctcaccatacagatggggtggaaagagcgatatcgacctggccgttgatgaaaacggcttgtgggtcatttatgcaaccgaacagaacaatggaaagatcgtcattagccaacttaatccttatactctccggattgaggggacctgggatacagcgtacgataagagatcagctagcaatgccttcatgatctgcggcatcctgtacgtcgttaagtccgtctacgaggatgacgacaatgaagccactgggaacaaaattgattacatctacaataccgaccaatctaaggactccctcgtggacgtcccctttcctaatagctatcaatatattgctgctgtggattacaatcccagagacaaccttctgtacgtgtggaacaattaccacgtcgtgaaatatagtctggattttggtccactggactcacgttctggtcaagcacaccatggtcaggtgagctacattagtccccctattcatctggattctgagttagaaaggccatccgtaaaagatatcagcacaacaggtccccttggtatgggcagtactacgacctccactacacttcgtactaccaccttgagcccagggcgctccactactccatctgtgtccggccgcaggaatcggtctacttccactccttctcctgctgttgaggtactggacgatatgaccactcacctgcccagcgcctcttcacaaattcctgcgttagaggagagctgcgaagctgtagaggctagggagataatgtggtttaagacgcgccagggtcaaatcgccaaacagccatgtcccgctggaactataggggtgtcaacctatctgtgtcttgcaccagacggtatctgggacccccaaggtcccgacctgtccaattgttcctccccctgggtaaaccacattactcagaagctcaagtccggcgaaactgcagccaacatagctagggagttagcagaacaaaccagaaatcacctcaacgccggagacatcacctactcagtgcgagcaatggatcagctcgtggggctcctcgatgtccagctgcgaaacctgaccccgggcggtaaggattcagccgccaggagcctcaataagctgcagaagcgagagcgctcctgccgcgcctacgtacaagctatggttgagactgtgaacaacctgttgcagcctcaagctctcaacgcttggagagacctgacgacgagcgaccagctgagagctgccacaatgctacttcatacagtggaggagtctgcctttgtgctggccgacaatctgctcaagactgacatcgtgcgggagaatacagacaatatcaagctggaggtggctcggttgtcgacagaaggtaatctggaagatctgaagtttccagagaacatgggtcacgggagcaccatccagctgtccgccaacacacttaaacagaacgggcgaaacggggagattcgggtcgcctttgtgctgtataataacctgggtccctaccttagtacggaaaatgcatccatgaaactaggcacagaagccttaagcactaaccattcggtgattgttaatagtccggtgattacagcagccataaataaagagtttagtaataaagtgtacctggctgacccagtcgtttttacagttaagcatataaaacaatctgaggagaactttaaccccaactgcagtttctggtcctattcgaaacgcactatgaccggctattggtctacccaggggtgccgccttttgaccactaacaagactcacacaacctgcagctgtaatcacctgacgaattttgcggttctcatggcgcacgttgaggttaaacacagcgacgcggtgcacgatctccttctggacgtgattacatgggtggggatcctgctttcgctcgtatgcctgctcatttgcatcttcacattttgtttttttagaggcctccaatccgacagaaacacgatccacaaaaacctgtgtatcagcctgtttgtggcagaactcctgtttttaatcgggataaaccggaccgatcagcctattgcatgtgccgtgtttgccgccctacttcatttttttttcctggccgctttcacctggatgttcctggaaggtgtgcagctgtacatcatgctggtggaggtcttcgaaagtgaacactcgagacggaaatatttttatttagtaggctacggcatgcccgctttgatcgtcgccgtgtctgccgctgtggattaccgttcatatggtaccgataaagtatgctggctgaggctcgacacttatttcatctggtcgttcattgggcctgcaacgttgatcatcatgctcaatgtaatcttcctggggatcgctctgtataaaatgttccaccataccgctatcctgaaaccagaatctgggtgcctagataatataaactatgaggataacagacccttcattaagtcctgggtcatcggcgctattgcattactttgtctgctcgggttaacctgggcgttcggcctcatgtacataaatgagtcaaccgtgatcatggcatacctgttcactatctttaacagcctgcaggggatgtttatctttatatttcattgtgtgctgcagaagaaggtcagaaaagagtacggaaagtgccttcggacacattgttgcagcgggaagagcaccgagagcagcatcgggagcggtaagacttcagggtccaggacccctgggcgctattctactggttctcaatctcgcattaggaggatgtggaatgacactgttcggaagcaatcagaatcctccttcatcaccggagatataaactcctcagcaagcttgaatagagaaggactgctaaacaacgctcgtgacaccagcgtgatggacaccctgccactgaacggcaatcacgggaactcctattccatcgcgtcaggggagtatctaagcaattgtgttcagatcattgaccggggctataatcacaacgagactgccctcgagaaaaagatactgaaggagctcacttcaaactacattccgtcgtacctcaacaaccacgaacgatcatcagagcagaatagaaatctgatgaacaagctcgtgaataacctaggcagtggcagggaggatgacgccatcgtgctagacgacgccaccagttttaatcacgaggagtccctcggcctggagttaatccatgaggaaagcgatgcaccattgcttccacctagggtctatagcacagaaaaccatcaacctcaccactatacacggcgtcgcatcccccaagaccactctgagtccttcttccctctcctcaccaatgaacacacagaagatctccagagtcctcatcgcgactcattatatacctctatgccgactctggccggcgttgcggccactgagtccgtgacaacctcaacacagacggaaccacctcctgccaaatgtggcgacgctgaggacgtgtattacaagtcaatgcccaatctgggctctcgcaaccatgtgcatcagctccacacttattatcagctcggacggggaagtagcgacggcttcattgtacctcccaacaaagatggcactcccccagaaggttcgagcaaggggcctgctcacctggtgaccagtctgtag

SEQ ID NO: 185378 - DNA, 2124 bp, Artificial Sequence
  derived and/or modified sequence
atgtggccctctcagctactgattttcatgatgctgttagcccccattattcacgcgtttagtcgtgcgcctatcccaatggcagtggttaggagggagctgagttgcgagtcttatccaatcgagttgagatgtcctggaaccgacgtgatcatgattgaatcagccaattacgggaggaccgacgataagatctgcgacagcgaccctgctcagatggagaacattagatgctatttaccagacgcctacaagattatgtcccagcgctgtaacaaccgcactcagtgcgccgtggtggctgggcctgatgtatttcccgatccgtgcccaggaacctacaagtacctggaggtccagtacgagtgtgtgccttatagagtggaccagaaagtcttcctctgccctggtctgttgaaaggcgtgtatcaatcggagcatttgttcgagagcgatcaccagtctggcgcttggtgtaaagaccccttgcaggcttccgacaagatatattacatgccttggactccttataggacggatactctgacggaatactccagtaaggatgatttcatcgcgggaagacctacgaccacttacaaattacctcaccgggtagacggcaccggattcgtcgtgtatgacggcgcactgttcttcaacaaagagcgcacccggaacatcgtcaagttcgacctgagaactaggattaaatcaggtgaggcgatcatcgctaacgccaactaccacgacacttctccgtaccggtggggaggcaagtcggatatagatttggcggtggatgagaacggactttgggttatctatgcgactgagcagaataatgggaagattgtgatcagtcaattgaatccatatacgctgcggatcgagggtacgtgggacaccgcctacgataaaaggagcgcctctaacgccttcatgatctgcggcatcctatatgtggtaaagagcgtatatgaggacgacgataatgaggcaacaggtaacaagattgattacatttacaacaccgaccaatcaaaagattctctggtagacgtgccattccccaattcctaccagtacatcgccgctgtcgattacaatccaagagacaaccttctctatgtttggaataattatcacgtggtcaagtacagtctcgatttcggcccccttgattctagatcaggtcaggctcaccacggccaggtgtcatacatctccccccctatacatttggattccgaactggagcgaccgagcgtgaaagacatctcgactacgggacctctgggaatggggtccaccacgacctccactacattgcggacaaccaccctgagcccaggcagatcgaccacaccaagcgtgagcgggaggagaaaccgctcaacgagcactccctccccagctgtagaagtactggatgatatgaccacacatcttccaagcgccagttcccagatacctgcactggaagagagctgcgaggccgttgaagcacgggagattatgtggttcaagacaagacaaggccaaatcgctaagcagccatgtcctgctggcacaattggggtgtcaacttatctgtgtctcgcccccgatgggatttgggaccctcaggggccagatctgtctaattgttcaagcccctgggtgaaccacattacccaaaagcttaaaagtggcgagactgccgccaacatcgctcgggagctggctgaacaaactagaaaccatctgaatgctggcgacatcacatactctgtaagagctatggaccagcttgtcggcctgctggatgtccagcttcgcaacctcacccccggaggtaaggatagcgcagccagatccctgaacaaggccatggtggaaactgttaataacctcctgcagccacaagctctcaatgcctggcgggatctcacaacctcagatcagctgagggccgcgactatgttgctgcacaccgtggaggaaagtgccttcgttctcgtgttgcaggtatgcctccccgtgagagagcagagtttccttccgttcttctccttctttattttttttttttcatttctcccatttatccctctcaaattccgcctggctaaaaacaaatag

SEQ ID NO: 185379 - DNA, 4410 bp, Artificial Sequence
  derived and/or modified sequence
atgtggccctcacagctgctgatcttcatgatgctgctcgcccccatcatccatgccttttctcgcgcccctatcccgatggcagtggtacgtagagaattatcctgtgagtcctacccgatcgaacttaggtgtccgggcacagacgtgatcatgatcgaaagcgctaattacgggagaaccgacgacaaaatctgtgatagcgatccggcccagatggagaacatcagatgctaccttcccgacgcttataagatcatgtcccagcgttgtaataaccgcacccagtgcgctgtcgtagctggcccagatgtgttcccagatccttgccctggcacttataagtacctggaggttcagtacgagtgtgttccatacaaagttgagcagaaagtgttcctctgccccggcctgttgaagggcgtttaccagtcggaacatcttttcgaatcagatcaccagtccggagcttggtgcaaggacccgctgcaggcaagtgacaaaatatactacatgccatggactccatataggactgatactctgaccgagtatagcagtaaagacgatttcatcgccgggaggcctacaacgacctacaaacttccacatagagtggacggaaccggtttcgtcgtgtacgatggcgctctctttttcaataaagaacgaacccggaatatcgttaagttcgacctccgtacacgtatcaagtccggtgaagcaatcatagcaaatgccaattatcatgatacaagcccctacagatggggcgggaaatcagacatcgacctagccgtggatgagaatgggctgtgggtgatttacgcaacggagcagaataacgggaaaatcgttatctcacagttgaatccctatactctgagaatcgaggggacttgggataccgcctacgataaaagaagtgcctcgaacgccttcatgatatgtgggatactttacgtcgtgaagagtgtgtatgaagatgacgataacgaggcgactggcaataagatcgactatatatataacacggaccagagcaaggattccctcgtcgatgtgccattccctaacagttatcagtatattgctgccgtggactacaatccccgtgacaatttgttgtacgtgtggaataattatcatgtcgtaaaatacagtctggactttggcccattggattccagaagcgggcaggcacaccacggccaggtgtcttatatatctccccctatacacttggatagcgaacttgagcgtccatcagtgaaggacatttcaacgaccgggccactgggaatgggctcaaccaccacctcgacgactctgaggacgaccaccctgtcaccggggcggagcacaacacccagcgtgtctggtcgcagaaatcggtccacctctacccctagccccgcagtggaagttctcgacgacatgacgacccacctgccctcggcatcctctcaaatcccagccttggaagagagctgtgaggcagtcgaagcgcgggaaatcatgtggttcaaaacacgccagggacagatcgccaaacagccctgtccagctggtacaatcggcgtgtcaacttacctgtgtctggcccctgatggaatctgggacccgcagggacccgacctcagtaattgcagttccccttgggtgaatcacataacccaaaagctcaagtccggtgagactgccgcaaatatcgcacgagagctggcagaacagacccgcaatcacctcaacgctggtgacatcacctactccgtaagagctatggaccaactagtgggattgctggacgtccaacttagaaacctcacccctggaggaaaggacagcgcggcaagatctcttaacaagttgcagaagcgcgagagatcctgcagagcttacgtgcaggctatggtagagacagtcaataatctgctgcagcctcaggcccttaacgcgtggagagacctgaccacgtccgatcagctgcgtgcggcgaccatgctgctgcatacagtggaggaaagcgcctttgtgctggccgacaacctgttaaaaaccgatatcgtgagggagaacactgacaatattaaactggaagtggctcggttatccacagaaggcaatctggaggacctcaaattcccagagaacatgggccacggaagtaccattcagctgtctgccaacactctgaaacagaacgggcggaatggcgagatccgggtggcttttgtattatataacaacctgggaccttacctgtccaccgagaacgccagcatgaagctgggcactgaggctctgtccacaaaccattccgtcatagtgaactcccctgtgataactgcggctataaataaagagtttagcaataaggtgtatctggcagatccggtggtcttcaccgtgaaacacattaaacagagtgaggagaactttaacccaaactgttctttttggtcttactccaagcggaccatgacagggtactggtctacccagggctgcagactcctcactaccaacaagactcatactacttgtagctgcaatcaccttacaaactttgccgttttaatggcccacgtggaggtgaagcatagcgatgctgtgcacgatttgctgctggatgtgattacctgggtagggatccttctgagcttggtgtgtctactaatctgtattttcaccttttgcttcttcagggggttgcagtcagaccgtaacacgatacataagaatctctgcatctccctgttcgtggctgaactcttattcctgattggcattaataggacggatcagcccattgcgtgtgcagtgttcgccgccctgctgcactttttctttctggccgcgtttacctggatgtttctggagggcgtccagctgtacatcatgcttgtcgaggtcttcgaatctgaacattcaaggagaaaatatttttacctcgtaggttacggcatgcctgccctcatagtggcggtctccgcggctgtcgactatagatcctatggcacagacaaagtgtgttggctgagactggatacgtattttatatggtcctttattggaccggccacactgattatcatgttaaacgtgatttttttgggcattgctttgtataagatgttccatcataccgccatcctcaaaccggagagcgggtgcttagacaacatcaattatgaggataataggcctttcattaagtcttgggtcattggcgccattgctctgctatgtcttctgggcttgacttgggcttttggcctgatgtatatcaatgagtcaactgtgatcatggcctacttatttaccatctttaactctctacagggcatgttcatttttattttccattgtgtgttgcagaaaaaggtccgcaaagagtatgggaaatgtttgagaacgcattgctgttctggcaaaagcacagagtcctcaatcggtagtggtaaaaccagcggctccagaacacccgggcgctacagcactgggagccaaagccggatcagaaggatgtggaacgatacagtgcgtaagcagagtgagagctcatttatcactggagatatcaactcctccgccagtctgaatagagaaggcctgctgaacaatgccagggatacttcggtgatggacacgctgccgttaaatgggaaccacgggaactcatattcaatagcctccggcgaatacttgtccaattgtgtgcagataatcgataggggctataaccacaatgagacagccttggagaaaaagatcttaaaggaactcaccagcaactacatccctagttatctgaacaatcatgagaggagctccgaacagaatagaaacctgatgaataaactggtcaataacctcggcagcggaagagaggacgacgccatcgtgctcgacgacgcgacgagctttaatcatgaagaatccctggggctagagctcatccatgaggaatctgatgccccgctcctgccaccaagggtgtactccacggagaatcaccagccgcatcactatacaagaagaaggattccacaggaccactccgagagcttttttccactgctgacgaatgaacacacagaagatcttcagtctcctcacagagattcgctatacacctccatgccgactttggctggggtagctgcgacagagtctgtcacgacttcaactcagacagagcccccgcccgcaaagtgcggagatgccgaggacgtgtattacaaaagcatgcctaacttgggtagcaggaaccatgtccaccagctgcacacctactaccaactgggcagaggatcatccgatggattcatcgtgccccctaacaaggatgggactccacccgaagggtcatctaaggggcctgcgcacctagtgacgagcctgtag

SEQ ID NO: 185380 - DNA, 6058 bp, Artificial Sequence
  derived and/or modified sequence
gtttcagatttgggatattggtgtttctgttttggagaaattattctttttctttttaatttgaagaaaaatcatcagtcttggaatacagaagagaaactagaaatatacgtattttgtttcacatttgaacagtcattcttgaggaatactccatacctgagtagacagccatgtggccatcgcagctactaattttcatgatgctcttagctccaataattcatgctttcagccgtgccccaattccaatggctgtggtccgcagagagctatcctgtgagagctatcctatagagcttcgctgtccaggaacagacgtcatcatgatagaaagtgccaactatggcaggactgatgacaaaatttgtgactctgaccctgctcagatggagaatatccgatgttatctgccagatgcctataagattatgtctcaaagatgcaataacagaacccagtgtgcagtggtggcaggtcctgatgtttttccagacccgtgtccaggaacctataaataccttgaagtgcagtatgaatgtgtcccttacagagtagaccagaaagtttttctttgtcctggactactaaaaggagtataccagagtgaacatttgtttgagtccgaccaccaatctggggcgtggtgcaaagaccctctgcaggcatctgacaagatttattatatgccctggactccctacagaactgataccctgactgagtattcatccaaggatgacttcattgctggaagaccaactacaacctacaagctccctcacagggtggatggcacaggatttgtagtgtatgatggagctttgttcttcaacaaagagcgcaccaggaacatagtaaagtttgatttgcggactaggataaagagtggagaggctatcatagcaaatgccaattaccatgatacctccccttaccgatggggaggcaaatctgacatagacctggcagtagatgagaatgggctatgggtaatctatgcaacagaacaaaacaatggtaaaattgtcattagtcaattgaacccttacaccctacggatcgaaggaacatgggatactgcatatgataaaaggtcagcttccaatgcctttatgatttgtggaattctgtatgtggtcaaatctgtatatgaggatgatgacaatgaggctactggaaataagattgactacatttacaacactgaccaaagcaaggatagtttggtggatgtaccctttcctaattcataccagtacattgcagctgtggattacaaccccagggacaacctactttatgtatggaataactatcacgtcgtgaaatattctttggattttggacctctggatagtagatcagggcaggcacatcatggacaagtttcatacatttctccgccaattcaccttgactctgagctagaaagaccctctgttaaagatatctctaccacaggacctcttggcatgggaagcactaccaccagtaccacccttcggaccacaactttgagcccaggaaggagtaccaccccgtcagtgtcaggaagaagaaaccggagtactagtaccccatctccagctgtcgaggtacttgatgacatgaccacacaccttccatcagcatcgtcccaaatcccagctctcgaagagagctgtgaggctgtggaagcccgagaaatcatgtggtttaagactcgtcaaggacagatagcaaagcagccatgccctgcaggaactataggtgtatcaacttatctatgccttgctcctgatggaatttgggatccccaaggtccagatctcagcaactgttcttctccttgggtcaatcatataacacagaagttgaaatctggtgaaacagctgccaacattgctagagagctggctgaacagacaagaaatcacttgaatgctggggacatcacctactctgtccgggccatggaccagctggtaggcctcctagatgtacagcttcggaacttgaccccaggtggaaaagatagtgctgcccggagtttgaacaaggcaatggtcgagacagttaacaacctccttcagccacaagctttgaatgcatggagagacctgactacgagtgatcagctgcgtgcggccaccatgttgcttcatactgtggaggaaagtgcttttgtgctggctgataaccttttgaagactgacattgtcagggagaatacagacaatattaaattggaagttgcaagactgagcacagaaggaaacttagaagacctaaaatttccagaaaacatgggccatggaagcactatccagctgtctgcaaataccttaaagcaaaatggccgaaatggagagatcagagtggcctttgtcctgtataacaacttgggtccttatttatccacggagaatgccagtatgaagttgggaacggaagctttgtccacaaatcattctgttattgtcaattcccctgttattacggcagcaataaacaaagagttcagtaacaaggtttatttggctgatcctgtggtatttactgttaaacatatcaagcagtcagaggaaaatttcaaccctaactgttcattttggagctactccaagcgtacaatgacaggttattggtcaacacaaggctgtcggctcctgacaacaaataagacacatactacatgctcttgtaaccacctaacaaattttgcagtactgatggcacatgtggaagttaagcacagtgatgcggtccatgacctccttctggatgtgatcacgtgggttggaattttgctgtcccttgtttgtctcctgatttgcatcttcacattttgctttttccgggggctccagagtgaccgtaacaccatccacaagaacctctgcatcagtctctttgtagcagagctgctcttcctgattgggatcaaccgaactgaccaaccaattgcctgtgctgttttcgctgccctgttacatttcttcttcttggctgccttcacctggatgttcctggagggggtgcagctttatatcatgctggtggaggtttttgagagtgaacattcacgtaggaaatacttttatctggtcggctatgggatgcctgcactcattgtggctgtgtcagctgcagtagactacaggagttatggaacagataaagtatgttggctccgacttgacacctacttcatttggagttttataggaccagcaactttgataattatgcttaatgtaatcttccttgggattgctttatataaaatgtttcatcatactgctatactgaaacctgaatcaggctgtcttgataacatcaagtcatgggttataggtgcaatagctcttctctgcctattaggattgacctgggcctttggactcatgtatattaatgaaagcacagtcatcatggcctatctcttcaccattttcaattctctacagggaatgtttatatttattttccattgtgtcctacagaagaaggtacgaaaagagtatgggaaatgcctgcgaacacattgctgtagtggcaaaagtacagagagttccattggttcagggaaaacatctggttctcgaactcctggacgctactccacaggctcacagagccgaatccgtagaatgtggaatgacacggttcgaaagcagtcagagtcttcctttattactggagacataaacagttcagcgtcactcaacagagaggggcttctgaacaatgccagggatacaagtgtcatggatactctaccactgaatggtaaccatggcaatagttacagcattgccagcggcgaatacctgagcaactgtgtgcaaatcatagaccgtggctataaccataacgagaccgccctagagaaaaagattctgaaggaactcacttccaactatatcccttcttacctgaacaaccatgagcgctccagtgaacagaacaggaatctgatgaacaagctggtgaataaccttggcagtggaagggaagatgatgccattgtcctggatgatgccacctcgtttaaccacgaggagagtttgggcctggaactcattcatgaggaatctgatgctcctttgctgcccccaagagtatactccaccgagaaccaccagccacaccattataccagaaggcggatcccccaagaccacagtgagagctttttccctttgctaaccaacgagcacacagaagatctccagtcaccccatagagactctctctataccagcatgccgacactggctggtgtggccgccacagagagtgttaccaccagcacccagaccgaacccccaccggccaaatgtggtgatgccgaagatgtttactacaaaagcatgccaaacctaggctccagaaaccacgtccatcagctgcatacttactaccagctaggtcgcggcagcagtgatggatttatagttcctccaaacaaagatgggacccctcccgagggaagttcaaaaggaccggctcatttggtcactagtctatagaagatgacacagaaattggaaccaacaaaactgctaacaccttgttgactgttctgagttgatataagcagtggtaataatgtgtgtactcctaaatctttatgctgtcctctaaagacaaacacaaactctcagacttttttttttttaatgggatttttaggtcagcccaggggagaaagataactgctaaaattcccctgtaccccatcctttcttgtcctttccccttcagatggagacttcattatgttaatgaacaagatatgaagaaaatggcactcattgtggccttgttgaattatgttgtgtatgttttaacatctctgatgctgtgttactaaaattacaaggacctgctttttaaaaggccagaacaattgtctgaaattagtaacaatgctgcatctagattggagtgctgcacaaacaaacataagagcaaagcaaaactgtatcacatagggtttttggtcactcacaacctgaattcaccacagctggaatagctgtggaaaacaaaataaaacaacaaaattaataatgaaatggaggggaattctagaattatatgctaaatgcatattttatgatttgctgtattaactgatgataaaactaatggcagaaaaagaagttgagcaatttctatgtaatgtacagatactagcattgcacatatagtctgctttctgttcctccagaatttgagtcctgttaatgtagtagaaaaaaaaaaaagaaattttctttttcttttgtgctggtcttgcaagtttgtctaccagtaagagagcaaagtttccttcctttcttctctttcttcattttctttttttcttttttgccttttattcctttaaaatttcgcctggcaaaaaataaataaatggaactatcactttataagaatcattttctagtaatgcaaacaaattattttttacaaaaaaacaaaataaataaaattagacttccttccctcactatatatctttatgcagtcagaatatttccaacagtgttttttgcaaattagagcaggacaaacttttatgtttacagggcacgtctgttgtaatgcaaagcatatttggcaagcagttcatcaccaggacactagctatgattctagaagtcaaaaggtgtctatagaactagtggggcttctgcatgtgaaaaacggttttccataggcattaaagtgctgaatgctcagtctgatcaacaagtgggcacctgcactaccactttttagaggaaattcactccctcgtaagcattggaaggtcaaattattttgaagtgatttttttaaaaaaaagtcttctgtttattaacaggaaaatttatttatttgacaggattttgagtaatgtaggaatacaaaaggtaaattagcagcacatataatttttttttaatttatgatccattttgtatggtctcaaagttggatgacctcattactaatatttgttgtaaaagtgaaacttgtttgccaaccaataaacaactgattgagatttagaagatattgt

SEQ ID NO: 185381 - DNA, 6297 bp, Artificial Sequence
  derived and/or modified sequence
agaaagcggacaggagggcgacttttctccgtcaggctggaactggtgccgctggaggcgggagcgggctggaggacggacagggtctggaaatgtttaatttggtaaattggaggaaaaaaacatggatttttagcaattgaagagcaaattaaggtttcagatttgggatattggtgtttctgttttggagaaattattctttttctttttaatttgaagaaaaatcatcagtcttggaatacagaagagaaactagaaatatacgtattttgtttcacatttgaacagtcattcttgaggaatactccatacctgagtagacagccatgtggccatcgcagctactaattttcatgatgctcttagctccaataattcatgctttcagccgtgccccaattccaatggctgtggtccgcagagagctatcctgtgagagctatcctatagagcttcgctgtccaggaacagacgtcatcatgatagaaagtgccaactatggcaggactgatgacaaaatttgtgactctgaccctgctcagatggagaatatccgatgttatctgccagatgcctataagattatgtctcaaagatgcaataacagaacccagtgtgcagtggtggcaggtcctgatgtttttccagacccgtgtccaggaacctataaataccttgaagtgcagtatgaatgtgtcccttacaaagtggaacaaaaagtttttctttgtcctggactactaaaaggagtataccagagtgaacatttgtttgagtccgaccaccaatctggggcgtggtgcaaagaccctctgcaggcatctgacaagatttattatatgccctggactccctacagaactgataccctgactgagtattcatccaaggatgacttcattgctggaagaccaactacaacctacaagctccctcacagggtggatggcacaggatttgtagtgtatgatggagctttgttcttcaacaaagagcgcaccaggaacatagtaaagtttgatttgcggactaggataaagagtggagaggctatcatagcaaatgccaattaccatgatacctccccttaccgatggggaggcaaatctgacatagacctggcagtagatgagaatgggctatgggtaatctatgcaacagaacaaaacaatggtaaaattgtcattagtcaattgaacccttacaccctacggatcgaaggaacatgggatactgcatatgataaaaggtcagcttccaatgcctttatgatttgtggaattctgtatgtggtcaaatctgtatatgaggatgatgacaatgaggctactggaaataagattgactacatttacaacactgaccaaagcaaggatagtttggtggatgtaccctttcctaattcataccagtacattgcagctgtggattacaaccccagggacaacctactttatgtatggaataactatcacgtcgtgaaatattctttggattttggacctctggatagtagatcagggcaggcacatcatggacaagtttcatacatttctccgccaattcaccttgactctgagctagaaagaccctctgttaaagatatctctaccacaggacctcttggcatgggaagcactaccaccagtaccacccttcggaccacaactttgagcccaggaaggagtaccaccccgtcagtgtcaggaagaagaaaccggagtactagtaccccatctccagctgtcgaggtacttgatgacatgaccacacaccttccatcagcatcgtcccaaatcccagctctcgaagagagctgtgaggctgtggaagcccgagaaatcatgtggtttaagactcgtcaaggacagatagcaaagcagccatgccctgcaggaactataggtgtatcaacttatctatgccttgctcctgatggaatttgggatccccaaggtccagatctcagcaactgttcttctccttgggtcaatcatataacacagaagttgaaatctggtgaaacagctgccaacattgctagagagctggctgaacagacaagaaatcacttgaatgctggggacatcacctactctgtccgggccatggaccagctggtaggcctcctagatgtacagcttcggaacttgaccccaggtggaaaagatagtgctgcccggagtttgaacaagcttcagaaaagagagcgctcttgcagagcctatgtccaggcaatggtcgagacagttaacaacctccttcagccacaagctttgaatgcatggagagacctgactacgagtgatcagctgcgtgcggccaccatgttgcttcatactgtggaggaaagtgcttttgtgctggctgataaccttttgaagactgacattgtcagggagaatacagacaatattaaattggaagttgcaagactgagcacagaaggaaacttagaagacctaaaatttccagaaaacatgggccatggaagcactatccagctgtctgcaaataccttaaagcaaaatggccgaaatggagagatcagagtggcctttgtcctgtataacaacttgggtccttatttatccacggagaatgccagtatgaagttgggaacggaagctttgtccacaaatcattctgttattgtcaattcccctgttattacggcagcaataaacaaagagttcagtaacaaggtttatttggctgatcctgtggtatttactgttaaacatatcaagcagtcagaggaaaatttcaaccctaactgttcattttggagctactccaagcgtacaatgacaggttattggtcaacacaaggctgtcggctcctgacaacaaataagacacatactacatgctcttgtaaccacctaacaaattttgcagtactgatggcacatgtggaagttaagcacagtgatgcggtccatgacctccttctggatgtgatcacgtgggttggaattttgctgtcccttgtttgtctcctgatttgcatcttcacattttgctttttccgggggctccagagtgaccgtaacaccatccacaagaacctctgcatcagtctctttgtagcagagctgctcttcctgattgggatcaaccgaactgaccaaccaattgcctgtgctgttttcgctgccctgttacatttcttcttcttggctgccttcacctggatgttcctggagggggtgcagctttatatcatgctggtggaggtttttgagagtgaacattcacgtaggaaatacttttatctggtcggctatgggatgcctgcactcattgtggctgtgtcagctgcagtagactacaggagttatggaacagataaagtatgttggctccgacttgacacctacttcatttggagttttataggaccagcaactttgataattatgcttaatgtaatcttccttgggattgctttatataaaatgtttcatcatactgctatactgaaacctgaatcaggctgtcttgataacatcaactatgaggataacagacccttcatcaagtcatgggttataggtgcaatagctcttctctgcctattaggattgacctgggcctttggactcatgtatattaatgaaagcacagtcatcatggcctatctcttcaccattttcaattctctacagggaatgtttatatttattttccattgtgtcctacagaagaaggtacgaaaagagtatgggaaatgcctgcgaacacattgctgtagtggcaaaagtacagagagttccattggttcagggaaaacatctggttctcgaactcctggacgctactccacaggctcacagagccgaatccgtagaatgtggaatgacacggttcgaaagcagtcagagtcttcctttattactggagacataaacagttcagcgtcactcaacagagaggggcttctgaacaatgccagggatacaagtgtcatggatactctaccactgaatggtaaccatggcaatagttacagcattgccagcggcgaatacctgagcaactgtgtgcaaatcatagaccgtggctataaccataacgagaccgccctagagaaaaagattctgaaggaactcacttccaactatatcccttcttacctgaacaaccatgagcgctccagtgaacagaacaggaatctgatgaacaagctggtgaataaccttggcagtggaagggaagatgatgccattgtcctggatgatgccacctcgtttaaccacgaggagagtttgggcctggaactcattcatgaggaatctgatgctcctttgctgcccccaagagtatactccaccgagaaccaccagccacaccattataccagaaggcggatcccccaagaccacagtgagagctttttccctttgctaaccaacgagcacacagaagatctccagtcaccccatagagactctctctataccagcatgccgacactggctggtgtggccgccacagagagtgttaccaccagcacccagaccgaacccccaccggccaaatgtggtgatgccgaagatgtttactacaaaagcatgccaaacctaggctccagaaaccacgtccatcagctgcatacttactaccagctaggtcgcggcagcagtgatggatttatagttcctccaaacaaagatgggacccctcccgagggaagttcaaaaggaccggctcatttggtcactagtctatagaagatgacacagaaattggaaccaacaaaactgctaacaccttgttgactgttctgagttgatataagcagtggtaataatgtgtgtactcctaaatctttatgctgtcctctaaagacaaacacaaactctcagacttttttttttttaatgggatttttaggtcagcccaggggagaaagataactgctaaaattcccctgtaccccatcctttcttgtcctttccccttcagatggagacttcattatgttaatgaacaagatatgaagaaaatggcactcattgtggccttgttgaattatgttgtgtatgttttaacatctctgatgctgtgttactaaaattacaaggacctgctttttaaaaggccagaacaattgtctgaaattagtaacaatgctgcatctagattggagtgctgcacaaacaaacataagagcaaagcaaaactgtatcacatagggtttttggtcactcacaacctgaattcaccacagctggaatagctgtggaaaacaaaataaaacaacaaaattaataatgaaatggaggggaattctagaattatatgctaaatgcatattttatgatttgctgtattaactgatgataaaactaatggcagaaaaagaagttgagcaatttctatgtaatgtacagatactagcattgcacatatagtctgctttctgttcctccagaatttgagtcctgttaatgtagtagaaaaaaaaaaaagaaattttctttttcttttgtgctggtcttgcaagtttgtctaccagtaagagagcaaagtttccttcctttcttctctttcttcattttctttttttcttttttgccttttattcctttaaaatttcgcctggcaaaaaataaataaatggaactatcactttataagaatcattttctagtaatgcaaacaaattattttttacaaaaaaacaaaataaataaaattagacttccttccctcactatatatctttatgcagtcagaatatttccaacagtgttttttgcaaattagagcaggacaaacttttatgtttacagggcacgtctgttgtaatgcaaagcatatttggcaagcagttcatcaccaggacactagctatgattctagaagtcaaaaggtgtctatagaactagtggggcttctgcatgtgaaaaacggttttccataggcattaaagtgctgaatgctcagtctgatcaacaagtgggcacctgcactaccactttttagaggaaattcactccctcgtaagcattggaaggtcaaattattttgaagtgatttttttaaaaaaaagtcttctgtttattaacaggaaaatttatttatttgacaggattttgagtaatgtaggaatacaaaaggtaaattagcagcacatataatttttttttaatttatgatccattttgtatggtctcaaagttggatgacctcattactaatatttgttgtaaaagtgaaacttgtttgccaaccaataaacaactgattgagatttagaagatattgtattgatgtatgtactat

SEQ ID NO: 185382 - DNA, 2297 bp, Artificial Sequence
  derived and/or modified sequence
gtttcagatttgggatattggtgtttctgttttggagaaattattctttttctttttaatttgaagaaaaatcatcagtcttggaatacagaagagaaactagaaatatacgtattttgtttcacatttgaacagtcattcttgaggaatactccatacctgagtagacagccatgtggccatcgcagctactaattttcatgatgctcttagctccaataattcatgctttcagccgtgccccaattccaatggctgtggtccgcagagagctatcctgtgagagctatcctatagagcttcgctgtccaggaacagacgtcatcatgatagaaagtgccaactatggcaggactgatgacaaaatttgtgactctgaccctgctcagatggagaatatccgatgttatctgccagatgcctataagattatgtctcaaagatgcaataacagaacccagtgtgcagtggtggcaggtcctgatgtttttccagacccgtgtccaggaacctataaataccttgaagtgcagtatgaatgtgtcccttacagagtagaccagaaagtttttctttgtcctggactactaaaaggagtataccagagtgaacatttgtttgagtccgaccaccaatctggggcgtggtgcaaagaccctctgcaggcatctgacaagatttattatatgccctggactccctacagaactgataccctgactgagtattcatccaaggatgacttcattgctggaagaccaactacaacctacaagctccctcacagggtggatggcacaggatttgtagtgtatgatggagctttgttcttcaacaaagagcgcaccaggaacatagtaaagtttgatttgcggactaggataaagagtggagaggctatcatagcaaatgccaattaccatgatacctccccttaccgatggggaggcaaatctgacatagacctggcagtagatgagaatgggctatgggtaatctatgcaacagaacaaaacaatggtaaaattgtcattagtcaattgaacccttacaccctacggatcgaaggaacatgggatactgcatatgataaaaggtcagcttccaatgcctttatgatttgtggaattctgtatgtggtcaaatctgtatatgaggatgatgacaatgaggctactggaaataagattgactacatttacaacactgaccaaagcaaggatagtttggtggatgtaccctttcctaattcataccagtacattgcagctgtggattacaaccccagggacaacctactttatgtatggaataactatcacgtcgtgaaatattctttggattttggacctctggatagtagatcagggcaggcacatcatggacaagtttcatacatttctccgccaattcaccttgactctgagctagaaagaccctctgttaaagatatctctaccacaggacctcttggcatgggaagcactaccaccagtaccacccttcggaccacaactttgagcccaggaaggagtaccaccccgtcagtgtcaggaagaagaaaccggagtactagtaccccatctccagctgtcgaggtacttgatgacatgaccacacaccttccatcagcatcgtcccaaatcccagctctcgaagagagctgtgaggctgtggaagcccgagaaatcatgtggtttaagactcgtcaaggacagatagcaaagcagccatgccctgcaggaactataggtgtatcaacttatctatgccttgctcctgatggaatttgggatccccaaggtccagatctcagcaactgttcttctccttgggtcaatcatataacacagaagttgaaatctggtgaaacagctgccaacattgctagagagctggctgaacagacaagaaatcacttgaatgctggggacatcacctactctgtccgggccatggaccagctggtaggcctcctagatgtacagcttcggaacttgaccccaggtggaaaagatagtgctgcccggagtttgaacaaggcaatggtcgagacagttaacaacctccttcagccacaagctttgaatgcatggagagacctgactacgagtgatcagctgcgtgcggccaccatgttgcttcatactgtggaggaaagtgcttttgtgctggtcttgcaagtttgtctaccagtaagagagcaaagtttccttcctttcttctctttcttcattttctttttttcttttttgccttttattcctttaaaatttcgcctggcaaaaaataaataa

SEQ ID NO: 185383 - DNA, 6124 bp, Artificial Sequence
  derived and/or modified sequence
gtttcagatttgggatattggtgtttctgttttggagaaattattctttttctttttaatttgaagaaaaatcatcagtcttggaatacagaagagaaactagaaatatacgtattttgtttcacatttgaacagtcattcttgaggaatactccatacctgagtagacagccatgtggccatcgcagctactaattttcatgatgctcttagctccaataattcatgctttcagccgtgccccaattccaatggctgtggtccgcagagagctatcctgtgagagctatcctatagagcttcgctgtccaggaacagacgtcatcatgatagaaagtgccaactatggcaggactgatgacaaaatttgtgactctgaccctgctcagatggagaatatccgatgttatctgccagatgcctataagattatgtctcaaagatgcaataacagaacccagtgtgcagtggtggcaggtcctgatgtttttccagacccgtgtccaggaacctataaataccttgaagtgcagtatgaatgtgtcccttacaaagtggaacaaaaagtttttctttgtcctggactactaaaaggagtataccagagtgaacatttgtttgagtccgaccaccaatctggggcgtggtgcaaagaccctctgcaggcatctgacaagatttattatatgccctggactccctacagaactgataccctgactgagtattcatccaaggatgacttcattgctggaagaccaactacaacctacaagctccctcacagggtggatggcacaggatttgtagtgtatgatggagctttgttcttcaacaaagagcgcaccaggaacatagtaaagtttgatttgcggactaggataaagagtggagaggctatcatagcaaatgccaattaccatgatacctccccttaccgatggggaggcaaatctgacatagacctggcagtagatgagaatgggctatgggtaatctatgcaacagaacaaaacaatggtaaaattgtcattagtcaattgaacccttacaccctacggatcgaaggaacatgggatactgcatatgataaaaggtcagcttccaatgcctttatgatttgtggaattctgtatgtggtcaaatctgtatatgaggatgatgacaatgaggctactggaaataagattgactacatttacaacactgaccaaagcaaggatagtttggtggatgtaccctttcctaattcataccagtacattgcagctgtggattacaaccccagggacaacctactttatgtatggaataactatcacgtcgtgaaatattctttggattttggacctctggatagtagatcagggcaggcacatcatggacaagtttcatacatttctccgccaattcaccttgactctgagctagaaagaccctctgttaaagatatctctaccacaggacctcttggcatgggaagcactaccaccagtaccacccttcggaccacaactttgagcccaggaaggagtaccaccccgtcagtgtcaggaagaagaaaccggagtactagtaccccatctccagctgtcgaggtacttgatgacatgaccacacaccttccatcagcatcgtcccaaatcccagctctcgaagagagctgtgaggctgtggaagcccgagaaatcatgtggtttaagactcgtcaaggacagatagcaaagcagccatgccctgcaggaactataggtgtatcaacttatctatgccttgctcctgatggaatttgggatccccaaggtccagatctcagcaactgttcttctccttgggtcaatcatataacacagaagttgaaatctggtgaaacagctgccaacattgctagagagctggctgaacagacaagaaatcacttgaatgctggggacatcacctactctgtccgggccatggaccagctggtaggcctcctagatgtacagcttcggaacttgaccccaggtggaaaagatagtgctgcccggagtttgaacaagcttcagaaaagagagcgctcttgcagagcctatgtccaggcaatggtcgagacagttaacaacctccttcagccacaagctttgaatgcatggagagacctgactacgagtgatcagctgcgtgcggccaccatgttgcttcatactgtggaggaaagtgcttttgtgctggctgataaccttttgaagactgacattgtcagggagaatacagacaatattaaattggaagttgcaagactgagcacagaaggaaacttagaagacctaaaatttccagaaaacatgggccatggaagcactatccagctgtctgcaaataccttaaagcaaaatggccgaaatggagagatcagagtggcctttgtcctgtataacaacttgggtccttatttatccacggagaatgccagtatgaagttgggaacggaagctttgtccacaaatcattctgttattgtcaattcccctgttattacggcagcaataaacaaagagttcagtaacaaggtttatttggctgatcctgtggtatttactgttaaacatatcaagcagtcagaggaaaatttcaaccctaactgttcattttggagctactccaagcgtacaatgacaggttattggtcaacacaaggctgtcggctcctgacaacaaataagacacatactacatgctcttgtaaccacctaacaaattttgcagtactgatggcacatgtggaagttaagcacagtgatgcggtccatgacctccttctggatgtgatcacgtgggttggaattttgctgtcccttgtttgtctcctgatttgcatcttcacattttgctttttccgggggctccagagtgaccgtaacaccatccacaagaacctctgcatcagtctctttgtagcagagctgctcttcctgattgggatcaaccgaactgaccaaccaattgcctgtgctgttttcgctgccctgttacatttcttcttcttggctgccttcacctggatgttcctggagggggtgcagctttatatcatgctggtggaggtttttgagagtgaacattcacgtaggaaatacttttatctggtcggctatgggatgcctgcactcattgtggctgtgtcagctgcagtagactacaggagttatggaacagataaagtatgttggctccgacttgacacctacttcatttggagttttataggaccagcaactttgataattatgcttaatgtaatcttccttgggattgctttatataaaatgtttcatcatactgctatactgaaacctgaatcaggctgtcttgataacatcaactatgaggataacagacccttcatcaagtcatgggttataggtgcaatagctcttctctgcctattaggattgacctgggcctttggactcatgtatattaatgaaagcacagtcatcatggcctatctcttcaccattttcaattctctacagggaatgtttatatttattttccattgtgtcctacagaagaaggtacgaaaagagtatgggaaatgcctgcgaacacattgctgtagtggcaaaagtacagagagttccattggttcagggaaaacatctggttctcgaactcctggacgctactccacaggctcacagagccgaatccgtagaatgtggaatgacacggttcgaaagcagtcagagtcttcctttattactggagacataaacagttcagcgtcactcaacagagaggggcttctgaacaatgccagggatacaagtgtcatggatactctaccactgaatggtaaccatggcaatagttacagcattgccagcggcgaatacctgagcaactgtgtgcaaatcatagaccgtggctataaccataacgagaccgccctagagaaaaagattctgaaggaactcacttccaactatatcccttcttacctgaacaaccatgagcgctccagtgaacagaacaggaatctgatgaacaagctggtgaataaccttggcagtggaagggaagatgatgccattgtcctggatgatgccacctcgtttaaccacgaggagagtttgggcctggaactcattcatgaggaatctgatgctcctttgctgcccccaagagtatactccaccgagaaccaccagccacaccattataccagaaggcggatcccccaagaccacagtgagagctttttccctttgctaaccaacgagcacacagaagatctccagtcaccccatagagactctctctataccagcatgccgacactggctggtgtggccgccacagagagtgttaccaccagcacccagaccgaacccccaccggccaaatgtggtgatgccgaagatgtttactacaaaagcatgccaaacctaggctccagaaaccacgtccatcagctgcatacttactaccagctaggtcgcggcagcagtgatggatttatagttcctccaaacaaagatgggacccctcccgagggaagttcaaaaggaccggctcatttggtcactagtctatagaagatgacacagaaattggaaccaacaaaactgctaacaccttgttgactgttctgagttgatataagcagtggtaataatgtgtgtactcctaaatctttatgctgtcctctaaagacaaacacaaactctcagacttttttttttttaatgggatttttaggtcagcccaggggagaaagataactgctaaaattcccctgtaccccatcctttcttgtcctttccccttcagatggagacttcattatgttaatgaacaagatatgaagaaaatggcactcattgtggccttgttgaattatgttgtgtatgttttaacatctctgatgctgtgttactaaaattacaaggacctgctttttaaaaggccagaacaattgtctgaaattagtaacaatgctgcatctagattggagtgctgcacaaacaaacataagagcaaagcaaaactgtatcacatagggtttttggtcactcacaacctgaattcaccacagctggaatagctgtggaaaacaaaataaaacaacaaaattaataatgaaatggaggggaattctagaattatatgctaaatgcatattttatgatttgctgtattaactgatgataaaactaatggcagaaaaagaagttgagcaatttctatgtaatgtacagatactagcattgcacatatagtctgctttctgttcctccagaatttgagtcctgttaatgtagtagaaaaaaaaaaaagaaattttctttttcttttgtgctggtcttgcaagtttgtctaccagtaagagagcaaagtttccttcctttcttctctttcttcattttctttttttcttttttgccttttattcctttaaaatttcgcctggcaaaaaataaataaatggaactatcactttataagaatcattttctagtaatgcaaacaaattattttttacaaaaaaacaaaataaataaaattagacttccttccctcactatatatctttatgcagtcagaatatttccaacagtgttttttgcaaattagagcaggacaaacttttatgtttacagggcacgtctgttgtaatgcaaagcatatttggcaagcagttcatcaccaggacactagctatgattctagaagtcaaaaggtgtctatagaactagtggggcttctgcatgtgaaaaacggttttccataggcattaaagtgctgaatgctcagtctgatcaacaagtgggcacctgcactaccactttttagaggaaattcactccctcgtaagcattggaaggtcaaattattttgaagtgatttttttaaaaaaaagtcttctgtttattaacaggaaaatttatttatttgacaggattttgagtaatgtaggaatacaaaaggtaaattagcagcacatataatttttttttaatttatgatccattttgtatggtctcaaagttggatgacctcattactaatatttgttgtaaaagtgaaacttgtttgccaaccaataaacaactgattgagatttagaagatattgt

SEQ ID NO: 185384 - DNA, 4344 bp, Artificial Sequence
  derived and/or modified sequence
atgtggcccagccagctgctgatcttcatgatgctgctggcccccatcatccacgccttcagccgggcccccatccccatggctgtggtgagaagagagctgagctgtgagagctaccccatcgagctgcgctgccccggcacagatgtgatcatgattgaaagtgccaactacggccgcacagatgacaagatctgtgacagcgaccctgcccagatggagaacatccgctgctacctgcctgatgcctacaagatcatgagccagcgctgcaacaacagaacccagtgtgctgtggtggccggcccagatgtgtttcctgacccctgccccggcacctacaagtacctggaggtgcagtatgaatgtgtgccctacagagtggaccagaaggtgttcctgtgccccggcctgctgaagggcgtgtaccagagcgagcacctgtttgaaagtgaccaccagagcggggcctggtgcaaggaccccctgcaggccagtgacaagatctactacatgccctggaccccctacagaacagacaccctgacagagtacagcagcaaggatgacttcatcgccggccggcccaccaccacctacaagctgccccaccgggtggatggcactggatttgtggtgtatgatggagccctcttcttcaacaaggagaggaccaggaacatcgtgaagtttgacctgcggacccgcatcaagtctggagaggccatcatcgccaatgccaactaccatgacaccagcccctaccgctggggcggcaagagtgacatcgacctggccgtggatgaaaatggcctgtgggtgatctatgccacagagcagaacaacgggaagatcgtcatcagccagctgaacccctacaccctgagaattgagggcacctgggacacagcctatgacaagaggtctgccagcaatgccttcatgatctgtggcatcctgtatgtggtgaagtctgtgtatgaagatgatgacaatgaggccactggaaacaagattgactacatctacaacacagaccagagcaaggacagcctggtggatgtgcccttccccaacagctaccagtacatcgctgctgtggactacaacccccgggacaacctgctgtatgtgtggaacaactaccacgtggtgaagtacagcctggactttggccccctggacagccgcagcggccaggcccaccacggccaggtgtcctacatcagcccccccatccacctggacagcgagctggagcggcccagcgtgaaggacatcagcaccaccggccccctgggcatgggcagcaccaccaccagcaccaccctgcggaccaccaccctgagccctggccgcagcaccacccccagcgtgtctggaagaagaaacagaagcaccagcacccccagccctgctgtggaggtgctggatgacatgaccacccacctgcccagcgccagcagccagatcccagccctggaggagagctgtgaggccgtggaggcccgggagatcatgtggttcaagacccggcagggccagatcgccaagcagccctgcccagctggcaccatcggcgtgtccacctacctgtgcctggccccagatggcatctgggacccccagggccctgacctgagcaactgcagcagcccctgggtgaaccacatcacccagaagctgaagagcggggagacagctgccaacatcgcccgggagctggccgagcagaccaggaaccacctgaatgctggggacatcacctacagcgtgcgggccatggaccagctggtgggcctgctggatgtgcagctgaggaacctgaccccaggcggcaaggacagcgctgcccggagcctgaacaaggccatggtggagaccgtgaacaacctgctgcagccccaggccctgaatgcctggagggacctgaccaccagtgaccagctgcgggccgccaccatgctgctgcacacagtggaggagagcgcctttgtgctggccgacaacctgctgaagacagacatcgtgagagaaaatacagacaacatcaagctggaggtggcccggctgagcacagagggcaacctggaggacctgaagtttcctgagaacatgggccacggcagcaccatccagctgagcgccaacaccctgaagcagaatggaagaaatggagagatccgggtggcctttgtgctgtacaacaacctgggcccctacctgagcacagaaaatgcctccatgaagctgggcacagaggccctgagcaccaaccacagcgtgattgtgaacagccctgtgatcacagctgccatcaacaaggagttcagcaacaaggtgtacctggccgaccctgtggtgttcaccgtgaagcacatcaagcagagcgaggagaacttcaaccccaactgcagcttctggagctacagcaagaggaccatgacaggctactggagcacccagggctgccgcctgctgaccaccaacaagacccacaccacctgcagctgcaaccacctgaccaactttgctgtgctgatggcccacgtggaggtgaagcacagtgatgctgtgcatgacctgctgctggatgtgatcacctgggtgggcatcctgctgagcctggtgtgcctgctgatctgcatcttcaccttctgcttcttccggggcctgcagagcgacaggaacaccatccacaagaacctgtgcatcagcctgtttgtggccgagctgctcttcctgattggcatcaacagaacagaccagcccatcgcctgtgctgtgtttgctgccctgctgcacttcttcttcctggccgccttcacctggatgttcctggagggcgtgcagctgtacatcatgctggtggaggtgtttgagagcgagcacagcaggaggaagtacttctacctggtgggctacggcatgcctgccctgattgtggccgtgtctgctgctgtggactaccgctcctatggaacagacaaggtgtgctggctgcggctggacacctacttcatctggagcttcatcggccctgccaccctcatcatcatgctgaatgtcatcttcctgggcatcgccctgtacaagatgttccaccacacagccatcctgaagccagagagcggctgcctggacaacatcaagtcctgggtgattggagccatcgccctgctgtgcctgctgggcctgacctgggccttcggcctgatgtacatcaatgaaagcaccgtcatcatggcctacctgttcaccatcttcaacagcctgcagggcatgttcatcttcatcttccactgtgtgctgcagaagaaggtgaggaaggagtatggcaagtgcctgcggacccactgctgcagcggcaagagcacagagagcagcatcggcagcggcaagaccagcggcagcaggaccccaggccgctacagcacaggcagccagagccgcatccggaggatgtggaatgacacagtgaggaagcagagcgagagcagcttcatcaccggggacatcaacagcagcgccagcctgaaccgggagggcctgctgaacaatgcccgggacacctctgtgatggacaccctgcccctgaatggaaatcatggcaacagctacagcatcgccagcggggagtacctgagcaactgtgtgcagatcatcgaccggggctacaaccacaatgaaacagccctggagaagaagatcctgaaggagctgaccagcaactacatccccagctacctgaacaaccacgagaggagcagcgagcagaacagaaacctgatgaacaagctggtgaacaacctgggcagcggccgggaggatgatgccatcgtgctggatgatgccaccagcttcaaccacgaggagagcctgggcctggagctgatccacgaggagagtgatgcccccctgctgcccccccgggtgtacagcacagagaaccaccagccccaccactacacccggcggcgcatcccccaggaccacagcgagagcttcttccccctgctgaccaatgagcacacagaggacctgcagagcccccaccgggacagcctgtacacctccatgcccaccctggccggcgtggccgccacagaatctgtgaccaccagcacccagacagagcccccaccagccaagtgtggagatgctgaagatgtgtactacaagtccatgcccaacctgggcagcaggaaccacgtgcaccagctgcacacctactaccagctgggccggggcagcagtgatggcttcatcgtgccccccaacaaggatggcaccccacctgagggcagcagcaagggccctgcccacctggtgaccagcctgtag

SEQ ID NO: 185385 - DNA, 4410 bp, Artificial Sequence
  derived and/or modified sequence
atgtggcccagccagctgctgatcttcatgatgctgctggcccccatcatccacgccttcagccgggcccccatccccatggctgtggtgagaagagagctgagctgtgagagctaccccatcgagctgcgctgccccggcacagatgtgatcatgattgaaagtgccaactacggccgcacagatgacaagatctgtgacagcgaccctgcccagatggagaacatccgctgctacctgcctgatgcctacaagatcatgagccagcgctgcaacaacagaacccagtgtgctgtggtggccggcccagatgtgtttcctgacccctgccccggcacctacaagtacctggaggtgcagtatgaatgtgtgccctacaaggtggagcagaaggtgttcctgtgccccggcctgctgaagggcgtgtaccagagcgagcacctgtttgaaagtgaccaccagagcggggcctggtgcaaggaccccctgcaggccagtgacaagatctactacatgccctggaccccctacagaacagacaccctgacagagtacagcagcaaggatgacttcatcgccggccggcccaccaccacctacaagctgccccaccgggtggatggcactggatttgtggtgtatgatggagccctcttcttcaacaaggagaggaccaggaacatcgtgaagtttgacctgcggacccgcatcaagtctggagaggccatcatcgccaatgccaactaccatgacaccagcccctaccgctggggcggcaagagtgacatcgacctggccgtggatgaaaatggcctgtgggtgatctatgccacagagcagaacaacgggaagatcgtcatcagccagctgaacccctacaccctgagaattgagggcacctgggacacagcctatgacaagaggtctgccagcaatgccttcatgatctgtggcatcctgtatgtggtgaagtctgtgtatgaagatgatgacaatgaggccactggaaacaagattgactacatctacaacacagaccagagcaaggacagcctggtggatgtgcccttccccaacagctaccagtacatcgctgctgtggactacaacccccgggacaacctgctgtatgtgtggaacaactaccacgtggtgaagtacagcctggactttggccccctggacagccgcagcggccaggcccaccacggccaggtgtcctacatcagcccccccatccacctggacagcgagctggagcggcccagcgtgaaggacatcagcaccaccggccccctgggcatgggcagcaccaccaccagcaccaccctgcggaccaccaccctgagccctggccgcagcaccacccccagcgtgtctggaagaagaaacagaagcaccagcacccccagccctgctgtggaggtgctggatgacatgaccacccacctgcccagcgccagcagccagatcccagccctggaggagagctgtgaggccgtggaggcccgggagatcatgtggttcaagacccggcagggccagatcgccaagcagccctgcccagctggcaccatcggcgtgtccacctacctgtgcctggccccagatggcatctgggacccccagggccctgacctgagcaactgcagcagcccctgggtgaaccacatcacccagaagctgaagagcggggagacagctgccaacatcgcccgggagctggccgagcagaccaggaaccacctgaatgctggggacatcacctacagcgtgcgggccatggaccagctggtgggcctgctggatgtgcagctgaggaacctgaccccaggcggcaaggacagcgctgcccggagcctgaacaagctgcagaagcgggagaggagctgccgggcctacgtgcaggccatggtggagaccgtgaacaacctgctgcagccccaggccctgaatgcctggagggacctgaccaccagtgaccagctgcgggccgccaccatgctgctgcacacagtggaggagagcgcctttgtgctggccgacaacctgctgaagacagacatcgtgcgggagaacacagacaacatcaagctggaggtggcccggctgagcacagagggcaacctggaggacctgaagtttcctgagaacatgggccacggcagcaccatccagctgagcgccaacaccctgaagcagaatggaagaaatggagagatccgggtggcctttgtgctgtacaacaacctgggcccctacctgagcacagaaaatgcctccatgaagctgggcacagaggccctgagcaccaaccacagcgtcatcgtgaacagccctgtgatcacagctgccatcaacaaggagttcagcaacaaggtgtacctggccgaccctgtggtgttcaccgtgaagcacatcaagcagagcgaggagaacttcaaccccaactgcagcttctggagctacagcaagaggaccatgacaggctactggagcacccagggctgccgcctgctgaccaccaacaagacccacaccacctgcagctgcaaccacctgaccaactttgctgtgctgatggcccacgtggaggtgaagcacagtgatgctgtgcatgacctgctgctggatgtgatcacctgggtgggcatcctgctgagcctggtgtgcctgctgatctgcatcttcaccttctgcttcttccggggcctgcagagcgacaggaacaccatccacaagaacctgtgcatcagcctgtttgtggccgagctgctcttcctgattggcatcaacagaacagaccagcccatcgcctgtgctgtgtttgctgccctgctgcacttcttcttcctggccgccttcacctggatgttcctggagggcgtgcagctgtacatcatgctggtggaggtgtttgaaagtgagcacagcaggaggaagtacttctacctggtgggctacggcatgcctgccctgattgtggccgtgtctgctgctgtggactaccgctcctatggaacagacaaggtgtgctggctgcggctggacacctacttcatctggagcttcatcggccctgccaccctcatcatcatgctgaatgtcatcttcctgggcatcgccctgtacaagatgttccaccacacagccatcctgaagccagagagcggctgcctggacaacatcaactatgaggacaaccggcccttcatcaagtcctgggtgattggagccatcgccctgctgtgcctgctgggcctgacctgggccttcggcctgatgtacatcaatgaaagcaccgtcatcatggcctacctgttcaccatcttcaacagcctgcagggcatgttcatcttcatcttccactgtgtgctgcagaagaaggtgaggaaggagtatggcaagtgcctgcggacccactgctgcagcggcaagagcacagagagcagcatcggcagcggcaagaccagcggcagcaggaccccaggccgctacagcacaggcagccagagccgcatccggaggatgtggaatgacacagtgaggaagcagagcgagagcagcttcatcaccggggacatcaacagcagcgccagcctgaaccgggagggcctgctgaacaatgcccgggacacctctgtgatggacaccctgcccctgaatggaaatcatggcaacagctacagcatcgccagcggggagtacctgagcaactgtgtgcagatcatcgaccggggctacaaccacaatgaaacagccctggagaagaagatcctgaaggagctgaccagcaactacatccccagctacctgaacaaccacgagaggagcagcgagcagaacagaaacctgatgaacaagctggtgaacaacctgggcagcggccgggaggatgatgccatcgtgctggatgatgccaccagcttcaaccacgaggagagcctgggcctggagctgatccacgaggagagtgatgcccccctgctgcccccccgggtgtacagcacagagaaccaccagccccaccactacacccggcggcgcatcccccaggaccacagcgagagcttcttccccctgctgaccaatgagcacacagaggacctgcagagcccccaccgggacagcctgtacacctccatgcccaccctggccggcgtggccgccacagaatctgtgaccaccagcacccagacagagcccccaccagccaagtgtggagatgctgaagatgtgtactacaagtccatgcccaacctgggcagcaggaaccacgtgcaccagctgcacacctactaccagctgggccggggcagcagtgatggcttcatcgtgccccccaacaaggatggcaccccacctgagggcagcagcaagggccctgcccacctggtgaccagcctgtag

SEQ ID NO: 185386 - DNA, 2124 bp, Artificial Sequence
  derived and/or modified sequence
atgtggcccagccagctgctgatcttcatgatgctgctggcccccatcatccacgccttcagccgggcccccatccccatggctgtggtgagaagagagctgagctgtgagagctaccccatcgagctgcgctgccccggcacagatgtgatcatgattgaaagtgccaactacggccgcacagatgacaagatctgtgacagcgaccctgcccagatggagaacatccgctgctacctgcctgatgcctacaagatcatgagccagcgctgcaacaacagaacccagtgtgctgtggtggccggcccagatgtgtttcctgacccctgccccggcacctacaagtacctggaggtgcagtatgaatgtgtgccctacagagtggaccagaaggtgttcctgtgccccggcctgctgaagggcgtgtaccagagcgagcacctgtttgaaagtgaccaccagagcggggcctggtgcaaggaccccctgcaggccagtgacaagatctactacatgccctggaccccctacagaacagacaccctgacagagtacagcagcaaggatgacttcatcgccggccggcccaccaccacctacaagctgccccaccgggtggatggcactggatttgtggtgtatgatggagccctcttcttcaacaaggagaggaccaggaacatcgtgaagtttgacctgcggacccgcatcaagtctggagaggccatcatcgccaatgccaactaccatgacaccagcccctaccgctggggcggcaagagtgacatcgacctggccgtggatgaaaatggcctgtgggtgatctatgccacagagcagaacaacgggaagatcgtcatcagccagctgaacccctacaccctgagaattgagggcacctgggacacagcctatgacaagaggtctgccagcaatgccttcatgatctgtggcatcctgtatgtggtgaagtctgtgtatgaagatgatgacaatgaggccactggaaacaagattgactacatctacaacacagaccagagcaaggacagcctggtggatgtgcccttccccaacagctaccagtacatcgctgctgtggactacaacccccgggacaacctgctgtatgtgtggaacaactaccacgtggtgaagtacagcctggactttggccccctggacagccgcagcggccaggcccaccacggccaggtgtcctacatcagcccccccatccacctggacagcgagctggagcggcccagcgtgaaggacatcagcaccaccggccccctgggcatgggcagcaccaccaccagcaccaccctgcggaccaccaccctgagccctggccgcagcaccacccccagcgtgtctggaagaagaaacagaagcaccagcacccccagccctgctgtggaggtgctggatgacatgaccacccacctgcccagcgccagcagccagatcccagccctggaggagagctgtgaggccgtggaggcccgggagatcatgtggttcaagacccggcagggccagatcgccaagcagccctgcccagctggcaccatcggcgtgtccacctacctgtgcctggccccagatggcatctgggacccccagggccctgacctgagcaactgcagcagcccctgggtgaaccacatcacccagaagctgaagagcggggagacagctgccaacatcgcccgggagctggccgagcagaccaggaaccacctgaatgctggggacatcacctacagcgtgcgggccatggaccagctggtgggcctgctggatgtgcagctgaggaacctgaccccaggcggcaaggacagcgctgcccggagcctgaacaaggccatggtggagaccgtgaacaacctgctgcagccccaggccctgaatgcctggagggacctgaccaccagtgaccagctgcgggccgccaccatgctgctgcacacagtggaggagagcgcctttgtgctggtgctgcaggtgtgcctgcctgtgcgggagcagagcttcctgcccttcttctccttcttcatcttcttcttctccttcctgcccttcatccccctgaagttccggctggccaagaacaagtag

SEQ ID NO: 185387 - DNA, 4344 bp, Artificial Sequence
  derived and/or modified sequence
atgtggcccagccagctgctgatcttcatgatgctgctggcccccatcattcacgcattttcgagggctcctatcccaatggccgtggtgaggcgggaattgtcttgtgaaagctaccctatagaattgaggtgtccgggaactgatgtgatcatgatcgagtcagctaactacggacgcactgatgacaaaatctgtgactccgaccccgctcagatggaaaatatccggtgttacctgccggacgcctacaaaatcatgtcccaacggtgtaataacaggacccagtgtgcggttgtggccggacccgacgtgtttcccgacccctgccctggcacttataaatatctggaggtgcagtacgagtgcgtgccttatcgcgttgaccaaaaggtttttttatgcccaggactcctaaaaggagtttaccagagtgaacatcttttcgagagcgaccatcagagcggggcctggtgtaaagacccactgcaggcgagcgataaaatctactatatgccctggaccccttatcgaacagatacccttacagaatacagctctaaagacgatttcattgccggaagacctactacaacatataagctgccacatcgggttgacgggacgggtttcgtcgtttacgacggagctctattttttaataaagagagaactagaaatattgtgaagttcgacctgcgtactcgcattaagtccggtgaggccataattgctaacgcgaactatcatgacacgagcccatatcggtggggaggaaagagcgatatcgacctggcggtggacgagaatggactgtgggtgatatatgcaacagagcagaataatggcaagattgtcattagccagctgaacccttacactctgaggatcgaaggtacatgggataccgcgtacgacaagcgtagtgcttctaacgccttcatgatatgtgggattttgtatgtggttaaatctgtgtatgaagatgacgacaacgaagccaccggaaataagatcgactacatttacaacaccgaccaaagtaaagattccttagtcgacgtgcctttcccaaactcttaccagtatatagcagccgtggactataatccacgggataatctcctttatgtttggaacaattaccacgtggtcaaatactccttggacttcggccccctcgacagcagaagtggacaggcacatcacggacaggtctcgtatatttccccacccatacatctggacagtgagctcgaacgtccttctgtaaaggacatttccacgacaggcccattgggcatgggaagtaccactacctccacaacattacggaccaccacactgtcaccaggcagaagtaccacaccctcagtttctggacgtcggaacagaagtacctcaacgccaagccccgcggtagaagtgctggacgacatgactacacacctgccaagcgccagctctcagatacccgctctggaggagagctgcgaagcagtggaggctcgagaaattatgtggttcaagaccaggcagggacaaattgcaaagcagccctgtcctgctgggacaataggtgtatcaacgtacctgtgtcttgctcccgatggtatttgggatccccaagggccagacctttccaactgcagctctccatgggtgaatcacattacccagaagctgaaaagcggcgagaccgccgccaatatcgcacgcgagctcgcggagcaaacacgaaaccatctcaacgccggagacattacttactctgtgcgggcgatggatcagcttgttgggctactcgacgtgcagctaaggaaccttacacccggcggcaaggactcagcagcacgatcgcttaacaaagccatggtcgagaccgtgaacaatctgttacagcctcaggctctgaacgcttggcgcgatctgaccacttcagaccagctgagagcagcaacaatgctgctgcacaccgtggaagagtccgcattcgtactggccgataacctcctgaaaacagatatagtccgcgagaataccgacaacataaaattggaagtcgcacggctgtcgacagagggcaacctcgaagaccttaagttccccgagaacatgggccacggatcaaccatccaactctcagccaacaccctcaagcaaaacggtagaaacggcgaaatcagagtcgctttcgtgctgtataacaacttagggccatacctttctacagagaatgcgtccatgaagctcggcactgaggctctctccaccaaccactctgtcatagtaaacagtcctgtcataaccgccgctattaacaaggagttttctaataaggtgtaccttgccgatccagtggtgttcacagtcaagcatattaagcaaagcgaggagaacttcaatccgaattgctccttttggagctatagcaagcgcaccatgactggatactggtccacccaaggttgcaggcttttaacaacaaataagactcacacgacttgcagctgcaatcacctgaccaactttgccgtcctgatggcccacgttgaagtcaagcattcagatgccgttcatgacctgttactcgatgttattacctgggtgggaatcttattgtcactggtttgcctgctgatttgcatcttcaccttctgcttttttagggggttacaaagcgaccgcaacaccatccataaaaacctttgtatcagcctctttgtggcggagctgctgttcttgattgggatcaataggacagaccaacctattgcttgcgccgtttttgctgcccttctgcacttcttttttttagcagccttcacatggatgttcctggaaggcgtccagctgtacatcatgttggtggaggtctttgagtccgaacattccaggcgtaaatacttttacctcgtgggctatggaatgcctgctttgatcgtcgcagtgtctgccgcggttgattatcgctcttacggaacagacaaagtgtgttggctgcggctggacacttacttcatatggtcttttataggcccagcaaccctgatcatcatgctaaacgtaatcttcttgggaatcgcgctgtacaaaatgtttcatcacaccgcaatactaaagcctgagtcggggtgcctcgataacattaagtcgtgggttatcggagccattgcgttgctgtgcctgctcggactgacatgggcttttggcctgatgtacatcaatgagagcaccgtgatcatggcttatttgttcactatttttaacagcctgcaaggcatgttcattttcattttccactgtgtcttacagaaaaaggtccggaaagagtacggaaagtgtctgcgcacccattgttgttctggtaagagcacggaaagctccatagggagcggaaagacatccggctctaggacgccgggtcgttactctaccgggagccaaagcagaatccggagaatgtggaacgacactgtcagaaaacagtctgaaagttcattcattaccggggatatcaattcatctgcctctctgaatcgtgaaggcctgctcaataacgcccgagatacctcagtgatggatactctgccactgaatggcaatcacggaaactcctactcaatcgccagtggagagtacctgagtaactgcgttcagatcatcgatcggggctataaccataacgagacggccttggagaagaagatcttaaaggagctaacctcaaactacatcccatcttacctgaacaaccacgagagatcatcagagcaaaatcgcaatctcatgaacaagctggtcaacaatcttggatccggtagagaggatgacgcaatagttctcgatgacgccaccagttttaatcacgaggaaagccttggactcgagctaatccatgaagaatctgatgcgcctctgctgcccccacgcgtgtacagcacagagaaccaccagccccatcactatacacgcagaagaatccctcaggaccattccgagtcctttttccccctgctgacaaacgagcatacagaggatcttcaatcgccacacagggacagcctctatacttccatgcccacgctggccggcgtggccgccaccgagtccgttactacttcaactcaaactgagccgccgcccgccaagtgtggagatgctgaggatgtgtactataaatccatgcctaatctcggctcccggaatcacgtccaccagctgcatacttactaccaactagggcggggatctagcgatggcttcatagtgccccctaataaagatgggactccccccgaagggagcagtaaagggcctgcccacctggtgacgtccttatag

SEQ ID NO: 185388 - DNA, 4410 bp, Artificial Sequence
  derived and/or modified sequence
atgtggcccagccagctgctgatcttcatgatgctgctggcccccattatccatgcctttagtcgcgcccccatccctatggctgtagtgagacgtgagttaagttgcgaaagctacccaatcgaactgcgttgccctggcaccgacgtcattatgatcgaaagtgccaactatgggcgaacggatgacaaaatctgtgacagcgaccctgctcaaatggaaaatatacgctgttacctgccagatgcgtacaagatcatgagtcaacgctgtaacaacagaacccagtgtgccgtggttgcagggcctgatgttttccctgacccatgtccggggacctataaatacctcgaagttcaatatgagtgtgtgccctacaaggttgaacagaaggtgtttctttgtccaggtttgctgaagggcgtgtatcagagcgagcacctgtttgaaagcgatcaccaaagtggggcctggtgtaaggaccctctgcaggctagtgacaaaatttactacatgccatggacaccatacaggaccgatacactcacagagtacagctctaaagacgactttatcgcgggtcgtcctacaacaacctataagctaccacatagggtcgatggtacaggattcgtggtttatgatggcgccctcttctttaacaaggagcggactaggaatatagtgaaatttgatctgcggacacggatcaagtctggcgaggccattattgccaatgccaactaccacgatactagcccttaccggtggggtggaaagagcgacattgacctcgccgttgatgagaacgggttatgggtgatctatgccactgaacaaaataatggcaaaatagtgatctcccagttaaacccttataccctaagaattgaaggaacatgggacaccgcctacgacaaacgctcagcttcaaatgccttcatgatctgtggtatactgtatgtggttaagtcagtctatgaagacgatgataacgaggcaacaggcaacaagatcgattatatttataataccgaccagtccaaggattctctggtggacgtccccttccctaattcttaccagtatatcgccgcggtggactacaacccaagagataacctgctgtacgtatggaacaactatcacgtggttaagtacagcctcgactttggcccgctcgattcacgttctggacaagcacaccacggacaggtatcttacatttcaccacctatacacctcgactcagaactggaacggccctccgtgaaggacatctcaacaactgggccccttggcatgggatcaacaaccacttctacaaccctgcggacaactacactaagccccggccgcagcacaactccctccgtctccggcaggaggaatagatcaacatctacccctagccccgctgtggaggtcctggacgacatgacaacacatctcccgagcgcgtcttcacagataccagctcttgaagagtcttgcgaagcggtggaggcacgagagatcatgtggtttaagactcgccagggtcagatcgccaagcaaccttgtcccgctggcaccattggtgtctccacatacttatgtctggcccccgacggtatttgggacccccagggtccagacctcagcaactgtagttctccttgggtcaaccatattacgcagaaactcaagtcaggggaaaccgccgctaatatcgcccgagagctggcggaacagaccagaaaccatcttaatgccggcgacatcacatattccgtgagggctatggaccagctcgtagggcttcttgacgttcaactgagaaatttgactccaggtggaaaagattctgccgcccgtagcctgaacaaactgcagaaaagggagcgctcgtgccgggcatacgtacaggctatggtggagacagtgaataacttgctgcagccacaggctctcaatgcctggcgagatctcaccaccagtgaccagcttagagccgccaccatgttgctccatacggtggaggaatctgccttcgtattagcagataacttacttaaaacagacattgttcgcgaaaacaccgataatatcaagctggaggtggctcggctctctaccgaaggaaatttggaggacttaaagtttcccgaaaacatgggtcacggcagtaccattcaactctctgccaataccttaaagcagaatgggagaaatggagagatccgtgtggcatttgtcctttataacaacctgggcccttacctgagcacagagaatgccagtatgaagttagggaccgaggccctgtcaactaatcattccgtgatcgtgaacagtcccgtaatcacagcagccatcaacaaagagttttccaataaagtgtacctggccgatcccgtagtgtttaccgttaagcatataaagcagagcgaggaaaacttcaacccaaactgcagcttctggtcttattctaagcgcacgatgactggctattggtctacccaaggttgccggctgttaactactaataaaacccacaccacatgctcatgtaaccacctgacaaattttgccgtgcttatggcccatgtggaggttaaacactcagatgccgtacatgacctgttactcgatgtaatcacctgggtaggaattctcctgtcactggtctgcctgctgatttgcatctttactttttgtttctttcgcggcctccagagcgaccggaatacaatccataagaacctttgcataagcctgttcgtcgccgagctgctgttcctgattgggattaatcgcacagatcagccgattgcctgcgccgtcttcgcagcgctgctacactttttcttcctagccgcattcacttggatgtttttggagggcgtgcagctgtacatcatgctggtcgaagtctttgagagtgaacacagccgtaggaaatacttctatctagtgggatacggtatgcctgcactgattgtggctgttagtgctgccgtggactatcggtcttatggaaccgacaaagtgtgttggttgagactggacacctatttcatttggtccttcataggacctgctacattaatcataatgcttaatgtaatatttttggggatcgcgttatacaagatgtttcatcacaccgctatattaaaacccgaaagtggctgcctggacaatataaactatgaagacaacaggccttttataaagtcatgggtgattggtgccattgctttactctgtcttctgggcctgacctgggcttttggattgatgtatatcaacgagtccacggtgattatggcttatctcttcactatttttaactcgctccaagggatgtttatcttcatctttcactgcgttctgcagaagaaagtgcggaaggaatatgggaagtgtttgagaactcattgctgttcaggcaaaagtactgagtcctctataggctcagggaaaaccagcgggtctaggacccctggtaggtattcgactggatcgcagagccgaattcgacgaatgtggaatgacacagtacggaagcaatccgagagcagcttcattacaggcgatatcaatagctctgcaagtctgaaccgcgagggactcttgaataatgctagggatacctctgtcatggacactctaccgctgaacgggaatcatggaaacagctactcaatcgcctcaggcgagtatctctctaattgtgttcagatcattgacagaggttacaaccacaatgagacagccctcgagaaaaagatcctgaaagagttgacttccaattacatacccagctacctcaataaccacgaacggtcttccgaacagaacagaaacctgatgaataagctcgtgaataatctcgggtctggccgggaagacgatgcgattgtgctggacgatgccacgagcttcaaccatgaggagtcattgggactagagctaatacacgaagaatcagatgcacccctattgcccccccgggtttactctactgagaaccaccagccgcaccattatactagacggagaatccctcaggatcacagcgagtctttcttccccctgctgacaaatgagcatactgaagaccttcaatcaccacatagagactccctgtatacctccatgcccaccctggctggggtagctgccactgaatcagtgaccacgagcacacaaaccgagccccctcccgctaaatgtggagacgccgaagacgtgtactataagtctatgcccaacctgggaagccgcaatcacgtgcaccaactccacacttactatcaattgggaagagggtctagcgacggcttcattgtgcccccgaacaaggacgggaccccaccagaggggtccagcaagggtcctgctcaccttgtcactagtctgtag

SEQ ID NO: 185389 - DNA, 2124 bp, Artificial Sequence
  derived and/or modified sequence
atgtggcccagccagctgctgatcttcatgatgctgctggcccccatcatccatgccttctcacgggcccccattccgatggcagttgtcaggagggagcttagctgtgagtcctaccccatagaattgcgttgccccgggaccgatgtaataatgatcgaatctgcaaactatggccggaccgatgataaaatttgcgattctgaccctgcccagatggagaatataaggtgttaccttcctgatgcttacaaaatcatgtcccagaggtgtaataatcgtacccagtgcgccgtggtagccgggccagacgtgtttccagatccttgtcccggcacatacaaatatctcgaggtccagtatgagtgtgttccttatagagtagaccaaaaggtgttcctttgccctggcctcttgaaaggtgtataccagtccgaacatttattcgagtccgatcatcaatccggcgcttggtgtaaggaccccctgcaagccagcgacaaaatttactacatgccatggacgccataccggacggatacactcaccgaatatagctccaaggatgactttatcgccgggcggcctacaaccacctacaagctgccccaccgggtcgatggtaccggattcgtggtctatgatggcgccctgttcttcaataaggaacgcactcgtaatatcgtcaagtttgatctacgcacccggatcaaatcaggtgaggcaattattgctaacgcaaactaccatgatactagcccataccgatggggcggaaagtctgatattgatctggctgtggacgaaaacgggctatgggtgatctacgctactgagcagaataacgggaagatagttatcagccagcttaatccctatacactgcgcatcgaagggacctgggatacggcttatgacaaaaggtccgcttctaatgcttttatgatttgcggaatcttgtacgtcgtgaagagtgtttacgaagatgacgacaacgaagctaccggcaacaaaatagattacatttacaatactgatcagtcaaaagattcactggtagacgtgcctttcccaaactcttatcagtatatcgctgctgtcgattataatccccgcgacaacctcctgtacgtgtggaataactaccacgtggtaaagtatagcctggattttgggccgttagactccagaagcgggcaggctcatcatgggcaggtgagttacatcagtcccccaattcaccttgatagcgaactggagcgtcctagcgtgaaggacatctcaactactggcccgctcggtatggggagcaccaccacttcaaccacgctgagaactacaactctgagtccagggcgcagcacgactccctcggtctccggccggcgaaaccgtagcacctccactccaagcccagcggttgaagtgctggacgatatgacaacccatctcccttccgcgagctcgcagatccctgctttagaagaatcttgtgaggctgtcgaggctcgggagattatgtggttcaaaacaagacaagggcaaattgctaagcagccttgccccgctggcaccataggggtcagcacttatctgtgtctcgcaccggacggaatatgggacccacagggaccagatctgagcaattgctcttctccatgggtgaaccacataactcagaaactaaaatccggagagacagcagcgaatatcgcccgtgaactcgctgaacaaactcgaaaccatctgaatgctggcgacataacctatagtgtgagggcgatggaccagttggttgggctgttggatgtacaactccgcaacttaacccctggaggtaaagatagcgcagctaggagtttaaacaaagcaatggtggaaacagtgaataatcttctgcagccccaggccttgaacgcctggcgtgacctgaccacgagcgaccagttgcgcgccgcgaccatgctcctgcatactgtagaagagtctgccttcgtactggttttgcaagtgtgtttacccgtccgagaacagtctttcctcccttttttcagcttttttattttcttctttagctttctgccattcatcccactcaaatttcggctcgctaagaataagtag

SEQ ID NO: 185390 - DNA, 4410 bp, Artificial Sequence
  derived and/or modified sequence
atgtggcccagccagctgctgatcttcatgatgctgctggcccccatcatccatgcgttcagtcgggcccctattccaatggcagtggtgaggagagaactctcatgtgagagttacccgattgagttgagatgccctgggactgatgtgatcatgatcgaaagcgctaactatgggaggacagacgacaaaatctgtgattcggaccccgcccagatggaaaatattcgctgttatcttcccgacgcctacaagattatgtcacagagatgcaacaaccgcacacaatgcgcagtcgtggctggccccgatgtcttccccgatccttgtcctggaacctataagtacttagaggtgcagtatgaatgtgtcccttacaaagtcgaacaaaaagttttcctttgcccagggctcctgaaaggggtgtatcaatcagagcacttgttcgaatccgatcatcagagcggcgcctggtgcaaagatcccttacaggcttccgataaaatctattacatgccatggactccataccgaaccgacacactgactgaatactcttccaaagatgattttatcgctggtcgccctactacaacttacaagctgccacatagagtcgacggtaccgggtttgtggtatacgatggcgcgttgttcttcaataaagagcgcacgaggaatatcgtgaaatttgatttaagaacccggattaagtcaggcgaggcaattatcgccaatgccaattaccacgatactagtccttacagatggggtgggaagagcgatatcgatctcgccgtggatgagaatggactatgggtcatttatgctacagaacaaaacaacggtaagattgttatctcacaattaaatccttacactctgcggattgagggtacttgggacaccgcttatgataaacgcagcgcatccaacgcttttatgatctgcgggatcctgtatgtggttaaaagcgtgtatgaggatgatgacaacgaggcaacagggaacaagattgactacatttacaatacagaccagagtaaagactccctcgtcgacgtgccattccccaacagctatcagtacattgcagcagtcgattacaacccccgggataatttgttgtacgtgtggaataactaccacgtggttaaatatagcttggatttcggccccctggactctcgatccggtcaagcacatcatggccaggtgagctacatctcacctcctatccacctggattctgagctggaacgaccttctgtgaaggatatttcaactactgggccacttgggatggggagtacaacgacgtcgaccacactgaggactactaccctgagtccaggtagaagcactacaccgtccgtgagtggtcgcagaaaccgctccaccagtactcctagccctgctgtggaggttttggacgatatgactacgcatctgccaagcgctagttcccagatacctgccttagaagaaagctgtgaggccgttgaggcgcgagagataatgtggttcaagacacggcagggacagatcgctaagcagccctgtccggctggcacaattggcgtgtccacttatttgtgccttgcgcctgatggaatctgggatccacagggacctgatctgtccaattgtagtagtccttgggtaaatcacatcacccagaaattgaagagtggcgagactgccgccaatatcgcgcgggagttagctgaacagactcggaaccacttgaatgcaggcgacatcacttatagtgtgagagcaatggaccagctggtcggccttttagacgtgcagctccgcaaccttacaccaggtggcaaggatagcgctgcccgaagccttaacaaactccaaaagagggaacggagctgtcgcgcatacgttcaagcaatggttgagactgtgaacaacttactgcaaccccaagcactgaatgcatggagggatctgacaacatccgaccagctgcgcgccgctactatgcttttgcatacggtcgaggagtccgcattcgttttggcggacaatcttctcaagactgatattgtgagagaaaacaccgacaatataaaattggaggtcgcgcgtctcagcaccgaaggcaatctcgaggacctgaagtttcccgagaatatgggacatgggtctactatccaactctccgcgaacacactcaagcagaacggcaggaatggtgaaatccgcgttgcattcgtactgtataataacctcggcccctacttaagcacggagaacgcctctatgaaactcggcactgaggccctgagtactaaccacagtgtcattgtgaattcacctgtgatcacagcggccatcaataaggaattttccaacaaagtgtaccttgccgatcccgtagttttcacagtaaagcatattaagcagtctgaggaaaactttaacccaaactgctccttttggagctacagcaagcggacaatgacaggctattggagtacccagggttgccgtctccttacgaccaacaagacccacacaacctgttcatgtaatcacctgactaattttgcagtgttaatggcgcacgtcgaggtgaagcatagcgatgccgtgcacgacttgctgctcgatgtgatcacttgggttggcattcttctgtcactcgtgtgtctgcttatttgcatcttcaccttctgcttttttagggggctgcagagcgaccggaatacaattcataagaacctctgcatctcactattcgttgctgagctgctcttcctcatcggaataaatcgcaccgaccaacccatagcttgtgctgtttttgccgcactcctgcacttcttttttctggcagccttcacgtggatgttcctggagggggtgcaactgtacattatgctcgtcgaagttttcgagagcgagcactccaggaggaaatacttctatctggttggctatgggatgcccgcactcatcgtggccgtttcagctgccgtggattacagaagctacggaaccgacaaagtatgctggctgcgcctggacacttattttatttggagcttcataggccctgctacacttattatcatgctaaacgtgatctttctggggattgccttgtataagatgttccaccacaccgcaatcctgaagcctgaaagcggctgcctggataacataaattatgaggataaccgcccatttatcaagtcttgggtcatcggcgctatcgccttattgtgtctcttgggtttgacctgggctttcgggctcatgtacatcaatgaatcaacagtgattatggcttacttgtttactatttttaacagtctgcaggggatgttcatttttatttttcactgtgttcttcaaaaaaaggtgcgcaaagagtacgggaagtgtctcaggacccattgttgttctggcaaatctaccgaatcctcaatcggttctgggaaaaccagtgggagccgcacgcccgggcgctacagcaccggatcccaatcccgcatacggcgcatgtggaatgataccgtgcgtaagcagtccgaatctagtttcataaccggagacatcaacagcagcgcaagcttgaatcgggaagggctgctgaacaacgcgagggacacctcagtcatggatacccttcccctgaacggtaatcacggaaatagctattctatcgccagcggcgagtatttatctaattgtgtccagatcatcgacagaggatacaaccataacgaaacggccctcgaaaaaaaaatactgaaggagctgacctcaaattatatccctagctacctgaacaaccacgaacgatcctccgaacagaacagaaacctcatgaataagctggtgaacaatctgggctccgggcgagaggacgatgcaatcgtccttgatgatgccacgtcattcaaccatgaggagtcattaggacttgaactcatccacgaggagagtgatgcacctctgctccctcctcgagtttatagtactgagaaccaccaacctcaccactacacaaggcgacggattcctcaggaccattctgaatcttttttccctctgttgaccaatgagcatacagaagacctacagtctccacaccgagactccctgtatacatccatgcctaccctcgctggcgtggccgctaccgaatccgtgactacatccacacagacagagccaccgcctgctaaatgtggcgacgccgaggacgtgtattataaatctatgccgaacctggggtcacggaaccacgtgcaccagctccacacatattaccaacttggtagaggctctagtgatggcttcatcgtccctccaaataaggacggaacaccccctgagggctcaagtaaaggacctgcccatctagttacttcgctatag

SEQ ID NO: 185391 - DNA, 4344 bp, Artificial Sequence
  derived and/or modified sequence
atgtggccctcccaactgctgattttcatgatgctgctggcgcctattattcacgcattttcccgcgcaccaatcccaatggccgtcgtccgcagagaactcagctgcgagagctatcctatcgagctccgctgtcccggaaccgacgttatcatgatagagtccgccaattatggccgaaccgacgacaagatttgcgacagcgacccagcacaaatggagaacatcaggtgttacctacccgatgcatacaaaataatgtcacagcggtgtaataacagaacacagtgtgccgtggtcgccggtccagatgtgttccctgatccttgtccaggtacgtacaagtacttagaagtgcagtatgagtgcgttccctatcgcgtggaccagaaagtgttcctgtgtcccggactcttaaaaggggtatatcagagcgagcacctgtttgagtctgatcatcagagcggagcatggtgtaaagaccccctacaagcaagtgacaaaatctattacatgccatggaccccctaccgtacggatacccttaccgagtacagttcaaaggacgactttatcgccggacgaccaactaccacatacaagctcccgcaccgcgtagacggaacagggtttgtggtgtacgatggcgctctgtttttcaataaggagcgtactcggaacatagtgaaattcgatttgcggacacgcatcaagtctggtgaagcaatcattgctaacgccaattaccacgacacctccccttatagatgggggggaaagagcgacatagacctggcagtggacgagaacggtctttgggttatctacgctactgaacagaacaacggaaagatcgttatttctcagctgaacccttacacccttaggatagagggcacttgggatacggcgtacgacaagaggagcgcctctaatgcctttatgatttgcgggatcctctatgtggttaagtccgtgtacgaggacgacgataatgaggctaccggaaataaaattgactatatctataacactgatcaatcaaaggacagtttggtcgacgtgcccttcccaaattcctaccaatacatcgccgcagtcgattataatccaagagacaatcttttatatgtatggaataattaccatgtagtgaagtactcgctggacttcgggccactagattcccgctccggtcaagcccaccacggacaggtctcttatatctctccccctatccatctggattcggaactagagcggccatcggtcaaggatatctcaactaccggcccactcgggatgggttccacaaccacctcaaccaccctaagaacaacaaccctttctccaggaaggagtactacgccttctgtcagcggccgacggaacaggtccacttccacaccctcaccggctgtggaggtcttggatgacatgacaacacacttgccttccgcatccagccagataccggctcttgaggaatcatgtgaagccgtggaggcgcgtgagattatgtggtttaagacacggcagggccaaatagctaagcagccctgtcccgcagggactatcggggtgagcacatacctttgtctggcgcctgacggcatttgggaccctcaaggcccagacttgagcaattgtagcagtccctgggtgaaccacattactcagaagctgaagtctggcgaaactgccgcaaatatcgcacgggagttagcagaacaaaccagaaaccacctgaatgccggtgacatcacttacagcgtcagggctatggaccagctcgtggggctgctagatgtccagctccgaaaccttaccccagggggtaaggattcagctgcccgaagcctcaataaggccatggtagagaccgtcaataaccttctccaaccacaggccctgaatgcatggagagacctgaccacgtccgatcaattgagagcagccacaatgctcctgcacacagtggaggagtctgctttcgtgttagccgacaacctcctgaagacagacattgtgcgtgagaacactgataacatcaagctcgaagtagctagattgagtacggaggggaatctggaagacttaaagttccccgagaatatgggccatggcagcaccatacagttaagtgccaacacccttaagcagaatgggagaaatggggagattcgagtagccttcgtcctttacaataatctgggaccttatctttctacagagaacgcaagtatgaaactcggaaccgaagctctgtccaccaaccactctgtgattgtcaactcaccagtgatcaccgccgcaatcaacaaagaatttagtaacaaagtgtatctagcggatccagtagtgttcaccgttaaacacattaagcagtccgaagagaattttaaccctaactgcagcttctggagttatagtaagcgaacaatgacgggctactggtctacccagggctgtagattactgacgacaaataaaacgcatactacctgttcctgtaatcacctgaccaacttcgcggtgctcatggcgcatgtcgaagtgaagcatagcgatgcagttcacgacctgctgctcgacgtcattacctgggtgggcatcctattgtccctcgtgtgtcttctgatttgtattttcacgttttgttttttcagaggcctgcaatcggaccgcaatacaatccacaaaaatctgtgcatctccctctttgtggccgaattgctgttcctgatcgggatcaaccggacagaccagcctatcgcctgcgccgtgtttgcagctctgctccacttcttcttcctggccgctttcacttggatgttccttgaaggcgtacagctctatattatgctggtggaggtgttcgagtctgaacacagtcgcagaaaatatttctatctggtcggttatggcatgccagccctgattgtcgccgtctcagctgcggttgattatcggagttatgggacagacaaggtctgttggctgcggctagatacttacttcatttggtcctttatcggacccgctacattgattatcatgctgaatgtgatcttcctgggaatcgccctgtataagatgtttcatcataccgccatcctaaaacctgaaagtggctgccttgataatatcaagtcctgggtcattggcgcaattgccctactgtgcctgttgggtttaacatgggccttcggcctcatgtatatcaatgaatctaccgttatcatggcatacctgttcacgatcttcaattcgctccagggcatgttcatttttattttccactgtgtcttgcagaagaaggtcaggaaagagtatggcaagtgtctccggacgcactgctgctccgggaaatctacagagagctcgatcggttcaggcaaaacctccggatccagaacacccggacgttactctaccggcagccagtctagaatacgcaggatgtggaacgacacagtgcggaaacagtctgagtcctccttcatcacaggtgatatcaactcctcagcatctttaaatagggaagggctgctcaataacgcacgagataccagcgtgatggacactctgccactgaacggaaaccacgggaattcatactctattgcgtctggagagtacctttcgaactgcgtgcagataattgaccgcggttacaatcacaacgaaacagcacttgagaagaaaattctgaaggagcttacatctaactatattcccagttacttgaataaccacgagagatcctcagaacagaatagaaatttgatgaataagttagtgaataatctggggagtggaagggaagatgacgctatcgtccttgatgatgctacctcatttaaccacgaggagtcactgggactggagttgatccatgaggaatcagacgccccattgttaccccctcgggtctattctaccgagaatcatcagccccatcactacacacggcgtaggattccacaagaccactcggaatccttttttccactgctgacaaatgaacatacggaggatttacagagtccgcacagggactcactctacactagcatgccaaccctcgccggagtggccgctacggaaagcgtgactacaagcacacagacggagcctccccctgctaaatgcggtgatgccgaggacgtctactacaagagtatgcccaatctaggatcaaggaatcatgttcatcagctccatacctactatcaactcggtcgcggaagctctgatggatttattgtccccccaaataaagacggaactccacctgaaggtagctccaagggcccagcacatctggtgacttcattgtag

SEQ ID NO: 185392 - DNA, 4410 bp, Artificial Sequence
  derived and/or modified sequence
atgtggcctagccaactgctcatctttatgatgctcctggccccaatcatccacgccttctctagagcacccatccccatggcagtggtcagacgcgagttatcttgtgagtcttaccccatagaattgcgctgtcccggaactgacgtgataatgattgaaagtgccaattatggccgaaccgacgacaagatctgcgatagtgatcccgcacaaatggagaacattcggtgttacttaccggacgcctataagataatgagtcaaagatgtaacaataggacacagtgtgcggtggttgcgggacctgacgtgttccccgatccatgccctgggacttacaagtatctcgaggtgcagtatgaatgcgtgccttacaaggttgagcagaaggtgttcctctgtcctggattactgaaaggtgtgtaccagagtgagcacttgtttgagtcagatcatcagtctggcgcatggtgtaaggacccccttcaagcttcagataagatttattatatgccttggactccctatcggaccgacactctgaccgagtatagcagcaaagatgatttcattgctggtcgacctacaacgacatacaaactaccacacagggtcgatggcaccggcttcgtagtgtatgacggcgcactctttttcaataaggagagaaccagaaatatagtgaagtttgacctgcgcacacgcataaagtctggcgaggcaattatcgccaatgccaattatcacgacaccagcccctatcgctggggcggtaaatctgacatcgaccttgctgttgatgagaacggtctatgggtgatctacgctaccgaacagaacaatgggaagatcgtaatttcacaattaaacccatacactctcaggattgagggcacctgggacacggcatatgacaagcgcagtgcgagcaacgcttttatgatctgcgggatcttgtacgtagtgaagagcgtctatgaagacgacgataacgaggccactggtaataagatcgattatatatataacacagaccagtccaaagatagcctcgtggacgtgccctttcccaattcttaccagtatattgctgcagtggattacaatcctcgggacaacttgttgtacgtgtggaataattatcacgtggtgaaatactccctcgacttcggtcccctggactctcggagtggtcaggcccatcacggccaggtgtcctacattagcccccctattcacctggattcagagcttgaacgcccttcggttaaagacatctcaaccaccggaccgttaggcatgggatcaaccacaacctctaccactttacgcactacaacattgagccccggacgttccaccactccctcagtctcgggccgaaggaatagatcaacttccaccccgtcccccgctgttgaagtcctggacgatatgactacacacctgccgagcgcctcaagccagatccctgcactcgaggagagttgcgaagcagtggaggctcgcgagatcatgtggtttaagactaggcaaggtcagatcgctaagcagccctgccctgccggaaccattggtgtcagcacatatctttgcctggctccggacgggatctgggacccacagggccctgatctcagcaactgttcttctccctgggtcaatcatataactcaaaaattgaaatctggcgaaacggcagccaacattgccagagaacttgcagagcagactaggaaccacctaaacgcgggagacattacttattctgtgagggctatggatcaattggtgggactgctggacgtacagctgaggaaccttacccccggtggaaaagatagcgctgcacgctccttaaacaaattgcaaaagagggagcgctcttgccgcgcttatgttcaagcaatggtggagactgtcaataatcttctgcagccacaggcccttaacgcgtggcgggaccttaccacttccgaccagctgcgcgcagcaactatgctcttacacaccgtagaagagtctgcctttgtgctggctgacaatctgctgaagaccgacatagtgagagaaaacactgataacattaagctggaggttgccagactctcaaccgaaggcaatctggaagatcttaagttcccagagaacatgggccacggttctaccatccaactcagcgcaaatacattaaaacaaaacgggcgaaatggagagattagggtcgcgttcgtcctgtacaataacctgggtccttatctctccaccgagaatgcttccatgaagctgggaaccgaggcgctttcaacaaatcactctgttatcgttaacagtcccgtcattacagcggcaattaacaaggagttctcaaataaggtctacttagcagacccggtcgtttttaccgttaaacacatcaaacaatctgaagagaatttcaatccaaattgtagcttctggtcatatagtaaacgtactatgactggatactggagcacccagggctgcaggctgcttacgacgaacaagacgcatactacctgttcttgtaatcatctgacaaactttgcagtgttgatggctcacgtggaggtgaagcactccgatgccgttcatgacctcttgctagacgtcatcacgtgggtgggcatcctgcttagcctcgtgtgcttgctgatctgtatttttactttctgtttctttcggggtttgcagtctgataggaacacaatacacaaaaatctttgcattagcctcttcgtcgctgaactcctgtttctgatcggtatcaacagaactgaccaaccaattgcatgtgcggtgttcgccgctctgttgcattttttctttttggctgctttcacctggatgttcctggagggtgtccagctctatattatgcttgttgaggtcttcgagtctgaacacagtagacgcaagtatttctatttggttggctatgggatgccagcgctgattgttgctgtctccgcagccgtcgactatagatcctacggcaccgataaagtctgttggcttagactggatacctatttcatttggagtttcattggtccagcgactctcatcattatgctcaacgtgatatttctggggatcgcgctgtataagatgttccaccataccgccattcttaagccagagtctgggtgcttagataatatcaactatgaagacaatcgcccattcatcaagagttgggtaattggagctatcgctctcctgtgtctgcttggcctgacttgggccttcggcctcatgtatataaacgaaagcacagttataatggcttacctatttacgatcttcaatagtctccaggggatgttcatctttatcttccattgcgtccttcaaaaaaaagtacggaaggagtacggaaaatgcctacggacacactgctgctcaggaaagtccactgagtccagtatcggaagcggtaagacgtccgggtcaaggactcccggacgatacagcaccggcagccagtcccgcattagacgtatgtggaacgacacggtgcgcaaacagtccgagtccagcttcataactggcgatatcaactccagtgcctcactgaaccgcgaaggtttgctcaacaacgctagggatacgagtgtcatggacaccctgcctcttaatggaaaccacggcaactcatattctatcgccagcggcgagtacctgtcaaactgcgtgcagataattgacaggggatataaccacaatgaaaccgcgcttgagaaaaaaattctcaaggagcttacctcaaactatattcccagctacctgaataatcacgagcgcagtagtgagcaaaatcgcaatctgatgaacaagctggtgaacaacctgggcagtggcagagaggatgatgctatcgtgctcgatgatgccaccagtttcaaccacgaagaatccttggggctggagttgatccacgaagaatccgacgcccctctgttacctccaagggtttacagtacagagaaccaccagccccatcattatacccgccgtaggataccacaggatcattccgagtcatttttccccctgctcacaaacgagcacacagaagacctgcagagcccacatagggatagcctgtacaccagcatgcctaccctggcgggtgtggctgcgaccgagtccgtgaccaccagcactcagacagaaccccctcccgcaaagtgtggagacgccgaggacgtttactacaagtcaatgcctaacttgggttcgaggaaccacgtccatcaactccatacttattatcagctgggaaggggcagtagtgacggttttatcgtccccccaaacaaggacggaaccccaccagaggggtctagtaagggacctgctcacctcgtgacttccctttag

SEQ ID NO: 185393 - DNA, 2124 bp, Artificial Sequence
  derived and/or modified sequence
atgtggcccagtcagttgctgatctttatgatgctgctcgccccaatcatccacgcgttttctagggctcctataccgatggccgtcgttcgcagagagttgagttgtgaatcttatcccattgagctccggtgtcccggaaccgatgtgattatgatcgagagcgccaattatgggaggacggacgataagatctgtgattccgacccagcccagatggaaaacatccgatgctatctgcccgatgcctataagataatgagccagcgctgtaacaacagaactcaatgcgctgttgtggccggacccgacgtcttccccgacccatgcccgggtacttataagtatctcgaagttcagtatgagtgtgtcccttatagagtggaccaaaaggtctttctatgccctgggttgttgaagggagtgtaccagtccgagcacctgttcgaatcagaccaccagtcaggggcatggtgcaaagacccactacaggcttctgacaaaatctattatatgccatggacgccttatcgcactgataccttgaccgaatactccagcaaagatgactttatcgctggcaggccaaccacgacctacaagttgccacacagagttgatggcactggattcgtggtatatgatggtgccctgttcttcaacaaagaaagaacacgcaacattgttaaatttgacctgcgcacccgtataaagagcggtgaggccatcatcgctaacgctaattaccacgatacaagtccttacagatggggaggcaagagcgatatcgatctggctgtggatgaaaatgggctttgggtgatttacgctaccgaacagaacaacggcaagattgtgatctcacagcttaatccctacaccctgaggatcgaggggacatgggatactgcttatgacaagagaagcgcttccaatgcattcatgatttgcggcattctctatgtcgtaaaatctgtgtatgaggacgacgataatgaagctactggaaataagatagattatatttacaacactgaccagtctaaagacagtctggtggatgtcccgtttcctaactcctatcagtacatcgccgcagtcgattacaaccctcgggataacttactatacgtctggaacaactatcatgttgtgaagtattcgctcgattttggccctctggatagccgcagtggccaagcccatcacggtcaagtttcttacatcagccctcccatccacctcgactccgagttggagcgcccttccgttaaggacatctcgaccaccggtcctcttggtatgggatcaacaactacctcaactaccctccggaccacgacactgtcccccggaaggagtaccacacccagcgtatccggcagacgcaacaggagcacctccactccctcccctgctgtggaagttttagatgatatgaccacccatctgcccagtgccagttcgcaaattccagctttagaagaaagctgcgaagcagtggaggcgagggaaattatgtggtttaaaaccaggcaaggacagattgccaagcaaccctgtcctgctggaaccattggggtttccacctatctttgcttggcgccagacgggatctgggacccacagggcccagatcttagtaattgcagctctccatgggtaaaccacattacccagaagctgaagagtggggagaccgcagccaacatagcacgagagttagctgagcagaccaggaatcatctcaatgcaggcgatatcacttattccgtgcgcgctatggatcagttggttggcctgcttgacgtccagttgagaaacttgacacccggaggcaaggattcagctgctagaagtctgaataaggcaatggtggaaaccgttaataacctgcttcagccgcaggccctgaatgcatggcgcgaccttactactagtgatcagctgagagccgctaccatgctgcttcataccgttgaggagagtgcctttgtcttggtgctgcaggtctgccttcccgtgcgagagcagtcattcctccccttcttcagctttttcattttctttttttccttcctgcccttcattcccctgaaatttaggctagctaaaaacaaatag

SEQ ID NO: 185394 - DNA, 4410 bp, Artificial Sequence
  derived and/or modified sequence
atgtggcccagccagctcctgatattcatgatgctgcttgccccaattattcacgctttctccagagctccgatccctatggcggtcgtgcgtagagagctttcctgtgagtcctatcccattgagttgcgctgcccaggcactgacgttattatgatcgaatccgccaactacggcagaacggacgataagatctgcgattccgaccccgcacagatggaaaacattagatgctatctgcccgatgcctacaagatcatgagccagaggtgcaacaatcgaacgcagtgtgcagtggtggcagggcctgacgttttcccggacccctgcccaggtacctacaagtaccttgaggtccagtacgagtgtgtgccgtacaaggtggagcagaaggtattcctgtgccccggactcttgaagggagtgtaccagtcagagcatctctttgagagcgaccatcagtccggagcttggtgtaaggatccattgcaggcctctgataaaatttactacatgccatggactccctatagaactgataccctgacggagtactcctcgaaagatgacttcatagccggtcgccctactaccacttacaaacttccacatcgcgttgacggcactggcttcgtagtctatgacggcgcattgttcttcaataaagaacggacacgaaatatagtgaaatttgacctcagaacgaggataaagtcaggggaggcgataatcgccaatgccaattaccacgatacttctccatataggtggggagggaaatccgatattgacctcgccgtggacgaaaacggactgtgggtgatctacgccactgaacagaacaatggaaaaatagtcattagccaattgaacccatatacgctacggatcgagggcacttgggacactgcttatgacaaaagatcggcgtccaacgccttcatgatttgtggcatactgtatgtcgtcaagagtgtgtatgaagatgatgacaacgaggctaccggtaataagatcgactacatttacaatacagatcaatccaaggattctctcgtagatgttccgttccccaattcataccagtatatagcagcggtcgactacaaccccagggacaatctgctgtacgtatggaataattaccatgtggtgaagtactcgcttgacttcggaccgctggattctcggtccggtcaggcccatcacggccaggtgagttacatctcaccgccaattcatctggatagcgaacttgagaggccgtcagtgaaggacatcagtacaacgggaccacttggaatgggatccaccacgacatccaccaccctccgcacaaccacattgtctccgggacgatccactactccaagtgtgagtggtagaagaaacaggagtacatctactccttctccagccgttgaggtactggatgatatgaccactcacctcccttctgctagctcacagatccccgcactcgaggagagctgtgaggctgttgaagctagggaaattatgtggttcaagacccgacagggccaaatcgcgaaacagccatgccctgccggtacaatcggtgtctctacatacttgtgcctggcacccgatggtatttgggacccccaggggccagacttgtctaactgtagctctccctgggtaaatcacattactcaaaagcttaaatctggggaaacagcagccaacatagcacgcgagctggctgagcagacacgcaatcacctgaacgccggtgacatcacatatagcgtccgcgctatggatcagctggtgggccttctggacgtacaactgcggaacttgacacccggaggaaaggactctgctgccaggagcttgaataagctgcaaaagagggagaggtcctgtcgcgcttatgtgcaggccatggtggagacagttaataacctgctccagccccaggccctaaatgcttggagagacttgacaacgagtgatcagctgcgagctgcgacgatgctgctgcatacagtggaggaaagtgccttcgtcttggccgacaatttgctcaagaccgatatcgttagggagaatacggataacatcaagttggaggtggccaggctgtctacagaggggaatctggaggatcttaagtttccagagaacatgggtcacggctccaccatccaactctctgctaacaccttgaaacagaatggtcgaaacggggagatcagggtggcattcgtgctgtacaataatcttggaccatatctctcgactgagaacgctagcatgaaactgggtacagaagcactatctacaaaccactccgtgatcgtcaacagtcccgtaatcactgctgccatcaataaagagtttagtaataaggtatatttggccgatccagtcgtgttcacggtgaagcacataaagcagtctgaggagaatttcaaccctaactgtagcttctggagctatagtaaaaggacaatgacgggctattggtccacacagggttgccgactccttactaccaataaaacccatacgacgtgcagctgtaatcatcttacaaatttcgcagtcctcatggctcatgtggaggtgaagcactccgacgctgtgcatgaccttctgctcgacgtcatcacttgggtggggatcttgctctctctggtgtgtttgctgatttgtatttttacgttttgctttttccgcggactccagtccgataggaacactattcacaagaacctgtgcatcagcctatttgttgcggaattgctctttctgataggaataaataggaccgaccagccgattgcttgcgctgttttcgcagcactgctccatttcttcttccttgccgcttttacctggatgtttttggagggggtgcagctgtacatcatgctggttgaggtgttcgagtctgagcactcacgtcgtaagtatttctacctggttgggtacggtatgccagccttaattgtcgcagtgagcgccgcagtggactatagaagctacggtactgacaaggtgtgttggctgcggctggacacatacttcatctggagttttataggccctgccactttgatcattatgttaaatgttatctttctagggatagccctttacaagatgtttcaccatacggccatcttgaagcccgagtccggctgcctggacaacatcaattacgaggacaacagaccttttatcaagagctgggtcatcggggcaatagccctcctgtgtctcctcggtttaacttgggccttcggtctaatgtacattaacgaatcaacagtgatcatggcctatctgtttacaatctttaactccttgcaggggatgttcatctttatttttcactgcgtgctccaaaaaaaagtgagaaaggagtacggtaaatgcctgagaacccactgctgttccggaaaatcaaccgaatcttccatcgggtcaggcaaaaccagcggctcccgcactccaggacgctactctactggatcgcagagccgaattcggagaatgtggaacgacacagtgaggaaacagagcgagtcctccttcatcactggcgatattaacagcagcgcctctctgaaccgtgaaggcctgctcaacaacgcaagagacacgagcgtgatggatacactgcctctcaacggcaaccatggcaactcgtattccatcgccagtggggaatacctttctaactgtgtgcagattatcgaccggggatataatcataatgagaccgcacttgaaaaaaaaatactgaaggaactgacatcgaattacattccctcttacctcaataaccatgagcggtcctccgaacaaaatcgtaatctaatgaacaagcttgttaataacctggggagcggccgtgaagatgacgccatcgtgctcgacgacgccacctctttcaatcatgaagaatcactcggactggaactcattcacgaagaaagcgacgcaccactgctcccacctagagtgtactcgacggaaaaccaccagccgcaccactacactaggcgcagaatcccccaggaccactcagagtccttcttccctcttttaaccaacgaacacactgaagatctgcagtccccacaccgggattccctgtatacatccatgcccaccctcgccggagttgccgcaaccgaatctgtgacaacttctacccagacggaacctccgcctgccaaatgtggagacgccgaagatgtctactataagtccatgcccaacttaggctctcggaaccacgtacatcagctgcacacctattaccagcttggacggggaagctccgatggatttatagtcccccctaacaaggacggaactccacccgagggcagctcgaagggaccagcacatctcgtgacctcactttag

SEQ ID NO: 185395 - DNA, 4410 bp, Artificial Sequence
  derived and/or modified sequence
atgtggccttcccagctcctcatctttatgatgcttctggctcccatcatacacgcctttagcagagctcctattcccatggctgtcgtgcgcagggaactatcatgtgagagttatccaatcgagctgcggtgcccgggcaccgacgtcatcatgatcgagtctgccaactatggcaggacagacgataagatttgcgactctgaccctgcacaaatggagaatatccggtgctatcttccggatgcttacaaaatcatgagccaacgttgcaacaacagaacgcaatgcgctgtggtcgccgggcccgatgtgtttccagacccttgtccggggacctataagtacttagaagtccagtatgagtgtgtcccctataaggttgagcagaaggtcttcctctgtccaggcctacttaagggggtgtaccagagcgaacatttgttcgagtcggatcaccagagcggagcatggtgcaaagatcctctgcaggcctccgacaagatctactacatgccatggacgccttatcgcacagacacccttaccgaatactcatcaaaggatgacttcatcgccgggaggccgactacgacgtacaagcttccccaccgggtagacggcacagggtttgtggtgtacgatggcgcactatttttcaacaaggagagaactcggaatatcgtgaagttcgatctcagaactagaatcaagtctggggaagcgatcatcgccaatgccaactaccatgatacttcgccctaccgatggggtggaaaaagtgacattgacctggctgttgatgagaacggactctgggtcatttacgcaactgagcagaataacggcaagatcgtcatctcccaactcaatccatatacactccgtatcgagggtacatgggatactgcgtatgacaagaggagtgcaagtaacgcatttatgatatgcggcattctctacgtcgtaaaatctgtgtacgaggatgacgacaatgaggctactggtaacaaaattgactatatttataatacagatcaatctaaggatagcctggtcgacgtgcccttccctaatagctatcagtatatagctgctgtggattataatccccgcgacaacttgctgtacgtctggaacaactaccatgtcgtcaagtatagtctcgactttggacccctggactctaggtctgggcaggcacaccatgggcaggtgtcttacatttcgccgcctatacacctcgactccgagcttgagcgcccctccgttaaggatatcagcacaaccggacccctgggaatgggaagtaccacgacttccaccactctcagaactactactctgtcccccggcagaagtaccacgccctccgtctccggaagaagaaaccggagcacctctactccgtctcccgcagttgaggtactggacgacatgactacccacctcccatccgcatcttctcagatacctgccctggaggagtcctgtgaggctgtagaagctcgggaaatcatgtggttcaagacacggcagggccagattgccaagcagccttgccccgccggaactatcggggtgtcgacatatctgtgtctagctccagatggaatctgggatccacagggcccagacctctccaactgtagctcgccgtgggtcaaccacattactcagaaactcaaatctggggaaaccgccgccaacattgccagagagttggctgaacagaccagaaatcacctgaatgctggagacatcacgtactccgtaagagctatggaccagctggtgggcttactggacgtacaacttcgtaatctgacaccaggcggtaaagatagtgcagctcggagcctcaacaaactccagaaacgggagcggtcatgccgggcttatgttcaggccatggtagaaaccgttaataatttgcttcagcctcaggcgttaaatgcttggcgcgacttaacaacctccgatcaattgcgcgccgccactatgctcctgcacaccgtggaggagtcagcatttgtgttggctgataacctgttaaaaaccgacattgtgagagagaatactgacaatataaaactcgaagtggcacgtctctccactgaggggaacctggaagatctgaaatttccagagaacatgggtcacggctctaccatccaactcagtgcaaacacactgaaacagaatggaaggaatggcgaaattcgcgtcgcatttgttctctataataatctggggccttacctctcaactgagaacgcttctatgaagctgggcacagaagctctttccactaatcatagcgtgattgttaattctccagtgattactgcagccataaataaggaattttccaacaaagtatacctggcagatcctgtggtgttcaccgtaaagcacattaaacagtctgaggagaacttcaatcctaactgctctttttggtcctattccaagcgaacaatgaccggctactggtcaacacaaggctgtaggctgctgaccacaaacaaaacacataccacttgttcttgtaaccatctgacgaacttcgctgtgctcatggcccacgtcgaagtgaagcactcagatgcagtgcatgatttgctgcttgacgttataacatgggtcggcatcctgctatcgctggtctgcttgttgatctgtatcttcactttttgcttctttcgtggactccaaagtgataggaatacgatccataaaaatctgtgtattagcctgtttgtagccgagctgctctttttgatcggaattaaccgcacagatcaacccatcgcctgcgcagtgtttgctgctctgctgcatttctttttccttgcggctttcacatggatgtttttggagggcgtccagctatatatcatgttggtcgaggtgtttgagtccgagcattctaggaggaagtacttttacctggtggggtatggaatgcctgctctgatcgtggcggttagtgctgccgtggactaccggagctatgggacagacaaggtttgctggctgcggttagacacctatttcatttggagcttcatcggccccgctactctgatcatcatgctgaacgttattttcctcggaattgcgctttataagatgttccaccatacagccatcctaaagcccgagagtggttgcctggacaacatcaactacgaagacaatcggccgttcattaaatcctgggtaatcggagcaatagctttgctctgcctgctggggctgacttgggcttttggattgatgtatataaacgagtcaaccgtcattatggcctatctgtttactatcttcaactctctccagggaatgttcatttttattttccattgtgtcttgcaaaagaaggtccgtaaagaatacggcaagtgcctgcggactcattgttgttctggtaaaagcaccgaatcttccatagggagcggcaagacctccggttctcgcacacccgggaggtactccaccggcagtcagtcaaggatacgtcgaatgtggaacgatacagtcaggaaacagagtgaatcaagcttcataacgggggacatcaacagtagcgcgagcctcaatagggaggggctactgaataatgctcgggacacgagtgtgatggatacactccctctgaacggcaaccatggaaactcctattcaatcgcaagcggagagtatttaagcaactgcgtacaaatcatagataggggttataaccacaacgagacagccctggagaagaaaatccttaaggaactgacgagcaattatattccaagctacctgaataatcatgaaagaagctcggaacaaaataggaacctaatgaacaagttagtcaataacctgggatccggccgcgaggacgacgcaattgtgctggatgatgccactagcttcaaccacgaggagtctctgggtctcgagctgattcatgaggagtccgatgcccctctgttgcctccaagggtttactcaactgagaaccaccagcctcaccactacacccggaggaggatcccacaggaccattcggaatctttcttccctttactcactaatgagcataccgaggacctccagagtcctcatagggattccctatacacatccatgcccactcttgcaggcgtcgccgctactgagtccgttactacctctacacagactgagcccccaccagccaaatgcggggatgccgaggatgtatactacaaaagtatgcccaatctcggctcgaggaatcacgtgcaccagctgcacacttattaccagctgggtaggggttctagcgacggctttattgtgccgcctaataaagacggcaccccaccggaaggctcttctaaaggccctgcccatctagtcacgtcactgtag

SEQ ID NO: 185396 - DNA, 4410 bp, Artificial Sequence
  derived and/or modified sequence
atgtggcccagccagctgctgatcttcatgatgctgctggcccccatcatacatgcatttagcagggcaccaatcccaatggcagtggtccgtagagagctgtcatgcgagtcataccccatcgaactgagatgccctgggacagacgttatcatgatcgagtccgccaactatgggcgcaccgacgacaagatttgtgatagcgacccagcacagatggagaatatacgatgttacctgccagacgcatataaaatcatgtcccagcgctgcaataaccgcacacagtgcgccgtggttgctgggccggatgttttccctgacccttgtccagggacatacaagtaccttgaagtgcagtatgagtgcgtgccttacaaggtcgaacagaaagtgtttctgtgcccgggtctgctgaaaggagtttaccagtccgaacatctgttcgaatcagatcaccagtcaggtgcatggtgtaaggacccgctccaagcctcagacaagatttattatatgccatggacgccataccgcacagatactctgacagagtatagcagcaaggatgattttattgccggcagacccacaaccacctataagctgccccacagagtggatgggaccggattcgtagtgtacgacggggcactcttttttaacaaagaaagaacgcgaaatattgtgaagtttgacctgcggactaggatcaaatcaggcgaggctatcatcgccaatgccaattatcacgacacgtcaccttaccgctgggggggaaaaagtgacatagacctcgcggtcgacgaaaacggtttgtgggttatctacgcaaccgagcagaataacgggaaaattgtgatctcacagctgaatccttacaccctaaggattgagggcacttgggacaccgcctatgacaagaggtcagcttccaatgctttcatgatttgtggcatcttatatgtggttaaatccgtatatgaggatgatgacaatgaggcaacagggaataagatcgattacatatataacactgaccagtcaaaagattctctggtggatgtgccgttccccaacagctatcagtacatcgccgctgtcgactataacccccgggacaacctcttgtatgtttggaacaattatcatgttgtgaaatattccctcgattttggccctctcgactcccgatccgggcaggcccatcacggacaggtgtcctatatctctccgcccatacacctggattctgaattggagcgtcctagcgtgaaagacatttccacaacaggccctctcggaatgggttccacgaccacgtccaccacactacgcaccaccacactctcccctgggcggtctacaacgccgtccgtgtccggtcgacgaaaccgctccactagcactcctagtcctgccgtcgaagttcttgacgacatgaccacacatttgcctagcgccagctctcaaatacccgcactcgaagaaagttgtgaggccgtggaggcccgagaaatcatgtggttcaaaaccagacagggacagattgcaaagcagccgtgccccgctgggactataggagtatctacctatctctgcctggcccctgacggaatttgggaccctcagggcccggacctgtcaaattgctcttctccctgggtcaatcatattactcagaaattaaagagcggcgagacagcggctaacatcgctcgggagctagctgaacagacccggaaccacctgaacgcaggggacataacatactctgtgcgcgctatggatcagttggtggggcttcttgacgttcaactcaggaatctgactcccggaggcaaggattcagcagctaggtccctcaataagctccagaaaagggaacgtagctgcagggcctatgtgcaagctatggtggagactgtgaataacctgctccagccgcaggccctcaacgcctggagagacctgacaacttccgatcagctgcgagcagctacaatgctgctccacacagtggaggaatccgcattcgtcctcgccgataacctgcttaagaccgatatagtgagagaaaacacagacaatataaaactggaggtggcacgcctatccacggagggtaacctggaggacctgaaattcccagagaacatgggccatggatcaacaatacagctgtccgccaataccctcaaacagaacggaaggaacggtgagatcagagtcgcctttgtgctgtataacaaccttggaccctatctgtccacagagaatgcaagtatgaagctggggaccgaagcactgtccacaaatcactccgtgatcgttaactctcctgtcatcaccgcggccattaacaaagagttcagtaacaaggtgtacttggccgatcctgtcgtatttactgttaaacacattaagcaatcagaggagaacttcaatcccaattgttctttctggtcatatagcaagcgtaccatgactgggtattggtccacccagggatgcaggctgctgacaacaaacaagactcacaccacttgctcttgtaatcacctgaccaacttcgctgtgctaatggctcacgtcgaagtgaaacatagtgatgctgttcacgacttgctactcgatgtgatcacctgggtgggaatcctcctctcactcgtttgcctcctcatttgcatcttcactttttgcttctttcgagggctgcaatcagatagaaatactattcataagaatctctgtatcagcttatttgtggccgagctcctttttctaatcggaatcaacagaactgatcagcccatcgcttgtgccgtttttgcagcgctgctgcattttttcttcctggcagcgttcacatggatgtttctagaaggcgttcagctgtatattatgctggtcgaggtgtttgagagtgagcactcccgcagaaagtacttttatttagttggttatggtatgcccgcgctgatcgtggcagtttctgcagccgtcgattatcggtcttatggcacggataaggtctgctggctgcggctcgacacttactttatttggtccttcatcggacccgctactttaattattatgcttaacgtaatcttcctggggattgctctgtataagatgttccaccataccgccattctgaaacccgagagcgggtgtctcgataatatcaattatgaagacaaccggcccttcattaagagttgggtcatcggggctattgctctgctgtgcctgttgggcttaacttgggcctttgggctgatgtacattaacgaatcaactgtgattatggcctacctattcaccatcttcaatagtttacagggaatgtttatatttatattccattgtgtgctgcagaagaaggttagaaaggagtatggcaaatgtctgcgcacccattgctgctcaggcaaatccaccgaatcctccattggatctgggaaaaccagcggctcccggaccccaggtaggtactctacaggaagtcaaagtcgcatcaggcgaatgtggaacgacaccgttcgaaaacaatctgaatctagttttatcaccggcgatatcaactccagcgccagtctgaacagggagggcctgctgaataacgcacgcgatacaagcgtgatggacacactgccattgaacgggaatcatggtaacagttattccatcgcctcaggcgagtatctatccaactgtgttcaaatcattgaccgcggctataatcacaatgagacggctctggagaagaagatcctgaaagaactgacgtcaaactacattcctagttatctgaacaatcacgaacgatcatctgaacagaatagaaatctcatgaacaaactggtcaacaacctggggtcaggcagagaggacgacgccatcgtcctcgatgatgcaacatctttcaaccacgaggagagtctgggactggagttgattcatgaggaatctgacgcccccttactgccaccaagagtgtattctaccgaaaaccaccagccgcatcactacacacgacgccgcattcctcaggaccattccgagtccttctttccgcttctgactaacgagcataccgaggatctgcaatccccacaccgagattcattgtatacctctatgcctaccctcgcgggcgttgctgcaacagagtccgttacaaccagcactcagactgagccaccccctgcgaagtgcggagacgccgaggacgtgtactacaaatccatgcctaacctgggaagccgaaaccatgtccaccagctccacacttattaccagctcggccgcggctcctctgatggatttattgtacctccgaataaagatggtactccccccgaagggagtagcaaaggccccgctcatctggtcacttctttgtag

SEQ ID NO: 185397 - DNA, 4410 bp, Artificial Sequence
  derived and/or modified sequence
atgtggccctcgcagctccttatattcatgatgcttttggcaccgataattcatgccttcagcagggcaccaataccaatggcagtagtgagaagagagctgtcctgtgagtcatatccaattgagttaaggtgtcccggtactgacgtgataatgattgagtctgctaactacggtaggacagatgacaagatttgtgacagtgatccagcgcagatggagaacatccgttgctatttacccgacgcatacaagattatgagccaacgctgtaataaccgcacccagtgcgccgtcgtagcagggcctgacgtgtttcccgacccctgcccgggtacatataaataccttgaggtccagtacgagtgcgtgccctacaaggttgagcagaaggtgtttctttgtccgggtttattaaaaggagtctaccagtctgagcatctttttgagagcgatcaccagtcaggtgcatggtgcaaagaccccctgcaagcctctgataagatctactacatgccatggacgccctacaggaccgatacgctgaccgaatattcaagcaaagacgatttcatcgccggtcggccaacaaccacgtataagctcccacatcgcgtagacggtaccggctttgtggtctacgatggggcactgttctttaacaaagaaaggacaaggaacatcgtgaagttcgacctcagaactaggatcaagtccggcgaggccattattgccaatgctaactaccacgatacttctccctaccggtggggcggtaagagtgatatcgatctggcagttgacgagaatggcctctgggtgatctacgccacagaacagaataacggaaagatcgtgatcagccaactgaacccttacaccctgagaattgagggaacttgggacaccgcttacgacaaacggagcgcgtccaatgcttttatgatatgtggaatcctgtatgtagtaaaatcagtttacgaagacgatgacaacgaggccactggcaataagatagactacatttacaatacagaccagagtaaagattctctggtcgacgtcccatttcctaatagctaccaatacattgcagcggtggattataacccccgtgacaacctgttatacgtgtggaataattaccacgtggtgaagtatagcttagacttcggtcctctagattcgcggtccggccaggcccaccacgggcaggtgagttatatttcccctccaattcaccttgatagcgagttagagagaccaagcgtaaaagatatcagtaccactggaccccttggtatgggatctacaaccacctcaacaactcttaggaccacaaccctgagcccgggaagatccaccactcctagcgtgtccggaaggcgaaataggtccactagtaccccgtcgccggctgtggaggtccttgacgatatgaccactcatctacctagcgcttcatcccagattccagcattagaagaatcttgcgaggctgtcgaggcgcgtgaaatcatgtggtttaaaacccggcagggtcagatcgccaaacagccctgtcctgccggaacgatcggcgtgtccacatatctgtgtctggctcctgacgggatttgggatccccaaggccctgatttaagcaactgttcttcaccatgggtgaaccacataacgcagaaattaaaaagcggggagaccgccgcaaacattgcccgtgagctggctgagcagacgaggaatcaccttaatgcgggtgacataacttatagcgttagagctatggaccagctggtgggacttctggatgttcaactgcggaatcttacaccgggtggaaaagatagtgccgcacgctctctgaacaagttgcaaaagcgggagcgctcatgccgcgcttatgtgcaggccatggtcgagaccgtgaataacctcctgcaaccacaggcccttaatgcttggagagatctgaccacctctgatcagctgcgcgctgccactatgctgctgcacaccgtcgaggaatccgcatttgtgctcgcagataatttactcaagacagatatcgtaagggaaaacactgataatattaaactcgaggtggcaaggttgagtacagaagggaatttagaggatttgaagtttcccgagaatatgggccacggatctaccatccagctatcggcaaatacactcaagcagaatgggaggaatggggagatacgggtggcattcgtcctttacaataacctgggaccctatctgagtacagagaacgcgtctatgaagttgggaaccgaagcactctccaccaaccatagcgtgatcgtaaactcaccagtgattacagctgctataaacaaggagttctcaaataaggtttacctagcggatcctgttgtcttcacggtgaaacacatcaagcagtcagaagaaaacttcaatcccaactgttccttttggtcctattcaaagcggacaatgactggctactggagcacacagggatgtcgcctcctgacaacgaataaaactcatacaacttgcagttgcaaccacctgaccaacttcgccgtgctgatggcccatgttgaggtcaagcattccgacgccgttcacgacctgctgttagacgttattacgtgggttggcattctgttgtccctagtttgcctgctgatttgtatcttcacattctgcttctttaggggattgcaatctgaccggaatactatccataagaacctgtgtatctccctatttgttgccgaactgctgtttcttattggaattaatcgaaccgaccagcccattgcttgcgcagtgtttgccgcactattgcacttcttctttcttgccgcatttacgtggatgttcctcgaaggagtacagctttacatcatgcttgtggaggtgttcgagagtgagcattcccggcgtaagtacttctatttggtcgggtacggcatgcctgccttgattgtagccgtgtcagctgctgtggattaccgctcatacggcacagataaggtgtgctggctccggctggacacttattttatctggtcctttatcggccctgccacgctgatcattatgcttaacgttatctttttgggcattgcactatacaagatgttccatcacactgctattctgaagccagagtctgggtgtctggataacatcaattatgaggacaataggccctttatcaagtcatgggttatcggcgctatcgctcttctgtgtctgctagggctcacgtgggcatttggcctgatgtatatcaatgaaagcaccgttatcatggcctaccttttcactatttttaacagcctgcagggtatgttcatattcatcttccattgtgtactacagaaaaaggtccgaaaggagtacggtaaatgtctgcggacacattgctgctcaggcaagtcaaccgaatcctctatagggtcagggaagacatcgggaagccggacccccggacggtacagcaccgggtctcagagtcgaatccgcaggatgtggaacgatactgtgcggaagcagtctgagtcatcattcatcacaggagatatcaactcctccgccagccttaatagagaaggcctgcttaacaatgctagagatacctctgtgatggataccttaccgttgaacggtaatcacgggaacagctattctattgcatcgggagagtatctctccaactgcgtacagataattgatagggggtacaatcacaacgagacagctctagagaagaagatcctgaaggaactgacctctaactatatacctagctacctgaataaccatgaacgttcttctgagcagaacaggaacctgatgaacaagctggtcaataatctgggcagtggcagggaagacgatgccatcgtgttagacgatgccacaagctttaaccacgaggaatcactgggactcgaactgatccacgaagagtcggatgcacccctattgcccccacgggtttactctaccgagaatcaccagccgcatcactacacacgccgtcgtatccctcaagaccactcagagtctttttttcccctcctgacaaatgaacacaccgaggatctgcagagcccacacagggattcgttatacaccagcatgccaactctggcaggcgtggccgcaacagagtcagtgacaacctcaacacaaactgagcctccccctgccaagtgcggcgacgccgaagacgtctattacaagtctatgccaaatctcggctctaggaatcatgtccaccagctccacacgtactaccaactgggccgaggctcttccgatgggttcattgtgccaccaaataaggatggcacacccccagagggctctagcaaaggtcctgcacatctcgtcacctcactgtag

SEQ ID NO: 185398 - protein, 1113 aa, Artificial Sequence
  derived and/or modified sequence
MPRPELPLPEGWEEARDFDGKVYYIDHTNRTTSWIDPRDRYTKPLTFADCISDELPLGWEEAYDPQVGDYFIDHNTKTTQIEDPRVQWRREQEHMLKDYLVVAQEALSAQKEIYQVKQQRLELAQQEYQQLHAVWEHKLGSQVSLVSGSSSSSKYDPEILKAEIATAKSRVNKLKREMVHLQHELQFKERGFQTLKKIDKKMSDAQGSYKLDEAQAVLRETKAIKKAITCGEKEKQDLIKSLAMLKDGFRTDRGSHSDLWSSSSSLESSSFPLPKQYLDVSSQTDISGSFGINSNNQLAEKVRLRLRYEEAKRRIANLKIQLAKLDSEAWPGVLDSERDRLILINEKEELLKEMRFISPRKWTQGEVEQLEMARKRLEKDLQAARDTQSKALTERLKLNSKRNQLVRELEEATRQVATLHSQLKSLSSSMQSLSSGSSPGSLTSSRGSLVASSLDSSTSASFTDLYYDPFEQLDSELQSKVEFLLLEGATGFRPSGCITTIHEDEVAKTQKAEGGGRLQALRSLSGTPKSMTSLSPRSSLSSPSPPCSPLMADPLLAGDAFLNSLEFEDPELSATLCELSLGNSAQERYRLEEPGTEGKQLGQAVNTAQGCGLKVACVSAAVSDESVAGDSGVYEASVQRLGASEAAAFDSDESEAVGATRIQIALKYDEKNKQFAILIIQLSNLSALLQQQDQKVNIRVAVLPCSESTTCLFRTRPLDASDTLVFNEVFWVSMSYPALHQKTLRVDVCTTDRSHLEECLGGAQISLAEVCRSGERSTRWYNLLSYKYLKKQSRELKPVGVMAPASGPASTDAVSALLEQTAVELEKRQEGRSSTQTLEDSWRYEETSENEAVAEEEEEEVEEEEGEEDVFTEKASPDMDGYPALKVDKETNTETPAPSPTVVRPKDRRVGTPSQGPFLRGSTIIRSKTFSPGPQSQYVCRLNRSDSDSSTLSKKPPFVRNSLERRSVRMKRPSSVKSLRSERLIRTSLDLELDLQATRTWHSQLTQEISVLKELKEQLEQAKSHGEKELPQWLREDERFRLLLRMLEKRQMDRAEHKGELQTDKMMRAAAKDVHRLRGQSCKEPPEVQSFREKMAFFTRPRMNIPALSADDV

SEQ ID NO: 185399 - DNA, 3342 bp, Artificial Sequence
  derived and/or modified sequence
atgcccagacccgagctgcccctgcccgagggctgggaggaggccagagacttcgacggcaaggtgtactacatcgaccacaccaacagaaccaccagctggatcgaccccagagacagatacaccaagcccctgaccttcgccgactgcatcagcgacgagctgcccctgggctgggaggaggcctacgacccccaggtgggcgactacttcatcgaccacaacaccaagaccacccagatcgaggaccccagagtgcagtggagaagagagcaggagcacatgctgaaggactacctggtggtggcccaggaggccctgagcgcccagaaggagatctaccaggtgaagcagcagagactggagctggcccagcaggagtaccagcagctgcacgccgtgtgggagcacaagctgggcagccaggtgagcctggtgagcggcagcagcagcagcagcaagtacgaccccgagatcctgaaggccgagatcgccaccgccaagagcagagtgaacaagctgaagagagagatggtgcacctgcagcacgagctgcagttcaaggagagaggcttccagaccctgaagaagatcgacaagaagatgagcgacgcccagggcagctacaagctggacgaggcccaggccgtgctgagagagaccaaggccatcaagaaggccatcacctgcggcgagaaggagaagcaggacctgatcaagagcctggccatgctgaaggacggcttcagaaccgacagaggcagccacagcgacctgtggagcagcagcagcagcctggagagcagcagcttccccctgcccaagcagtacctggacgtgagcagccagaccgacatcagcggcagcttcggcatcaacagcaacaaccagctggccgagaaggtgagactgagactgagatacgaggaggccaagagaagaatcgccaacctgaagatccagctggccaagctggacagcgaggcctggcccggcgtgctggacagcgagagagacagactgatcctgatcaacgagaaggaggagctgctgaaggagatgagattcatcagccccagaaagtggacccagggcgaggtggagcagctggagatggccagaaagagactggagaaggacctgcaggccgccagagacacccagagcaaggccctgaccgagagactgaagctgaacagcaagagaaaccagctggtgagagagctggaggaggccaccagacaggtggccaccctgcacagccagctgaagagcctgagcagcagcatgcagagcctgagcagcggcagcagccccggcagcctgaccagcagcagaggcagcctggtggccagcagcctggacagcagcaccagcgccagcttcaccgacctgtactacgaccccttcgagcagctggacagcgagctgcagagcaaggtggagttcctgctgctggagggcgccaccggcttcagacccagcggctgcatcaccaccatccacgaggacgaggtggccaagacccagaaggccgagggcggcggcagactgcaggccctgagaagcctgagcggcacccccaagagcatgaccagcctgagccccagaagcagcctgagcagccccagccccccctgcagccccctgatggccgaccccctgctggccggcgacgccttcctgaacagcctggagttcgaggaccccgagctgagcgccaccctgtgcgagctgagcctgggcaacagcgcccaggagagatacagactggaggagcccggcaccgagggcaagcagctgggccaggccgtgaacaccgcccagggctgcggcctgaaggtggcctgcgtgagcgccgccgtgagcgacgagagcgtggccggcgacagcggcgtgtacgaggccagcgtgcagagactgggcgccagcgaggccgccgccttcgacagcgacgagagcgaggccgtgggcgccaccagaatccagatcgccctgaagtacgacgagaagaacaagcagttcgccatcctgatcatccagctgagcaacctgagcgccctgctgcagcagcaggaccagaaggtgaacatcagagtggccgtgctgccctgcagcgagagcaccacctgcctgttcagaaccagacccctggacgccagcgacaccctggtgttcaacgaggtgttctgggtgagcatgagctaccccgccctgcaccagaagaccctgagagtggacgtgtgcaccaccgacagaagccacctggaggagtgcctgggcggcgcccagatcagcctggccgaggtgtgcagaagcggcgagagaagcaccagatggtacaacctgctgagctacaagtacctgaagaagcagagcagagagctgaagcccgtgggcgtgatggcccccgccagcggccccgccagcaccgacgccgtgagcgccctgctggagcagaccgccgtggagctggagaagagacaggagggcagaagcagcacccagaccctggaggacagctggagatacgaggagaccagcgagaacgaggccgtggccgaggaggaggaggaggaggtggaggaggaggagggcgaggaggacgtgttcaccgagaaggccagccccgacatggacggctaccccgccctgaaggtggacaaggagaccaacaccgagacccccgcccccagccccaccgtggtgagacccaaggacagaagagtgggcacccccagccagggccccttcctgagaggcagcaccatcatcagaagcaagaccttcagccccggcccccagagccagtacgtgtgcagactgaacagaagcgacagcgacagcagcaccctgagcaagaagccccccttcgtgagaaacagcctggagagaagaagcgtgagaatgaagagacccagcagcgtgaagagcctgagaagcgagagactgatcagaaccagcctggacctggagctggacctgcaggccaccagaacctggcacagccagctgacccaggagatcagcgtgctgaaggagctgaaggagcagctggagcaggccaagagccacggcgagaaggagctgccccagtggctgagagaggacgagagattcagactgctgctgagaatgctggagaagagacagatggacagagccgagcacaagggcgagctgcagaccgacaagatgatgagagccgccgccaaggacgtgcacagactgagaggccagagctgcaaggagccccccgaggtgcagagcttcagagagaagatggccttcttcaccagacccagaatgaacatccccgccctgagcgccgacgacgtgtag

SEQ ID NO: 185400 - DNA, 3342 bp, Artificial Sequence
  derived and/or modified sequence
atgccccggcctgagttacctttgccagaaggttgggaggaagctagagactttgatggcaaggtatactacattgatcacaccaatcggacaacatcttggatagatcctcgggataggtatacaaagccgctgacgttcgctgactgtatcagcgacgagctaccactcggatgggaggaggcttatgacccacaggtgggcgattacttcatcgaccataacacgaaaactacccaaatcgaagaccctcgagtgcagtggaggcgagagcaggagcacatgcttaaagattatctcgtggtcgcacaggaagccctgagcgcccaaaaggagatctaccaagtcaaacagcagcggctagagttggcccaacaggagtaccagcagctccatgcggtgtgggagcacaaactcggatctcaggtcagtctggtgtcaggatctagctcaagctcaaagtacgaccctgagatcctgaaagcagaaatcgcgaccgccaagtcccgagtgaacaagctgaagcgggagatggttcatctccagcacgagctgcagtttaaggagaggggtttccagactctgaagaaaatcgataagaagatgagtgacgctcaggggtcatataaactcgacgaggcgcaggccgtgctgagggaaacaaaggccattaaaaaagcaataacgtgcggagagaaagaaaaacaagacttgataaagagcctcgccatgctgaaggatggttttcgtactgatagaggtagtcacagcgacctctggtcaagtagttcatcactggaatcctcctcttttccgctccctaagcagtatctcgacgtgtccagtcagacggacatctcgggttcatttgggatcaacagcaataatcaactcgctgaaaaggttcggctgcggcttcgctacgaggaggctaagaggcggatcgccaacctgaagatccaactggcaaagttggattccgaggcctggccaggcgtgttggattccgaacgtgacaggctcatccttattaatgagaaggaggagctgctgaaggagatgcggttcatctccccacggaagtggacccagggtgaagtggaacagctggagatggcacgaaagagactggaaaaggacctgcaagcagcaagggacacgcagtccaaggccctgactgagagactgaaactcaatagcaagcggaatcagcttgtccgagagctggaggaagccacacggcaagtggccacactccacagtcagctgaagagcttgtcctcaagcatgcagtctctgtcctctgggtcctctcccggaagcctgacctcttctcgcggaagtctcgtcgcatcatcactcgatagctccaccagcgcatcttttactgatctttactacgacccattcgagcagctggactcggagctgcagagcaaggtggaattcctgttattggagggcgctaccgggtttcggccttcaggctgtattactaccatccacgaggacgaggtcgccaaaactcagaaggctgaggggggcggacggcttcaggcgctgagatctctgtctggaactcctaaatcgatgaccagtcttagcccccgcagcagtctgtcctctccgtcacccccctgctcaccgttgatggcagatccgcttttggcaggggacgcctttctcaactcactggagtttgaggacccagagctcagtgccactctgtgcgagctgtccctgggaaattccgcacaggagagatatcgcctagaagaacctggaacagaaggcaaacagctggggcaagccgtaaacaccgctcagggttgtggtctaaaagtcgcttgtgtgtcggctgccgtctccgatgagagcgtggccggggattctggagtgtacgaggcttccgtccagcggctgggcgcaagcgaggccgctgccttcgattccgatgagtctgaggcggttggggccactcgcattcagatcgcgctgaaatacgacgagaaaaacaagcagtttgctatcctcattatccaactgtctaatctgtccgccttgctacagcagcaagatcagaaagtgaacataagagtggcagtcctcccttgtagcgagtctacaacatgcctttttcggacccgtccgctcgatgctagcgataccttggtgtttaacgaagtcttttgggtgtcaatgtcctatcccgccctccaccagaagactctcagggtggatgtctgtacaactgatagatcacatctggaggaatgcctcggaggcgcccaaatttctttggccgaggtatgcagatctggagagagaagcactagatggtacaacctgctgagttacaagtacctgaagaagcagtcaagagagttgaaacccgtgggcgtcatggctccagccagcggaccagctagcactgacgctgtttctgccctactggaacagaccgccgtggaattagagaagaggcaggagggaagatctagtactcagacgctcgaggacagttggcgttatgaggagacatctgagaacgaagcggtggcggaggaggaggaagaagaggttgaggaagaggagggcgaggaggatgtgttcaccgagaaagcaagcccggatatggatggatatcctgcccttaaagttgacaaggaaaccaatactgagacacccgcccctagccccactgttgtcagaccgaaagatagaagagtgggcaccccatctcaagggcccttcctgaggggcagcaccatcatcaggtcaaaaaccttctccccagggccacagtcacagtatgtgtgccggctgaatcgcagtgattccgactcaagtactctgagcaagaaaccaccgttcgtgcggaattctttggagcgacggagcgtcagaatgaaaagacccagttccgtgaagtctctgaggtctgagcggcttatccggactagccttgatctcgaattggacctgcaggccactaggacctggcactcacagctgacacaagaaatcagcgtcctgaaggagctcaaggaacagctggagcaggctaagagccacggagaaaaggaacttccccagtggctacgcgaggatgagagatttaggttgctgctgcgaatgctggagaaaaggcagatggatagagcagaacacaagggggaacttcaaacagacaaaatgatgagggccgcggccaaggatgtgcatcgactccgcggacaatcttgtaaggaaccacctgaggttcagtcgttcagggaaaagatggccttctttaccaggcctaggatgaacatccctgccctgtccgccgatgacgtctag

SEQ ID NO: 185401 - DNA, 3342 bp, Artificial Sequence
  derived and/or modified sequence
atgcccaggcctgagctgcccctgcctgagggctgggaggaggcccgggactttgatggcaaggtgtactacatcgaccacaccaacagaaccacctcctggattgacccccgggaccgctacaccaagcccctgacctttgctgactgcatcagtgatgagctgcccctgggctgggaggaggcctatgacccccaggtgggggactacttcatcgaccacaacaccaagaccacccagatcgaggacccccgggtgcagtggaggcgggagcaggagcacatgctgaaggactacctggtggtggcccaggaggccctgagcgcccagaaggagatctaccaggtgaagcagcagaggctggagctggcccagcaggagtaccagcagctgcatgctgtgtgggagcacaagctgggcagccaggtgtccctggtgtctggcagcagcagcagcagcaaatatgaccctgagatcctgaaggccgagatcgccacagccaagagccgggtgaacaagctgaagcgggagatggtgcacctgcagcacgagctgcagttcaaggagcggggcttccagaccctgaagaagattgacaagaagatgtctgatgcccagggcagctacaagctggatgaggcccaggccgtgctgcgggagaccaaggccatcaagaaggccatcacctgtggggagaaggagaagcaggacctgatcaagagcctggccatgctgaaggatggcttcagaacagaccggggcagccacagcgacctgtggagcagcagcagcagcctggagagcagcagcttccccctgcccaagcagtacctggatgtgagcagccagacagacatcagcggcagctttggcatcaacagcaacaaccagctggccgagaaggtgcggctgcggctgcgctatgaggaggccaagagaagaattgccaacctgaagatccagctggccaagctggacagcgaggcctggccaggagtgctggacagcgagcgggacaggctcatcctgatcaatgagaaggaggagctgctgaaggagatgaggttcatcagccccaggaagtggacccagggcgaggtggagcagctggagatggccaggaagaggctggagaaggacctgcaggccgcccgggacacccagagcaaggccctgacagagcggctgaagctgaacagcaagaggaaccagctggtgcgggagctggaggaggccacccggcaggtggccaccctgcacagccagctgaagagcctgagcagctccatgcagagcctgagcagcggcagcagccctggcagcctgaccagcagccggggcagcctggtggccagcagcctggacagcagcaccagcgccagcttcacagacctgtactatgacccctttgagcagctggacagcgagctgcagagcaaggtggagttcctgctgctggagggcgccaccggcttccggcccagcggctgcatcaccaccatccatgaagatgaggtggccaagacccagaaggccgagggcggcggccgcctgcaggccctgcggagcctgagcggcacccccaagtccatgaccagcctgagccccaggagcagcctgagcagccccagccccccctgcagccccctgatggctgaccccctgctggccggagatgccttcctgaacagcctggagtttgaggaccctgagctgagcgccaccctgtgtgagctgagcctgggcaacagcgcccaggagcgctaccgcctggaggagcccggcacagagggcaagcagctgggccaggccgtgaacacagcccagggctgcggcctgaaggtggcctgtgtgtctgctgctgtgtctgatgagagcgtggccggggacagcggcgtgtatgaggcctctgtgcagaggctgggcgccagcgaggccgccgcctttgacagtgatgagagcgaggccgtgggcgccacccgcatccagatcgccctgaagtatgatgagaagaacaagcagtttgccatcctgatcatccagctgagcaacctgagcgccctgctgcagcagcaggaccagaaggtgaacatccgggtggccgtgctgccctgcagcgagagcaccacctgcctcttccgcacccggcccctggatgccagtgacaccctggtgttcaatgaggtgttctgggtgtccatgagctacccagccctgcaccagaagaccctgcgggtggatgtgtgcaccacagacaggagccacctggaggagtgcctgggcggggcccagatcagcctggccgaggtgtgccgctctggagagaggagcacccgctggtacaacctgctgagctacaagtacctgaagaagcagagccgggagctgaagcctgtgggcgtgatggccccagccagcggccctgccagcacagatgctgtgtctgccctgctggagcagacagctgtggagctggagaagaggcaggagggccgcagcagcacccagaccctggaggacagctggaggtatgaggagaccagtgaaaatgaggccgtggccgaggaggaggaggaggaggtggaggaggaggagggggaggaggatgtgttcacagagaaggccagcccagacatggatggctacccagccctgaaggtggacaaggagaccaacacagagaccccagcccccagccccaccgtggtgcggcccaaggaccggcgggtgggcacccccagccagggccccttcctgcggggcagcaccatcatccgcagcaagaccttcagccctggcccccagagccagtatgtgtgccgcctgaacagaagtgacagcgacagcagcaccctgagcaagaagcccccatttgtgaggaacagcctggagaggagatctgtgaggatgaagaggcccagctctgtgaagagcctgcggtctgagcggctcatccgcaccagcctggacctggagctggacctgcaggccaccaggacctggcacagccagctgacccaggagatctctgtgctgaaggagctgaaggagcagctggagcaggccaagagccatggagagaaggagctgccccagtggctgcgggaggatgagcgcttccggctgctgctgaggatgctggagaagaggcagatggacagagctgagcacaagggggagctgcagacagacaagatgatgagagctgctgccaaggatgtgcaccggctgcggggccagagctgcaaggagcccccagaggtgcagagcttccgggagaagatggccttcttcacccggcccaggatgaacatcccagccctgtctgcagatgatgtgtag

SEQ ID NO: 185402 - DNA, 3342 bp, Artificial Sequence
  derived and/or modified sequence
atgccccggcccgagctgcccctgcccgagggctgggaggaggcccgggacttcgacgggaaggtgtattacatcgaccacactaaccgaaccaccagctggatcgatcccagagatcgttacactaagccactgacatttgcagactgcatcagcgacgagctgcctcttggctgggaggaagcctatgatccacaggtgggggactattttatcgatcacaataccaagaccacacaaattgaggacccccgcgtccagtggcggagggaacaggaacacatgctgaaagactacctggttgttgcccaggaagcactatctgcgcagaaggaaatttatcaggtcaagcagcagcgattggaactcgcacaacaggaatatcagcagctccatgctgtgtgggaacacaaattgggcagccaggtaagtcttgtgtcagggtcttcctcatcaagtaagtacgaccctgagatcctgaaggctgagatcgcaaccgcaaaatctcgagtcaacaagcttaaaagggagatggtgcatctccagcacgagctgcaattcaaggagagaggtttccaaaccttaaagaaaattgacaagaagatgtctgacgcccaggggtcttataagctggatgaggcgcaggctgtactgcgggagacaaaggcaattaaaaaagccattacctgcggggaaaaggagaaacaggacttgattaaatcccttgcaatgctgaaggacggctttaggacagatagaggaagtcatagcgatctttggagcagcagctcatcattagagtcatcttctttcccacttcccaaacaatacttagacgtgagcagccaaaccgatatttcaggcagcttcggtattaattcaaataaccagcttgccgaaaaggttaggttgaggctgaggtacgaggaagccaaaaggcgcatagctaatttgaagatccaattagcgaaactagacagcgaggcatggcctggggtacttgattcagagagagatcgcctgattctgattaacgagaaggaggagttattgaaggagatgaggtttatttctcctagaaagtggacccagggggaggtcgagcagctcgagatggcaaggaagaggctagaaaaggacctccaagcggctagagacacccaatcaaaggctttgaccgaaagactcaagctcaattctaaaagaaatcagctagtgcgtgagctcgaggaggctactcgccaggtggctacacttcactcccaactgaagtcgctcagcagtagcatgcagtcactaagctctggttcctccccgggctcattgactagctcccggggctctctcgttgcctcctcgttggactcaagcaccagtgcctcctttactgatttgtactacgatccattcgagcagctagatagcgaattacagagtaaggtagaattcctcctgctggagggagcgacaggctttcgcccttccggttgcatcacaactatccacgaggacgaagtggccaagacacagaaggcggagggaggcggccgcctgcaggccctacgctcactgtcaggcacccctaagtctatgacaagcctgtccccccggtcatctctgagctccccctcgcccccttgttccccactcatggcggaccctctcctagccggagacgcgttcttgaattccctggaatttgaggaccccgagcttagcgccacactgtgtgagttatcccttggcaattccgcacaagagcgatacaggctggaagagcctggcacggaagggaaacagctggggcaagctgttaataccgcgcaggggtgtggactcaaggtggcatgcgtgtctgccgctgtgtctgatgagtctgtggccggtgacagtggcgtttatgaagcatctgtacaacgcctaggagcctctgaggcagccgcattcgacagcgatgagtctgaggccgtcggagcaactcgcatccagatcgccctcaagtacgacgaaaagaacaaacagttcgcgatactcatcattcaactcagcaacctctctgctctgctgcagcagcaagatcagaaggtgaacatcagggtggcagtgcttccttgttccgagtcgacaacatgtctgtttcgaactagaccactcgacgccagcgatactctggtgttcaacgaggtcttctgggtcagtatgtcctacccagcactgcaccagaagactctgcgggttgacgtctgtacaacagaccgctcccatttggaggagtgcctgggtggcgcccagatatctcttgcggaagtctgcagaagcggggaaagatcaactcgatggtacaaccttctttcttataaatatcttaagaagcaaagcagggagctgaaacccgttggcgtaatggcccccgccagtggacctgcctctacagacgccgtgtccgctctcctcgagcagaccgcggtggaacttgagaagcgtcaggagggacggagtagcacccaaaccttggaggactcttggcggtacgaagaaacctccgaaaatgaagcagtggcggaagaagaggaagaggaggtggaggaagaggaaggggaagaagatgttttcacagaaaaggcaagcccagatatggacggctaccctgcccttaaggtcgacaaggagaccaatacagagacccctgcaccctcaccaactgtagtgagaccgaaagatcgtcgggtaggtacaccctcccagggtcccttcctacggggaagtaccataattcgcagcaaaacattctcaccaggcccccagagccaatacgtttgcaggctgaaccggagcgatagcgactccagcaccctatccaagaagccccctttcgtgcgcaactctctggaacggcggagcgtcagaatgaaacgcccatcatccgttaaatctttaaggtccgagcgcttgatcagaacatccctcgacctagagctggacttgcaggccaccagaacctggcatagccagttgacacaggaaatctcagtattgaaagagctgaaggagcagctagaacaggccaagtcccatggtgaaaaagaacttccgcagtggctgcgagaggatgagaggttccgtctgttgctgagaatgctggaaaagcgacagatggatagggcagagcacaaaggggagctgcaaacggataagatgatgcgggccgctgctaaggatgttcacagactcagaggacagagctgcaaggaaccgccagaagtgcagtccttccgcgaaaaaatggcttttttcactcgcccacgcatgaacatacccgccctgagcgccgacgatgtgtag

SEQ ID NO: 185403 - DNA, 3342 bp, Artificial Sequence
  derived and/or modified sequence
atgcctagaccagagctccccttgcctgagggctgggaggaggcacgggatttcgatggcaaggtttattatattgaccacacgaatcgcaccacatcctggattgatcccagggatcgatataccaaaccactcacattcgctgactgtatttccgacgaattaccgctgggatgggaagaagcatacgatccacaggtcggggattacttcattgatcacaacactaagaccacacagattgaggaccccagggtccagtggcgacgggagcaggaacatatgttaaaggattatttggttgtcgcccaagaggccctgtctgcccagaaggaaatctatcaggtcaaacaacagaggcttgagctcgctcagcaggagtaccagcaactacacgccgtgtgggagcataagctgggaagccaggtgtccttggtatcagggtcctcatcaagtagcaagtacgaccccgaaattttgaaggccgaaattgccacagccaagagtcgcgtcaacaagcttaagagagaaatggtccacctgcagcacgagcttcagtttaaagagcgcggtttccagactttaaagaagattgacaaaaagatgagcgacgcacaggggtcctataagttggacgaagcccaggccgtgctgagggaaaccaaggcaatcaagaaagccatcacctgtggcgagaaagaaaagcaggatttgattaagagcctggccatgctgaaggatggctttagaaccgatcgcggtagccacagcgacctgtggtcctcaagcagcagcctggaatcctcctcatttcccctgcccaagcagtacttggacgttagctcccagactgatataagcggctcgtttggcatcaatagcaataatcagttagccgagaaggttagactccggctccggtatgaagaagcaaaaaggagaatcgccaacctcaagattcagctggctaagctggatagtgaggcttggcctggagttctggactccgaacgagaccgactgatccttatcaacgagaaagaagagctgctcaaagagatgcgattcatatctccaaggaaatggactcagggagaagtggagcagctagagatggccagaaaacgactcgagaaagaccttcaagcggctagagacactcagtcaaaagccctgaccgagagattaaagttgaattccaaaaggaatcaattggtccgtgaacttgaagaggcgaccaggcaggtggcgacactccattcacaattgaagtccctctcctctagtatgcagagcctcagcagcggaagcagcccaggatccctgacaagtagtcgcggttcgctggtggctagttccctggatagctccactagcgcttcatttaccgatctctattacgacccgtttgagcagctggatagtgagctccagtccaaagtcgaattcctccttctagaaggggctactgggtttcgtccgagcggctgcatcactacaattcacgaggatgaggtcgccaaaacacagaaagccgagggcggaggacggctgcaggctcttagaagcttatccggtacaccaaaaagcatgaccagtctgagcccacgctctagcttaagttctccatcacctccctgcagtcctctaatggcagaccctctgttggctggcgacgcttttttgaactctttggagtttgaagaccctgaattgtccgccactctttgtgagctgagcctggggaactctgcgcaggagcggtatcgtctggaagaaccgggtaccgaaggaaaacagctagggcaggcagtgaacacggcacagggctgcggacttaaagtggcctgtgtctctgccgctgtgtcagatgagtccgtggcaggcgattcaggagtgtatgaagcctccgtacagaggctcggtgcttcagaggcagcagcctttgactccgatgagtctgaagctgtgggcgctactcggatacagattgctttgaaatacgatgagaaaaacaaacaatttgcaattctgataattcagctgtccaacctatcggcgttactgcaacagcaagatcagaaagtcaacattagagttgcggtcctgccttgttccgagagcaccacttgtctgtttcggacacgccctcttgacgcatctgacaccctcgtgttcaacgaggtgttctgggttagtatgtcctaccccgctctgcaccagaagaccctgcgtgtggacgtatgtaccaccgacaggtcacacctggaggaatgtctcggaggagcccagatttcccttgccgaagtatgccggagcggtgaacgatccacccgctggtacaacctactttcatataagtatctcaaaaaacagagtcgagagctgaaacctgttggagttatggcaccggctagcgggccagcgtccacggacgctgtctcagccctgttggagcagactgccgtggaactggaaaagcgccaggaaggtagaagctccacccaaaccctagaagattcctggagatatgaagagacctccgagaatgaagcagtggcggaggaagaggaggaggaagtggaggaagaggaaggggaagaggacgtcttcactgaaaaggctagtccggatatggacggctaccctgcccttaaagtcgacaaggaaaccaacactgaaactccagccccatctccaactgtagtcagacctaaagacagacgcgtggggaccccatcccagggtccttttctacgcggaagtacaattatcaggagcaaaacttttagccccggtcctcagagtcagtacgtgtgtagacttaacaggagtgatagcgactcctccaccctgagtaagaaaccgccatttgtgaggaactctctggagcgccgatcagtgaggatgaaacgcccatcaagtgtgaaatccctgcgctccgaacggctgatcaggacatccctcgacctggaattggatttacaggcaaccagaacatggcactcccagctcacccaagaaatctcagttttgaaggaactgaaagagcagctggagcaggccaagagccatggcgaaaaggagctgcctcagtggctcagagaggatgaaaggttccgcctgctcctgaggatgctggagaaaagacagatggacagggccgagcataaaggcgagctccaaactgataagatgatgagagcagccgctaaggatgttcaccgcctccgcggtcagagttgtaaggagcctcctgaagtgcagtcatttcgagagaaaatggcattcttcactcgccctcgaatgaacatacccgcattaagcgccgacgacgtgtag

SEQ ID NO: 185404 - DNA, 7130 bp, Artificial Sequence
  derived and/or modified sequence
ggggcagcgcggttacctgcaccgcccgagccgcacctggcggaggcagaagtcacaaacccggcgagctcagagcggtggagcggagaggagggacggcacccggctgcagggaggagggaggcggcagcggcagcggcggcgtggagggcgcagcgcgccgcgcggcggaggagggcagacggcggcggcggcggcgctcggctcgctctgcccggccggctgggcgcgcacccgggctcgcaccgcgccgctgcggacgcacatggcagcgtgagaggccggcggcgggaggagcgggcggcgccgggtcggggctgcagggccgcatggacagcggcgccaccccggccggcccctactagggccccccatctgcgggcgccaccccccggatcatggtgcctcggcggccgcccgggctaagagcggccggctggagccgctgagcccccgctgcggccgggagctgcatgggggagcgccggcagcgcttgggaagatgccccggccggagctgcccctgccggagggctgggaggaggcgcgcgacttcgacggcaaggtctactacatagaccacacgaaccgcaccaccagctggatcgacccgcgggacaggtacaccaaaccgctcacctttgctgactgcattagtgatgagttgccgctaggatgggaagaggcatatgacccacaggttggagattacttcatagaccacaacaccaaaaccactcagattgaggatcctcgagtacaatggcggcgggagcaggaacatatgctgaaggattacctggtggtggcccaggaggctctgagtgcacaaaaggagatctaccaggtgaagcagcagcgcctggagcttgcacagcaggagtaccagcaactgcatgccgtctgggagcataagctgggctcccaggtcagcttggtctctggttcatcatccagctccaagtatgaccctgagatcctgaaagctgaaattgccactgcaaaatcccgggtcaacaagctgaagagagagatggttcacctccagcacgagctgcagttcaaagagcgtggctttcagaccctgaagaaaatcgataagaaaatgtctgatgctcagggcagctacaaactggatgaagctcaggctgtcttgagagaaacaaaagccatcaaaaaggctattacctgtggggaaaaggaaaagcaagatctcattaagagccttgccatgttgaaggacggcttccgcactgacagggggtctcactcagacctgtggtccagcagcagctctctggagagttcgagtttcccgctaccgaaacagtacctggatgtgagctcccagacagacatctcgggaagcttcggcatcaacagcaacaatcagttggcagagaaggtcagattgcgccttcgatatgaagaggctaagagaaggatcgccaacctgaagatccagctggccaagcttgacagtgaggcctggcctggggtgctggactcagagagggaccggctgatccttatcaacgagaaggaggagctgctgaaggagatgcgcttcatcagcccccgcaagtggacccagggggaggtggagcagctggagatggcccggaagcggctggaaaaggacctgcaggcagcccgggacacccagagcaaggcgctgacggagaggttaaagttaaacagtaagaggaaccagcttgtgagagaactggaggaagccacccggcaggtggcaactctgcactcccagctgaaaagtctctcaagcagcatgcagtccctgtcctcaggcagcagccccggatccctcacgtccagccggggctccctggttgcatccagcctggactcctccacttcagccagcttcactgacctctactatgacccctttgagcagctggactcagagctgcagagcaaggtggagttcctgctcctggagggggccaccggcttccggccctcaggctgcatcaccaccatccacgaggatgaggtggccaagacccagaaggcagagggaggtggccgcctgcaggctctgcgttccctgtctggcaccccaaagtccatgacctccctatccccacgttcctctctctcctccccctccccaccctgttcccctctcatggctgaccccctcctggctggtgatgccttcctcaactccttggagtttgaagacccggagctgagtgccactctttgtgaactgagccttggtaacagcgcccaggaaagataccggctggaggaaccaggaacggagggcaagcagctgggccaagctgtgaatacggcccaggggtgtggcctgaaagtggcctgtgtctcagccgccgtatcggacgagtcagtggctggagacagtggtgtgtacgaggcttccgtgcagagactgggtgcttcagaagctgctgcatttgacagtgacgaatcggaagcagtgggtgcgacccgaattcagattgccctgaagtatgatgagaagaataagcaatttgcaatattaatcatccagctgagtaacctttctgctctgttgcagcaacaagaccagaaagtgaatatccgcgtggctgtccttccttgctctgaaagcacaacctgcctgttccggacccggcctctggacgcctcagacactctagtgttcaatgaggtgttctgggtatccatgtcctatccagcccttcaccagaagaccttaagagtcgatgtctgtaccaccgacaggagccatctggaagagtgcctgggaggcgcccagatcagcctggcggaggtctgccggtctggggagaggtcgactcgctggtacaaccttctcagctacaaatacttgaagaaacagagcagggagctcaagccagtgggagtcatggcccctgcctcagggcctgccagcacggacgctgtgtctgctctgttggaacagacagcagtggagctggagaagaggcaggagggcaggagcagcacacagacactggaagacagctggaggtatgaggagaccagtgagaatgaggcagtagccgaggaagaggaggaggaggtggaggaggaggagggagaagaggatgttttcaccgagaaagcctcacctgatatggatgggtacccagcattaaaggtggacaaagagaccaacacggagaccccggccccatcccccacagtggtgcgacctaaggaccggagagtgggcaccccgtcccaggggccatttcttcgagggagcaccatcatccgctctaagaccttctccccaggaccccagagccagtacgtgtgccggctgaatcggagtgatagtgacagctccactctgtccaaaaagccaccttttgttcgaaactccctggagcgacgcagcgtccggatgaagcggccttcctcggtcaagtcgctgcgctccgagcgtctgatccgtacctcgctggacctggagttagacctgcaggcgacaagaacctggcacagccaattgacccaggagatctcggtgctgaaggagctcaaggagcagctggaacaagccaagagccacggggagaaggagctgccacagtggttgcgtgaggacgagcgtttccgcctgctgctgaggatgctggagaagcggcagatggaccgagcggagcacaagggtgagcttcagacagacaagatgatgagggcagctgccaaggatgtgcacaggctccgaggccagagctgtaaggaacccccagaagttcagtctttcagggagaagatggcatttttcacccggcctcggatgaatatcccagctctctctgcagatgacgtctaatcgccagaaaagtatttcctttgttccactgaccaggctgtgaacattgactgtggctaaagttatttatgtggtgttatatgaaggtactgagtcacaagtcctctagtgctcttgttggtttgaagatgaaccgactttttagtttgggtcctactgttgttattaaaaacagaacaaaaacaaaacacacacacacacaaaaacagaaacaaaaaaaaccagcattaaaataataagattgtatagtttgtatatttaggagtgtatttttgggaaagaaaatttaaatgaactaaagcagtattgagttgctgctcttcttaaaatcgtttagattttttttggtttgtacagctccaccttttagaggtcttactgcaataagaagtaatgcctgggggacggtaatcctaataggacgtcccgcacttgtcacagtacagctaatttttcctagttaacatattttgtacaatattaaaaaaatgcacagaaaccattgggggggattcagaggtgcatccacggatcttcttgagctgtgacgtgtttttatgtggctgcccaacgtggagcgggcagtgtgataggctgggtgggctaagcagcctagtctatgtgggtgacaggccacgctggtctcagatgcccagtgaagccactaacatgagtgaggggagggctgtggggaactccattcagttttatctccatcaataaagtggcctttcaaaaagaatcttcctcttgctctctttttctttcctacccctcacttcatctgtttccctgatttttgactctcccctttccagtcatttctttcccacccatccgcagtcctggaaacatttattttttcttttgcccactgttttcatttgctcattaaattaaaatgactgctcggctcattgggaatccacatccccaagttagactggggatatgctctctgtactgtctccttctatggaattccaccccacccagagagagatgacttcacagtttgttcatatgagcatcatcccatgtcgtccccaacccaggggctggtaggtgctacagcttgtgcttcatgctgctcctgtggcccctattcctacccagctcagagctttgcagggtctactgcagacaatcagaagtcagtttctaacaaatagcaacagccacaaatctcttcctccttcctctctgacattaccctgtgcaacttttctcaaagtctgttgcaccactcagcaaagcaagttgcaccagctatatcagaatcacctggggcagcctattaaaaatgcagactgttgagaccatcctggctaacacggtgaaaccctgtctctactaaaaatacaaaaaattagccggccgtggtggcgggcagctactcgggaggctgaggcaggagaatgacctgaacctgggaggcagagcttgcagtgagctgagattgtgccactgcactccagcctgggtgacagagcaagactccgtctcaaaaaaaaaaaaaaaagaaaaatgcagactggctggcgcggtggctcatgcttgtaatcccagcactttgggaggctgaggcgggcagatcaactgagatcgggggttcgagaccagcctgatcaacatggagaaacctggtctctactaaaaatacataattagctgggcgtagtggcgcatacctgtaatcccagctacttgggtggccaaggcttgaacccaggaggcggaggttgcggtgagccgagatggcgccattgactccagcctgggcaacaagagcgtaactccatctcaaaaaaataataataataaaaataaaatgcagactgtcaggtcctctctagacccactgaactatcccgcccaccctgggacggtccccagtgccagtgttttacccatgttccctctgtaagtcttatgcacaccgcaatttgagagccccactggtataaagtgagtgaaacccaggcagagacaggcaaaatggtgaggcccgcatcctattggtgagtcacacagggaacgctgaaattcatggccttctccaggctactgggaacccatgggcggtgatggagggagtggtgccaccttcacttgctgctgaggctcttccccctctccccagcatactccttacctggctgtctctcctcatgtataaggaacctatagtggtgtagaatctactcttcttccccctgtggcttccaggcccccctgtatagctgctatccagcccgatttctcaccactggcccagggcttcctcctgccccgtggcttcacgtctctgaacacatcaatctctgatgttctctctccttccattgaattccaccagacacattcagggtttacttcgtaatgtcttcatatgagtatcaatcaacaccttccccaactcaattgtactaggttgtagagcacaaggatggtctcgtgctgctctgtggcacctgtgcctacactcctctgagctttgaggaggctgctctctttgctgaccccatgatcttttctgcccttctgttaagggcattggccacagcaacggggcaaatgccccaagctggctgtaagtgacccatccctttggctcccatgattagaccaaggagaggcatggggtccagctgagccattcagaaccattccttagcattttccactcaaaggttagagatgagattttctcttcccaaggctacctctggccatggttccagcttcatgggggcaatgggattaggaaaatgaggtcaacctgcaaaggaaagcagatgcaagagatggagacagaatgggggtgtcctggggatcttggagcctgaattcattggcacaaaaggcagcagcatcctcactgtatctgcagtccatttggactcaataaaaactttgaaagtcacatgtgttatggaattccttctcagtgacacattcatctgtgctcagttgtcccagcaagggtcagcccctcatacccctgcagcatccgctgctatgaagcagagctgtaaacgccctccctgtgtataggaaaagctacatggagcaaatcctcctgcctgaagaagtgcatctcagcatcacttcagctgtcggggcatttgtggggagaaccagaccacctctgcggaaggcagcagaccctcttccagccatggatggagttgaattctctataaacggttcaccagcaaaccaccaatacattccattgtttgcctagagagaaatttaaaaataaataaatgttcacttataa

SEQ ID NO: 185405 - protein, 1186 aa, Artificial Sequence
  derived and/or modified sequence
MSKLKVIPEKSLTNNSRIVGLLAQLEKINAEPSESDTARYVTSKILHLAQSQEKTRREMTAKGSTGMEILLSTLENTKDLQTTLNILSILVELVSAGGGRRVSFLVTKGGSQILLQLLMNASKESPPHEDLMVQIHSILAKIGPKDKKFGVKARINGALNITLNLVKQNLQNHRLVLPCLQLLRVYSANSVNSVSLGKNGVVELMFKIIGPFSKKNSSLIKVALDTLAALLKSKTNARRAVDRGYVQVLLTIYVDWHRHDNRHRNMLIRKGILQSLKSVTNIKLGRKAFIDANGMKILYNTSQLPVIPVTGPVAQLYSLPPEVDDVVDESDDNDDIDVEAENETENEDDLDQNFKNDDIETDINKLKPQQEPGRTIEDLKMYEHLFPELVDDFQDYDLISKEPKPFVFEGKVRGPIVVPTAGEETSGNSGNLRKVVMKENISSKGDEGEKKSTFMDLAKEDIKDNDRTLQQQPGDQNRTISSVHGLNNDIVKALDRITLQNIPSQTAPGFTAEMKKDCSLPLTVLTCAKACPHMATCGNVLFEGRTVQLGKLCCTGVETEDDEDTESNSSVEQASVEVPDGPTLHDPDLYIEIVKNTKSVPEYSEVAYPDYFGHIPPPFKEPILERPYGVQRTKIAQDIERLIHQSDIIDRVVYDLDNPNYTIPEEGDILKFNSKFESGNLRKVIQIRKNEYDLILNSDINSNHYHQWFYFEVSGMRPGVAYRFNIINCEKSNSQFNYGMQPLMYSVQEALNARPWWIRMGTDICYYKNHFSRSSVAAGGQKGKSYYTITFTVNFPHKDDVCYFAYHYPYTYSTLQMHLQKLESAHNPQQIYFRKDVLCETLSGNSCPLVTITAMPESNYYEHICHFRNRPYVFLSARVHPGETNASWVMKGTLEYLMSNNPTAQSLRESYIFKIVPMLNPDGVINGNHRCSLSGEDLNRQWQSPSPDLHPTIYHAKGLLQYLAAVKRLPLVYCDYHGHSRKKNVFMYGCSIKETVWHTNDNATSCDVVEDTGYRTLPKILSHIAPAFCMSSCSFVVEKSKESTARVVVWREIGVQRSYTMESTLCGCDQGKYKGLQIGTRELEEMGAKFCVGLLRLKRLTSPLEYNLPSSLLDFENDLIESSCKVTSPTTYVLDEDEPRFLEEVDYSAESNDELDIELAENVGDYEPSAQEEVLSDSELSRTYLP

SEQ ID NO: 185406 - DNA, 3561 bp, Artificial Sequence
  derived and/or modified sequence
atgagtaagctgaaagtgattcccgagaagtccctcacaaacaactctcgcattgtcggattgttagcccagcttgagaaaatcaacgctgagccgtcggaatcagacactgcccggtacgtgacatcaaagatactgcaccttgctcagagtcaagaaaagacgcgacgagaaatgacagccaaaggctcaaccgggatggagatccttctctccacgctggagaatactaaagacttacagacaacccttaatatattgagcatcttagtggagctggtgtccgccggaggcggacgcagggtcagcttccttgtgaccaagggagggtcccagatcctcctgcagctgctgatgaatgcatcgaaggaaagccccccacacgaagacttgatggtgcagatccactccatcctggctaagattgggcctaaagacaagaaatttggggtgaaggcccgcataaacggtgccctgaacatcacccttaacctggtcaaacagaacctgcagaaccatcgccttgtgctgccgtgtctgcagctgctcagagtgtattccgcgaacagtgttaactctgtgtccttgggaaaaaatggggtcgtagagctgatgttcaagatcatcggcccatttagtaaaaaaaattcctctttgatcaaagttgccctggataccttagccgccctgctgaaaagcaaaaccaacgctagaagagcagtcgaccgcggatacgttcaggtgctgttgactatttacgtagattggcataggcatgacaataggcaccggaatatgcttattaggaaggggatactgcagtccctgaagtctgtcaccaacatcaagctggggaggaaagcattcatcgacgccaatggaatgaaaatcctctataatacatcacagctcccggtgatccctgtgaccggtcccgtcgctcagctctattcccttccccctgaggtcgacgatgtcgtggatgagagcgatgataatgatgacattgacgtcgaggccgaaaatgaaaccgaaaacgaagatgacctcgatcagaactttaagaacgacgatatcgagaccgatatcaacaaactcaaacctcaacaggagcctggacgcacgatcgaggatctaaagatgtacgaacacctcttcccagaactggtggacgacttccaggattatgaccttatcagcaaagaacccaaaccattcgtcttcgaaggtaaggtgagagggcccatcgttgttccgacagccggggaggaaactagcgggaactcaggaaatcttagaaaggtggtaatgaaggagaacattagctccaagggagacgaaggcgagaaaaaaagtacatttatggacctcgccaaagaagacataaaggataacgacaggactctgcagcagcagcctggcgaccagaatcgcaccatttcctctgtgcacggactgaacaatgacatcgttaaagcattggaccgcatcaccttgcaaaatatcccatcccaaacggccccagggtttacagctgaaatgaaaaaggattgttccctcccgcttactgttttaacttgcgccaaggcctgtccccacatggccacctgcggaaacgtgttattcgagggccgaaccgtgcagctgggtaagttatgctgtaccggggtagaaaccgaagatgatgaagatacggaaagcaactcttcagtcgagcaagcctccgtggaagtgcccgatgggcctaccctgcatgatcccgatttgtacattgagattgttaagaatacaaaatctgtccctgagtacagcgaggtggcctaccctgactactttggccacatacccccaccttttaaggagcccattctggagagaccatacggtgtgcaacgcaccaagatagctcaggatattgagcgactcatacatcaatcggacatcatcgaccgtgtagtctacgatctcgataaccccaactatacaattcctgaggaaggcgacatcctcaagtttaatagtaagttcgagtcgggcaacctgagaaaggtcatacagatacgtaaaaacgaatacgacctaatcttgaactcagatattaacagtaaccactatcaccaatggttctactttgaggtttctggtatgagacctggagtggcttaccgttttaacataatcaattgtgagaaatccaactcacagttcaattacgggatgcagcccttgatgtatagtgtccaggaagcactgaatgcacggccatggtggatcaggatgggaaccgacatctgctactacaaaaaccacttttcacgaagctcagtggccgctggcggtcagaagggcaaatcatactataccatcacatttaccgtgaattttcctcacaaagatgatgtatgttactttgcctaccattacccttatacctactctacactgcagatgcacctacagaagctagaatccgctcacaatcctcagcagatctactttcgcaaagacgtgctgtgtgaaacactgagtgggaactcttgtccccttgtgaccataactgcaatgcccgagtcaaattactatgaacacatctgtcactttcggaacagaccttacgtgttcttgtcggctcgtgttcacccaggggagaccaatgcgagctgggtgatgaagggaactctggagtacctgatgtccaacaatcccactgcacaatcccttagagaatcgtatatttttaaaatagtacccatgctaaatccagacggagtgattaatggcaatcaccgctgcagcctgtccggcgaagacctgaatcgccagtggcagtccccatcccccgacttgcacccaaccatctaccatgcaaaaggactacttcagtatttagctgctgtcaaaagattacccctggtgtactgtgattatcatgggcactccaggaagaaaaacgtttttatgtacggctgctctatcaaggagactgtttggcataccaatgataacgccacctcttgtgatgtggttgaagacactggttaccggactctgcccaaaatcctgagccacatagctcctgctttctgtatgtcctcctgttcattcgtcgtggaaaagtccaaggaatccaccgctcgcgttgtagtttggcgggaaattggagtccagagatcctacaccatggaaagcaccttatgcggctgcgaccaaggtaaatacaagggtctgcagatcgggacacgcgagcttgaggagatgggggcaaagttctgcgtaggtctactgcgcctcaagcgtcttacctctcccctcgagtacaatcttccgagctcactcctcgactttgaaaacgatctgattgagagttcctgtaaagtgacgtcccccacaacatatgtacttgacgaggacgaacctaggtttctagaggaagtggactacagtgcggagtctaacgacgagctcgacattgaactcgccgaaaatgtgggtgactacgaaccttctgcccaagaagaagtgttgtccgactctgagctaagtcgcacttatctaccatag

SEQ ID NO: 185407 - DNA, 3561 bp, Artificial Sequence
  derived and/or modified sequence
atgagcaagctgaaggtgattcctgagaagagcctgaccaacaacagccgcatcgtgggcctgctggcccagctggagaagatcaatgctgagcccagcgagagtgacacagcccgctacgtgaccagcaagatcctgcacctggcccagagccaggagaagacccggcgggagatgacagccaagggcagcacaggcatggagatcctgctgagcaccctggagaacaccaaggacctgcagaccaccctgaacatcctgagcatcctggtggagctggtgtctgctgggggcggccggcgggtgtccttcctggtgaccaagggcggcagccagatcctgctgcagctgctgatgaatgccagcaaggagagcccccctcatgaggacctgatggtgcagatccacagcatcctggccaagattggccccaaggacaagaagtttggagtgaaggcccgcatcaacggggccctgaacatcaccctgaacctggtgaagcagaacctgcagaaccaccggctggtgctgccctgcctgcagctgctgcgggtgtacagcgccaacagcgtgaacagcgtgtccctgggcaagaatggagtggtggagctgatgttcaagatcatcggccccttcagcaagaagaacagcagcctcatcaaggtggccctggacaccctggccgccctgctgaagagcaagaccaatgcccggcgggctgtggaccggggctacgtgcaggtgctgctgaccatctacgtggactggcacagacatgacaacagacacaggaacatgctgatcaggaagggcatcctgcagagcctgaagtctgtgaccaacatcaagctgggcaggaaggccttcattgatgccaacggcatgaagatcctgtacaacaccagccagctgcctgtgattcctgtgacaggccctgtggcccagctgtacagcctgcccccagaggtggatgatgtggtggatgaaagtgatgacaatgatgacattgatgtggaggctgaaaatgaaacagaaaatgaagatgacctggaccagaacttcaagaatgatgacattgaaacagacatcaacaagctgaagccccagcaggagcccggccgcaccatcgaggacctgaagatgtatgagcacctgtttcctgagctggtggatgacttccaggactatgacctgatcagcaaggagcccaagccctttgtgtttgagggcaaggtgcggggccccatcgtggtgcccacagctggggaggagaccagcggcaacagcggcaacctgaggaaggtggtgatgaaggagaacatcagcagcaaaggagatgaaggagagaagaagagcaccttcatggacctggccaaggaggacatcaaggacaatgacaggaccctgcagcagcagcccggggaccagaacagaaccatcagctctgtgcacggcctgaacaatgacatcgtgaaggccctggaccgcatcaccctgcagaacatccccagccagacagcccctggcttcaccgctgagatgaagaaggactgcagcctgcccctgactgtgctgacctgtgccaaggcctgcccccacatggccacctgtggaaatgtgctgtttgagggccgcacagtgcagctgggcaagctgtgctgcacaggagtggagacagaagatgatgaggacacagagagcaacagctctgtggagcaggcctctgtggaggtgcctgatggccccaccctgcatgaccctgacctgtacattgaaattgtgaagaacaccaagtctgtgcctgagtacagcgaggtggcctacccagactacttcggccacatccccccacccttcaaggagcccatcctggagcggccctacggcgtgcagaggaccaagatcgcccaggacatcgagcggctcatccaccagagcgacatcatcgacagagtggtgtatgacctggacaaccccaactacaccatccctgaggagggggacatcctgaagttcaacagcaagtttgagagcggcaacctgaggaaggtgatccagatcaggaagaatgaatatgacctgatcctgaacagcgacatcaacagcaaccactaccaccagtggttctactttgaggtgtctggcatgaggcctggggtggcctaccgcttcaacatcatcaactgtgagaagagcaacagccagttcaactacggcatgcagcccctgatgtacagcgtgcaggaggccctgaatgcccggccctggtggatccgcatgggcacagacatctgctactacaagaaccacttcagccgcagctctgtggccgccggcggccagaagggcaagagctactacaccatcaccttcaccgtgaacttcccccacaaggatgatgtgtgctactttgcctaccactacccctacacctacagcaccctgcagatgcacctgcagaagctggagagcgcccacaacccccagcagatctacttcaggaaggatgtgctgtgtgagaccctgagcggcaacagctgccccctggtgaccatcacagccatgcctgagagcaactactatgagcacatctgccacttcaggaaccggccctacgtgttcctgagcgcccgggtgcaccctggagagaccaatgcctcctgggtgatgaagggcaccctggagtacctgatgagcaacaaccccacagcccagagcctgcgggagagctacatcttcaagatcgtgcccatgctgaacccagatggagtcatcaatggaaaccaccgctgcagcctgagcggggaggacctgaaccggcagtggcagagccccagcccagacctgcaccccaccatctaccacgccaagggcctgctgcagtacctggccgctgtgaagaggctgcccctggtgtactgtgactaccacggccacagcaggaagaagaatgtgttcatgtatggctgcagcatcaaggagaccgtgtggcacaccaatgacaatgccaccagctgtgatgtggtggaggacaccggctaccgcaccctgcccaagatcctgagccacatcgccccagccttctgcatgagcagctgcagctttgtggtggagaagagcaaggagagcacagcccgggtggtggtgtggagagaaattggagtgcagaggagctacaccatggagagcaccctgtgtggctgtgaccagggcaagtacaagggcctgcagatcggcacccgggagctggaggagatgggcgccaagttctgtgtgggcctgctgcggctgaagaggctgaccagccccctggagtacaacctgcccagcagcctgctggactttgaaaatgacctgattgagagcagctgcaaggtgaccagccccaccacctacgtgctggatgaagatgagccccgcttcctggaggaggtggactacagcgctgagagcaatgatgagctggacatcgagctggctgaaaatgtgggggactatgagcccagcgcccaggaggaggtgctgagtgacagcgagctgagcaggacctacctgccctag

SEQ ID NO: 185408 - DNA, 3561 bp, Artificial Sequence
  derived and/or modified sequence
atgagcaagctgaaggtgatccccgagaagagcctgaccaacaacagccgcatagtggggcttttagcccaacttgagaagattaacgcagagccatccgagagtgacacagcacgttacgtaaccagcaaaatcctacacctggcccagtcccaggaaaagacgagacgagagatgaccgccaagggcagcacaggcatggaaatcctgctgagtacccttgaaaatacaaaggaccttcaaacaaccctgaacatcctatctattcttgttgaacttgtctccgccgggggtggtcggcgcgtgtccttcctggtgacaaaagggggctctcagatcctgttacaattgctcatgaatgcgagcaaagaatcccctcctcacgaagatctcatggtacagatacatagcatcttggctaaaatcgggcctaaggataaaaaatttggcgtgaaggccagaattaatggggctttgaatataacactgaatcttgtgaagcagaatctgcaaaatcacaggctcgttctcccttgccttcaactgctcagagtgtattctgcgaatagtgtgaacagcgtgagtttgggcaaaaatggtgtggtggagctcatgtttaagatcattggccctttttcaaagaagaactcctcactgattaaggtggccctggataccctagccgccctcctgaagtccaaaacaaatgctcgtcgggcggttgataggggttacgtccaagtgctgctcacgatctatgtcgactggcacagacacgataataggcaccgtaatatgctaatccgtaaggggattctgcagagcttaaaatccgtgaccaatattaaactgggccgcaaagctttcatcgatgctaatgggatgaagattttatacaacacctcccagctacccgttatacctgttactggtccagtggcacaactatactccctcccacctgaggtcgatgatgtcgtcgacgagtcagatgataacgatgatatcgacgtcgaggcagagaacgagaccgagaacgaggacgatttagaccagaattttaaaaacgatgatatcgaaaccgatattaataaacttaaaccacaacaggagcctgggaggactatcgaggacttgaaaatgtacgaacacctgttcccggaactggtcgatgactttcaagactatgatttgatctctaaagaacccaagcctttcgtgtttgagggcaaagtccggggcccgatcgtcgtccctactgcaggtgaggagactagtggaaactcagggaatttgcggaaggttgtgatgaaggagaatattagttctaagggagacgagggggaaaaaaagagtactttcatggatttggctaaggaggacatcaaggataacgatcgtactctgcaacagcagccaggtgatcagaacaggaccatatcgtcggtgcacggcttgaacaatgacatagtcaaggccttggaccgcatcacgctgcagaatattcctagccagacagcaccagggtttacagccgaaatgaaaaaggattgcagtcttcccctgaccgtcctcacttgtgcaaaggcatgcccgcatatggcaacatgcggtaatgtgctgttcgagggccgtaccgtccaacttgggaagctgtgttgcaccggggttgagactgaggatgacgaggacaccgagtccaatagctcagtggagcaggctagtgtggaagttcctgatggaccgacacttcatgatccagatctgtacatcgaaatagttaagaataccaaatccgtacctgaatacagcgaggtggcctatccagattactttgggcacattcctcctccttttaaggaaccaatcttggagcgcccctatggagtccagcgtaccaagatcgcacaggatatagaacgcctgatccatcagtctgatatcatcgatagggttgtgtatgacctagataatccgaattataccatccctgaggaaggagatattctgaaatttaattccaaatttgagtctggtaacttacgtaaggttattcagatccgcaaaaatgaatacgacctgattctcaattccgacattaattcaaaccactaccaccagtggttctacttcgaggtgagcggcatgaggcctggggtagcgtatcggttcaacattatcaattgtgagaagagcaatagccagttcaactatgggatgcaacctcttatgtactctgtacaagaggctctgaatgcacgcccttggtggatccggatggggaccgatatttgttactacaaaaatcacttttcaagaagctccgtcgctgcggggggacagaagggaaagagctactataccattacgttcaccgtgaacttcccccataaagacgatgtgtgctactttgcctatcactatccctatacatactctacactgcagatgcacctgcagaagctggagtcggcacacaacccacagcagatctacttccggaaggacgtgctgtgcgagaccctcagcggcaacagctgtcccctggtgaccatcaccgccatgccagaaagtaactactacgagcatatatgtcacttcagaaatagaccttacgtattcctgtccgccagagtgcaccccggtgagacaaacgcgagttgggtgatgaaaggtaccctggagtaccttatgtccaataatcctaccgcccaaagcctccgcgaatcctacattttcaagatcgtccccatgttgaatcctgacggcgtgatcaatggcaaccacaggtgttctctgtctggcgaggacctgaacaggcaatggcagagccccagccccgacttgcatcccactatctaccatgccaaaggtctgctccagtaccttgctgccgtgaagcggcttcccctggtgtactgcgattatcacggtcattcccggaagaagaacgtgtttatgtacggctgtagcatcaaggagacagtgtggcacaccaacgacaatgcaacttcttgtgatgttgtggaggacactgggtacaggaccttaccgaagatcctctcccacatcgctcccgctttctgcatgtcaagctgctctttcgtggtggaaaaatccaaggagtccacggctcgcgtggtggtgtggagagagattggtgtgcaacggtcctacaccatggaatccacactctgtgggtgcgatcagggaaaatataagggcttacaaattgggacccgagagttggaagagatgggtgccaaattctgcgtgggcctgcttcggctgaagcgcctcaccagcccattggaatacaacctgcctagctcgctgctggattttgaaaacgacctgatcgagtccagctgtaaagtcacatcacccacaacgtatgtcctcgatgaggatgagcccaggttcctggaggaggttgactactccgccgagtccaatgacgagcttgatattgagctagccgaaaacgtcggtgattatgaaccttctgctcaggaagaggtactttctgactcggagctcagtcggacttacctgccatag

SEQ ID NO: 185409 - DNA, 3561 bp, Artificial Sequence
  derived and/or modified sequence
atgtccaagctgaaagtaatacccgagaagtctctgaccaacaattccaggattgtcggtctccttgcccagttggaaaagatcaacgccgagccgagtgagagtgacactgcacgatatgtgacaagcaagattctgcacctggcacagagccaagaaaagacacgcagagagatgaccgctaagggctcaacggggatggagatcctgctatctaccctcgagaatactaaggacttacagacaacactcaacatcctgtcaatcctggtggaactcgtatcggccggagggggacggcgtgtatcttttctcgtgaccaaaggcggatctcagatcctgttacagctcctgatgaacgcttccaaggaatccccaccacacgaggatttaatggttcagattcattcaatcctcgcaaagatcggacctaaggataaaaaattcggggtgaaagctaggattaacggcgctctgaatatcacacttaacctggtgaaacagaacctgcagaatcacaggctggttcttccttgcctccagctgttgagagtgtacagcgcaaattctgttaactccgtcagtctgggaaagaacggagtcgtggagctgatgtttaaaatcattggcccattttccaagaaaaactcaagtttgattaaagtggctctggatactctggctgccctgctcaaatctaaaactaatgctcggagggcagtcgacagaggctatgtgcaagtattattgacgatctacgtcgattggcaccgacacgataatcggcatcgaaacatgttgattaggaagggcatcttgcagtcactgaaaagtgtgaccaatattaaactgggtcgcaaagcctttatcgatgcaaatggcatgaaaattctgtataatacaagtcagctcccagtaatcccagtgactggccctgtggcacagttgtatagcctcccccctgaagtggatgatgtggtggatgagtcagacgacaatgacgacattgacgttgaggccgaaaatgagaccgagaatgaagacgacctggaccagaactttaagaatgatgatattgagaccgatatcaataagctgaaaccccagcaagaacccggtcgcactattgaggacctcaagatgtatgagcacctattccctgagctcgtggacgactttcaagattatgatctgataagcaaggagcccaagccctttgtgtttgaggggaaggttcgaggacctattgttgttcccaccgccggtgaggaaacctctgggaatagcgggaacttgcgaaaagtggtgatgaaggagaacatatcttcaaagggagacgaaggcgagaagaagagtaccttcatggaccttgccaaggaggatataaaagataatgatcggaccctgcagcaacaacccggtgatcaaaatcgaaccatttcttctgtccacgggctgaataatgatattgtaaaggccctggatagaatcacgctgcaaaacatcccctcacagacggcacccggttttacggccgagatgaagaaggattgtagcctccctctcactgtgctgacatgcgcaaaggcatgtccacacatggccacctgcggcaatgttctattcgaaggaaggactgtccaacttgggaagctctgctgtactggcgtggagaccgaggatgacgaggacaccgaatctaatagctctgtagaacaggcctcagttgaagttcccgatggcccaactctgcacgatcccgatctttacattgagattgtgaagaacactaagtccgtgccagagtacagtgaggttgcttatcctgactactttgggcatatccctccaccctttaaagaacccattctagagagaccgtacggagtccagagaacaaaaatcgcccaggacatcgagcggctaattcaccagagcgatattatagaccgcgtggtctacgacctcgataacccaaactatacgatcccagaagaaggggacattttgaagtttaacagcaagtttgagtccggaaatctgcgcaaagtgattcagattaggaaaaacgagtacgatctcatcctgaacagcgatatcaactcaaaccactaccaccagtggttttactttgaggtcagtgggatgcggccaggggtggcctatcggtttaatatcatcaactgcgaaaaaagtaacagtcagtttaactacgggatgcagccattgatgtactccgtgcaggaagccctcaatgcgaggccttggtggattcgaatggggacagacatatgttattacaaaaaccactttagtagaagctcagtggcagcgggtggccagaaagggaaaagctattacacaattacttttacagtgaacttcccacataaggatgatgtctgttactttgcataccattatccttatacctacagtactctccagatgcacctacaaaaattggagagcgctcacaacccccagcagatatactttcgtaaagacgtgctctgtgagaccctgagcggcaatagctgccctctcgttaccatcacagctatgccagaatctaactactacgagcacatctgccacttccgcaaccgtccttacgtttttctctcagccagggttcacccaggagagaccaacgccagctgggtgatgaaaggcaccctcgagtatttgatgtctaacaaccccacagcccagagtctgcgggagagttacattttcaagatcgtcccaatgctcaatcccgacggagtgataaacgggaatcatagatgctcactgagtggcgaggacctgaatcgccagtggcagtcaccctcacctgatcttcaccccacaatctatcacgccaagggactgctgcagtatttggcagcggtgaaacgactcccacttgtctattgtgattaccacggacactctcgtaagaaaaacgtgttcatgtatggctgcagtatcaaggagaccgtatggcacaccaatgacaacgctacctcctgcgacgtggtggaggacactggctatagaacactgcctaaaattctaagccacatcgccccagctttttgtatgtcctcttgcagtttcgtggttgagaagtccaaggagagtaccgcccgtgtcgtcgtctggagagaaatcggcgtccagagaagttacacaatggagagcactctgtgtggctgtgaccagggtaagtataaaggacttcaaattggcacaagagagctcgaagagatgggtgccaaattctgtgtgggtcttctaagactgaaacgtcttacaagtccacttgagtacaatttgccatcctctttgctggacttcgagaacgacctcatagaatccagctgtaaggtgacctctccaaccacctatgtcctagatgaggacgagccacgttttctggaggaggtggattactccgccgagagtaatgatgaactggacatcgagttggcggaaaacgtgggggactatgagcctagcgcccaggaagaagtcttgagcgactctgagttgtcccggacttacctcccctag

SEQ ID NO: 185410 - DNA, 4205 bp, Artificial Sequence
  derived and/or modified sequence
gctgcggctctgcgcggtccccgccagcgccccatcctgagccgattatctgcaattatgaaatgaagtaactcaagatgagcaagttaaaagtgataccagaaaaaagccttaccaataattctaggatcgtaggactcctggctcaactggagaagatcaatgctgagccttcagaatcagacactgcccgatatgttacatcaaaaattcttcatctggctcagagtcaagaaaaaacaaggagagaaatgacagccaaaggttctacaggaatggaaattctgctgtcaacattagagaacacaaaagatcttcaaactacacttaatatcttaagcattcttgttgagctggtgtcagctggtggaggtcgaagagtgagtttcttagtcaccaaaggtggttcacaaatattgttgcagttacttatgaatgccagcaaagaatctcccccacatgaggacttaatggtacagattcattctattcttgcaaagattggaccaaaagataaaaaatttggagtaaaggctagaattaatggggctctgaatataaccctgaatttggtcaagcagaatttgcagaatcatcgcttggttctaccttgccttcagcttttacgagtatattctgccaactctgtgaattcagtatccttagggaaaaatggagttgtggaactgatgtttaaaatcattggaccatttagtaagaagaattccagtcttataaaggttgctttagacactcttgctgcattgctaaaatcaaaaacaaatgccaggagagctgtagacagaggatatgtccaagtgcttttaacaatttatgtagattggcaccgccatgataaccggcatagaaacatgctcattcggaaaggaattttacagagtttaaaaagtgttacaaacatcaagttgggaagaaaagcatttattgatgccaatgggatgaaaattctgtataatacttcgcaattgcctgttattcctgtgactggtcctgtggctcagctctacagcttacctcctgaagtggatgacgtagtagatgaaagtgatgacaacgatgatattgatgtagaagctgaaaacgaaactgagaatgaagatgacctagatcaaaattttaagaatgatgatattgaaacagatattaacaaactaaaaccccagcaagaaccgggacgaacaatagaagatctaaaaatgtatgaacaccttttccctgagcttgttgatgattttcaggactatgatttaatctccaaagaaccaaagccttttgtatttgagggaaaagtacgtggtcctattgttgttcctacggcaggcgaggaaacatctgggaattctggcaatttaagaaaagttgtaatgaaggagaacatatcttctaaaggagatgaaggtgaaaagaagtctacctttatggatctagcaaaagaagatattaaagataatgatagaacattacaacagcagccaggtgatcaaaatagaactatttcatcagtccatggtttaaacaatgatattgtaaaggccttggaccgaattacattgcagaatattccttctcaaacagccccaggttttactgcagaaatgaagaaggactgcagtcttcctcttactgtccttacctgtgctaaagcatgtccacacatggctacttgtggaaatgttctgtttgagggaagaacagttcagctagggaagctttgctgcactggagttgaaactgaagatgatgaagatactgagtcaaattcatcggtagaacaagcatcggttgaagtacctgatggaccaacactccatgacccagacctctatattgagattgtgaaaaatacgaagtctgtcccagaatattcagaggtggcttatcccgattattttggtcacattccgcctccattcaaagagcctattttagaaaggccttatggtgtacaaaggacaaaaattgctcaagatattgaaaggctaatacatcagagtgatatcatagatcgtgtggtatatgacttggataacccaaattacaccattccagaagagggagatattttgaaatttaactccaaatttgagtctgggaatctgcgcaaagtaattcaaattagaaaaaatgaatatgatcttattctgaactcagacataaacagcaatcattatcatcagtggttttactttgaagtcagtggaatgcgaccaggtgttgcttacaggtttaacatcattaactgtgaaaagtccaacagtcagtttaattatggtatgcaaccactcatgtattcggttcaggaagcattaaatgccagaccatggtggattcgtatggggactgacatttgttactataaaaatcatttctcaagaagttcagttgctgcaggtgggcaaaagggaaaatcctactatacaattacatttactgtcaattttccacataaagatgatgtttgctactttgcttatcactatccatatacgtattcaactttacagatgcatcttcaaaaattggaatcagcacacaatcctcagcaaatctattttcggaaagatgtgttatgtgaaaccctgtctggaaacagctgccccttggtgactataacagcaatgccagagtctaattattatgaacatatctgccatttcagaaatcgcccttacgttttcttgtctgctcgggtacatcctggagaaactaatgcaagttgggttatgaaaggaacgttggaatatctcatgagcaataaccccactgctcagagcttacgagaatcttatatttttaaaattgtccctatgttaaatccagatggtgtcatcaatggaaatcatcgctgttctttaagtggagaggatttgaataggcagtggcaaagtccaagtccggatttacatcctacaatttaccatgctaaggggctgttgcaatacttggctgcagtgaagcgtttacccttggtttattgtgattatcatggccattcccgaaagaagaatgtatttatgtatggttgcagcatcaaagagacagtgtggcataccaatgataatgcaacttcatgtgatgttgtggaggatacgggatacaggacattgcctaagatactgagccatatcgccccagcattttgcatgagcagctgtagcttcgtagtggaaaaatctaaagaatccacagcacgtgttgtagtttggagggaaataggagtacaaagaagttataccatggagagtactttatgtggctgtgatcagggaaaatacaagggtttacagattggtacccgagaactggaagagatgggagcaaaattttgtgttggtcttttacgtttgaaaagactgacctctccattggagtataatctgccttccagcctgcttgactttgaaaatgatttaattgaatcaagctgcaaagtaactagccctaccacttatgtcttggatgaagatgaacctcgattccttgaagaagttgattacagtgcagaaagtaatgatgagttagatattgagttggctgaaaatgtaggagattatgaaccttctgctcaagaagaagtactttctgactctgaattatcaagaacatacctaccttgagcccgctgccatctcttgttaactgcaaagaataaatgaaatatcttggtttttatttcccaggaagcttgagagaaatgagtttatacagagctgactcaaaaagacaaaaagtaacttgggccagtttggtttcaagataataaatgtgttattaattaatgataaaattggcgcttgttttattttcgatattcaatgcactttatgtagcattgaatgatcaaatattggatttacctttaaaaaaaaaacctgagtatcattgcatgaatttttatctccctatggttatatcctgcatcaagtggataattttgaagtgtgttcagaatataaaattgaaattttagagttgttgaaaatcctgacttgttgaaaactaatatatatgtacatggatttctatagatgtgtttgtttagaagtgggtagatattgcagataagactgttcttcagaatcatgttaactattgggttgtgactgaagtagtccagggtttgccttgaaaccattacattctacatttaccaaattaaacaaataaaaactgtattaaatgtt

SEQ ID NO: 185411 - DNA, 3561 bp, Artificial Sequence
  derived and/or modified sequence
atgagcaagctgaaggtgatccccgagaagagcctgaccaacaacagcagaatcgtgggcctgctggcccagctggagaagatcaacgccgagcccagcgagagcgacaccgccagatacgtgaccagcaagatcctgcacctggcccagagccaggagaagaccagaagagagatgaccgccaagggcagcaccggcatggagatcctgctgagcaccctggagaacaccaaggacctgcagaccaccctgaacatcctgagcatcctggtggagctggtgagcgccggcggcggcagaagagtgagcttcctggtgaccaagggcggcagccagatcctgctgcagctgctgatgaacgccagcaaggagagccccccccacgaggacctgatggtgcagatccacagcatcctggccaagatcggccccaaggacaagaagttcggcgtgaaggccagaatcaacggcgccctgaacatcaccctgaacctggtgaagcagaacctgcagaaccacagactggtgctgccctgcctgcagctgctgagagtgtacagcgccaacagcgtgaacagcgtgagcctgggcaagaacggcgtggtggagctgatgttcaagatcatcggccccttcagcaagaagaacagcagcctgatcaaggtggccctggacaccctggccgccctgctgaagagcaagaccaacgccagaagagccgtggacagaggctacgtgcaggtgctgctgaccatctacgtggactggcacagacacgacaacagacacagaaacatgctgatcagaaagggcatcctgcagagcctgaagagcgtgaccaacatcaagctgggcagaaaggccttcatcgacgccaacggcatgaagatcctgtacaacaccagccagctgcccgtgatccccgtgaccggccccgtggcccagctgtacagcctgccccccgaggtggacgacgtggtggacgagagcgacgacaacgacgacatcgacgtggaggccgagaacgagaccgagaacgaggacgacctggaccagaacttcaagaacgacgacatcgagaccgacatcaacaagctgaagccccagcaggagcccggcagaaccatcgaggacctgaagatgtacgagcacctgttccccgagctggtggacgacttccaggactacgacctgatcagcaaggagcccaagcccttcgtgttcgagggcaaggtgagaggccccatcgtggtgcccaccgccggcgaggagaccagcggcaacagcggcaacctgagaaaggtggtgatgaaggagaacatcagcagcaagggcgacgagggcgagaagaagagcaccttcatggacctggccaaggaggacatcaaggacaacgacagaaccctgcagcagcagcccggcgaccagaacagaaccatcagcagcgtgcacggcctgaacaacgacatcgtgaaggccctggacagaatcaccctgcagaacatccccagccagaccgcccccggcttcaccgccgagatgaagaaggactgcagcctgcccctgaccgtgctgacctgcgccaaggcctgcccccacatggccacctgcggcaacgtgctgttcgagggcagaaccgtgcagctgggcaagctgtgctgcaccggcgtggagaccgaggacgacgaggacaccgagagcaacagcagcgtggagcaggccagcgtggaggtgcccgacggccccaccctgcacgaccccgacctgtacatcgagatcgtgaagaacaccaagagcgtgcccgagtacagcgaggtggcctaccccgactacttcggccacatccccccccccttcaaggagcccatcctggagagaccctacggcgtgcagagaaccaagatcgcccaggacatcgagagactgatccaccagagcgacatcatcgacagagtggtgtacgacctggacaaccccaactacaccatccccgaggagggcgacatcctgaagttcaacagcaagttcgagagcggcaacctgagaaaggtgatccagatcagaaagaacgagtacgacctgatcctgaacagcgacatcaacagcaaccactaccaccagtggttctacttcgaggtgagcggcatgagacccggcgtggcctacagattcaacatcatcaactgcgagaagagcaacagccagttcaactacggcatgcagcccctgatgtacagcgtgcaggaggccctgaacgccagaccctggtggatcagaatgggcaccgacatctgctactacaagaaccacttcagcagaagcagcgtggccgccggcggccagaagggcaagagctactacaccatcaccttcaccgtgaacttcccccacaaggacgacgtgtgctacttcgcctaccactacccctacacctacagcaccctgcagatgcacctgcagaagctggagagcgcccacaacccccagcagatctacttcagaaaggacgtgctgtgcgagaccctgagcggcaacagctgccccctggtgaccatcaccgccatgcccgagagcaactactacgagcacatctgccacttcagaaacagaccctacgtgttcctgagcgccagagtgcaccccggcgagaccaacgccagctgggtgatgaagggcaccctggagtacctgatgagcaacaaccccaccgcccagagcctgagagagagctacatcttcaagatcgtgcccatgctgaaccccgacggcgtgatcaacggcaaccacagatgcagcctgagcggcgaggacctgaacagacagtggcagagccccagccccgacctgcaccccaccatctaccacgccaagggcctgctgcagtacctggccgccgtgaagagactgcccctggtgtactgcgactaccacggccacagcagaaagaagaacgtgttcatgtacggctgcagcatcaaggagaccgtgtggcacaccaacgacaacgccaccagctgcgacgtggtggaggacaccggctacagaaccctgcccaagatcctgagccacatcgcccccgccttctgcatgagcagctgcagcttcgtggtggagaagagcaaggagagcaccgccagagtggtggtgtggagagagatcggcgtgcagagaagctacaccatggagagcaccctgtgcggctgcgaccagggcaagtacaagggcctgcagatcggcaccagagagctggaggagatgggcgccaagttctgcgtgggcctgctgagactgaagagactgaccagccccctggagtacaacctgcccagcagcctgctggacttcgagaacgacctgatcgagagcagctgcaaggtgaccagccccaccacctacgtgctggacgaggacgagcccagattcctggaggaggtggactacagcgccgagagcaacgacgagctggacatcgagctggccgagaacgtgggcgactacgagcccagcgcccaggaggaggtgctgagcgacagcgagctgagcagaacctacctgccctag

SEQ ID NO: 185412 - protein, 1205 aa, Artificial Sequence
  derived and/or modified sequence
MTKKEEPPPSRVPRAVRVASLLSEGEELSGDDQGDEEEDDHAYEGVPNGGWHTSSLSLSLPSTIAAPHPMDGPPGGSTPVTPVIKAGWLDKNPPQGSYIYQKRWVRLDTDHLRYFDSNKDAYSKRFISVACISHVAAIGDQKFEVITNNRTFAFRAESDVERKEWMQALQQAMAEQRARARLSSAYLLGVPGSEQPDRAGSLELRGFKNKLYVAVVGDKVQLYKNLEEYHLGIGITFIDMSVGNVKEVDRRSFDLTTPYRIFSFSADSELEKEQWLEAMQGAIAEALSTSEVAERIWAAAPNRFCADCGAPQPDWASINLCVVICKRCAGEHRGLGAGVSKVRSLKMDRKVWTETLIELFLQLGNGAGNRFWAANVPPSEALQPSSSPSTRRCHLEAKYREGKYRRYHPLFGNQEELDKALCAAVTTTDLAETQALLGCGAGINCFSGDPEAPTPLALAEQAGQTLQMEFLRNNRTTEVPRLDSMKPLEKHYSVVLPTVSHSGFLYKTASAGKLLQDRRAREEFSRRWCVLGDGVLSYFENERAVTPNGEIRASEIVCLAVPPPDTHGFEHTFEVYTEGERLYLFGLESAEQAHEWVKCIAKAFVPPLAEDLLARDFERLGRLPYKAGLSLQRAQEGWFSLSGSELRAVFPEGPCEEPLQLRKLQELSIQGDSENQVLVLVERRRTLYIQGERRLDFMGWLGAIQKAAASMGDTLSEQQLGDSDIPVIVYRCVDYITQCGLTSEGIYRKCGQTSKTQRLLESLRQDARSVHLKEGEQHVDDVSSALKRFLRDLPDGLFTRAQRLTWLEASEIEDEEEKVSRYRELLVRLPPVNRATVKALISHLYCVQCFSDTNQMNVHNLAIVFGPTLFQTDGQDYKAGRVVEDLINHYVVVFSVDEEELRKQREEITAIVKMRVAGTASGTQHAGDFICTVYLEEKKAETEQHIKVPASMTAEELTLEILDRRNVGIREKDYWTCFEVNEREEAERPLHFAEKVLPILHGLGTDSHLVVKKHQAMEAMLLYLASRVGDTKHGMMKFREDRSLLGLGLPSGGFHDRYFILNSSCLRLYKEVRSQRPWSGAPETSHRPEKEWPIKSLKVYLGVKKKLRPPTCWGFTVVHETEKHEKQQWYLCCDTQMELREWFATFLFVQHDGLVWPSEPSRVSRAVPEVRLGSVSLIPLRGSENEMRRSVAAFTADPLSLLRNV

SEQ ID NO: 185413 - protein, 627 aa, Artificial Sequence
  derived and/or modified sequence
KCWAVWVGAVWTEGAWQPRVGVICGLKGRMTLSGSRGQEEPPPSRVPRAVRVASLLSEGEELSGDDQGDEEEDDHAYEGVPNGGWHTSSLSLSLPSTIAAPHPMDGPPGGSTPVTPVIKAGWLDKNPPQGSYIYQKRWVRLDTDHLRYFDSNKDAYSKRFISVACISHVAAIGDQKFEVITNNRTFAFRAESDVERKEWMQALQQAMAEQRARARLSSAYLLGVPGSEQPDRAGSLELRGFKNKLYVAVVGDKVQLYKNLEEYHLGIGITFIDMSVGNVKEVDRRSFDLTTPYRIFSFSADSELEKEQWLEAMQGAIAEALSTSEVAERIWAAAPNRFCADCGAPQPDWASINLCVVICKRCAGEHRGLGAGVSKVRSLKMDRKVWTETLIELFLQLGNGAGNRFWAANVPPSEALQPSSSPSTRRCHLEAKYREGKYRRYHPLFGNQEELDKALCAAVTTTDLAETQALLGCGAGINCFSGDPEAPTPLALAEQAGQTLQMEFLRNNRTTEVPRLDSMKPLEKHYSVVLPTVSHSGFLYKTASAGKLLQDRRAREEFSRRWCVLGDGVLSYFENERAVTPNGEIRASEIVCLAVPPPDTHGFEHTFEVYTEGERLYLWAGECGAGS

SEQ ID NO: 185414 - protein, 1210 aa, Artificial Sequence
  derived and/or modified sequence
MTLSGSRGQEEPPPSRVPRAVRVASLLSEGEELSGDDQGDEEEDDHAYEGVPNGGWHTSSLSLSLPSTIAAPHPMDGPPGGSTPVTPVIKAGWLDKNPPQGSYIYQKRWVRLDTDHLRYFDSNKDAYSKRFISVACISHVAAIGDQKFEVITNNRTFAFRAESDVERKEWMQALQQAMAEQRARARLSSAYLLGVPGSEQPDRAGSLELRGFKNKLYVAVVGDKVQLYKNLEEYHLGIGITFIDMSVGNVKEVDRRSFDLTTPYRIFSFSADSELEKEQWLEAMQGAIAEALSTSEVAERIWAAAPNRFCADCGAPQPDWASINLCVVICKRCAGEHRGLGAGVSKVRSLKMDRKVWTETLIELFLQLGNGAGNRFWAANVPPSEALQPSSSPSTRRCHLEAKYREGKYRRYHPLFGNQEELDKALCAAVTTTDLAETQALLGCGAGINCFSGDPEAPTPLALAEQAGQTLQMEFLRNNRTTEVPRLDSMKPLEKHYSVVLPTVSHSGFLYKTASAGKLLQDRRAREEFSRRWCVLGDGVLSYFENERAVTPNGEIRASEIVCLAVPPPDTHGFEHTFEVYTEGERLYLFGLESAEQAHEWVKCIAKAFVPPLAEDLLARDFERLGRLPYKAGLSLQRAQEGWFSLSGSELRAVFPEGPCEEPLQLRKLQELSIQGDSENQVLVLVERRRTLYIQGERRLDFMGWLGAIQKAAASMGDTLSEQQLGDSDIPVIVYRCVDYITQCGLTSEGIYRKCGQTSKTQRLLESLRQDARSVHLKEGEQHVDDVSSALKRFLRDLPDGLFTRAQRLTWLEASEIEDEEEKVSRYRELLVRLPPVNRATVKALISHLYCVQCFSDTNQMNVHNLAIVFGPTLFQTDGQDYKAGRVVEDLINHYVVVFSVDEEELRKQREEITAIVKMRVAGTASGTQHAGDFICTVYLEEKKAETEQHIKVPASMTAEELTLEILDRRNVGIREKDYWTCFEVNEREEAERPLHFAEKVLPILHGLGTDSHLVVKKHQAMEAMLLYLASRVGDTKHGMMKFREDRSLLGLGLPSGGFHDRYFILNSSCLRLYKEVRSQRPWSGAPETSHRPEKEWPIKSLKVYLGVKKKLRPPTCWGFTVVHETEKHEKQQWYLCCDTQMELREWFATFLFVQHDGLVWPSEPSRVSRAVPEVRLGSVSLIPLRGSENEMRRSVAAFTADPLSLLRNV

SEQ ID NO: 185415 - DNA, 3618 bp, Artificial Sequence
  derived and/or modified sequence
atgactaaaaaagaagaaccgccccccagccgggtccccagggccgtgcgtgtcgcctcccttctttctgagggcgaagaactgagcggagatgatcaaggagatgaagaagaagatgaccatgcgtatgaaggtgtacctaatggggggtggcacacaagtagtctctccttgtctctgccctccactattgctgctcctcatcctatggatggccctcctggcgggagcacaccagtgactcccgtgattaaggctgggtggctggacaagaacccgccacagggatcatacatttaccagaagcgctgggtgcggttggatacagaccacctgaggtacttcgattcaaacaaggacgcctatagcaaacgatttatctcagtggcctgcatatcccacgtcgctgctatcggagatcagaaatttgaggttatcacaaataacagaacttttgccttccgagcggaatctgatgttgaacgcaaagaatggatgcaggccctgcagcaggcaatggccgagcagcgcgcaagggccaggctttctagcgcctacctgctaggggtgccgggtagcgaacagcctgatagagcagggtcgctagagctgcgagggttcaagaacaagctatatgttgccgtggtgggggataaggtgcagttgtacaaaaacctagaggaataccacctgggcattgggatcactttcatcgacatgtcagttggaaatgttaaagaagtagacagacggagttttgacctgactactccttacaggatattcagtttttccgcagatagcgagctcgaaaaggagcagtggcttgaagcaatgcaaggtgctattgcggaggcactgagcacgagcgaggtggccgagcggatttgggctgccgcccccaacagattttgtgctgattgtggagccccccagcccgattgggcctctattaatttatgtgtggtaatttgtaagagatgtgccggcgaacaccggggcttgggcgcgggcgtatcaaaggttagaagtctgaaaatggatagaaaggtgtggacggaaaccctcattgagctgtttctgcagctgggcaacggcgcaggcaaccgattctgggcagccaacgttccaccctccgaggctttacagccttcaagctccccatctacacggaggtgtcatcttgaggcaaaatacagggaagggaagtatagacgataccacccactgttcggcaaccaggaggagctggacaaggctctctgcgcagccgtcaccactacagacctcgctgagactcaggctctgctggggtgtggcgccggaatcaactgcttctcaggcgatccggaagctccaacacccctcgccctggcagaacaggccggtcagaccctgcagatggaattccttcgaaacaatagaaccacagaagtgcccaggcttgattccatgaaaccattggagaaacactattcagtcgttctgcccaccgtttctcatagtggatttttatataaaactgcttcagcaggaaaactgctacaagatagacgtgctagagaggaatttagccggcgctggtgtgttctgggtgacggggtgctatcctactttgaaaacgaacgtgcagtcactcctaatggggagattcgggcttccgagatcgtctgtctcgccgtccctccacccgatacccatggctttgagcacacctttgaggtgtatactgagggtgagcggctctacttgttcggtctcgaatctgctgaacaggctcacgaatgggtgaaatgcatcgccaaagcatttgttccccccctggcggaagacctgctggcgagggattttgagagactgggcagactcccgtataaggccggcttgtccctgcaacgggctcaggaagggtggtttagtctaagtgggagcgaactccgcgccgtgttccccgagggcccatgtgaagaacccctgcaactgcgcaagctgcaagagttatccatacagggcgacagcgaaaaccaagtcctggtcctggtggagcgccgacggaccctttatatccagggcgaacgtcgtttagactttatgggctggctgggggcaatacagaaggctgcggccagcatgggcgatacactgtctgaacagcagctcggtgacagcgatatcccagttattgtctaccggtgtgtcgattatatcacgcaatgcgggctaacctctgaaggaatctacaggaagtgcgggcagacctccaaaacacagaggctcctggagagcttacgacaagatgctcgttcagtgcacctgaaggaaggcgagcagcatgtcgacgatgtgagctctgctttaaagaggttccttagggacctgcctgacgggctctttacccgcgcacagcggttgacttggctggaggctagcgaaattgaggatgaggaggaaaaagtgagccgctatcgagagctgctcgtcagactgccgccggtgaaccgcgcaacggttaaagccctgatatcccacttgtactgcgtccagtgtttctcagatactaaccagatgaacgtgcacaacttagccatagtgttcggtcccacactgttccagacagacgggcaagactataaggctggacgggtggtggaagacctgatcaaccactatgtggtggtgttttctgttgatgaggaagaactccgaaagcagcgggaagaaattacggcaatcgtcaagatgagagtagctggaaccgctagcggtacgcagcatgccggcgacttcatctgcacagtgtacttagaggaaaaaaaggcggaaacagaacagcatattaaagtaccggcaagcatgacggcagaagaactcaccctagaaatactggatcggaggaatgttgggatcagggaaaaagattattggacatgctttgaggtgaacgaaagagaggaggccgagcgccctttgcatttcgctgaaaaggtgctgccaatcctacacggccttggtacagatagccaccttgtcgtcaaaaagcatcaggccatggaagccatgttgttgtacctagccagtcgagtgggggacacaaaacatgggatgatgaagttcagagaggatcgctcactcctcggtctgggtcttcctagcggcggatttcatgatcggtattttatcctgaattcatcttgtctccgcctctataaagaggtgagaagtcagagaccctggtccggcgcccctgaaacttctcataggcccgagaaggaatggccaattaaatccttgaaggtttacctgggtgtaaaaaaaaaactgagacccccgacgtgctgggggtttacagtggtccacgagactgagaaacacgaaaagcagcagtggtatctgtgttgtgacacacaaatggagctgcgcgaatggttcgccacatttctctttgtgcagcacgacggccttgtgtggcctagtgagccgtctcgggtcagcagggcagtgcccgaggtaagactaggctccgtgagcctgatcccacttcgaggctcagagaacgaaatgagacggagtgtggctgcatttaccgccgatccactctccctgctgaggaacgtatag

SEQ ID NO: 185416 - DNA, 1884 bp, Artificial Sequence
  derived and/or modified sequence
aaatgttgggccgtatgggtgggggcagtctggactgaaggtgcttggcagccacgggtcggagttatttgcggtttaaaaggtcgcatgaccctttccggcagcaggggccaggaggaaccccctccatcacgcgtgcccagagccgtgagagtggcttcactactcagcgaaggcgaggagttaagcggggatgatcagggagacgaggaggaggacgaccatgcctacgagggcgttcccaatggcggctggcatacctcttcactgtccctgtctctgccatcaactatcgccgccccccacccaatggatggaccccccggcggctccactcctgtgactccagttataaaagctggctggctggacaaaaacccaccacagggcagctacatatatcagaaaagatgggtgcgcctagatactgaccatctccggtattttgatagtaacaaagacgcctacagtaagagattcatctccgtggcctgcatcagtcacgtagctgctattggggatcaaaaattcgaggtgatcactaacaacaggacatttgccttcagggccgaaagcgatgtcgagcgcaaggagtggatgcaggcactccagcaggcaatggccgaacagagagcccgcgctaggctttcttctgcttacttgctgggagtgccgggcagtgaacagcctgaccgagcaggctccttagaactgcggggattcaaaaacaaactgtacgtggctgtagtcggcgacaaagtgcagctctataagaatttggaagagtatcacctgggaattggcatcacctttatcgacatgagcgtggggaatgtgaaggaagttgataggcgctctttcgatctgactaccccctatagaattttttctttttccgccgactccgagctggaaaaggagcagtggctggaagcaatgcagggtgctatcgccgaagccctgtccacctcggaagtcgctgagcgcatttgggctgcagccccaaatcgcttctgcgccgattgtggtgccccacaaccagactgggcaagtatcaacctatgcgtcgtgatttgcaagagatgtgcaggggagcaccgtggcctgggtgccggggttagcaaggtgcggagtttaaaaatggatagaaaagtctggacagaaaccctgatcgagctgttcctgcagctgggtaacggtgccggaaatcgattctgggctgcaaatgtacccccgtctgaggcactacagccatcttcatccccgagcacgagacggtgccacctcgaagcgaagtacagggagggcaaatatagacgatatcatccgctgtttggcaaccaagaggaattagataaagcattgtgcgctgctgtgacaactacggacctcgctgagacacaggctttgctgggatgcggagccggaattaactgtttctccggagatccggaggcccctacacccctggcactggcggagcaagccggccagaccctgcagatggaattccttagaaacaatagaactaccgaagttccccgtctagatagtatgaagccgctggaaaagcactattctgtggtccttcctacagttagccacagcggcttcttgtataagaccgcttctgcgggaaagctcctccaggataggcgcgcccgcgaggaattcagcaggagatggtgtgttctgggtgatggagtgttaagctatttcgagaacgaacgcgccgtcactcccaacggagagattcgggccagcgaaatagtgtgcctggccgtcccaccccccgatacacacggcttcgaacacacattcgaagtatataccgaaggcgagcgcctgtacctttgggccggcgagtgcggggccggatcttag

SEQ ID NO: 185417 - DNA, 3633 bp, Artificial Sequence
  derived and/or modified sequence
atgacactgtcagggagcaggggacaggaagagccgcccccttcacgggtgccaagggccgtacgcgtggcttctttactgtccgaaggagaagaactgtccggagatgaccagggagacgaggaggaggacgatcacgcatatgaaggggtgcccaacggtggatggcataccagctcgcttagtctctcactgccctcgacgatcgctgcaccacacccgatggacggacctcctggtggtagtactcctgtgacacccgtgatcaaggcaggctggctggacaaaaatcccccccagggttcctacatataccagaaacgttgggtgcgattggatacggaccacttacggtactttgattctaataaggatgcctacagcaagcggttcatttcagtcgcctgtatctcacatgtggctgccattggtgatcaaaagtttgaggtaatcactaacaatagaaccttcgcgtttagagccgagtctgacgtggagaggaaggagtggatgcaggccctgcagcaggccatggcggagcagcgagccagggcccggctgagttcggcctacttgctgggcgtgcccggttctgaacagccggatcgtgctggctcgctggagctgcgtggcttcaagaataaattatatgtggcggtagtaggtgataaagttcagctctataaaaatctggaggagtaccacctgggaattggaataactttcatcgacatgtctgttgggaatgtgaaagaagtagatcggcgatcctttgatctgaccacaccctatcgaatcttcagtttctctgcagacagtgaactggagaaagagcagtggctcgaggcaatgcagggggccatcgcggaagctctctccacctctgaagtggcagaaagaatctgggcagcggcacctaatcggttctgtgctgactgcggagcgccacagccggactgggcctccatcaacctgtgtgtggtgatttgcaaacgctgtgccggcgagcacagaggcctgggggccggggtaagcaaggttagaagtcttaaaatggaccgaaaggtgtggactgaaacccttatagaactgttcctgcagttgggtaatggagccggcaatcgattttgggccgcaaatgtgccacccagcgaggcgctccaaccttcatcttcaccttccactaggagatgccacctcgaagccaaatatcgcgaaggcaaataccggcgctaccatcctctgtttggtaaccaggaagagcttgacaaggcactgtgcgcagcagtgaccaccaccgatcttgccgagactcaagcactgctcggatgcggggctgggatcaattgtttcagtggggacccagaagctccgacccctctggccctggcggagcaagccggacagactctgcagatggagttcctgcggaataacagaacgactgaggtcccaagactggactctatgaaacccttggaaaagcactattccgttgttctgccaaccgtgtctcactctggattcctctataagaccgccagcgccggtaagctgttgcaggaccggcgggcccgagaggaattcagcaggcgctggtgtgtgctgggcgacggggtcctaagctattttgaaaatgaaagggccgtcacccccaacggagaaataagagcaagcgaaatcgtctgtcttgcagttcccccacctgatacacacggattcgagcacacatttgaagtgtatacggaaggtgagaggctgtacctcttcggcctcgagagtgctgaacaagctcacgagtgggtgaaatgcatagcaaaagctttcgtgccgcccctggctgaggaccttttagccagggactttgaaagactggggaggctgccatacaaggccggcctatctctgcagcgggcgcaggagggctggttctcgctgtccggttcagaactccgggcagtgttccctgaagggccttgtgaagaaccactccagttgcgcaagctgcaggagcttagcattcaaggtgactctgaaaaccaggtcctcgtcctagtagaacggagacgcaccctctatattcagggggagaggaggcttgattttatgggctggctcggggcgatacagaaagctgccgcgtcaatgggcgacactctcagcgaacagcagctcggcgatagcgatattcccgtgatcgtgtaccgatgcgtagactatattactcagtgcggactgactagcgaaggcatctacagaaaatgcggccaaacgagcaagacgcagcgcctgctcgagtctctgaggcaggacgcgagaagcgtgcatctcaaagagggagaacaacatgtggacgacgtgtccagcgctttgaagcgattcctacgggatctgccagacgggctcttcacgagggcccaaagactgacttggctggaggctagcgagatcgaggacgaggaggaaaaagtgtcccggtatcgggaattgttggtgaggctgcctcccgtgaaccgagccacagttaaagctttaatatcccacctgtactgcgtccagtgcttctcagatacaaatcagatgaatgtccataacctcgccattgtattcggccctacactttttcaaacagatggacaagactacaaggccggccgtgtggttgaagaccttatcaatcattacgtggtggtgttttctgtggacgaagaggagctgaggaagcagcgcgaggagattaccgcaattgtgaagatgcgggttgcaggtacagcatctggcacacagcacgctggggatttcatttgcacagtgtacctggaggagaagaaggccgaaaccgaacagcacatcaaagttcctgctagcatgacggccgaagaactcacacttgagatcttagatcgccgtaacgtcggaattagagagaaggactattggacctgcttcgaagtcaacgaacgcgaagaggccgagaggccccttcatttcgccgagaaggtcctgccaatcttacatgggctggggacagatagccacctggtggtgaagaagcatcaggcaatggaggctatgctgctctacctggcgtcacgcgttggcgacactaagcacggtatgatgaagttccgggaggatcgctcattactagggctgggactcccatccggtggatttcatgaccggtacttcatcctcaatagcagctgtctgagattgtacaaagaggtgcggagccagcggccgtggtcgggcgccccggagacatctcatagacccgaaaaggaatggccaatcaagtctctaaaagtgtatctgggcgtgaaaaaaaagctgcggccgccgacttgttggggctttacagtggtgcacgagacagagaaacatgaaaagcaacagtggtatctgtgctgtgacacccagatggaactgcgggaatggtttgccacatttctgttcgtgcagcacgatggtctcgtatggcctagcgaacctagtagggtcagtcgcgccgtgccagaggtgcgccttggtagcgtcagcctcatcccacttagggggtctgagaatgaaatgagaaggagcgtggcggcctttactgccgaccccctatcgcttctacgcaatgtttag

SEQ ID NO: 185418 - DNA, 3618 bp, Artificial Sequence
  derived and/or modified sequence
atgaccaagaaggaggagcccccacccagccgggtgcccagggctgtgcgggtggccagcctgctgtctgagggggaggagctgtctggagatgaccagggagatgaggaggaggatgaccacgcctatgaaggagtgcccaacggcggctggcacaccagcagcctgagcctgagcctgcccagcaccatcgccgccccccaccccatggatggccccccaggcggcagcacccctgtgacccctgtgatcaaggccggctggctggacaagaaccccccccagggcagctacatctaccagaagcgctgggtgcggctggacacagaccacctgcgctactttgacagcaacaaggatgcctacagcaagcgcttcatctctgtggcctgcatcagccacgtggccgccatcggggaccagaagtttgaagtcatcaccaacaacagaacatttgccttccgggcagagagtgatgtggagaggaaggagtggatgcaggccctgcagcaggccatggccgagcagagggcccgggcccggctgagcagcgcctacctgctgggcgtgcccggcagcgagcagcctgacagagctggcagcctggagctgcggggcttcaagaacaagctgtatgtggccgtggtgggggacaaggtgcagctgtacaagaacctggaggagtaccacctgggcatcggcatcaccttcatcgacatgtctgtgggcaatgtgaaggaggtggaccggcgcagctttgacctgaccaccccctaccgcatcttctccttctctgctgacagcgagctggagaaggagcagtggctggaggccatgcagggcgccatcgccgaggccctgagcaccagcgaggtggccgagcgcatctgggccgccgcccccaaccgcttctgtgccgactgtggggccccccagcctgactgggccagcatcaacctgtgtgtggtgatctgcaagagatgtgccggggagcaccggggcctgggcgccggcgtgtccaaggtgcgcagcctgaagatggacaggaaggtgtggacagagaccctgattgagctgttcctgcagctgggcaatggagctggcaaccgcttctgggccgccaacgtgcccccatctgaggccctgcagcccagcagcagccccagcacccggcgctgccacctggaggccaagtaccgggagggcaagtaccgccgctaccaccccctgtttggaaaccaggaggagctggacaaggccctgtgtgccgctgtgaccaccacagacctggccgagacccaggccctgctgggctgtggggccggcatcaactgcttcagcggggaccctgaggcccccacccccctggccctggccgagcaggccggccagaccctgcagatggagttcctgaggaacaacagaaccacagaggtgccccggctggacagcatgaagcccctggagaagcactacagcgtggtgctgcccaccgtgagccacagcggcttcctgtacaagacagccagcgctgggaagctgctgcaggaccggcgggcccgggaggagttcagccgccgctggtgtgtgctgggagatggagtgctgagctactttgaaaatgaaagagctgtgacccccaacggggagatccgggccagcgagatcgtgtgcctggccgtgcccccaccagacacccacggctttgagcacacctttgaggtgtacacagaaggagagcggctgtacctgtttggcctggagagcgctgagcaggcccacgagtgggtgaagtgcatcgccaaggcctttgtgccccccctggccgaggacctgctggcccgggactttgagcggctgggccgcctgccctacaaggccggcctgagcctgcagagggcccaggagggctggttcagcctgagcggcagcgagctgcgggctgtgtttcctgagggcccctgtgaggagcccctgcagctgaggaagctgcaggagctgagcatccagggcgacagcgagaaccaggtgctggtgctggtggagaggaggaggaccctgtacatccagggcgagcggcggctggacttcatgggctggctgggcgccatccagaaggccgccgcctccatgggagacaccctgtctgagcagcagctgggggacagcgacatccctgtgattgtgtaccgctgtgtggactacatcacccagtgtggcctgaccagcgagggcatctacagaaaatgtggccagaccagcaagacccagaggctgctggagagcctgcggcaggatgcccggtctgtgcacctgaaggagggggagcagcacgtggatgatgtgagcagcgccctgaagcgcttcctgcgggacctgcctgatggcctcttcacccgggcccagaggctgacctggctggaggccagcgagattgaagatgaggaggagaaggtgagccgctaccgggagctgctggtgcggctgccccctgtgaacagagccaccgtgaaggccctgatcagccacctgtactgtgtgcagtgcttcagtgacaccaaccagatgaatgtgcacaacctggccatcgtgtttggccccaccctcttccagacagatggccaggactacaaggccggccgggtggtggaggacctgatcaaccactacgtggtggtgttttctgtggatgaggaggagctgaggaagcagcgggaggagatcacagccatcgtgaagatgagggtggccggcacagccagcggcacccagcacgccggggacttcatctgcaccgtgtacctggaggagaagaaggccgagacagagcagcacatcaaggtgcctgcctccatgacagctgaggagctgaccctggagatcctggacagaagaaatgtgggcatccgggagaaggactactggacctgctttgaggtgaatgaaagagaggaggccgagcggcccctgcactttgctgagaaggtgctgcccatcctgcacggcctgggcacagacagccacctggtggtgaagaagcaccaggccatggaggccatgctgctgtacctggccagccgggtgggggacaccaagcacggcatgatgaagttccgggaggacaggagcctgctgggcctgggcctgcccagcggcggcttccatgaccgctacttcatcctgaacagcagctgcctgcggctgtacaaggaggtgcgcagccagaggccctggagcggggcccctgagaccagccacaggcctgagaaggagtggcccatcaagagcctgaaggtgtacctgggcgtgaagaagaagctgcggccccccacctgctggggcttcaccgtggtgcatgaaacagagaagcatgagaagcagcagtggtacctgtgctgtgacacccagatggagctgcgggagtggtttgccaccttcctgtttgtgcagcatgatggcctggtgtggcccagcgagcccagccgggtgtccagagctgtgcctgaggtgcggctgggctctgtgtccctcatccccctgcggggctctgaaaatgagatgagaagatctgtggccgccttcaccgctgaccccctgagcctgctgagaaatgtgtag

SEQ ID NO: 185419 - DNA, 1884 bp, Artificial Sequence
  derived and/or modified sequence
aaatgctgggccgtgtgggtgggcgctgtgtggacagagggcgcctggcagccccgggtgggcgtcatctgtggcctgaagggccgcatgaccctgagcggcagccggggccaggaggagcccccacccagccgggtgcccagggctgtgcgggtggccagcctgctgtctgagggggaggagctgtctggagatgaccagggagatgaggaggaggatgaccacgcctatgaaggagtgcccaacggcggctggcacaccagcagcctgagcctgagcctgcccagcaccatcgccgccccccaccccatggatggccccccaggcggcagcacccctgtgacccctgtgatcaaggccggctggctggacaagaaccccccccagggcagctacatctaccagaagcgctgggtgcggctggacacagaccacctgcgctactttgacagcaacaaggatgcctacagcaagcgcttcatctctgtggcctgcatcagccacgtggccgccatcggggaccagaagtttgaagtcatcaccaacaacagaacatttgccttccgggcagagagtgatgtggagaggaaggagtggatgcaggccctgcagcaggccatggccgagcagagggcccgggcccggctgagcagcgcctacctgctgggcgtgcccggcagcgagcagcctgacagagctggcagcctggagctgcggggcttcaagaacaagctgtatgtggccgtggtgggggacaaggtgcagctgtacaagaacctggaggagtaccacctgggcatcggcatcaccttcatcgacatgtctgtgggcaatgtgaaggaggtggaccggcgcagctttgacctgaccaccccctaccgcatcttctccttctctgctgacagcgagctggagaaggagcagtggctggaggccatgcagggcgccatcgccgaggccctgagcaccagcgaggtggccgagcgcatctgggccgccgcccccaaccgcttctgtgccgactgtggggccccccagcctgactgggccagcatcaacctgtgtgtggtgatctgcaagagatgtgccggggagcaccggggcctgggcgccggcgtgtccaaggtgcgcagcctgaagatggacaggaaggtgtggacagagaccctgattgagctgttcctgcagctgggcaatggagctggcaaccgcttctgggccgccaacgtgcccccatctgaggccctgcagcccagcagcagccccagcacccggcgctgccacctggaggccaagtaccgggagggcaagtaccgccgctaccaccccctgtttggaaaccaggaggagctggacaaggccctgtgtgccgctgtgaccaccacagacctggccgagacccaggccctgctgggctgtggggccggcatcaactgcttcagcggggaccctgaggcccccacccccctggccctggccgagcaggccggccagaccctgcagatggagttcctgaggaacaacagaaccacagaggtgccccggctggacagcatgaagcccctggagaagcactacagcgtggtgctgcccaccgtgagccacagcggcttcctgtacaagacagccagcgctgggaagctgctgcaggaccggcgggcccgggaggagttcagccgccgctggtgtgtgctgggagatggagtgctgagctactttgaaaatgaaagagctgtgacccccaacggggagatccgggccagcgagatcgtgtgcctggccgtgcccccaccagacacccacggctttgagcacacctttgaggtgtacacagaaggagagcggctgtacctgtgggccggggagtgtggggccggcagctag

SEQ ID NO: 185420 - DNA, 3633 bp, Artificial Sequence
  derived and/or modified sequence
atgaccctgagcggcagccggggccaggaggagcccccacccagccgggtgcccagggctgtgcgggtggccagcctgctgtctgagggggaggagctgtctggagatgaccagggagatgaggaggaggatgaccacgcctatgagggcgtgcccaatggaggctggcacaccagcagcctgagcctgagcctgcccagcaccatcgccgccccccaccccatggatggccccccaggcggcagcacccctgtgacccctgtgatcaaggccggctggctggacaagaaccccccccagggcagctacatctaccagaagcgctgggtgcggctggacacagaccacctgcgctactttgacagcaacaaggatgcctacagcaagcgcttcatctctgtggcctgcatcagccacgtggccgccatcggggaccagaagtttgaggtgatcaccaacaacagaacatttgccttccgggcagagagtgatgtggagaggaaggagtggatgcaggccctgcagcaggccatggccgagcagagggcccgggcccggctgagcagcgcctacctgctgggcgtgcccggcagcgagcagcctgaccgggccggcagcctggagctgcggggcttcaagaacaagctgtatgtggccgtggtgggggacaaggtgcagctgtacaagaacctggaggagtaccacctgggcatcggcatcaccttcatcgacatgtctgtgggcaatgtgaaggaggtggacagaagaagctttgacctgaccaccccctaccgcatcttctccttctctgctgacagcgagctggagaaggagcagtggctggaggccatgcagggcgccatcgccgaggccctgagcaccagcgaggtggccgagcgcatctgggccgccgcccccaaccgcttctgtgccgactgtggggccccccagcctgactgggccagcatcaacctgtgtgtggtgatctgcaagagatgtgccggggagcaccggggcctgggcgctggggtgtccaaggtgcgcagcctgaagatggacaggaaggtgtggacagagaccctcatcgagctgttcctgcagctgggcaatggagctggcaaccgcttctgggccgccaacgtgccccccagcgaggccctgcagcccagcagcagccccagcacccggcgctgccacctggaggccaagtaccgggagggcaagtaccgccgctaccaccccctgtttggaaaccaggaggagctggacaaggccctgtgtgccgctgtgaccaccacagacctggccgagacccaggccctgctgggctgtggggccggcatcaactgcttcagcggggaccctgaggcccccacccccctggccctggccgagcaggccggccagaccctgcagatggagttcctgaggaacaacagaaccacagaggtgccccggctggacagcatgaagcccctggagaagcactacagcgtggtgctgcccaccgtgagccacagcggcttcctgtacaagacagccagcgctgggaagctgctgcaggacagaagagcccgggaggagttcagccgccgctggtgtgtgctgggagatggagtgctgagctactttgaaaatgaaagagctgtgaccccaaatggagagatccgggccagcgagatcgtgtgcctggccgtgcccccaccagacacccacggctttgagcacacctttgaggtgtacacagaaggagagcggctgtacctgtttggcctggagagcgctgagcaggcccacgagtgggtgaagtgcatcgccaaggcctttgtgccccccctggccgaggacctgctggcccgggactttgagcggctgggccgcctgccctacaaggccggcctgagcctgcagagggcccaggagggctggttcagcctgagcggcagcgagctgcgggctgtgtttcctgagggcccctgtgaggagcccctgcagctgaggaagctgcaggagctgagcatccagggcgacagcgagaaccaggtgctggtgctggtggagaggaggaggaccctgtacatccagggcgagcggcggctggacttcatgggctggctgggcgccatccagaaggctgctgcctccatgggagacaccctgtctgagcagcagctgggggacagcgacatccctgtgattgtgtaccgctgtgtggactacatcacccagtgtggcctgaccagcgagggcatctacagaaaatgtggccagaccagcaagacccagaggctgctggagagcctgcggcaggatgcccggtctgtgcacctgaaggagggggagcagcacgtggatgatgtgtcctctgccctgaagcgcttcctgcgggacctgcctgatggcctcttcacccgggcccagaggctgacctggctggaggccagcgagattgaagatgaggaggagaaggtgagccgctaccgggagctgctggtgcggctgccccctgtgaacagagccaccgtgaaggccctgatcagccacctgtactgtgtgcagtgcttcagtgacaccaaccagatgaatgtgcacaacctggccatcgtgtttggccccaccctcttccagacagatggccaggactacaaggccggccgggtggtggaggacctgatcaaccactacgtggtggtgttttctgtggatgaggaggagctgaggaagcagcgggaggagatcacagccatcgtgaagatgagggtggccggcacagccagcggcacccagcacgccggggacttcatctgcaccgtgtacctggaggagaagaaggccgagacagagcagcacatcaaggtgcctgcctccatgacagctgaggagctgaccctggagatcctggacagaagaaatgtgggcatccgggagaaggactactggacctgctttgaggtgaatgaaagagaggaggccgagcggcccctgcactttgctgagaaggtgctgcccatcctgcacggcctgggcacagacagccacctggtggtgaagaagcaccaggccatggaggccatgctgctgtacctggccagccgggtgggggacaccaagcacggcatgatgaagttcagagaagatagaagcctgctgggcctgggcctgcccagcggcggcttccatgaccgctacttcatcctgaacagcagctgcctgcggctgtacaaggaggtgcgcagccagaggccctggagcggggcccctgagaccagccacaggcctgagaaggagtggcccatcaagagcctgaaggtgtacctgggcgtgaagaagaagctgcggccccccacctgctggggcttcaccgtggtgcatgaaacagagaagcatgagaagcagcagtggtacctgtgctgtgacacccagatggagctgcgggagtggtttgccaccttcctgtttgtgcagcatgatggcctggtgtggcccagcgagcccagccgggtgtccagagctgtgcctgaggtgcggctgggctctgtgtccctcatccccctgcggggctctgaaaatgagatgagaagatctgtggccgccttcaccgctgaccccctgagcctgctgagaaatgtgtag

SEQ ID NO: 185421 - DNA, 3618 bp, Artificial Sequence
  derived and/or modified sequence
atgaccaagaaggaggagcccccccccagccgggtgccccgggccgtgcgcgtcgcctcattgctgtccgagggcgaggaactctcaggtgacgaccagggcgatgaggaagaagacgatcacgcctacgaaggcgtacctaacggtggctggcatacctcctctctgagcctcagtctgccttctactatcgccgccccccatcctatggacggacctcccgggggatccaccccagttactcctgtgatcaaagctggttggctcgacaagaatcctccacaaggcagttacatctaccagaaacgttgggtgaggctcgatactgatcacctgaggtatttcgatagtaacaaggacgcatattctaagcgttttatctccgtggcatgtatatctcacgtagctgccatcggagatcagaaatttgaagtcatcactaacaataggacatttgcctttagggcagagagcgatgtggagcgaaaagagtggatgcaggctctgcagcaggctatggctgagcagagggctcgtgcgcggttgtcaagtgcttatctgctcggcgtgcccggcagcgaacaaccagatcgtgctggctctcttgaactgcggggctttaaaaacaaattatatgtggccgtcgtgggcgataaggttcagctctacaagaaccttgaggagtaccacttaggcattggtatcaccttcattgacatgtcagtgggaaacgtgaaagaggtggatcggcggtctttcgacttaacaaccccttatcggatcttcagtttcagcgccgactctgaacttgaaaaagaacaatggcttgaagccatgcagggagcgatcgccgaggcactgagcacaagcgaggttgccgagaggatttgggctgcagctcccaaccggttttgtgccgactgcggagccccccaaccagactgggccagcatcaacctctgtgtggttatctgtaagcgctgcgcgggtgaacaccgcggcttaggtgctggcgtgtctaaggtccgatctctcaagatggatcggaaagtatggaccgaaacactgattgaactttttctgcagctaggaaatggcgccggtaaccgattttgggccgccaatgtgcctcctagtgaagccctccagccatcatcatccccatccactagacgctgccatctggaggctaaatatcgcgaggggaagtatcgaaggtaccatccattgttcgggaatcaagaggagctggacaaggcactctgtgcagccgttaccaccacagatctcgcagaaacccaagctcttctcggctgcggtgccggcatcaactgtttttccggcgacccagaggcacccacacccttggctctggcagagcaggctggccagactctccaaatggaatttctccggaacaatagaaccacagaagtgcctcgtctcgacagtatgaaaccgcttgaaaagcactatagcgtggtcctgccaactgtctcccactcggggtttctgtataagacagcgtctgccggtaagctgttgcaggatcggcgcgccagggaggaattctctagacgctggtgcgttctgggggacggagttttgtcatacttcgagaatgaacgcgctgtcacccccaacggcgaaattcgagcttcagagatcgtctgtcttgcggtgcccccacccgacacccatgggtttgaacacacctttgaagtgtacacggagggcgaacgcctctatctttttgggctcgagtccgccgagcaggcccatgaatgggttaaatgtatcgccaaagcgtttgtacctccactggccgaagatctgctggcccgagacttcgagaggctggggcggctgccatacaaagctggcctttccttgcaacgggctcaagaaggttggttctccctgtctggatccgagctcagggccgtttttcctgaaggcccctgcgaagagccccttcagttaagaaaactccaagagctgtccatccagggggactctgaaaaccaggtgcttgtactggtagaacggcggaggactttgtacatccagggcgagcggaggctggatttcatgggctggctaggcgccatccagaaagctgcggcttccatgggggatacgctctcagaacagcagctgggagatagcgacatcccagtcatcgtctaccgctgtgtggattatataactcagtgtggactcactagtgagggaatttacaggaaatgtggccagacttcaaaaactcagcgccttcttgaatctctgaggcaagacgctcgctctgtacacctgaaggagggtgagcaacatgtggacgatgtcagcagcgcgctaaaacgcttcctgcgggacctgccggatggcctgttcacacgtgctcagcgcctgacctggctcgaagctagtgagatcgaggacgaagaggagaaggtttctaggtatcgcgagcttttggtaaggctgccgccagtgaaccgtgcaacagtgaaggcactcatcagtcacctctattgcgtgcagtgtttttctgacacgaatcagatgaatgtgcacaacctggccatcgtgttcgggccaacgctgttccagacggatgggcaggactacaaggccggaagggtagttgaagacctaattaatcactacgtggtagtcttctccgttgacgaagaggagctacgcaagcagagagaggagatcactgcaattgtcaagatgcgtgtggctgggactgcatcaggcacccagcatgctggggacttcatatgtactgtgtaccttgaagagaagaaagccgagacagagcagcacatcaaggttcccgctagcatgacagcagaagagctcaccttagaaatcctcgatagacgcaatgtggggattcgcgagaaagattattggacctgctttgaagtcaacgaacgagaagaggccgaacgtcctctccacttcgccgaaaaggtcttgccgatcctccacggcctgggaactgatagccatctggtagtgaaaaagcaccaggcaatggaggctatgctgctgtacttggcctcacgcgtaggggataccaagcacggaatgatgaaattccgcgaggacaggagcttgctcggcctgggcctcccttcagggggcttccacgatcgctactttatactaaattcttcctgtttgcgcctttataaggaggtgcgcagtcaaaggccttggagcggcgcccctgagaccagccacagacccgaaaaagaatggccaatcaaaagcctcaaggtgtatctgggcgttaagaagaagctgcggccaccaacctgttgggggtttaccgttgtccatgagacagagaaacacgaaaaacagcaatggtatctgtgctgtgatacccagatggaactgagagagtggtttgcaacattcttgtttgttcagcatgatggtcttgtctggccaagcgagcctagtcgcgtgagtagagccgtgcccgaggtgcgcctgggctctgtaagccttatccccctgagaggatccgagaatgagatgcgccgcagcgtggcagccttcaccgcggaccccctaagtttgctgagaaatgtatag

SEQ ID NO: 185422 - DNA, 1884 bp, Artificial Sequence
  derived and/or modified sequence
aagtgctgggccgtgtgggtgggcgccgtgtggaccgagggcgcctggcagcctcgcgttggcgtgatctgtgggctgaagggcagaatgacattgtctggttctcgcggacaggaggaaccgccccctagtcgggtgccccgtgctgtgagagtcgcatccttgctgtccgaaggtgaggaactgtccggagatgaccaaggagatgaggaagaggatgatcatgcctacgagggcgttcctaacggcggatggcatacctctagcctgagtctttcattgccgtccaccatcgccgcccctcaccccatggatggccccccaggaggctccaccccggttaccccagtaatcaaagcaggatggcttgacaaaaacccaccccagggcagttacatataccaaaagcgctgggtgcggctcgatacggatcacctacgctattttgattcgaacaaagatgcttattctaaacgctttatttcggtcgcttgcatcagtcacgtggccgccatcggcgaccagaagttcgaagtgattaccaacaaccgtaccttcgcatttcgcgcggaatcagacgtggaacgtaaggagtggatgcaggcactgcagcaagccatggccgaacagagggctagggcccggctgtcttctgcctatctgctgggtgtccccggttccgagcagcctgaccgtgctggcagcttagaattgcggggcttcaagaacaaactgtatgtagccgtggtgggcgacaaagtgcaactgtataagaacctggaggagtaccaccttggaattggaataacttttatcgacatgtccgtgggtaacgtcaaagaagtggacaggagaagcttcgacctgacaaccccttatcggatatttagcttcagcgccgatagtgaactggaaaaggaacaatggttagaggccatgcagggagccatagctgaagcattgtcaacatctgaggtcgctgagcgtatatgggcggcagcaccaaataggttctgtgccgattgcggggcccctcagcctgactgggccagcattaacctctgcgtagtaatatgcaaaagatgtgccggagagcacagaggactgggtgctggcgtttccaaggtgcgtagtctgaaaatggataggaaagtgtggaccgagacactcatagaacttttcctgcagttgggcaatggggccggaaaccggttttgggcagccaacgtccctccttcagaggccctgcagccttcctccagcccaagcacacgccgctgccatctcgaggctaagtatagagagggtaaataccgacgctaccacccactgttcggtaatcaggaggagctcgataaagcgctttgcgctgctgtgaccaccaccgacctggcagaaactcaggcactcctcggatgtggagccggcattaactgcttctccggggatcccgaagcccctactcccctggccctggctgaacaagccggccagactcttcaaatggagttcctcaggaacaaccgaaccactgaagtccctaggcttgattccatgaaaccattggagaagcattacagcgtggtgttaccaaccgtgagccattctggatttctgtacaaaacagccagcgccggaaaactcctgcaagacagaagggcacgggaggaattcagccggcggtggtgcgtgctgggagatggtgtgctgagttacttcgagaatgaacgcgccgtaacacccaatggtgagattagggcaagcgaaatcgtgtgtctcgccgtaccaccacctgacacccacgggttcgagcatacgttcgaagtttacactgaaggggaacgcctgtatctctgggctggcgagtgcggcgcaggtagctag

SEQ ID NO: 185423 - DNA, 3633 bp, Artificial Sequence
  derived and/or modified sequence
atgaccctgagcggcagccggggccaggaggagcccccccccagccgagttccccgtgcggtccgcgtggcctctctgttgtcagagggtgaggagctctcaggtgacgaccagggggacgaagaggaagacgaccacgcctatgagggcgtgcctaatggaggctggcatacttcaagtctgagcctcagtctcccttctacaatagctgcaccacatcctatggatggccctcctggggggtctacaccagtgacacctgtgataaaggccggctggttagataagaacccaccacagggttcatatatatatcaaaaacggtgggtgaggctcgatacagatcatctccgctactttgacagtaacaaagacgcatattcaaagcgctttatcagtgtggcctgtatatcccatgttgcagccatcggcgatcagaaatttgaagtgataacaaataaccggacctttgctttccgagctgagtccgatgtggagaggaaagaatggatgcaggcactacagcaagctatggctgagcaaagagcccgcgcccgcctgtccagcgcatacctcctgggagtgcctggcagtgagcagcccgacagggccggctctctggagctcagaggctttaaaaacaaattgtatgtggctgtggtcggcgataaggtgcagctctacaaaaatctcgaggagtaccatctcgggattgggattacattcatcgatatgtctgtgggaaatgttaaggaagtagatcgccggagttttgacctcaccacaccctatagaatattttccttcagcgctgatagcgaactggagaaagagcagtggctcgaagctatgcagggcgcaatcgcagaggcactgtcaacatcagaagtcgccgagcgcatttgggcagctgcccctaacagattttgcgcagactgcggtgccccccagcctgactgggccagcattaacctttgcgtggtgatttgcaagcggtgtgcaggggagcatcggggacttggcgccggtgtatccaaggtgcgaagcctgaaaatggacagaaaggtctggaccgaaactctcatcgaactctttctgcagctgggaaacggagctggcaacagattctgggccgccaatgtcccgccatctgaggccctgcagccatcttcctctccatcgacccgtcgttgccacctcgaggcgaagtaccgcgaaggcaagtacaggagatatcatcccctgtttgggaatcaggaggaacttgataaggcactatgtgccgctgtgactactaccgatctggctgaaacccaggccctcttaggctgcggcgctggcataaattgctttagcggcgaccccgaagctcccaccccactcgcgctggctgagcaggcaggacagaccctgcagatggaatttctcagaaacaatcgcactaccgaggtgccgcggctagatagcatgaagcccctggaaaaacactattccgtggtccttcctaccgtgagtcacagcggttttttgtataagaccgcatcagccggaaaattgctgcaggaccgaagagcacgtgaagaattctcaaggcgctggtgtgtgctcggtgacggggtgttaagttatttcgagaacgagcgagctgttaccccaaatggtgagatcagagcatcggagatcgtttgcttggccgttccccctcccgacacacatggtttcgaacacactttcgaagtttacaccgaaggcgagcggctctatctgttcggtcttgagagtgcggaacaggcgcacgagtgggtcaagtgcatcgcaaaagcattcgtgccgcccctggcagaggatctcttggcgagagattttgagagattgggtcgtttgccctataaggccggactgtccctccagagggcgcaggaaggttggtttagtctgagcggctccgagctccgcgcagttttccctgaagggccttgtgaggagcctcttcaattgcgaaaactgcaggagctgagcatccagggagactccgagaaccaggtgcttgtactggttgaacggcgcagaaccctctatattcaaggcgaacgcaggcttgacttcatggggtggttgggggcgatacagaaggccgccgccagtatgggcgatactctatcggagcaacagcttggtgacagcgatatcccggtcatcgtgtataggtgcgtggattatatcactcagtgcgggctcacatccgaagggatctaccggaagtgtgggcagacttccaagactcagaggctgctggaatctctccgccaggatgctcgtagcgtgcacctgaaggagggcgagcagcacgttgacgatgtttcttctgcgttgaagagattcctgagggacctcccggacggtttgttcacccgagcgcagcggctgacatggttagaagcttcagagatcgaggacgaagaagagaaagtctctcggtacagggagttattggtccgattaccgcccgttaatagagctactgtgaaggcgctgatctcccacttgtattgcgttcaatgcttcagtgatacaaaccagatgaacgtgcacaatctggccattgtattcgggcctaccctcttccagacagatggccaggactataaagctggtcgggttgtggaggatctgatcaatcactacgtcgtggtgttcagcgtggatgaagaggagctgcgtaagcagcgagaggaaattaccgcaatcgtgaaaatgcgagtggcagggacagcctctgggacacagcacgctggggattttatctgcaccgtgtatctggaggaaaagaaggcagagacagaacagcacatcaaggtacccgctagcatgaccgctgaggagcttacattggagatcctcgaccgcaggaatgtgggcatacgggagaaggattactggacctgtttcgaggtcaatgaacgggaagaggcggagcggcctctgcactttgcagagaaggtcctgcccatactccacgggctgggcaccgattcccatctggtggtcaaaaaacaccaggccatggaagccatgctattgtatctcgcatcaagagtcggggataccaaacatggcatgatgaaattccgggaggacagaagcttgctcggcttgggactcccatccgggggatttcatgacaggtacttcattctgaattcatcttgcctcaggctctacaaggaggtaaggagccagagaccctggtccggcgcccccgaaactagccaccggccagagaaggagtggcccatcaaatccctgaaagtatacctgggagtgaagaagaagttaaggcccccaacatgctggggattcactgtggtccatgagaccgagaagcatgaaaagcagcaatggtacttatgctgtgacacacagatggaactgagagagtggtttgctacctttctgttcgtgcagcacgatgggctggtgtggccctcggagccgagcagagtctctcgggcagtgcccgaggtgcgcctggggtcagtgagcctaataccactccgggggtccgagaacgaaatgcgtcggagcgtcgctgcttttaccgccgacccgctgtctttactgcggaatgtatag

SEQ ID NO: 185424 - DNA, 3618 bp, Artificial Sequence
  derived and/or modified sequence
atgacgaagaaggaggagcctccacccagcagggtgcctcgcgctgtgcgggtggcaagcctgttgtcggaaggtgaggaattgagcggcgacgaccagggcgacgaagaggaggatgaccatgcctacgaaggcgtgcctaatggaggatggcacacgtcttcactgtctctctccctgccatcaaccatcgctgctccgcaccccatggatggtccacccggtggctccactccagtgacaccggttattaaggcagggtggctggataaaaacccacctcagggctcctacatttaccaaaaacgttgggtgcgacttgacaccgatcacttaagatactttgacagcaataaggacgcatactccaagcgattcatttccgttgcatgcatctctcacgtggcagctattggggatcagaagttcgaggtgataaccaataatcgcaccttcgcgttcagggcagagtccgacgtggagaggaaagagtggatgcaggccctacagcaggctatggccgagcagcgtgcccgagcccgtctgagcagcgcttacctgttgggcgtgcctggctccgaacaacccgaccgcgcagggtctctggaactgagaggattcaaaaacaagctttacgtcgccgtggttggtgataaggtgcagctgtataagaacctggaagaataccacctcgggatagggattacatttatagatatgtccgtgggcaacgtgaaggaagtggatcgcagatcgttcgacttgaccactccataccgcattttcagcttttccgctgacagcgagctggagaaggagcagtggcttgaagccatgcagggcgcaatagctgaagctctctccactagcgaggtcgcagagaggatctgggccgctgctccaaatagattctgtgctgattgcggagctccccagcccgattgggcctccatcaacttgtgcgtggtgatctgcaagcgctgcgccggagagcaccggggtttgggtgccggagtgtctaaggtgcgcagcttaaagatggaccgaaaggtatggacggaaacactcattgaactgttcctccagctgggaaatggggcaggtaaccgcttttgggccgctaacgtccctccaagtgaggctttacagccctcaagctcaccctcaacccgacgttgtcacctggaggcaaaataccgcgaagggaaatatcgccgatatcacccattattcggaaatcaggaggaactcgacaaggcactatgtgctgctgtcacaacaacggacctcgctgagacccaggcactgctcggatgcggcgctgggattaattgcttctccggagacccagaagctcccacaccccttgcgttggcagagcaagctggacagactctacagatggagttcttgagaaacaatagaactacggaagttcctcgcctggatagcatgaaacctctcgaaaagcattactctgtggtcttaccaaccgtttcccattctgggtttctctacaagactgcttctgccggtaagcttctgcaagatcgcagggcaagagaagagttttctcgccgttggtgtgtgctgggagacggcgtgctgtcatatttcgagaacgagcgcgctgtaacccctaacggcgaaatccgtgcctccgaaatcgtatgccttgccgtgccccctcccgatacacatggattcgaacatacatttgaggtttataccgaaggagagcgcctgtatctcttcggcctcgagtctgccgaacaggctcacgaatgggtcaagtgcatcgcaaaagcattcgtacccccattggccgaagacctactcgccagagactttgaacggttgggccgactgccatataaggcagggctgtccttgcagcgcgcacaggaaggctggtttagcctgtccggctccgagcttagagcagtgtttcccgaggggccatgtgaggaacccctccagctgcggaaactgcaagagttatctattcagggcgattctgaaaaccaagtgctagtccttgttgagcgtaggaggaccctttatatacagggcgagagacgcctggatttcatgggctggcttggggcaattcagaaagccgctgccagtatgggcgacacactctctgaacaacagttgggggactctgatattcctgtgatcgtctatcggtgtgtggactacattacccaatgtggcttaaccagcgagggaatttatcgtaagtgcggacagacctctaagacacagcgcctgctggagagtcttcgacaggatgcgcgttcagtgcacctcaaagagggcgagcagcacgtagatgatgtcagtagtgctcttaaaaggttcctgcgcgatctgcccgacggactatttacaagagctcagaggttgacgtggttggaagccagcgaaatcgaagatgaagaagagaaggtcagtcgctacagggaacttcttgtcagactccctcctgtcaaccgtgcaacagtaaaagcacttatctctcacctttattgtgtccagtgtttctctgacacaaatcagatgaatgtgcataacctggccatagtgtttggacccactctctttcagacagatgggcaagattacaaagccggtagagtggtggaagatctcattaaccactacgtggttgttttctcagtcgatgaggaggagttacggaagcagagggaggagatcaccgccatagttaagatgcgcgtggcaggaacagcttcaggcacccagcatgcgggagatttcatatgcaccgtgtatttagaggagaagaaggctgaaaccgagcaacacataaaggtccccgctagcatgactgcggaggaattgacgctcgaaattctggatcggagaaatgttggtatccgggagaaagattactggacatgtttcgaggttaatgaaagagaggaagccgaacgacctcttcacttcgcagaaaaggtccttccgattctccacggtctgggaactgactctcacctggtggtgaagaagcaccaggctatggaagccatgctcctgtatctggcatctagggttggagataccaagcatgggatgatgaagtttcgtgaggatcggtccttgttgggcctgggactcccatccggcggatttcacgaccggtattttatcctcaattcatcctgtctgcgtctctacaaggaggtgcgatcacagcgtccatggtccggcgctccagagacaagccatcgccctgagaaggaatggcctatcaaatctcttaaggtgtatctcggggtgaaaaagaagctgcggccacccacttgttgggggtttaccgttgtgcacgagaccgaaaagcacgagaaacaacagtggtatctttgttgcgatacccagatggagctgagggagtggtttgcaacttttctcttcgtgcagcatgatggactggtgtggccttctgagccgtcccgcgttagtcgcgcagttccagaggtgaggctggggtctgtctccctgatccccctgcggggaagtgagaacgaaatgcgtcggagtgtggcagccttcactgcagatcccctgtccttactgaggaacgtctag

SEQ ID NO: 185425 - DNA, 1884 bp, Artificial Sequence
  derived and/or modified sequence
aagtgctgggccgtctgggtgggtgcggtgtggacagagggagcttggcagcccagggtgggggtgatttgcggcctaaagggccgaatgacattatctgggtcccgcggacaggaggagccgccaccatctagagtgccaagggctgtcagagtggcttcactcttgagcgagggggaagagttatcaggggatgatcaaggcgatgaagaagaagacgaccacgcttatgagggcgttccaaatggcggatggcacaccagctctctttcactcagccttccctcaacgatcgcagcccctcatccgatggacggccctccaggaggtagtacgcctgttacccctgttatcaaggccggttggctagacaagaatccaccacagggttcctatatatatcaaaaacgctgggttcgactggatacggaccatctgagatacttcgactctaataaggatgcatacagcaaacgctttataagtgtggcttgcattagtcacgtggccgctattggcgatcagaaattcgaagtgattacaaacaatagaacatttgccttcagggcggagagcgacgtggaacgaaaggagtggatgcaggcccttcagcaggcgatggccgaacagagagcgcgtgcacgattgagtagcgcctatttactgggagtgcctggaagcgagcagcccgatcgggcaggttctctggaactaaggggcttcaaaaacaaactgtatgtagcagtggttggcgacaaagttcaattatataagaacctggaggaataccacctcggcatcgggatcacctttattgacatgtccgttggaaatgtcaaggaggttgaccgcaggagttttgacttaaccaccccctacagaatcttcagcttttccgcagatagcgaactggaaaaggagcagtggctggaagccatgcagggggctatcgctgaagccctgtctacttcagaggtcgctgagagaatttgggctgctgcccctaataggttttgcgctgactgtggcgcaccccagccagactgggctagtatcaacctgtgcgtggtgatttgcaaacgctgcgctggcgagcaccgcggactgggcgctggcgtctccaaggtgaggtctctgaaaatggaccgcaaggtgtggaccgagacattaatcgaactgttcctgcagctaggcaatggagccggaaatcgcttttgggccgctaatgtcccgccatctgaggctctccagcctagctcaagtccatctacacgacggtgccacctggaagccaagtaccgggaaggcaaatacaggaggtaccatccactgttcggaaatcaggaggagcttgacaaagctctatgtgcagccgttacaactacggacctggctgagactcaggcacttctcggctgcggcgcaggtatcaactgtttttctggtgaccctgaggcacctactcctttggcgctcgccgagcaggcaggacagactctccaaatggagttcttaaggaataataggaccaccgaagtcccccgactggactccatgaaaccactggagaaacactatagcgttgtattgccaacagtgtctcacagtggcttcctgtataagacagcttccgcagggaagctgctgcaggacagaagagcaagagaggagttctcacggaggtggtgtgttttgggagatggcgttctgtcgtactttgaaaacgagagggccgtgacgcctaacggtgagatcagggcgagcgaaattgtgtgcctagcagtccccccacctgacacccacggcttcgaacacactttcgaggtgtataccgagggcgaacggctgtatctgtgggcgggagagtgcggggctggatcctag

SEQ ID NO: 185426 - DNA, 3633 bp, Artificial Sequence
  derived and/or modified sequence
atgacactgtcagggagcagagggcaggaggagccgcctccatctagagtgcctcgagccgtgcgcgtggcaagcctgttatccgagggcgaagaattgtcgggagacgatcagggagatgaggaagaggacgatcatgcctacgaaggcgtgcccaatgggggatggcatacgagctcactcagcttatcactgccctcaactatagctgcaccacacccaatggacggccctccaggcggaagcacacccgtcacaccggtcataaaagcgggttggctggataaaaacccgccacaagggtcctatatctatcagaagagatgggtcaggctggacacggaccatctgagatacttcgactctaacaaagatgcttatagcaagcgctttatttctgtcgcctgcatctcccacgttgctgctatcggcgatcagaagttcgaagtgataaccaataacaggaccttcgcatttcgcgcagaaagtgacgtagaacgcaaggagtggatgcaggctctgcagcaggcgatggctgaacagagagctcgagctaggctgtctagcgcctatctcttaggggtgccgggttccgaacagccagacagagctgggtcccttgaactgcggggattcaaaaataaactgtacgtcgccgtcgtgggggataaggtgcagctctacaagaatctggaagaataccatcttggcatagggattacgtttatcgacatgtccgtcggcaacgtcaaggaggttgatcgaagatccttcgacttgaccactccctatcgtatttttagctttagtgccgacagcgagctggagaaagagcagtggctggaagctatgcagggtgctatcgccgaggctctttcaacctcggaagtagctgaacgaatctgggctgccgctcctaaccgcttttgcgctgattgtggggcacctcaacccgactgggcctctattaatttgtgtgttgttatttgcaaacggtgcgccggagagcatcgcggtcttggagccggtgtgtcgaaagttagaagtctcaagatggaccgaaaggtctggacagaaaccctcattgagttgtttctgcagctgggcaacggggctgggaatcggttctgggcggctaatgtccctcccagtgaagctctgcagccaagctctagtccaagcacccgaagatgccaccttgaggcaaaatacagggaggggaaatataggcgctaccatcctcttttcggcaatcaagaagaactggacaaggcgttgtgcgccgctgttactactacagacctcgcagagactcaggcactgctggggtgtggtgctggtatcaattgtttctccggcgatcccgaggcacccacccctttagctctagcagagcaggccggacagaccctgcaaatggagttcctacggaataaccggaccactgaagtgcccaggctcgattcgatgaaacccctcgagaagcactatagtgtggtcctcccaaccgtgtctcactccggattcctgtacaaaaccgcatccgccggtaagctcctccaagatcgacgagccagagaagaatttagccgcagatggtgcgtcttgggagacggggtgctgtcctacttcgagaatgaacgcgctgtgacgccaaacggcgaaattcgcgctagcgagatcgtgtgtctcgccgtaccacctcctgatacgcacggctttgaacacacattcgaagtctatactgagggggaacggctgtacctttttggactggaaagcgccgagcaagcacacgagtgggtcaaatgtatcgccaaagcatttgtgccgcctctggccgaagatctgttggctcgcgactttgaacgcctaggcaggctaccctacaaggccggactgtctctgcagcgggcacaagaaggctggttcagtctttccggaagcgaactccgggcagtttttccagaggggccatgcgaagaaccacttcaattgcgcaaactccaggagctctccattcaaggtgattccgagaaccaggttctggtgcttgtggaaagacgtcgcacactgtatatacagggagagcgcaggcttgactttatggggtggttaggggcaatccagaaagccgctgcaagtatgggcgacacactcagcgaacagcagttgggagacagcgacatacccgtgattgtgtatcgctgcgtcgactacatcacccagtgcggcttaacctcggaagggatctaccgtaagtgtggccagacctccaagacacagcggctgttagagtctcttaggcaggatgccaggtctgtgcatctgaaggagggcgagcagcatgtcgatgatgtgtcgtctgcattaaaaagattcctgagagacctacccgacggcctgttcacacgtgcccaacgactaacctggctcgaggcctcggagatcgaagatgaagaagagaaagtgtcccgctaccgcgaactgcttgttcggctgccaccagtgaatcgggctacagtgaaggccctcatttcacacctgtattgtgtgcagtgtttttcagatactaaccagatgaatgtgcataatctggcgattgtgtttggcccaactctcttccagaccgatggccaggattataaggccggtagggtcgtggaggacctgattaaccactacgttgttgttttctccgtagacgaggaagaactgcggaagcagcgggaggaaatcactgctatcgtgaagatgagagtagcaggaacagcctcaggaacccaacatgctggcgactttatatgtacggtttatctggaggagaaaaaggctgaaacagaacagcacatcaaagtacctgccagtatgactgcggaggagctcaccctggaaattctcgatagacgcaacgtaggaatccgcgaaaaagactactggacatgctttgaagtgaacgaacgtgaggaggcggagagaccactgcattttgctgagaaggtcttgcctattttgcatgggctgggaaccgactcccatctcgtggtcaaaaagcaccaggccatggaggccatgctgctctatcttgcgtccagggtgggagacactaaacacggaatgatgaaattcagggaggaccgatcactcctggggttaggcctgccgagcgggggtttccacgatcgctactttattctgaattcttcgtgtttgagactgtacaaagaggtacgtagccagcgaccgtggtcgggcgctcctgagactagccaccggccagaaaaagaatggcctatcaagtcactgaaggtgtatctcggagttaaaaagaagcttaggcccccaacctgctggggtttcacggtggtgcatgaaaccgaaaaacacgagaaacagcagtggtatctctgctgcgacacccagatggagctaagggaatggttcgctacctttctattcgtgcagcacgacggattagtgtggccttctgaacccagccgcgtttctagagcagtgcccgaagtcagacttggttcagtgtctctcattcctctcaggggaagcgagaatgagatgaggcgcagcgtggcggcattcaccgcggaccccctgtccctgctgcggaacgtgtag

SEQ ID NO: 185427 - DNA, 2353 bp, Artificial Sequence
  derived and/or modified sequence
gcctgtcagggtgttgtgggggtgcccagctgcctgtcagaccctgaggactaccagacagagagtgggcagccatttcccgggaggcttccccttcccccacctcactctcttgccatacgggggtcaggagtcacgtgtagccacagcgctctgggccaggggtcggggctctggtgtggctcccccaggccctggctgtatgtgggtgggcatgtggcctccccccaccctgtgtgttaggaactcgtgtcctgtcccggagtgtctgtctctgtttcacttcttgtgttcccgtgtctgtctgtcttgcatccctagcccgcagtctttttctctgtccctttatctttctgtttttgtctgtgtcctaggtcggtttctgccactggctctcctgtccctgtgatctgggtctctgtgtggtctccgctggcagggggaggggagtgtgaggaaacagaactaaaagtgctgggctgtgtgggtcggggctgtgtggacagagggggcgtggcagccccgggtgggtgtgatctgtggcttgaagggaaggatgacgctgagtgggtctcgggggcaggaggagcccccaccgagccgagtcccacgggccgtgcgcgtggccagtctgctgagcgagggagaggaactgtctggggacgaccaaggggatgaggaagaggatgaccacgcctatgagggcgtccccaatggcggatggcataccagcagcctgagcttgtccttgcccagcacaatagctgcgccacaccccatggacgggccgcctgggggctccacccccgtcacaccagtcatcaaggctggctggctggacaagaacccaccgcagggatcttacatctatcagaaacgatgggtgagactggatactgatcacctgcgatactttgacagtaacaaggacgcttactctaagcgctttatctctgtggcctgcatctcccacgtggctgccatcggggaccagaagtttgaagtgatcacaaacaaccgaacctttgccttccgggcagagagtgatgtggagcggaaggagtggatgcaggccctgcagcaggccatggctgagcagcgtgcccgggcccggctctctagcgcttatctgctgggagttccaggctcagagcagcctgaccgcgctggcagcctggagcttcgtggcttcaagaataagctgtacgtggccgtggtcggggacaaagtgcagctctacaagaatctagaggagtaccacctgggcattggcatcaccttcatcgacatgagcgtgggcaacgtgaaggaagtggaccggcgcagcttcgacctcaccacgccctaccgcatcttcagcttctctgctgactcagagctagagaaggagcagtggttggaggccatgcagggagccatcgctgaggccctgtctacctcggaggtggccgagcgcatctgggctgcagcccccaacaggttctgtgctgactgcggggctcctcagcctgactgggcctccatcaacctctgtgttgttatctgcaagcgctgtgcaggggagcaccgtggcctgggcgctggcgtctccaaggtgcggagcctgaagatggacaggaaggtgtggacagaaacacttatcgagctcttcttacagctggggaatggcgctgggaaccgcttctgggcagccaacgtgccccccagtgaggccctgcagcccagcagcagccccagcacccggcggtgccacctggaggccaagtaccgtgagggcaagtaccgccgctaccacccgctctttggcaaccaggaggagctggacaaggccctgtgtgctgcagtcaccaccacagacctggctgagacccaggcgctcctgggctgtggggctgggatcaactgcttctcgggggaccctgaggcccccacgcccctggctcttgcagagcaggcggggcagacgctgcagatggaattccttcggaacaaccggaccacagaggtgcctcggctggactcgatgaagcccctggaaaagcactactcagttgtcctgccgaccgtgagccacagtggcttcctctacaagactgcctctgccggcaagctgctacaggaccgccgggcccgggaagagttcagccggcgctggtgtgtccttggtgacggggtcctgagctactttgagaatgagcgggcagtgacccccaatggagagattcgggccagcgagattgtgtgcctggcagtgccccctcctgacacccatggctttgagcacacctttgaggtgtacacggagggagaacggctgtacctgtgggctggagagtgcggagcaggctcatga

SEQ ID NO: 185428 - DNA, 4778 bp, Artificial Sequence
  derived and/or modified sequence
gcctgtcagggtgttgtgggggtgcccagctgcctgtcagaccctgaggactaccagacagagagtgggcagccatttcccgggaggcttccccttcccccacctcactctcttgccatacgggggtcaggagtcacgtgtagccacagcgctctgggccaggggtcggggctctggtgtggctcccccaggccctggctgtatgtgggtgggcatgtggcctccccccaccctgtgtgttaggaactcgtgtcctgtcccggagtgtctgtctctgtttcacttcttgtgttcccgtgtctgtctgtcttgcatccctagcccgcagtctttttctctgtccctttatctttctgtttttgtctgtgtcctaggtcggtttctgccactggctctcctgtccctgtgatctgggtctctgtgtggtctccgctggcagggggaggggagtgtgaggaaacagaactaaaagtgctgggctgtgtgggtcggggctgtgtggacagagggggcgtggcagccccgggtgggtgtgatctgtggcttgaagggaaggatgacgctgagtgggtctcgggggcaggaggagcccccaccgagccgagtcccacgggccgtgcgcgtggccagtctgctgagcgagggagaggaactgtctggggacgaccaaggggatgaggaagaggatgaccacgcctatgagggcgtccccaatggcggatggcataccagcagcctgagcttgtccttgcccagcacaatagctgcgccacaccccatggacgggccgcctgggggctccacccccgtcacaccagtcatcaaggctggctggctggacaagaacccaccgcagggatcttacatctatcagaaacgatgggtgagactggatactgatcacctgcgatactttgacagtaacaaggacgcttactctaagcgctttatctctgtggcctgcatctcccacgtggctgccatcggggaccagaagtttgaagtgatcacaaacaaccgaacctttgccttccgggcagagagtgatgtggagcggaaggagtggatgcaggccctgcagcaggccatggctgagcagcgtgcccgggcccggctctctagcgcttatctgctgggagttccaggctcagagcagcctgaccgcgctggcagcctggagcttcgtggcttcaagaataagctgtacgtggccgtggtcggggacaaagtgcagctctacaagaatctagaggagtaccacctgggcattggcatcaccttcatcgacatgagcgtgggcaacgtgaaggaagtggaccggcgcagcttcgacctcaccacgccctaccgcatcttcagcttctctgctgactcagagctagagaaggagcagtggttggaggccatgcagggagccatcgctgaggccctgtctacctcggaggtggccgagcgcatctgggctgcagcccccaacaggttctgtgctgactgcggggctcctcagcctgactgggcctccatcaacctctgtgttgttatctgcaagcgctgtgcaggggagcaccgtggcctgggcgctggcgtctccaaggtgcggagcctgaagatggacaggaaggtgtggacagaaacacttatcgagctcttcttacagctggggaatggcgctgggaaccgcttctgggcagccaacgtgccccccagtgaggccctgcagcccagcagcagccccagcacccggcggtgccacctggaggccaagtaccgtgagggcaagtaccgccgctaccacccgctctttggcaaccaggaggagctggacaaggccctgtgtgctgcagtcaccaccacagacctggctgagacccaggcgctcctgggctgtggggctgggatcaactgcttctcgggggaccctgaggcccccacgcccctggctcttgcagagcaggcggggcagacgctgcagatggaattccttcggaacaaccggaccacagaggtgcctcggctggactcgatgaagcccctggaaaagcactactcagttgtcctgccgaccgtgagccacagtggcttcctctacaagactgcctctgccggcaagctgctacaggaccgccgggcccgggaagagttcagccggcgctggtgtgtccttggtgacggggtcctgagctactttgagaatgagcgggcagtgacccccaatggagagattcgggccagcgagattgtgtgcctggcagtgccccctcctgacacccatggctttgagcacacctttgaggtgtacacggagggagaacggctgtacctgtttgggctggagagtgcggagcaggctcatgagtgggtcaagtgtattgctaaggcattcgtgcctcccctagccgaggatctgctggcccgggattttgagcggctgggacgcctaccctacaaagctggcctgagcctacagcgggcccaggagggctggttctctctcagtggctcggagctccgtgctgtcttcccggaggggccctgcgaagagccgctgcaactacggaaactgcaggagctttccatccagggggacagtgagaaccaggtgctggtgctggtggagcgaaggaggacactgtacatacagggcgagcggcggctggacttcatgggttggctgggggccatccagaaagcagccgccagcatgggggacacgctgtcggagcagcagcttggggactcggatatcccggtgatcgtgtaccgctgtgtggactacatcacgcagtgcggcctgacctccgagggcatctaccgcaagtgtgggcagacatcgaagacacagcggctgctggagagcctgcggcaggatgcgcgctctgtgcacctcaaggagggcgagcagcacgtggatgatgtttcctcggcgctcaagcgcttcctgcgcgacctgcctgatgggctcttcactcgcgcccagcgcctaacctggctggaggcctcagagattgaggacgaggaggagaaggtctccaggtaccgagagctgctggtgcggctgccccctgtcaaccgggccacagtgaaggcccttatcagccacctgtactgtgttcagtgcttctcagacacgaaccagatgaacgtgcacaacctggcaattgtgtttgggcccacgctcttccagacagatgggcaggactacaaggctggccgtgtggtggaagacctcattaaccactatgtggtggtgtttagtgtggatgaggaagagctcaggaagcagcgggaggagatcactgccattgtgaagatgcgcgtggctggcactgccagtgggacccagcatgccggtgacttcatctgcacagtgtatctggaagagaagaaggcagagactgagcagcatatcaaggtcccagcatccatgactgctgaggagctcaccctggagatcctggatcgccggaacgtgggcatcagggagaaggactattggacctgctttgaggtcaacgagagggaggaggcagagcgccccctgcactttgcggagaaggtgctgcccatcctgcacgggctgggcacggacagccacctggtggtgaagaagcaccaggccatggaggccatgctgctgtacctggccagccgtgtcggtgacaccaagcatggcatgatgaagttccgtgaggaccgcagcctcctgggcctgggcctgccctcaggtggcttccacgatcgctacttcatcctcaacagcagctgcttgcggctctacaaggaggtccggagccagaggccgtggagcggggcccctgagaccagtcaccggcctgagaaggagtggcctattaagagtctcaaagtctacctgggagtgaagaagaaactcaggccacccacctgctggggcttcacagtggtgcatgagacagagaaacatgagaagcagcagtggtacctctgctgtgacacacagatggagctccgggagtggttcgctacctttctgtttgtgcagcatgacggcctggtgtggccctcagagccctcacgcgtgtcccgggcagtgcctgaggtccggctgggtagtgtgtcactgatcccccttcgaggtagtgaaaatgaaatgcgccggagtgtggctgccttcaccgcggaccctctgtctcttctgcgcaacgtctgagcacaggagcccatccttggctctaggattccgccgctggaagccttctgttcagacaccccttatgctccaaggcctgatgtgagccagcggggggtgcatgggaaactgcaccccacaacccacatcctccatcctgactgcagcatggggttccccggcaggggtgggaggcagcaggggtcagcctgggcaggaacctctcccaactctgtccaggtgttcagacctcttggcccaacctgctcaccccaccgggttcactgtccttgtggggctggagagatgggcataagtcaggaacttgggaggaccaccaccctttcagaggcgtgaggccctggggccctgccggaagggagccccctgctcctcccaacaaactccagaacagcagaaagcgggtgctgtagaggagcactcagctcacggggagggagctcttggctgagcttctacagggctgagagctgcgctttggggacttcagccttccttccagtctgggctgagtggggggtccagactacctgatgccccttccccaatttggggactttttgataatataaatatatctgtatatttt

SEQ ID NO: 185429 - DNA, 3618 bp, Artificial Sequence
  derived and/or modified sequence
atgaccaagaaggaggagcccccccccagcagagtgcccagagccgtgagagtggccagcctgctgagcgagggcgaggagctgagcggcgacgaccagggcgacgaggaggaggacgaccacgcctacgagggcgtgcccaacggcggctggcacaccagcagcctgagcctgagcctgcccagcaccatcgccgccccccaccccatggacggcccccccggcggcagcacccccgtgacccccgtgatcaaggccggctggctggacaagaaccccccccagggcagctacatctaccagaagagatgggtgagactggacaccgaccacctgagatacttcgacagcaacaaggacgcctacagcaagagattcatcagcgtggcctgcatcagccacgtggccgccatcggcgaccagaagttcgaggtgatcaccaacaacagaaccttcgccttcagagccgagagcgacgtggagagaaaggagtggatgcaggccctgcagcaggccatggccgagcagagagccagagccagactgagcagcgcctacctgctgggcgtgcccggcagcgagcagcccgacagagccggcagcctggagctgagaggcttcaagaacaagctgtacgtggccgtggtgggcgacaaggtgcagctgtacaagaacctggaggagtaccacctgggcatcggcatcaccttcatcgacatgagcgtgggcaacgtgaaggaggtggacagaagaagcttcgacctgaccaccccctacagaatcttcagcttcagcgccgacagcgagctggagaaggagcagtggctggaggccatgcagggcgccatcgccgaggccctgagcaccagcgaggtggccgagagaatctgggccgccgcccccaacagattctgcgccgactgcggcgccccccagcccgactgggccagcatcaacctgtgcgtggtgatctgcaagagatgcgccggcgagcacagaggcctgggcgccggcgtgagcaaggtgagaagcctgaagatggacagaaaggtgtggaccgagaccctgatcgagctgttcctgcagctgggcaacggcgccggcaacagattctgggccgccaacgtgccccccagcgaggccctgcagcccagcagcagccccagcaccagaagatgccacctggaggccaagtacagagagggcaagtacagaagataccaccccctgttcggcaaccaggaggagctggacaaggccctgtgcgccgccgtgaccaccaccgacctggccgagacccaggccctgctgggctgcggcgccggcatcaactgcttcagcggcgaccccgaggcccccacccccctggccctggccgagcaggccggccagaccctgcagatggagttcctgagaaacaacagaaccaccgaggtgcccagactggacagcatgaagcccctggagaagcactacagcgtggtgctgcccaccgtgagccacagcggcttcctgtacaagaccgccagcgccggcaagctgctgcaggacagaagagccagagaggagttcagcagaagatggtgcgtgctgggcgacggcgtgctgagctacttcgagaacgagagagccgtgacccccaacggcgagatcagagccagcgagatcgtgtgcctggccgtgcccccccccgacacccacggcttcgagcacaccttcgaggtgtacaccgagggcgagagactgtacctgttcggcctggagagcgccgagcaggcccacgagtgggtgaagtgcatcgccaaggccttcgtgccccccctggccgaggacctgctggccagagacttcgagagactgggcagactgccctacaaggccggcctgagcctgcagagagcccaggagggctggttcagcctgagcggcagcgagctgagagccgtgttccccgagggcccctgcgaggagcccctgcagctgagaaagctgcaggagctgagcatccagggcgacagcgagaaccaggtgctggtgctggtggagagaagaagaaccctgtacatccagggcgagagaagactggacttcatgggctggctgggcgccatccagaaggccgccgccagcatgggcgacaccctgagcgagcagcagctgggcgacagcgacatccccgtgatcgtgtacagatgcgtggactacatcacccagtgcggcctgaccagcgagggcatctacagaaagtgcggccagaccagcaagacccagagactgctggagagcctgagacaggacgccagaagcgtgcacctgaaggagggcgagcagcacgtggacgacgtgagcagcgccctgaagagattcctgagagacctgcccgacggcctgttcaccagagcccagagactgacctggctggaggccagcgagatcgaggacgaggaggagaaggtgagcagatacagagagctgctggtgagactgccccccgtgaacagagccaccgtgaaggccctgatcagccacctgtactgcgtgcagtgcttcagcgacaccaaccagatgaacgtgcacaacctggccatcgtgttcggccccaccctgttccagaccgacggccaggactacaaggccggcagagtggtggaggacctgatcaaccactacgtggtggtgttcagcgtggacgaggaggagctgagaaagcagagagaggagatcaccgccatcgtgaagatgagagtggccggcaccgccagcggcacccagcacgccggcgacttcatctgcaccgtgtacctggaggagaagaaggccgagaccgagcagcacatcaaggtgcccgccagcatgaccgccgaggagctgaccctggagatcctggacagaagaaacgtgggcatcagagagaaggactactggacctgcttcgaggtgaacgagagagaggaggccgagagacccctgcacttcgccgagaaggtgctgcccatcctgcacggcctgggcaccgacagccacctggtggtgaagaagcaccaggccatggaggccatgctgctgtacctggccagcagagtgggcgacaccaagcacggcatgatgaagttcagagaggacagaagcctgctgggcctgggcctgcccagcggcggcttccacgacagatacttcatcctgaacagcagctgcctgagactgtacaaggaggtgagaagccagagaccctggagcggcgcccccgagaccagccacagacccgagaaggagtggcccatcaagagcctgaaggtgtacctgggcgtgaagaagaagctgagaccccccacctgctggggcttcaccgtggtgcacgagaccgagaagcacgagaagcagcagtggtacctgtgctgcgacacccagatggagctgagagagtggttcgccaccttcctgttcgtgcagcacgacggcctggtgtggcccagcgagcccagcagagtgagcagagccgtgcccgaggtgagactgggcagcgtgagcctgatccccctgagaggcagcgagaacgagatgagaagaagcgtggccgccttcaccgccgaccccctgagcctgctgagaaacgtgtag

SEQ ID NO: 185430 - DNA, 1884 bp, Artificial Sequence
  derived and/or modified sequence
aagtgctgggccgtgtgggtgggcgccgtgtggaccgagggcgcctggcagcccagagtgggcgtgatctgcggcctgaagggcagaatgaccctgagcggcagcagaggccaggaggagcccccccccagcagagtgcccagagccgtgagagtggccagcctgctgagcgagggcgaggagctgagcggcgacgaccagggcgacgaggaggaggacgaccacgcctacgagggcgtgcccaacggcggctggcacaccagcagcctgagcctgagcctgcccagcaccatcgccgccccccaccccatggacggcccccccggcggcagcacccccgtgacccccgtgatcaaggccggctggctggacaagaaccccccccagggcagctacatctaccagaagagatgggtgagactggacaccgaccacctgagatacttcgacagcaacaaggacgcctacagcaagagattcatcagcgtggcctgcatcagccacgtggccgccatcggcgaccagaagttcgaggtgatcaccaacaacagaaccttcgccttcagagccgagagcgacgtggagagaaaggagtggatgcaggccctgcagcaggccatggccgagcagagagccagagccagactgagcagcgcctacctgctgggcgtgcccggcagcgagcagcccgacagagccggcagcctggagctgagaggcttcaagaacaagctgtacgtggccgtggtgggcgacaaggtgcagctgtacaagaacctggaggagtaccacctgggcatcggcatcaccttcatcgacatgagcgtgggcaacgtgaaggaggtggacagaagaagcttcgacctgaccaccccctacagaatcttcagcttcagcgccgacagcgagctggagaaggagcagtggctggaggccatgcagggcgccatcgccgaggccctgagcaccagcgaggtggccgagagaatctgggccgccgcccccaacagattctgcgccgactgcggcgccccccagcccgactgggccagcatcaacctgtgcgtggtgatctgcaagagatgcgccggcgagcacagaggcctgggcgccggcgtgagcaaggtgagaagcctgaagatggacagaaaggtgtggaccgagaccctgatcgagctgttcctgcagctgggcaacggcgccggcaacagattctgggccgccaacgtgccccccagcgaggccctgcagcccagcagcagccccagcaccagaagatgccacctggaggccaagtacagagagggcaagtacagaagataccaccccctgttcggcaaccaggaggagctggacaaggccctgtgcgccgccgtgaccaccaccgacctggccgagacccaggccctgctgggctgcggcgccggcatcaactgcttcagcggcgaccccgaggcccccacccccctggccctggccgagcaggccggccagaccctgcagatggagttcctgagaaacaacagaaccaccgaggtgcccagactggacagcatgaagcccctggagaagcactacagcgtggtgctgcccaccgtgagccacagcggcttcctgtacaagaccgccagcgccggcaagctgctgcaggacagaagagccagagaggagttcagcagaagatggtgcgtgctgggcgacggcgtgctgagctacttcgagaacgagagagccgtgacccccaacggcgagatcagagccagcgagatcgtgtgcctggccgtgcccccccccgacacccacggcttcgagcacaccttcgaggtgtacaccgagggcgagagactgtacctgtgggccggcgagtgcggcgccggcagctag

SEQ ID NO: 185431 - DNA, 3633 bp, Artificial Sequence
  derived and/or modified sequence
atgaccctgagcggcagcagaggccaggaggagcccccccccagcagagtgcccagagccgtgagagtggccagcctgctgagcgagggcgaggagctgagcggcgacgaccagggcgacgaggaggaggacgaccacgcctacgagggcgtgcccaacggcggctggcacaccagcagcctgagcctgagcctgcccagcaccatcgccgccccccaccccatggacggcccccccggcggcagcacccccgtgacccccgtgatcaaggccggctggctggacaagaaccccccccagggcagctacatctaccagaagagatgggtgagactggacaccgaccacctgagatacttcgacagcaacaaggacgcctacagcaagagattcatcagcgtggcctgcatcagccacgtggccgccatcggcgaccagaagttcgaggtgatcaccaacaacagaaccttcgccttcagagccgagagcgacgtggagagaaaggagtggatgcaggccctgcagcaggccatggccgagcagagagccagagccagactgagcagcgcctacctgctgggcgtgcccggcagcgagcagcccgacagagccggcagcctggagctgagaggcttcaagaacaagctgtacgtggccgtggtgggcgacaaggtgcagctgtacaagaacctggaggagtaccacctgggcatcggcatcaccttcatcgacatgagcgtgggcaacgtgaaggaggtggacagaagaagcttcgacctgaccaccccctacagaatcttcagcttcagcgccgacagcgagctggagaaggagcagtggctggaggccatgcagggcgccatcgccgaggccctgagcaccagcgaggtggccgagagaatctgggccgccgcccccaacagattctgcgccgactgcggcgccccccagcccgactgggccagcatcaacctgtgcgtggtgatctgcaagagatgcgccggcgagcacagaggcctgggcgccggcgtgagcaaggtgagaagcctgaagatggacagaaaggtgtggaccgagaccctgatcgagctgttcctgcagctgggcaacggcgccggcaacagattctgggccgccaacgtgccccccagcgaggccctgcagcccagcagcagccccagcaccagaagatgccacctggaggccaagtacagagagggcaagtacagaagataccaccccctgttcggcaaccaggaggagctggacaaggccctgtgcgccgccgtgaccaccaccgacctggccgagacccaggccctgctgggctgcggcgccggcatcaactgcttcagcggcgaccccgaggcccccacccccctggccctggccgagcaggccggccagaccctgcagatggagttcctgagaaacaacagaaccaccgaggtgcccagactggacagcatgaagcccctggagaagcactacagcgtggtgctgcccaccgtgagccacagcggcttcctgtacaagaccgccagcgccggcaagctgctgcaggacagaagagccagagaggagttcagcagaagatggtgcgtgctgggcgacggcgtgctgagctacttcgagaacgagagagccgtgacccccaacggcgagatcagagccagcgagatcgtgtgcctggccgtgcccccccccgacacccacggcttcgagcacaccttcgaggtgtacaccgagggcgagagactgtacctgttcggcctggagagcgccgagcaggcccacgagtgggtgaagtgcatcgccaaggccttcgtgccccccctggccgaggacctgctggccagagacttcgagagactgggcagactgccctacaaggccggcctgagcctgcagagagcccaggagggctggttcagcctgagcggcagcgagctgagagccgtgttccccgagggcccctgcgaggagcccctgcagctgagaaagctgcaggagctgagcatccagggcgacagcgagaaccaggtgctggtgctggtggagagaagaagaaccctgtacatccagggcgagagaagactggacttcatgggctggctgggcgccatccagaaggccgccgccagcatgggcgacaccctgagcgagcagcagctgggcgacagcgacatccccgtgatcgtgtacagatgcgtggactacatcacccagtgcggcctgaccagcgagggcatctacagaaagtgcggccagaccagcaagacccagagactgctggagagcctgagacaggacgccagaagcgtgcacctgaaggagggcgagcagcacgtggacgacgtgagcagcgccctgaagagattcctgagagacctgcccgacggcctgttcaccagagcccagagactgacctggctggaggccagcgagatcgaggacgaggaggagaaggtgagcagatacagagagctgctggtgagactgccccccgtgaacagagccaccgtgaaggccctgatcagccacctgtactgcgtgcagtgcttcagcgacaccaaccagatgaacgtgcacaacctggccatcgtgttcggccccaccctgttccagaccgacggccaggactacaaggccggcagagtggtggaggacctgatcaaccactacgtggtggtgttcagcgtggacgaggaggagctgagaaagcagagagaggagatcaccgccatcgtgaagatgagagtggccggcaccgccagcggcacccagcacgccggcgacttcatctgcaccgtgtacctggaggagaagaaggccgagaccgagcagcacatcaaggtgcccgccagcatgaccgccgaggagctgaccctggagatcctggacagaagaaacgtgggcatcagagagaaggactactggacctgcttcgaggtgaacgagagagaggaggccgagagacccctgcacttcgccgagaaggtgctgcccatcctgcacggcctgggcaccgacagccacctggtggtgaagaagcaccaggccatggaggccatgctgctgtacctggccagcagagtgggcgacaccaagcacggcatgatgaagttcagagaggacagaagcctgctgggcctgggcctgcccagcggcggcttccacgacagatacttcatcctgaacagcagctgcctgagactgtacaaggaggtgagaagccagagaccctggagcggcgcccccgagaccagccacagacccgagaaggagtggcccatcaagagcctgaaggtgtacctgggcgtgaagaagaagctgagaccccccacctgctggggcttcaccgtggtgcacgagaccgagaagcacgagaagcagcagtggtacctgtgctgcgacacccagatggagctgagagagtggttcgccaccttcctgttcgtgcagcacgacggcctggtgtggcccagcgagcccagcagagtgagcagagccgtgcccgaggtgagactgggcagcgtgagcctgatccccctgagaggcagcgagaacgagatgagaagaagcgtggccgccttcaccgccgaccccctgagcctgctgagaaacgtgtag

SEQ ID NO: 185432 - protein, 863 aa, Artificial Sequence
  derived and/or modified sequence
MLESYVTPILMSYVNRYIKNLKPSDLQLSLWGGDVVLSKLELKLDVLEQELKLPFTFLSGHIHELRIHVPWTKLGSEPVVITINTMECILKLKDGIQDDHESCGSNSTNRSTAESTKSSIKPRRMQQAAPTDPDLPPGYVQSLIRRVVNNVNIVINNLILKYVEDDIVLSVNITSAECYTVGELWDRAFMDISATDLVLRKVINFSDCTVCLDKRNASGKIEFYQDPLLYKCSFRTRLHFTYENLNSKMPSVIKIHTLVESLKLSITDQQLPMFIRIMQLGIALYYGEIGNFKEGEIEDLTCHNKDMLGNITGSEDETRIDMQYPAQHKGQELYSQQDEEQPQGWVSWAWSFVPAIVSYDDGEEDFVGNDPASTMHQQKAQTLKDPIVSIGFYCTKATVTFKLTEMQVESSYYSPQKVKSKEVLCWEQEGTTVEALMMGEPFFDCQIGFVGCRAMCLKGIMGVKDFEENMNRSETEACFFICGDNLSTKGFTYLTNSLFDYRSPENNGTRAEFILDSTHHKETYTEIAGMQRFGAFYMDYLYTMENTSGKGSTNQQDFSSGKSEDLGTVQEKSTKSLVIGPLDFRLDSSAVHRILKMIVCALEHEYEPYSRLKSDIKDENETILNPEEVALLEEYIPTRHTSVTLLKCTCTISMAEFNLLDHLLPVIMGEKNSSNFMNTTNFQSLRPLPSIRILVDKINLEHSVPMYAEQLVHVVSSLTQPSDNLLHYCYVHCYLKIFGFQAGLTSLDCSGSYCLPVPVIPSFSTALYGKLLKLPTCWTKRSQIAITEGIFELPNLTIQATRAQTLLLQAIYQSWSHLGNVSSSAVIEALINEIFLSIEIGSCYVAQVDLELLASNDPPTSTS

SEQ ID NO: 185433 - DNA, 2592 bp, Artificial Sequence
  derived and/or modified sequence
atgctggagagctacgtgacccccatcctgatgagctacgtgaacagatacatcaagaacctgaagcccagcgacctgcagctgagcctgtggggcggcgacgtggtgctgagcaagctggagctgaagctggacgtgctggagcaggagctgaagctgcccttcaccttcctgagcggccacatccacgagctgagaatccacgtgccctggaccaagctgggcagcgagcccgtggtgatcaccatcaacaccatggagtgcatcctgaagctgaaggacggcatccaggacgaccacgagagctgcggcagcaacagcaccaacagaagcaccgccgagagcaccaagagcagcatcaagcccagaagaatgcagcaggccgcccccaccgaccccgacctgccccccggctacgtgcagagcctgatcagaagagtggtgaacaacgtgaacatcgtgatcaacaacctgatcctgaagtacgtggaggacgacatcgtgctgagcgtgaacatcaccagcgccgagtgctacaccgtgggcgagctgtgggacagagccttcatggacatcagcgccaccgacctggtgctgagaaaggtgatcaacttcagcgactgcaccgtgtgcctggacaagagaaacgccagcggcaagatcgagttctaccaggaccccctgctgtacaagtgcagcttcagaaccagactgcacttcacctacgagaacctgaacagcaagatgcccagcgtgatcaagatccacaccctggtggagagcctgaagctgagcatcaccgaccagcagctgcccatgttcatcagaatcatgcagctgggcatcgccctgtactacggcgagatcggcaacttcaaggagggcgagatcgaggacctgacctgccacaacaaggacatgctgggcaacatcaccggcagcgaggacgagaccagaatcgacatgcagtaccccgcccagcacaagggccaggagctgtacagccagcaggacgaggagcagccccagggctgggtgagctgggcctggagcttcgtgcccgccatcgtgagctacgacgacggcgaggaggacttcgtgggcaacgaccccgccagcaccatgcaccagcagaaggcccagaccctgaaggaccccatcgtgagcatcggcttctactgcaccaaggccaccgtgaccttcaagctgaccgagatgcaggtggagagcagctactacagcccccagaaggtgaagagcaaggaggtgctgtgctgggagcaggagggcaccaccgtggaggccctgatgatgggcgagcccttcttcgactgccagatcggcttcgtgggctgcagagccatgtgcctgaagggcatcatgggcgtgaaggacttcgaggagaacatgaacagaagcgagaccgaggcctgcttcttcatctgcggcgacaacctgagcaccaagggcttcacctacctgaccaacagcctgttcgactacagaagccccgagaacaacggcaccagagccgagttcatcctggacagcacccaccacaaggagacctacaccgagatcgccggcatgcagagattcggcgccttctacatggactacctgtacaccatggagaacaccagcggcaagggcagcaccaaccagcaggacttcagcagcggcaagagcgaggacctgggcaccgtgcaggagaagagcaccaagagcctggtgatcggccccctggacttcagactggacagcagcgccgtgcacagaatcctgaagatgatcgtgtgcgccctggagcacgagtacgagccctacagcagactgaagagcgacatcaaggacgagaacgagaccatcctgaaccccgaggaggtggccctgctggaggagtacatccccaccagacacaccagcgtgaccctgctgaagtgcacctgcaccatcagcatggccgagttcaacctgctggaccacctgctgcccgtgatcatgggcgagaagaacagcagcaacttcatgaacaccaccaacttccagagcctgagacccctgcccagcatcagaatcctggtggacaagatcaacctggagcacagcgtgcccatgtacgccgagcagctggtgcacgtggtgagcagcctgacccagcccagcgacaacctgctgcactactgctacgtgcactgctacctgaagatcttcggcttccaggccggcctgaccagcctggactgcagcggcagctactgcctgcccgtgcccgtgatccccagcttcagcaccgccctgtacggcaagctgctgaagctgcccacctgctggaccaagagaagccagatcgccatcaccgagggcatcttcgagctgcccaacctgaccatccaggccaccagagcccagaccctgctgctgcaggccatctaccagagctggagccacctgggcaacgtgagcagcagcgccgtgatcgaggccctgatcaacgagatcttcctgagcatcgagatcggcagctgctacgtggcccaggtggacctggagctgctggccagcaacgacccccccaccagcaccagctag

SEQ ID NO: 185434 - DNA, 2592 bp, Artificial Sequence
  derived and/or modified sequence
atgctggaaagttatgtcaccccgatcctcatgtcatacgtgaacaggtatatcaaaaacctgaagccttccgatttgcaactcagcctgtggggaggagatgtcgtgctctctaaactggagctcaaacttgacgttctagagcaggagttgaaactcccttttacctttttgtccggacacattcacgagctccggatccatgtcccttggaccaagctcggctctgaacctgtggtgatcactatcaacaccatggagtgtattcttaagttgaaggacgggatacaagatgatcacgagagctgtggttctaattcaaccaaccgcagtactgccgagtccaccaaatcctctattaaacctaggcggatgcagcaggcagccccaacggatcctgatctcccccccggttacgtccagtcactgattcgccgcgtggtgaacaatgtgaacatcgtgatcaacaacctgatattaaaatatgtggaagacgacatcgtgctaagtgtgaatataacaagcgctgaatgctatactgttggcgagctgtgggaccgagcgttcatggacatttcagcaacggacctagtgttgagaaaggttatcaactttagcgactgcacagtgtgtctggacaaacgtaatgcctctggtaagattgaattctatcaggatcctctgctctataaatgctcctttcggacaaggctgcactttacatacgagaacttgaactccaagatgccgagtgtgatcaagatacacactctggtagagagtctgaaactgtctattacagatcagcagttacctatgttcattcgtatcatgcaactgggcatcgcgttgtactacggggagatcgggaacttcaaggagggagagatcgaggatctcacttgtcacaacaaagatatgcttggtaacatcacgggctcagaggatgagacaaggattgatatgcagtaccccgcccagcacaagggccaggagctttattcccagcaggacgaggagcagccccagggctgggttagttgggcctggagttttgtcccggccatcgtctcttatgatgacggcgaggaggacttcgtggggaacgaccctgcctctactatgcaccagcagaaggcccagacattaaaggacccgatagtttcgattggtttctactgtaccaaggctaccgttaccttcaagctgaccgagatgcaggtggaatcatcttactactcccctcagaaagtcaagagtaaagaagtcctctgttgggagcaagaggggaccacagtagaggcgctcatgatgggcgagccatttttcgactgccaaatcggctttgtgggttgcagagcaatgtgtctgaagggcatcatgggggtcaaagatttcgaggagaacatgaatagatctgaaactgaggcttgcttctttatctgtggggataacctgtctacgaaaggcttcacatatctgacaaactcactgttcgactacagaagcccggagaacaatggaacccgtgctgaattcattctggacagcactcaccacaaggaaacctacaccgaaattgcaggaatgcagcgatttggagccttctatatggactatctctatactatggagaatacaagtggtaaaggcagcaccaaccagcaggatttctcttccgggaagagcgaggacctgggaacggtgcaggagaaatccaccaagtcgctggtaataggccctttagacttccgcctcgattcttcggccgtccacaggattctcaaaatgatcgtatgcgcgctggaacacgagtacgagccgtactcaagattgaaatcagacatcaaagacgagaatgagaccatcctgaacccggaagaagtggccctactggaagaatacatcccgactagacacacctcggtgaccttgctgaagtgtacatgcaccatttctatggctgagttcaacctcctcgaccacctcctacccgttatcatgggtgagaagaactccagcaatttcatgaatacaaccaacttccaaagcctgcgcccactgccctccatcagaatcctggtcgataaaataaatcttgaacattctgttcctatgtacgccgagcagctagtccatgtggtatccagtttgactcagccatcagataatctgctccattactgttatgtgcattgttatctgaagatctttggcttccaagctgggttaacatcactggattgtagcgggagttactgtctccctgtgcctgtgattccttccttttcaactgccctgtacggcaaactgctgaagttgccaacatgttggaccaagcgtagccagatagcaattacagaggggatatttgaacttccaaacttgactatccaagcaactagggcccagacgctactgctgcaggcaatataccagtcctggtcccatctgggcaatgtgagctccagcgcagtgatcgaagctctgatcaacgagatcttcctctccatcgaaattggctcctgttatgttgctcaggtcgatctcgaactccttgcatctaatgaccctcctacatcgacctcgtag

SEQ ID NO: 185435 - DNA, 2592 bp, Artificial Sequence
  derived and/or modified sequence
atgctggagagctatgtgacccccatcctgatgtcctatgtgaaccgctacatcaagaacctgaagcccagcgacctgcagctgagcctgtggggcggagatgtggtgctgagcaagctggagctgaagctggatgtgctggagcaggagctgaagctgcccttcaccttcctgagcggccacatccacgagctgcgcatccacgtgccctggaccaagctgggcagcgagcctgtggtgatcaccatcaacaccatggagtgcatcctgaagctgaaggatggcatccaggatgaccacgagagctgtggcagcaacagcaccaacagaagcacagctgagagcaccaagagcagcatcaagcccaggaggatgcagcaggccgcccccacagatcctgacctgcccccaggctacgtgcagagcctcatcagaagagtggtgaacaacgtgaacatcgtcatcaacaacctgatcctgaagtatgtggaggatgacatcgtgctgtctgtgaacatcaccagcgctgagtgctacacagtgggggagctgtgggaccgggccttcatggacatcagcgccacagacctggtgctgaggaaggtgatcaacttcagtgactgcaccgtgtgcctggacaagagaaatgccagcggcaagattgagttctaccaggaccccctgctgtacaagtgcagcttccgcacccggctgcacttcacctatgagaacctgaacagcaagatgcccagcgtcatcaagatccacaccctggtggagagcctgaagctgagcatcacagaccagcagctgcccatgttcatccgcatcatgcagctgggcatcgccctgtactacggggagatcggcaacttcaaggagggggagattgaggacctgacctgccacaacaaggacatgctgggcaacatcaccggctctgaagatgagaccagaattgacatgcagtacccagcccagcacaagggccaggagctgtacagccagcaggatgaggagcagccccagggctgggtgtcctgggcctggagctttgtgcctgccatcgtgtcctatgatgatggagaggaggactttgtgggcaatgaccctgccagcaccatgcaccagcagaaggcccagaccctgaaggaccccatcgtgtccatcggcttctactgcaccaaggccaccgtgaccttcaagctgacagagatgcaggtggagagcagctactacagcccccagaaggtgaagagcaaggaggtgctgtgctgggagcaggagggcaccaccgtggaggccctgatgatgggagagcccttctttgactgccagattggatttgtgggctgccgggccatgtgcctgaagggcatcatgggcgtgaaggactttgaggagaacatgaacagaagtgaaacagaggcctgcttcttcatctgtggggacaacctgagcaccaagggcttcacctacctgaccaacagcctgtttgactaccgcagcccagaaaataatggcaccagggctgagttcatcctggacagcacccaccacaaggagacctacacagaaattgctggcatgcagagatttggagccttctacatggactacctgtacaccatggagaacaccagcggcaagggcagcaccaaccagcaggacttcagcagcggcaagtctgaggacctgggcaccgtgcaggagaagagcaccaagagcctggtgattggccccctggacttccggctggacagcagcgctgtgcaccgcatcctgaagatgattgtgtgtgccctggagcacgagtatgagccctacagccggctgaagagtgacatcaaggatgaaaatgagaccatcctgaaccctgaggaggtggccctgctggaggagtacatccccaccaggcacacctctgtgaccctgctgaagtgcacctgcaccatctccatggccgagttcaacctgctggaccacctgctgcctgtgatcatgggagagaagaacagcagcaacttcatgaacaccaccaacttccagagcctgcggcccctgcccagcatccgcatcctggtggacaagatcaacctggagcacagcgtgcccatgtatgcagagcagctggtgcacgtggtgagcagcctgacccagcccagcgacaacctgctgcactactgctacgtgcactgctacctgaagatcttcggcttccaggccggcctgaccagcctggactgcagcggcagctactgcctgcctgtgcctgtgatccccagcttcagcacagccctgtatggcaagctgctgaagctgcccacctgctggaccaagaggagccagatcgccatcacagagggcatctttgagctgcccaacctgaccatccaggccacccgggcccagaccctgctgctgcaggccatctaccagagctggagccacctgggcaatgtgagcagcagcgctgtgattgaggccctgatcaatgagatcttcctgagcattgagatcggcagctgctacgtggcccaggtggacctggagctgctggccagcaatgacccccccaccagcaccagctag

SEQ ID NO: 185436 - DNA, 2592 bp, Artificial Sequence
  derived and/or modified sequence
atgctggagagctacgtgacccccatcctgatgagctacgtgaacaggtacattaagaatctaaagccttccgatctccagctgtcactctggggcggcgacgtcgtgctgtctaaacttgaattaaagcttgacgtactcgaacaagaattgaagttgccattcacatttcttagcggccatatccacgagctgagaatacatgttccctggaccaagttaggctctgagcccgtggtgatcaccataaatactatggaatgtattctgaaactgaaggatggtatacaagacgaccatgagtcctgtgggagcaactctactaaccgaagcactgctgagtcaactaaatcaagcattaaacctaggcgtatgcaacaggcggcccccacagatcccgatctgccccctggttacgtccaatcactgattcgcagagtagtgaataatgtgaacatcgtcatcaataacctgatcctaaaatatgtggaggatgacatcgtgctctctgtgaacatcacctccgccgagtgttacacagtgggtgaactctgggatcgggcattcatggatatctccgctactgacctggtgctaagaaaagtcatcaatttcagcgattgcaccgtgtgtctcgacaagcgaaatgcatcaggcaaaattgaattctatcaggaccctctgctctataaatgtagctttcgaacacgacttcatttcacgtatgaaaatctgaacagcaaaatgccctcagtgattaagattcacactctggttgaatcgttgaagctcagcattacagaccaacagttgccaatgttcataaggatcatgcagttgggcattgccctctattacggagaaatcggcaattttaaggaaggcgagatcgaagacctgacgtgtcacaataaagacatgcttggtaatattaccggctctgaggatgaaactcgtattgacatgcagtaccctgcacagcataaaggccaagagctctacagccagcaggacgaggagcagccccaggggtgggtatcctgggcatggtcattcgtgccagcgatagtgtcctacgatgatggtgaggaagactttgtcggaaatgatcctgctagcacgatgcaccagcagaaagcccagaccctcaaagatccgattgtgagtattgggttctattgtaccaaggccacggtgacattcaaattgaccgaaatgcaggtcgagtcatcctactactctccgcagaaggttaagagtaaggaagttctctgttgggaacaggaaggaacaacagtggaggccctgatgatgggggaacctttcttcgattgtcaaatcggatttgtaggctgtcgggccatgtgtctgaagggcattatgggcgtgaaagactttgaggagaatatgaatcgctccgagacagaggcttgcttttttatttgcggcgacaacctttctactaaagggtttacctacctgacaaactccctgtttgattatcgcagtccagagaataacggaacccgggccgaattcatccttgattctacccaccacaaggagacctatactgagatagccggaatgcaacgctttggagccttttacatggactatctgtacaccatggagaatacctccggcaaggggtctaccaatcagcaagactttagttcagggaagagcgaggacttgggcaccgtacaggagaagtctacgaaatccctggtcatcggtcctctcgatttcagactggatagcagtgcagtgcacagaatcctgaaaatgatcgtttgtgcattagaacacgagtacgagccctattcgaggctgaagtctgatattaaagacgagaacgagacaattcttaacccagaagaagtcgctttgctggaagaatacattccaacacggcacactagcgtgactctcttgaaatgcacatgtactatctctatggcggagtttaatctactagatcacctgttacccgtgatcatgggggaaaagaactcctcaaacttcatgaataccacaaattttcaatcactgaggccactgcccagtatcaggattctagtggacaagatcaacctcgaacacagcgtgccaatgtacgctgagcagctagttcacgtcgtgtcgagtctgacccagccgagcgataatctgctgcattattgctatgtgcactgctatttgaagattttcggatttcaggccgggctgacttcccttgattgcagcggaagttactgcctgccagtgcctgttatccccagcttttcgacagccctgtatgggaagctgctcaaacttcccacttgctggacaaaacgcagccagattgccatcaccgaagggatattcgaactgcctaatctgaccatccaggccactagagcccaaactctactcctccaagccatctaccagtcctggagtcacttagggaatgtcagcagttcagcggtgattgaggctctaataaacgagatcttcctgtcgattgaaattgggtcctgttacgtggcccaagtggatctagagctcctggccagcaatgatcccccaactagcacaagctag

SEQ ID NO: 185437 - DNA, 2592 bp, Artificial Sequence
  derived and/or modified sequence
atgttggagagctacgtcacacccattctcatgtcctacgtaaaccggtatattaaaaacctgaagcctagtgacctacagctgagcctgtggggcggagatgtggtgctgtcaaaactggagcttaaactcgatgtcttggaacaggaattaaagctaccttttactttcctttccggacacatacatgagctccggatccacgtcccatggaccaagttgggctccgaaccggtggttattacaatcaatactatggagtgcatcctgaagctgaaagacgggattcaagatgaccatgaatcctgcggctcaaactccacgaatcggtccacagcagaatccactaaaagttctatcaagccacgacgtatgcagcaggcggctcccaccgatccagacctgccacccggttatgtgcagtcactgattaggcgagtcgtgaacaacgtaaacatcgtgatcaacaatctcattttgaaatatgttgaagatgatattgtgctgagtgtaaacatcacatccgctgaatgctacaccgtgggtgaattgtgggaccgtgcgttcatggacatctccgccaccgatttagtgctgcggaaagtcattaatttcagcgactgcactgtatgcctggataagcgaaacgcatccggtaaaattgaattttaccaggatcccctcctgtacaaatgtagtttccgaactcgactgcacttcacatacgaaaacctgaacagtaagatgccctccgttattaagatacatacactggtcgagagtctgaagctgtccatcacagatcagcagctccctatgttcattaggattatgcagctgggtatagccctctactatggcgagatcgggaactttaaggagggcgaaatcgaagacctgacgtgtcacaataaggacatgcttggaaatatcaccggtagtgaggatgaaactaggattgatatgcagtatcccgcacaacacaagggtcaggagctctactctcagcaggatgaagaacaacctcagggttgggtgtcgtgggcctggagctttgtgcccgcaatcgtgtcctacgacgatggtgaagaagatttcgtggggaatgatcccgcatcgaccatgcaccaacagaaggcgcagactctgaaggaccccatcgtgtcaatcgggttttattgcactaaagccactgtgaccttcaagctgactgaaatgcaagttgagagcagctattatagccctcaaaaggtgaaatctaaggaagtgctgtgctgggagcaagaagggaccactgtcgaagccctgatgatgggtgagcccttttttgactgccagattgggttcgtgggatgcagagccatgtgcctgaaagggatcatgggggtcaaagattttgaggagaatatgaaccggtccgagaccgaggcgtgtttttttatatgtggggataatctatctacgaaaggtttcacatatttgactaactctctgttcgactatcgaagccctgagaacaatgggacaagagctgaattcatcctggatagtactcaccataaggagacgtatactgaaattgctggaatgcagcggttcggggcattctacatggattatttgtacactatggaaaacacctctgggaagggaagcaccaatcagcaggacttttctagcggtaaaagcgaggatctgggcaccgtccaggagaaaagcaccaagtcactggtgattgggccactagattttagactggactccagtgctgtccaccgaatcctgaaaatgatcgtgtgcgcccttgagcatgaatacgagccatacagtaggcttaaaagcgatattaaggacgaaaacgaaacgattttgaaccccgaggaagtggccctgctggaggagtacatccccacacggcacacttcagtcactttgttaaaatgtacatgcactattagtatggctgagttcaatcttctagaccatcttctcccagtcattatgggggagaaaaacagctccaacttcatgaatactaccaattttcaatccctaagacccctgccttcaatccgcattttggtggacaaaatcaacctcgaacacagcgtccctatgtatgcggagcagttggtccacgtcgtgtcttcactcacacagccatccgacaatttactccactactgctatgtccactgttacttaaaaatattcggcttccaagccggtctcacatcactggattgctccggcagctactgtttaccagttccagtaataccatctttttctaccgctctgtatggaaagctgttgaagctcccgacctgctggacgaaaaggtcgcagatcgctattacagaagggatctttgaactgccaaatctgactatacaggctaccagggcacaaactctgctgctccaggctatctaccagagctggagccatctagggaatgtgtctagcagtgcagtgatagaagctcttatcaatgagatattcctatctatcgaaatagggagctgttacgtggcccaggtggatctcgaactgttggccagcaacgatccccctacatcaacttcttag

SEQ ID NO: 185438 - DNA, 2822 bp, Artificial Sequence
  derived and/or modified sequence
ggcgcggtacaggagcagcactgccggcgggggcgggtgccagggacttggaggtggaggggacgcggcggtactctggcgtcttccgacttcgactccttaccttaaaagatgctggagtcatatgtaactccaattttaatgagctatgtgaatcgctacatcaagaacttaaagccgtcggatctacagctttcactatggggtggagacgtggtactcagcaagctcgagttaaagttggatgtgctggaacaggaactgaaattaccattcacttttttaagtggacatattcatgaattgaggattcatgtaccatggacaaaactgggttcagaaccagtggtaattaccatcaatactatggaatgcattttgaaacttaaggatgggatacaggatgaccatgaaagctgtggttctaattctaccaaccgtagtactgctgagagcacaaaatcatcaatcaaaccgcggagaatgcagcaggctgctcctacagatcctgacttaccaccaggttatgtgcagagtctgattagacgagttgtaaataatgtaaacattgtgataaataatctcatactaaaatatgttgaagatgatatcgtcctttccgtcaatatcacttctgcagaatgttatacagtaggtgaattatgggatcgtgcattcatggatatttctgcaactgatttggtgctgagaaaggttatcaatttttctgactgtacagtttgtcttgataaacggaatgccagtggtaaaatagaattttaccaggatcctttattatacaaatgttccttcagaactcgtcttcattttacatatgaaaacctaaattccaagatgccatctgttattaaaattcatactttagtggaaagtttgaaactttctatcacagatcaacaactgcctatgtttattcgtataatgcaacttggaattgctctttactatggagaaataggcaattttaaagaaggcgaaatagaggaccttacttgtcataataaagatatgctaggaaacattacaggttctgaagatgaaacaagaatagatatgcaatatcctgctcagcataaaggtcaagagttatattcacagcaagatgaggagcagccacagggatgggtgtcatgggcctggtcctttgtgcctgcaattgtgagttatgacgatggcgaggaagactttgttgggaacgatcctgcatcaaccatgcatcaacaaaaagcacagactttgaaggatcctattgtttctataggattttattgcacaaaggcaacggtgactttcaaactcacagaaatgcaagttgagagtagttattacagtccacagaaagtaaaatctaaagaagtattgtgttgggaacaagaaggaactacagttgaggcccttatgatgggagaacctttctttgattgccagattgggtttgttggttgcagagccatgtgccttaaaggaattatgggtgttaaagattttgaagagaatatgaatagaagtgaaactgaagcctgtttcttcatttgtggtgacaatttgagtacgaaaggtttcacataccttacaaattcattgtttgattaccgaagcccagaaaataatggtactcgcgcagaatttatcttggattcaactcatcataaggagacatacactgagatagctggaatgcaacggtttggggctttttatatggattacctgtatacaatggagaacactagtggcaaaggttccacaaatcaacaagacttttcttcagggaaaagtgaagatttgggaacagttcaggagaagtccaccaaaagccttgttataggtcctcttgattttcgtttggatagcagtgcggtgcataggattttgaaaatgattgtgtgtgccttggaacatgaatatgaaccatatagcaggctaaaatcagatattaaggatgaaaatgaaacaatactgaatcctgaagaggtggctcttctggaggaatatattcctactcgacatacaagtgttactctcctcaaatgtacctgcacaatttccatggctgaattcaacttgctggaccatttactacctgtcattatgggagaaaagaactcaagtaacttcatgaatactacaaacttccagtctcttcggcctttgccatccattcgaatattggtggataaaattaatctggaacattcagtgccaatgtatgctgaacagttggtgcatgtggtcagcagccttactcaaccttctgataacctgcttcattattgttatgtacactgctatcttaagatatttggtttccaggcaggactgacgtctttggattgcagtggatcttactgcttacctgtaccagttattccctctttcagcactgctctttatgggaaacttctgaaactccccacatgctggaccaaaagatctcagattgctataactgaaggtatatttgaacttccaaatctcacaattcaagctacaagagcacagacacttctcttgcaagcaatatatcaaagttggtctcatcttggaaatgtcagctcttccgcagtgattgaagctttgataaatgaaatcttcctaagtatagagattgggtcttgctatgttgcccaggttgatcttgaactcctggcctcaaatgatcctcccacctcaacctcctgaagtgccgggattggaggcccaagccactgtgcctggccctttataaattatgttataatttcatgtaatacataattgtatagtcaaaatggctcacatattaaatattctttatacaa

SEQ ID NO: 185439 - protein, 1134 aa, Artificial Sequence
  derived and/or modified sequence
MGKEQELLEAARTGHLPAVEKLLSGKRLSSGFGGGGGGGSGGGGGGSGGGGGGLGSSSHPLSSLLSMWRGPNVNCVDSTGYTPLHHAALNGHKDVVEVLLRNDALTNVADSKGCYPLHLAAWKGDAQIVRLLIHQGPSHTRVNEQNNDNETALHCAAQYGHTEVVKVLLEELTDPTMRNNKFETPLDLAALYGRLEVVKMLLNAHPNLLSCNTKKHTPLHLAARNGHKAVVQVLLDAGMDSNYQTEMGSALHEAALFGKTDVVQILLAAGTDVNIKDNHGLTALDTVRELPSQKSQQIAALIEDHMTGKRSTKEVDKTPPPQPPLISSMDSISQKSQGDVEKAVTELIIDFDANAEEEGPYEALYNAISCHSLDSMASGRSSDQDSTNKEAEAAGVKPAGVRPRERPPPPAKPPPDEEEEDHIDKKYFPLTASEVLSMRPRIHGSAAREEDEHPYELLLTAETKKVVLVDGKTKDHRRSSSSRSQDSAEGQDGQVPEQFSGLLHGSSPVCEVGQDPFQLLCTAGQSHPDGSPQQGACHKASMQLEETGVHAPGASQPSALDQSKRVGYLTGLPTTNSRSHPETLTHTASPHPGGAEEGDRSGARSRAPPTSKPKAELKLSRSLSKSDSDLLTCSPTEDATMGSRSESLSNCSIGKKRLEKSPSFASEWDEIEKIMSSIGEGIDFSQERQKISGLRTLEQSVGEWLESIGLQQYESKLLLNGFDDVHFLGSNVMEEQDLRDIGISDPQHRRKLLQAARSLPKVKALGYDGNSPPSVPSWLDSLGLQDYVHSFLSSGYSSIDTVKNLWELELVNVLKVQLLGHRKRIIASLADRPYEEPPQKPPRFSQLRCQDLLSQTSSPLSQNDSCTGRSADLLLPPGDTGRRRHDSLHDPAAPSRAERFRIQEEHREAKLTLRPPSLAAPYAPVQSWQHQPEKLIFESCGYEANYLGSMLIKDLRGTESTQDACAKMRKSTEHMKKIPTIILSITYKGVKFIDASNKNVIAEHEIRNISCAAQDPEDLCTFAYITKDLQTSHHYCHVFSTVDVNLTYEIILTLGQAFEVAYQLALQAQKSRATGASAAEMIETKSSKPVPKPRVGVRKSALEPPDMDQDAQSHASVSWVVDPKPDSKRSLSTN

SEQ ID NO: 185440 - protein, 570 aa, Artificial Sequence
  derived and/or modified sequence
MSSIGEGIDFSQERQKISGLRTLEQSVGEWLESIGLQQYESKLLLNGFDDVHFLGSNVMEEQDLRDIGISDPQHRRKLLQAARSLPKVKALGYDGNSPPSVPSWLDSLGLQDYVHSFLSSGYSSIDTVKNLWELELVNVLKVQLLGHRKRIIASLADRPYEEPPQKPPRFSQLRCQDLLSQTSSPLSQNDSCTGRSADLLLPPGDTGRRRHDSLHDPAAPSRAERFRIQEEHREAKLTLRPPSLAAPYAPVQSWQHQPEKLIFESCGYEANYLGSMLIKDLRGTESTQDACAKMRKSTEHMKKIPTIILSITYKGVKFIDASNKNVIAEHEIRNISCAAQDPEDLCTFAYITKDLQTSHHYCHVFSTVDVNLTYEIILTLGQAFEVAYQLALQAQKSRATGASAAEMIETKSSKPVPKPRVGVRKSAVPLPPDSRCCYCHTCTTHRPSYLPLPSVSPGVKLEPPDMDQDAQSHASVSWVVDPKPDSKRSLSTNHTRLELVCCSQPENELVSTISGDKPKSFLEPLLFVMPTTAYNHNCPEWRSQKDGGCSTSECPHHLCLEKPGVLSLEM

SEQ ID NO: 185441 - protein, 320 aa, Artificial Sequence
  derived and/or modified sequence
MGKEQELLEAARTGHLPAVEKLLSGKRLSSGFGGGGGGGSGGGGGGSGGGGGGLGSSSHPLSSLLSMWRGPNVNCVDSTGYTPLHHAALNGHKDVVEVLLRNDALTNVADSKGCYPLHLAAWKGDAQIVRLLIHQGPSHTRVNEQNNDNETALHCAAQYGHTEVVKVLLEELTDPTMRNNKFETPLDLAALYGRLEVVKMLLNAHPNLLSCNTKKHTPLHLAARNGHKAVVQVLLDAGMDSNYQTEMGSALHEAALFGKTDVVQILLAAGTDVNIKDNHGLTALDTVRELPSQKSQQIAALIEDLDTLQFYFISCPFQGL

SEQ ID NO: 185442 - protein, 472 aa, Artificial Sequence
  derived and/or modified sequence
MGKEQELLEAARTGHLPAVEKLLSGKRLSSGFGGGGGGGSGGGGGGSGGGGGGLGSSSHPLSSLLSMWRGPNVNCVDSTGYTPLHHAALNGHKDVVEVLLRNDALTNVADSKGCYPLHLAAWKGDAQIVRLLIHQGPSHTRVNEQNNDNETALHCAAQYGHTEVVKVLLEELTDPTMRNNKFETPLDLAALYGRLEVVKMLLNAHPNLLSCNTKKHTPLHLAARNGHKAVVQVLLDAGMDSNYQTEMGSALHEAALFGKTDVVQILLAAGTDVNIKDNHGLTALDTVRELPSQKSQQIAALIEDHMTGKRSTKEVDKTPPPQPPLISSMDSISQKSQGDVEKAVTELIIDFDANAEEEGPYEALYNAISCHSLDSMASGRSSDQDSTNKEAEAAGVKPAGVRPRERPPPPAKPPPDEEEEDHIDKKYFPLTASEVLSMRPRIHGSAAREEDEHPYELLLTAETKKKKKKKKK

SEQ ID NO: 185443 - DNA, 3405 bp, Artificial Sequence
  derived and/or modified sequence
atgggcaaggagcaggagctgctggaggccgccagaaccggccacctgcccgccgtggagaagctgctgagcggcaagagactgagcagcggcttcggcggcggcggcggcggcggcagcggcggcggcggcggcggcagcggcggcggcggcggcggcctgggcagcagcagccaccccctgagcagcctgctgagcatgtggagaggccccaacgtgaactgcgtggacagcaccggctacacccccctgcaccacgccgccctgaacggccacaaggacgtggtggaggtgctgctgagaaacgacgccctgaccaacgtggccgacagcaagggctgctaccccctgcacctggccgcctggaagggcgacgcccagatcgtgagactgctgatccaccagggccccagccacaccagagtgaacgagcagaacaacgacaacgagaccgccctgcactgcgccgcccagtacggccacaccgaggtggtgaaggtgctgctggaggagctgaccgaccccaccatgagaaacaacaagttcgagacccccctggacctggccgccctgtacggcagactggaggtggtgaagatgctgctgaacgcccaccccaacctgctgagctgcaacaccaagaagcacacccccctgcacctggccgccagaaacggccacaaggccgtggtgcaggtgctgctggacgccggcatggacagcaactaccagaccgagatgggcagcgccctgcacgaggccgccctgttcggcaagaccgacgtggtgcagatcctgctggccgccggcaccgacgtgaacatcaaggacaaccacggcctgaccgccctggacaccgtgagagagctgcccagccagaagagccagcagatcgccgccctgatcgaggaccacatgaccggcaagagaagcaccaaggaggtggacaagaccccccccccccagccccccctgatcagcagcatggacagcatcagccagaagagccagggcgacgtggagaaggccgtgaccgagctgatcatcgacttcgacgccaacgccgaggaggagggcccctacgaggccctgtacaacgccatcagctgccacagcctggacagcatggccagcggcagaagcagcgaccaggacagcaccaacaaggaggccgaggccgccggcgtgaagcccgccggcgtgagacccagagagagaccccccccccccgccaagcccccccccgacgaggaggaggaggaccacatcgacaagaagtacttccccctgaccgccagcgaggtgctgagcatgagacccagaatccacggcagcgccgccagagaggaggacgagcacccctacgagctgctgctgaccgccgagaccaagaaggtggtgctggtggacggcaagaccaaggaccacagaagaagcagcagcagcagaagccaggacagcgccgagggccaggacggccaggtgcccgagcagttcagcggcctgctgcacggcagcagccccgtgtgcgaggtgggccaggaccccttccagctgctgtgcaccgccggccagagccaccccgacggcagcccccagcagggcgcctgccacaaggccagcatgcagctggaggagaccggcgtgcacgcccccggcgccagccagcccagcgccctggaccagagcaagagagtgggctacctgaccggcctgcccaccaccaacagcagaagccaccccgagaccctgacccacaccgccagcccccaccccggcggcgccgaggagggcgacagaagcggcgccagaagcagagccccccccaccagcaagcccaaggccgagctgaagctgagcagaagcctgagcaagagcgacagcgacctgctgacctgcagccccaccgaggacgccaccatgggcagcagaagcgagagcctgagcaactgcagcatcggcaagaagagactggagaagagccccagcttcgccagcgagtgggacgagatcgagaagatcatgagcagcatcggcgagggcatcgacttcagccaggagagacagaagatcagcggcctgagaaccctggagcagagcgtgggcgagtggctggagagcatcggcctgcagcagtacgagagcaagctgctgctgaacggcttcgacgacgtgcacttcctgggcagcaacgtgatggaggagcaggacctgagagacatcggcatcagcgacccccagcacagaagaaagctgctgcaggccgccagaagcctgcccaaggtgaaggccctgggctacgacggcaacagcccccccagcgtgcccagctggctggacagcctgggcctgcaggactacgtgcacagcttcctgagcagcggctacagcagcatcgacaccgtgaagaacctgtgggagctggagctggtgaacgtgctgaaggtgcagctgctgggccacagaaagagaatcatcgccagcctggccgacagaccctacgaggagcccccccagaagccccccagattcagccagctgagatgccaggacctgctgagccagaccagcagccccctgagccagaacgacagctgcaccggcagaagcgccgacctgctgctgccccccggcgacaccggcagaagaagacacgacagcctgcacgaccccgccgcccccagcagagccgagagattcagaatccaggaggagcacagagaggccaagctgaccctgagaccccccagcctggccgccccctacgcccccgtgcagagctggcagcaccagcccgagaagctgatcttcgagagctgcggctacgaggccaactacctgggcagcatgctgatcaaggacctgagaggcaccgagagcacccaggacgcctgcgccaagatgagaaagagcaccgagcacatgaagaagatccccaccatcatcctgagcatcacctacaagggcgtgaagttcatcgacgccagcaacaagaacgtgatcgccgagcacgagatcagaaacatcagctgcgccgcccaggaccccgaggacctgtgcaccttcgcctacatcaccaaggacctgcagaccagccaccactactgccacgtgttcagcaccgtggacgtgaacctgacctacgagatcatcctgaccctgggccaggccttcgaggtggcctaccagctggccctgcaggcccagaagagcagagccaccggcgccagcgccgccgagatgatcgagaccaagagcagcaagcccgtgcccaagcccagagtgggcgtgagaaagagcgccctggagccccccgacatggaccaggacgcccagagccacgccagcgtgagctgggtggtggaccccaagcccgacagcaagagaagcctgagcaccaactag

SEQ ID NO: 185444 - DNA, 1713 bp, Artificial Sequence
  derived and/or modified sequence
atgagcagcatcggcgagggcatcgacttcagccaggagagacagaagatcagcggcctgagaaccctggagcagagcgtgggcgagtggctggagagcatcggcctgcagcagtacgagagcaagctgctgctgaacggcttcgacgacgtgcacttcctgggcagcaacgtgatggaggagcaggacctgagagacatcggcatcagcgacccccagcacagaagaaagctgctgcaggccgccagaagcctgcccaaggtgaaggccctgggctacgacggcaacagcccccccagcgtgcccagctggctggacagcctgggcctgcaggactacgtgcacagcttcctgagcagcggctacagcagcatcgacaccgtgaagaacctgtgggagctggagctggtgaacgtgctgaaggtgcagctgctgggccacagaaagagaatcatcgccagcctggccgacagaccctacgaggagcccccccagaagccccccagattcagccagctgagatgccaggacctgctgagccagaccagcagccccctgagccagaacgacagctgcaccggcagaagcgccgacctgctgctgccccccggcgacaccggcagaagaagacacgacagcctgcacgaccccgccgcccccagcagagccgagagattcagaatccaggaggagcacagagaggccaagctgaccctgagaccccccagcctggccgccccctacgcccccgtgcagagctggcagcaccagcccgagaagctgatcttcgagagctgcggctacgaggccaactacctgggcagcatgctgatcaaggacctgagaggcaccgagagcacccaggacgcctgcgccaagatgagaaagagcaccgagcacatgaagaagatccccaccatcatcctgagcatcacctacaagggcgtgaagttcatcgacgccagcaacaagaacgtgatcgccgagcacgagatcagaaacatcagctgcgccgcccaggaccccgaggacctgtgcaccttcgcctacatcaccaaggacctgcagaccagccaccactactgccacgtgttcagcaccgtggacgtgaacctgacctacgagatcatcctgaccctgggccaggccttcgaggtggcctaccagctggccctgcaggcccagaagagcagagccaccggcgccagcgccgccgagatgatcgagaccaagagcagcaagcccgtgcccaagcccagagtgggcgtgagaaagagcgccgtgcccctgccccccgacagcagatgctgctactgccacacctgcaccacccacagacccagctacctgcccctgcccagcgtgagccccggcgtgaagctggagccccccgacatggaccaggacgcccagagccacgccagcgtgagctgggtggtggaccccaagcccgacagcaagagaagcctgagcaccaaccacaccagactggagctggtgtgctgcagccagcccgagaacgagctggtgagcaccatcagcggcgacaagcccaagagcttcctggagcccctgctgttcgtgatgcccaccaccgcctacaaccacaactgccccgagtggagaagccagaaggacggcggctgcagcaccagcgagtgcccccaccacctgtgcctggagaagcccggcgtgctgagcctggagatgtag

SEQ ID NO: 185445 - DNA, 963 bp, Artificial Sequence
  derived and/or modified sequence
atgggcaaggagcaggagctgctggaggccgccagaaccggccacctgcccgccgtggagaagctgctgagcggcaagagactgagcagcggcttcggcggcggcggcggcggcggcagcggcggcggcggcggcggcagcggcggcggcggcggcggcctgggcagcagcagccaccccctgagcagcctgctgagcatgtggagaggccccaacgtgaactgcgtggacagcaccggctacacccccctgcaccacgccgccctgaacggccacaaggacgtggtggaggtgctgctgagaaacgacgccctgaccaacgtggccgacagcaagggctgctaccccctgcacctggccgcctggaagggcgacgcccagatcgtgagactgctgatccaccagggccccagccacaccagagtgaacgagcagaacaacgacaacgagaccgccctgcactgcgccgcccagtacggccacaccgaggtggtgaaggtgctgctggaggagctgaccgaccccaccatgagaaacaacaagttcgagacccccctggacctggccgccctgtacggcagactggaggtggtgaagatgctgctgaacgcccaccccaacctgctgagctgcaacaccaagaagcacacccccctgcacctggccgccagaaacggccacaaggccgtggtgcaggtgctgctggacgccggcatggacagcaactaccagaccgagatgggcagcgccctgcacgaggccgccctgttcggcaagaccgacgtggtgcagatcctgctggccgccggcaccgacgtgaacatcaaggacaaccacggcctgaccgccctggacaccgtgagagagctgcccagccagaagagccagcagatcgccgccctgatcgaggacctggacaccctgcagttctacttcatcagctgccccttccagggcctgtag

SEQ ID NO: 185446 - DNA, 1419 bp, Artificial Sequence
  derived and/or modified sequence
atgggcaaggagcaggagctgctggaggccgccagaaccggccacctgcccgccgtggagaagctgctgagcggcaagagactgagcagcggcttcggcggcggcggcggcggcggcagcggcggcggcggcggcggcagcggcggcggcggcggcggcctgggcagcagcagccaccccctgagcagcctgctgagcatgtggagaggccccaacgtgaactgcgtggacagcaccggctacacccccctgcaccacgccgccctgaacggccacaaggacgtggtggaggtgctgctgagaaacgacgccctgaccaacgtggccgacagcaagggctgctaccccctgcacctggccgcctggaagggcgacgcccagatcgtgagactgctgatccaccagggccccagccacaccagagtgaacgagcagaacaacgacaacgagaccgccctgcactgcgccgcccagtacggccacaccgaggtggtgaaggtgctgctggaggagctgaccgaccccaccatgagaaacaacaagttcgagacccccctggacctggccgccctgtacggcagactggaggtggtgaagatgctgctgaacgcccaccccaacctgctgagctgcaacaccaagaagcacacccccctgcacctggccgccagaaacggccacaaggccgtggtgcaggtgctgctggacgccggcatggacagcaactaccagaccgagatgggcagcgccctgcacgaggccgccctgttcggcaagaccgacgtggtgcagatcctgctggccgccggcaccgacgtgaacatcaaggacaaccacggcctgaccgccctggacaccgtgagagagctgcccagccagaagagccagcagatcgccgccctgatcgaggaccacatgaccggcaagagaagcaccaaggaggtggacaagaccccccccccccagccccccctgatcagcagcatggacagcatcagccagaagagccagggcgacgtggagaaggccgtgaccgagctgatcatcgacttcgacgccaacgccgaggaggagggcccctacgaggccctgtacaacgccatcagctgccacagcctggacagcatggccagcggcagaagcagcgaccaggacagcaccaacaaggaggccgaggccgccggcgtgaagcccgccggcgtgagacccagagagagaccccccccccccgccaagcccccccccgacgaggaggaggaggaccacatcgacaagaagtacttccccctgaccgccagcgaggtgctgagcatgagacccagaatccacggcagcgccgccagagaggaggacgagcacccctacgagctgctgctgaccgccgagaccaagaagaagaagaagaagaagaagaagtag

SEQ ID NO: 185447 - DNA, 6336 bp, Artificial Sequence
  derived and/or modified sequence
tcgtggggaaaaggcagggagggggtggtgtccccagccggtttggggggtgcgttgcccggagacggaaagtttgggagcccgagcaggctcggctgcagcctcggggagggggtccagcgggtggcggccctggggatggggaaggagcaggagctgctggaggcggcccgcaccgggcacctcccggcggtggagaagctgctgtccgggaagcggctctcctcaggctttgggggcggcggcggcggtggctctgggggcggcggcggcggcagcggcggcggcggcggcggcctcggctcttccagccaccccctctccagtctgctcagcatgtggagagggccaaatgtgaactgtgttgacagcactggctacacacccctgcaccatgctgctttgaatggccataaggatgtggtcgaggttcttctgaggaacgatgcgctgaccaacgtggctgactcaaaaggctgctaccctctgcatttggcagcctggaaaggagatgcccagatagtgcggttgctcatccatcaagggccttcacacaccagagtcaatgaacagaacaatgacaacgagacagccctgcattgtgcagcgcagtatggccacacagaggtggtgaaggtgctcttagaggagctgacggaccccaccatgcgcaacaacaaattcgagacccctttggacctggcagcactgtacgggcgactggaggtggtgaaaatgctccttaatgcacaccccaacctcctgagctgcaacactaagaagcacacccctctgcacttggcagcaaggaatggccacaaagccgtggtccaggtcctcctcgatgctggcatggacagcaactaccagacggagatgggcagtgctttgcatgaggctgctttgtttggcaagaccgatgtggtgcaaatcctgctggctgcaggaactgacgtcaacataaaagataaccatggactgactgccctagacactgttcgggaactgccttctcaaaagagccagcaaatagcagcattaattgaagatcacatgactggaaaaagaagtacaaaagaagtagataaaacccccccaccccagccacctctcatctccagtatggactccatatcacagaagtctcagggtgacgtggagaaagcagtgactgaactgattatagattttgatgcaaatgctgaagaagagggtccctacgaagctctgtataatgccatctcctgccattcgttggacagcatggccagcgggcgatcatctgaccaagactccacgaacaaggaggctgaggcagcaggagtgaaacctgctggagtgaggcctagggaacgtccaccacctccagcaaagccaccgcccgatgaagaggaagaagaccacatagataagaagtattttcccttgacagcttctgaggttctgtccatgagacctaggattcatgggagtgcagcccgggaagaagacgaacacccttatgaactgttgttaacagcagagacaaagaaagtggtgttggtggatggaaaaacaaaagaccacaggcggagcagcagcagccggagccaggactctgcggaggggcaggacgggcaggtcccagagcagttctcaggcctcctccacggctcctccccggtgtgcgaggtggggcaggaccctttccagctgctctgtaccgctggccagagccatccagacgggtccccccagcagggcgcctgccacaaggccagcatgcagctggaggagacgggtgtgcatgctcctggagcctcccagcccagtgccctggaccagagcaagagagtgggctacctcacaggcctgcccaccaccaacagccgctcgcaccctgaaactttgactcacacagcatctccgcaccctggtggtgctgaggaaggagaccggagtggggccaggagccgagcgcctcccactagcaaacccaaagctgaactcaaactcagccgcagcttgtccaagtctgactctgatctcctgacctgctcacccacagaggacgctaccatggggagtcggagtgagtccttatccaactgcagcattgggaagaaaaggctagagaagtcaccctccttcgcctcggagtgggatgagattgagaaaatcatgagttctattggagaagggattgacttttctcaggaacggcagaagatctcaggtttacggacgctggagcagagtgtcggggagtggctggagtcgattgggctgcagcagtatgagagcaagttgcttctgaatggctttgacgatgtccacttcctggggtctaatgtgatggaagagcaggacctgcgggacatcggcatcagcgacccacagcaccggcggaagctgctccaggcggcacgctccctacccaaggtgaaggctctgggttatgacgggaacagcccccctagcgtgccctcctggctggactccctggggctgcaggactacgtccattccttcttgtcaagtggttacagctccattgacaccgtgaagaacctctgggagctagagctcgtcaatgtcctgaaggtccagctgctcggccatcgcaagcgcatcatcgcctccctcgcagacagaccgtacgaggagccgccccagaagccccccagattctcccagctgaggtgccaagatttgctctcccagacgtcatccccactgagtcagaatgattcctgcactgggcggtcggcagatctgctgctgcctccaggggacacaggcaggaggcgccatgacagtctccatgaccctgcggcaccctcccgagcggagcgcttcaggatccaggaggagcaccgtgaggccaagctgaccctgcggcccccgagcctggcagccccctacgccccagtgcagagttggcaacaccagccagagaaactcatcttcgagtcctgtggttatgaagccaattatctgggctccatgctgatcaaagatctgcgagggacagaatccacgcaagacgcctgtgccaagatgcggaaatctacggagcacatgaagaagatccccaccatcatcctgtccatcacatacaaaggtgtcaagttcatcgatgcctccaacaagaacgtcattgcagagcacgagatccggaacatttcctgtgcggcccaggacccggaggacctctgtacctttgcctacatcaccaaggacctgcagaccagccaccactattgccatgtgttcagcaccgtggatgtgaacctgacctacgagatcatcctgacgctggggcaggccttcgaagtggcctatcagttggccctgcaggcccagaagtccagggcgacgggcgcctctgcagctgagatgattgaaacaaaatcttccaaaccggtgcctaagcctcgggtcggcgtgaggaaatccgcactggaaccacctgatatggaccaagatgcccaatcccatgccagtgtctcctgggttgtggaccccaaaccagactctaagcggagcctcagcaccaactgagccactgaggaaccacactgtgctgcggaaacatagacgtgggggcataggctcccactgccaccaccgccatcgcctcacctgcagctctgaagacccaggcctcacctccgcctgcaggacctcctcttggccacttggcctgggcctgccaccaccacgtcctgcagaacgagccctgccttggctgtggagaagcactccaggccgctagcagatgggactggcattccagagggtcaagaagtgacttgttcagaacacattgtttttaacagaaaaaaaatctttttataaaatgaacttttaacacttggctcaaacctctaggtcatactgccaatctttagacaaatggccatggggcagaggacaggggagctgaggttggttcagaggccagcctgcatagcctctgtcctcaggacggaacttgggtgcagctcagtgggtcggaagagaaggcggtggcctgtgggtgaggggaacggagcaggctcaggcagaattgagtacggtgcgtctgcttttcaaacccaaccatatcagctgctgctctttatgaactgcccaacttcctgtccctttcaggggctagacacaggcttctcgtaagaacacagccttagaggcacctgagcaactcaaaggtttccggtccatttctggggttcccgatgggaaggttcagtggccaaatgaagataagtgtgcagtttctagtgctgggaagtcttagccagcaccagagcgccaggcctctccctggcctcttacctgtcagtgatcggagcactgccctgggctggccggcgccgtactgcctgcgttgtgtcagagaataggaaaagcagctttgtttggggcattaatgcttggagtggggtcagctaaggttgctacttgccaatttgtgatttgtctaatcagcctgtgtgattggggctcattttgattctctgaattatcggtttgacggttacacttggctgctgggcccatccctggcccccggtgtggaaaaggctaaataaggtgacagtgcatcgatgctcccccgcgtggcctttggggcaggctggcatcccggtgcgcctctgcttcttaagctttcctgctgctcgctttgtttttaaaagtaacttgggttgcattcttccctctggactagagtagaaatgcaggggaaactgctgtggatttgagaggcaaagttggctcagctgtgtgcccagttcctcctgtgggcactttagcaggctccgagctttcctggcataggtcaatcaggtcccaggatgaataatccaggcttcagcaacactcctctttcccagccagcaaaggctgtgaatttgaattctttgttggtatgtatgtgcagggagtactgttaggcacattcttaacccatgtggttggccagaaatcagaagtggggctgtgtctctgactggctagaggccaggccttgtgggtttctatctgctaagcacccagcaggttggggcctgggactcagctctctctgcggtagaggcaggccctcctccacttcttggtactaaacgaagatctcgacaccttgcagttttacttcatttcctgcccctttcagggcctgtgaggatgcccatgagctaccgctgtacagttctcggccccggctttcttccaagagttgaccaggaaccctaaagcatccagagtagactgcgctgccactgcgcacatgctggtgcccgtcttcctcctaaggggccaggccacatccaagtgggcctctgtcgggggcggggcggtaggtccgaaagaaaccgcagacactacgatgcactcctcaagctgtcttttgtgcttagatcatccataggtgtttcttctgcttgaagctgctatatcatctttatttattcagggtattttcatattggaagccttggctagtctgctctagctctgggttctgtttagagattggtttatttctgaatattcaagaaaggaaaatgactgggcctttctttcttttcttctcctctgggatgggtagtctccctttcctagaaaggttattataactttaaggacaggcttcaagtgggaaggcccctacttttgcacttctccaagtgcaggtcacaccaggggcagaccctgtcgctgcgtttctgaactgtgaaggagcccattcgggtgggagacttcagatgggctcagtacctgtcccagccacaggcttcttgtccacctcttctcccctgcccaccagctgctcagcgcataagaccttcccgacaggctctgcgtgtgcagctctctgcgtccctcctgggccctccagcgtcagacactaatgggagttcccgagatgctcgggtttgagcagggagcaggcagagctgcagtcagagacattagaaaaccagtctgaattgggtctgtctttgagatgcccaggccagcagaaagcagctcagaagtattgttgctcatggtgtggcaatggactgaactgtaatgaaaatgttatttaatctttgtctctgtattttgatacttgaatgactttcccttttgttttactgtatataaaattgttaatctgtctgattttgtctgaattataaacactttgaggtaccaaacataaccaatctgtgcaacaacatagactgacctcagtacccaagagagtgtaaatatttctgggcttccagctttggttttgttattttcataactgtacacaacttagaacagactgaattaataaatgagaagcgacatgaa

SEQ ID NO: 185448 - DNA, 3405 bp, Artificial Sequence
  derived and/or modified sequence
atgggcaaggagcaggaactcctggaggccgcccgtacaggccatctgcccgctgtggagaagctactctcgggcaaaagattgtcatccggtttcgggggaggcgggggcgggggatcaggcggaggggggggtggcagcggcgggggcggaggcggcttgggaagttccagtcatcctctatcatcgcttctgtccatgtggaggggtcctaacgtaaattgtgtggactccactgggtacacacctttgcaccacgccgctctgaacggacacaaggacgtcgtggaagtgttgctacggaacgacgcgctgaccaacgtggctgacagtaagggctgctacccactgcacctcgccgcctggaagggggacgcacagattgtccgactgttaattcatcagggcccctctcatactagagtgaacgaacagaataacgacaacgagaccgccctccactgtgccgcgcagtatggccacaccgaggtggtaaaagtcctactggaagagctgacagatccgaccatgcggaataataaattcgagaccccactggaccttgcagcactctacggccggcttgaggtcgttaagatgctgctgaacgctcatcctaacctgcttagctgtaataccaaaaagcatacacccctgcacctggccgcccgaaacggccacaaagctgtggtgcaagtcctgctggacgcaggcatggattccaactaccagacagagatgggctcagcgctgcacgaagcagctctgttcgggaagaccgatgtcgtccagatcttgctggccgcaggaacagatgtgaacattaaggacaaccacggcctaacagccttagacacagtacgcgagctcccttcacagaaatcgcagcagattgctgctctgatagaagatcacatgacagggaaaagatccaccaaggaagtagacaagaccccgcctcctcaacctcccctgatctccagcatggattcgataagccagaaatcgcagggagacgtagaaaaggcagtgaccgaactaatcatagacttcgacgccaacgctgaggaagaggggccctacgaagccctatacaatgcaatctcatgtcacagcctggattctatggcctcaggccgctcatcggaccaggacagcactaataaagaggcggaggccgccggtgtgaaaccagcaggtgtgaggcctcgggagcgacctccccctccggccaaacctcccccagatgaagaagaagaggaccacatagataaaaagtacttccctttaacagcgtctgaggtgctgtcaatgagacctcgtatacatggatcagccgccagagaagaagatgaacacccatacgagctattattgactgctgagacaaagaaagtcgtgctggtggacggtaagacaaaggaccaccgaaggagttcttcctcccgaagccaagatagtgccgaagggcaggatggtcaggttcctgagcagttctccggccttctccacgggagtagcccagtttgtgaggttggacaggacccattccagctgttatgcactgccggccagagtcaccccgacgggtctcctcaacagggtgcctgtcacaaggccagcatgcaacttgaagaaactggcgtacacgcacccggggccagtcaaccctctgctctggaccaatccaaacgggtcgggtacctcactggactgccgactactaattccagatcccaccccgagaccctgacacatactgctagtcctcaccccggaggagccgaagagggagatcgttcaggcgccagatccagagcgccgcctacctccaagccaaaagctgagttgaagctatcaaggtctctctccaaaagcgactccgacctcttaacgtgttcgcccaccgaagacgccactatgggtagtcgttccgaatctctgagcaattgttctatcggtaagaagcgcctcgaaaaaagtccctccttcgcgtctgaatgggacgagatagagaagataatgagttcaatcggagaagggatcgacttttcccaggaaaggcagaaaataagcggactccgaacacttgaacagtccgtgggcgaatggttggagtccattggactgcagcagtatgagtctaagctcctgctcaacgggttcgatgacgtccatttcctgggaagcaacgttatggaggaacaggatctgcgggacattggcattagcgatcctcagcatagaagaaagttgctccaggctgcacgatctctgccaaaagttaaggctctcgggtacgatggcaattcaccaccatctgtgcctagctggctggattctctcggtctgcaggattatgtgcattcctttctgtcctcaggatacagcagcattgacaccgtgaaaaatctctgggaattggaactcgtcaacgtcctcaaagttcagctgctggggcacaggaaacgcataatcgcctcccttgccgaccgaccctatgaagaacccccccagaagcccccacggtttagccagctgcggtgtcaggatctgctgagccagaccagcagcccactcagtcagaacgattcttgcacgggtcggagcgccgacctgctgctgccacctggagacaccggcagaagacgtcatgactccctgcatgacccggccgctccttcccgcgctgagaggtttaggatccaggaggagcatcgtgaggcaaagctcaccctccgcccccccagcctcgctgccccgtatgccccagtgcagagctggcagcatcagccggagaaactcatatttgagagttgcggctacgaagctaactatttggggagcatgctcatcaaggatctgcgcgggaccgaaagcacgcaggatgcctgcgctaagatgcgcaagagtacggagcatatgaagaaaattcctactatcattctaagcatcacctataaaggggtaaagttcatagatgcaagtaacaaaaacgtgattgccgaacatgaaatccgtaatatcagttgtgccgcccaggacccagaggacctgtgtacatttgcctacatcacaaaggacttacaaacatcccatcactactgccacgtattctcgactgtcgacgttaacctgacctatgaaatcattctaacccttggccaggcctttgaggtggcttatcaactcgcccttcaggctcagaagtcacgtgcaaccggggccagcgcagctgagatgatagagaccaaatcatcaaagcctgtgcctaagcctagggtgggggtaagaaagtccgcacttgagccacccgacatggatcaggatgcccagtcacacgccagcgtcagctgggttgttgaccccaagccggacagcaaacggtccctatccaccaactag

SEQ ID NO: 185449 - DNA, 1713 bp, Artificial Sequence
  derived and/or modified sequence
atgtcttcaataggcgaggggatcgacttctctcaggagcgacagaaaatcagcgggcttcgcacattagagcagtccgtgggggagtggttggagtcaattggattgcagcaatatgagtccaaactgctgcttaacggtttcgacgatgtgcattttctggggtccaacgtcatggaggaacaggacctacgggacattggtataagcgatccacagcacagacgaaagttgctacaggctgcaagaagcctgcccaaggtaaaagccctaggttatgatggaaacagccctccatctgtgcccagctggttagactctcttggcctacaagattatgtgcacagtttcctgagctcaggttacagttctattgatactgtgaagaacctttgggagctcgagctggtaaacgtgttgaaagtccaactactgggacataggaaacgtattatcgccagcctagcggaccggccctacgaagagcctcctcagaaaccaccccgttttagtcaactgcgctgccaggacctgctgtcacaaaccagctccccgctctcccagaacgattcttgcaccggtagatcagcagaccttctcttgccgcctggtgacaccggacggcggcgacatgacagcctacatgaccccgcggcgccaagccgagccgaaaggtttagaattcaggaggaacaccgggaggccaaactgaccctgcgaccaccctccctggctgcaccatacgcacccgttcaatcttggcagcatcagccagaaaagctcatatttgagtcctgtggctacgaggcaaattacctgggttctatgctcattaaggacctgagaggaactgagtctactcaggatgcgtgcgccaagatgcgaaagtccactgagcacatgaagaagatccctaccattattcttagtattacctataagggtgtaaagtttattgacgcgagcaacaaaaacgtaattgcagagcacgagatacgtaatatctcttgcgctgcacaggatcccgaagatttgtgtacttttgcatatataacgaaagatcttcagactagccatcactactgccatgtcttcagtaccgtggatgtgaacctgacctacgaaattatccttaccctgggacaggcttttgaagtcgcctatcagttggccttgcaggcccagaagagccgcgccacaggggcgtctgccgccgagatgattgaaactaaatcatctaagccagtcccaaagcctcgagttggggtgcgcaagagtgccgtccccctacccccagattcaaggtgctgctactgccatacttgtaccacgcacaggcccagctatctgcctctcccatccgtgtcaccaggagtcaagcttgagcctcccgatatggaccaggacgcccagtcacacgcaagcgtaagctgggtggtggatcccaaaccagattccaaaagaagcctttccaccaatcacacacgcctggaacttgtatgctgctctcaaccggaaaatgagctggtgtccacaatctctggagataagcccaagtccttcctcgagccattgctgttcgtgatgcccactaccgcctacaaccacaattgtcctgaatggaggagtcaaaaggacggaggatgcagcacgtctgagtgtcctcatcatttatgtctggagaaaccaggcgtcctgtccctggagatgtag

SEQ ID NO: 185450 - DNA, 963 bp, Artificial Sequence
  derived and/or modified sequence
atggggaaagagcaggaattgctggaagccgctcggacagggcatttgccggccgtcgagaagttgctgagcggcaaaagattgagcagcggattcggcgggggcggtggtggagggtccggcggcggcgggggggggagcgggggcgggggcgggggactagggtcctcttcacaccctttgtcatccctgctaagcatgtggagaggcccaaatgtcaactgtgtggatagtaccggatataccccactccatcacgctgctctcaatggacacaaggacgtggtggaggtcttgctccgtaacgacgcactgacaaatgtagcagatagcaaggggtgttatccactacacctggcagcttggaaaggcgatgctcagatcgtccgactcctgatccaccaggggcctagccatacaagagtgaatgagcagaacaatgataatgagacagcccttcattgtgcggcacagtacggtcacaccgaggtggtcaaggtgctgcttgaagagctgaccgacccaacaatgcgcaataataagtttgaaacaccgttggatctggcggctctgtacggaaggttggaggtggtgaagatgctgctgaatgctcatccaaacctgctaagctgcaatacgaaaaaacatacacccctgcatcttgcggcccggaatggccacaaagctgttgtccaggtgcttttggacgcagggatggatagcaactatcagaccgaaatgggtagcgcattacacgaggctgcacttttcggcaaaacagatgttgtccagattctcttggcggccggcacagatgtcaacatcaaggacaatcacgggctcactgccctagacacagtccgcgagctaccaagtcagaaatcccagcaaattgctgcactgatcgaggacctggatacccttcagttctatttcattagctgccccttccagggactctag

SEQ ID NO: 185451 - DNA, 1419 bp, Artificial Sequence
  derived and/or modified sequence
atggggaaagagcaggagctcttggaagcagcgcgtaccgggcacttgccagccgttgaaaagctcctgtccggaaaaagattgtcctctggctttggtggcggaggcggcggcggttcagggggcggcggcggcggttcagggggtgggggaggaggtctcggctccagctcgcatccattatcaagtcttctcagtatgtggcgcgggcccaacgttaactgcgtggatagtactggatacacccccctccaccatgcagccctgaacggacataaggatgtagtagaggtgcttctccggaacgatgccctgaccaacgtcgcagactcaaaggggtgctaccccttacatctggcggcctggaaaggggacgcccaaatcgtccggctgttgatccatcagggcccttcacatacgagggtaaatgagcagaataacgacaatgagacagctttacattgtgccgcccagtacggacatacagaggtagtcaaggtgttattggaagagctcacagatcctactatgcgcaacaacaaattcgagacgcctttggacctagcagccctgtatggaaggctggaggttgtgaagatgttactcaatgctcaccccaatctgctctcttgtaacaccaaaaagcacactccgctgcatctggcagctagaaacggacacaaggctgtagttcaggtcttgctcgatgcaggcatggatagcaattaccagaccgagatgggcagtgctctgcacgaagccgcactattcggaaagacagacgtggttcaaatcttgcttgctgccggaactgatgttaatatcaaagacaaccacggtctgactgccttggacaccgttcgggagctgcccagccagaagagccagcagattgccgcattgatagaagaccacatgaccggcaaacgctccaccaaggaggtggataaaacacccccgcctcagccacccctaatctcctccatggacagtatctcacagaagtcccagggagacgtcgagaaagctgtaacagagttaatcatagattttgatgctaatgcagaggaagaggggccgtatgaggctctttacaacgccataagttgccattcactcgacagtatggcctcagggcggtcaagtgaccaagactctacaaacaaggaggcagaagcggcaggcgtcaagcctgcaggggtacggcctagagaacgacctccaccccctgcgaaaccccctccagacgaggaggaagaggatcacatcgacaaaaagtactttcccctcacagcctcagaggttttgtccatgcgtccccggatccacggttccgcggcgagggaggaagatgaacacccttatgaactgttgctcacagccgaaacgaagaagaagaaaaaaaaaaagaagaagtag

SEQ ID NO: 185452 - DNA, 3405 bp, Artificial Sequence
  derived and/or modified sequence
atgggcaaggagcaggagctgctggaggccgccaggacaggccacctgcctgctgtggagaagctgctgagcggcaagaggctgagcagcggctttggaggcggcggcggcggcggcagcggcggcggcggcggcggcagcggcggcggcggcggcggcctgggcagcagcagccaccccctgagcagcctgctgtccatgtggaggggccccaacgtgaactgtgtggacagcacaggctacacccccctgcaccacgccgccctgaatggccacaaggatgtggtggaggtgctgctgagaaatgatgccctgaccaacgtggccgacagcaagggctgctaccccctgcacctggccgcctggaagggagatgcccagatcgtgcggctgctgatccaccagggccccagccacaccagggtgaatgagcagaacaatgacaatgaaacagccctgcactgtgccgcccagtatggccacacagaggtggtgaaggtgctgctggaggagctgacagaccccaccatgaggaacaacaagtttgagacccccctggacctggccgccctgtatggccgcctggaggtggtgaagatgctgctgaatgcccaccccaacctgctgagctgcaacaccaagaagcacacccccctgcacctggccgccagaaatggccacaaggctgtggtgcaggtgctgctggatgctggcatggacagcaactaccagacagagatgggcagcgccctgcacgaggccgccctgtttgggaagacagatgtggtgcagatcctgctggccgccggcacagatgtgaacatcaaggacaaccacggcctgacagccctggacacagtgcgggagctgcccagccagaagagccagcagattgctgccctgattgaggaccacatgaccgggaagaggagcaccaaggaggtggacaagaccccaccaccccagcccccactcatcagctccatggacagcatcagccagaagagccagggagatgtggagaaggctgtgacagagctgatcatcgactttgatgccaatgctgaggaggagggcccctatgaggccctgtacaatgccatcagctgccacagcctggacagcatggccagcggccgcagcagtgaccaggacagcaccaacaaggaggccgaggccgccggcgtgaagccagctggggtgcggccccgggagaggcctcctcctccagccaagcccccaccagatgaggaggaggaggaccacatcgacaagaagtacttccccctgacagccagcgaggtgctgtccatgaggccccgcatccacggcagcgctgcccgggaggaggatgagcacccctatgagctgctgctgacagctgagaccaagaaggtggtgctggtggatggcaagaccaaggaccacagaagaagcagcagcagccgcagccaggacagcgctgagggccaggacggccaggtgcctgagcagttcagcggcctgctgcacggcagcagccctgtgtgtgaggtgggccaggaccccttccagctgctgtgcacagctggccagagccacccagatggcagcccccagcagggcgcctgccacaaggcctccatgcagctggaggagactggagtgcacgcccctggggccagccagcccagcgccctggaccagagcaagagggtgggctacctgaccggcctgcccaccaccaacagccgcagccaccctgagaccctgacccacacagccagcccccaccctgggggcgctgaggagggggacagaagtggggcccggagccgggccccacccaccagcaagcccaaggccgagctgaagctgagccgcagcctgagcaagagtgacagcgacctgctgacctgcagccccacagaagatgccaccatgggcagccgctctgagagcctgagcaactgcagcatcggcaagaagaggctggagaagagccccagctttgccagcgagtgggatgaaattgagaagatcatgagcagcatcggggagggcatcgacttcagccaggagcggcagaagatcagcggcctgcggaccctggagcagagcgtgggggagtggctggagagcatcggcctgcagcagtatgagagcaagctgctgctgaatggatttgatgatgtgcacttcctgggcagcaatgtgatggaggagcaggacctgcgggacatcggcatcagtgacccccagcacaggaggaagctgctgcaggccgcccggagcctgcccaaggtgaaggccctgggctatgatggcaacagcccccccagcgtgcccagctggctggacagcctgggcctgcaggactatgtgcacagcttcctgagcagcggctacagcagcattgacacagtgaagaacctgtgggagctggagctggtgaatgtgctgaaggtgcagctgctgggccacaggaagaggatcatcgccagcctggccgaccggccctatgaggagcccccccagaagcccccacgcttcagccagctgcgctgccaggacctgctgagccagaccagcagccccctgagccagaatgacagctgcaccggccgctctgctgacctgctgctgcccccaggggacaccggcagaagaagacatgacagcctgcatgaccctgctgcccccagcagagctgagcgcttccgcatccaggaggagcaccgggaggccaagctgaccctgcggccccccagcctggccgccccctatgcccctgtgcagagctggcagcaccagcctgagaagctgatctttgagagctgtggctatgaggccaactacctgggctccatgctgatcaaggacctgcggggcacagagagcacccaggatgcctgtgccaagatgaggaagagcacagagcacatgaagaagatccccaccatcatcctgagcatcacctacaagggcgtgaagttcattgatgccagcaacaagaatgtgattgctgagcacgagatccggaacatcagctgtgccgcccaggaccctgaggacctgtgcacctttgcctacatcaccaaggacctgcagaccagccaccactactgccacgtgttcagcacagtggatgtgaacctgacctatgagatcatcctgaccctgggccaggcctttgaggtggcctaccagctggccctgcaggcccagaagagccgggccaccggggccagcgctgctgagatgattgagaccaagagcagcaagcctgtgcccaagccccgggtgggcgtgaggaagagcgccctggagcccccagacatggaccaggatgcccagagccacgcctctgtgtcctgggtggtggaccccaagccagacagcaagaggagcctgagcaccaactag

SEQ ID NO: 185453 - DNA, 1713 bp, Artificial Sequence
  derived and/or modified sequence
atgagcagcatcggggagggcatcgacttcagccaggagcggcagaagatcagcggcctgcggaccctggagcagagcgtgggggagtggctggagagcatcggcctgcagcagtatgagagcaagctgctgctgaatggatttgatgatgtgcacttcctgggcagcaatgtgatggaggagcaggacctgcgggacatcggcatcagtgacccccagcacaggaggaagctgctgcaggccgcccggagcctgcccaaggtgaaggccctgggctatgatggcaacagcccccccagcgtgcccagctggctggacagcctgggcctgcaggactatgtgcacagcttcctgagcagcggctacagcagcattgacacagtgaagaacctgtgggagctggagctggtgaatgtgctgaaggtgcagctgctgggccacaggaagaggatcatcgccagcctggccgaccggccctatgaggagcccccccagaagcccccacgcttcagccagctgcgctgccaggacctgctgagccagaccagcagccccctgagccagaatgacagctgcaccggccgctctgctgacctgctgctgcccccaggggacaccggcagaagaagacatgacagcctgcatgaccctgctgcccccagcagagctgagcgcttccgcatccaggaggagcaccgggaggccaagctgaccctgcggccccccagcctggccgccccctatgcccctgtgcagagctggcagcaccagcctgagaagctgatctttgagagctgtggctatgaggccaactacctgggctccatgctgatcaaggacctgcggggcacagagagcacccaggatgcctgtgccaagatgaggaagagcacagagcacatgaagaagatccccaccatcatcctgagcatcacctacaagggcgtgaagttcattgatgccagcaacaagaatgtgattgctgagcacgagatccggaacatcagctgtgccgcccaggaccctgaggacctgtgcacctttgcctacatcaccaaggacctgcagaccagccaccactactgccacgtgttcagcacagtggatgtgaacctgacctatgagatcatcctgaccctgggccaggcctttgaggtggcctaccagctggccctgcaggcccagaagagccgggccaccggggccagcgctgctgagatgattgagaccaagagcagcaagcctgtgcccaagccccgggtgggcgtgaggaagtctgctgtgcccctgcccccagacagccgctgctgctactgccacacctgcaccacccaccggcccagctacctgcccctgcccagcgtgtccccaggagtgaagctggagcccccagacatggaccaggatgcccagagccacgcctctgtgtcctgggtggtggaccccaagccagacagcaagaggagcctgagcaccaaccacacccggctggagctggtgtgctgcagccagccagaaaatgagctggtgtccaccatcagcggggacaagcccaagagcttcctggagcccctgctgtttgtgatgcccaccacagcctacaaccacaactgcccagagtggaggagccagaaggatggcggctgcagcaccagtgaatgtccccaccacctgtgcctggagaagccaggagtgctgagcctggagatgtag

SEQ ID NO: 185454 - DNA, 963 bp, Artificial Sequence
  derived and/or modified sequence
atgggcaaggagcaggagctgctggaggccgccaggacaggccacctgcctgctgtggagaagctgctgagcggcaagaggctgagcagcggctttggaggcggcggcggcggcggcagcggcggcggcggcggcggcagcggcggcggcggcggcggcctgggcagcagcagccaccccctgagcagcctgctgtccatgtggaggggccccaacgtgaactgtgtggacagcacaggctacacccccctgcaccacgccgccctgaatggccacaaggatgtggtggaggtgctgctgagaaatgatgccctgaccaacgtggccgacagcaagggctgctaccccctgcacctggccgcctggaagggagatgcccagatcgtgcggctgctgatccaccagggccccagccacaccagggtgaatgagcagaacaatgacaatgaaacagccctgcactgtgccgcccagtatggccacacagaggtggtgaaggtgctgctggaggagctgacagaccccaccatgaggaacaacaagtttgagacccccctggacctggccgccctgtatggccgcctggaggtggtgaagatgctgctgaatgcccaccccaacctgctgagctgcaacaccaagaagcacacccccctgcacctggccgccagaaatggccacaaggctgtggtgcaggtgctgctggatgctggcatggacagcaactaccagacagagatgggcagcgccctgcacgaggccgccctgtttgggaagacagatgtggtgcagatcctgctggccgccggcacagatgtgaacatcaaggacaaccacggcctgacagccctggacacagtgcgggagctgcccagccagaagagccagcagattgctgccctgattgaggacctggacaccctgcagttctacttcatcagctgccccttccagggcctgtag

SEQ ID NO: 185455 - DNA, 1419 bp, Artificial Sequence
  derived and/or modified sequence
atgggcaaggagcaggagctgctggaggccgccaggacaggccacctgcctgctgtggagaagctgctgagcggcaagaggctgagcagcggctttggaggcggcggcggcggcggcagcggcggcggcggcggcggcagcggcggcggcggcggcggcctgggcagcagcagccaccccctgagcagcctgctgtccatgtggaggggccccaacgtgaactgtgtggacagcacaggctacacccccctgcaccacgccgccctgaatggccacaaggatgtggtggaggtgctgctgagaaatgatgccctgaccaacgtggccgacagcaagggctgctaccccctgcacctggccgcctggaagggagatgcccagatcgtgcggctgctgatccaccagggccccagccacaccagggtgaatgagcagaacaatgacaatgaaacagccctgcactgtgccgcccagtatggccacacagaggtggtgaaggtgctgctggaggagctgacagaccccaccatgaggaacaacaagtttgagacccccctggacctggccgccctgtatggccgcctggaggtggtgaagatgctgctgaatgcccaccccaacctgctgagctgcaacaccaagaagcacacccccctgcacctggccgccagaaatggccacaaggctgtggtgcaggtgctgctggatgctggcatggacagcaactaccagacagagatgggcagcgccctgcacgaggccgccctgtttgggaagacagatgtggtgcagatcctgctggccgccggcacagatgtgaacatcaaggacaaccacggcctgacagccctggacacagtgcgggagctgcccagccagaagagccagcagattgctgccctgattgaggaccacatgaccgggaagaggagcaccaaggaggtggacaagaccccaccaccccagcccccactcatcagctccatggacagcatcagccagaagagccagggagatgtggagaaggctgtgacagagctgatcatcgactttgatgccaatgctgaggaggagggcccctatgaggccctgtacaatgccatcagctgccacagcctggacagcatggccagcggccgcagcagtgaccaggacagcaccaacaaggaggccgaggccgccggcgtgaagccagctggggtgcggccccgggagaggcctcctcctccagccaagcccccaccagatgaggaggaggaggaccacatcgacaagaagtacttccccctgacagccagcgaggtgctgtccatgaggccccgcatccacggcagcgctgcccgggaggaggatgagcacccctatgagctgctgctgacagctgagaccaagaagaagaagaagaagaagaagaagtag

SEQ ID NO: 185456 - DNA, 3405 bp, Artificial Sequence
  derived and/or modified sequence
atgggcaaggagcaggagctgctggaggccgcccggaccggccacttgcctgccgtcgagaagctcttgagcggaaagcgtctgagcagtggtttcggtggtggcgggggcggtggtagtggtggtggaggtgggggctcaggggggggcggaggcggtctgggatcatcatcccaccccctgagcagcctactatctatgtggcgcggccctaatgtcaattgtgtagatagcacaggatacacccccctacaccatgctgccctcaacgggcataaggatgtagtcgaggtactcctcagaaatgatgccctgaccaatgtggctgatagtaaaggctgctatccactccacctggccgcatggaaaggagatgcacagatcgtgcggttgcttatccaccaaggcccttcacacacacgagtaaatgaacaaaacaatgacaatgagaccgcgctgcactgcgcggcacagtacggtcatacagaagtagtgaaagtgctgctcgaggagctgaccgaccctactatgaggaataataagttcgaaacacccttggatttggccgcactgtatgggcgactggaggtcgtgaagatgctgttaaacgctcatccgaacctgctgtcttgtaatactaaaaagcacacgcctctgcaccttgccgctcggaatggccacaaggcggtggtacaggtcttgttggacgctggcatggactcaaactatcagactgagatgggcagcgccttgcacgaagcagctctctttgggaaaaccgacgtggtccaaattctattagccgccggtacagatgtcaatatcaaagacaatcatggtctcaccgctctcgacaccgtgagggaactaccttcccaaaagtctcagcagatcgcagcactaattgaggaccacatgacaggcaaaaggtctacaaaggaggtggacaaaactcctccaccgcaaccaccactcatttcaagcatggactctattagtcaaaaatctcaaggggatgtggagaaggctgtgaccgagcttattatcgacttcgatgcgaacgccgaagaggaaggcccatacgaggcactgtacaacgctatcagctgccatagtctggattcgatggctagtggacgctccagcgaccaggattcgacaaataaagaggctgaagccgccggtgtcaagcccgctggagtccgacctcgtgaaaggcccccgcccccagctaaaccaccacccgatgaggaggaggaggatcacatcgataaaaaatacttccccttaacagccagtgaagtgctgtctatgcgccctaggattcacggctctgcggccagagaggaggatgaacacccgtacgagctgctgctcaccgccgaaactaaaaaggtagttctggtggacgggaagacaaaagaccataggcggtccagctcttctcgcagccaggatagtgcagaagggcaggacggacaagtgcccgagcagttttccggtctgctccatgggtcttctcccgtgtgtgaggtcgggcaggatcctttccagcttctgtgcaccgccggccagtctcatcccgacgggtctccgcaacagggtgcgtgccacaaggccagcatgcagttggaagagacaggggtgcatgcccctggtgcttcacagccctccgccctagaccagtcaaaacgggtcggatacctgacgggactcccgactactaattccagatctcatcccgaaaccttgactcatacggcatcacctcaccctggtggtgctgaagagggcgatcgctctggtgccaggagccgcgccccacctactagtaaacccaaggccgaactgaaactctctagatcgctcagcaaatctgacagcgatctactgacatgttctcctaccgaggatgcaactatgggctctcgatctgaaagcctgtctaattgttctattgggaaaaaacgacttgagaaatctcccagcttcgcttccgagtgggatgagatcgaaaagatcatgtcttccattggcgaggggatagacttctcccaggaacgtcaaaaaatttctggcctgcggacgctggagcaaagtgtgggagaatggcttgaatcaattgggctccagcagtatgaaagcaagttgctgctcaacgggttcgacgacgtgcacttcctcggctccaacgtgatggaggagcaggacctgagagatatcggcatcagcgatcctcaacacagaagaaagctcctgcaagctgctcggagtctccctaaggtcaaagccttgggctacgatggcaacagcccgccctctgtaccatcatggctcgattctcttggactgcaagattacgtgcatagtttcctcagctcggggtattcctccatagacactgtaaagaatctgtgggaactggaactcgtgaacgtgctcaaggtccagctccttgggcatcgcaaaaggattatcgcatcattggctgaccgcccatacgaggaaccaccgcagaagcccccccggttcagtcaactccggtgtcaggaccttcttagccaaacatccagtcctcttagtcagaatgattcctgcaccggcaggtcagcagacttactgctgccccccggcgacaccggtcggcgcaggcacgacagcttacatgacccagccgccccctctagagctgaacgcttccgaatccaagaagagcaccgagaagccaagctcaccctgcgaccaccatcactcgccgccccatatgctcctgtgcagagttggcagcaccagcctgaaaagttgatctttgagtcttgcggatatgaggccaactacttgggtagtatgctgatcaaagatctgaggggaaccgaatcgactcaggacgcctgcgcaaagatgaggaagagcactgagcatatgaaaaagataccgacaataatcctaagcataacttacaagggagtcaaatttattgacgcgtcaaacaaaaatgtgatagctgagcacgaaataaggaatatctcctgcgccgctcaggaccccgaagatttgtgcacattcgcttatataaccaaagatttacagacctctcatcattactgtcacgtttttagtacagtggatgtcaaccttacctatgagattattctcactttaggacaagcgttcgaagtggcctatcagctcgcacttcaagcccagaagtcccgcgccaccggggctagcgctgcagagatgattgagactaagtcttccaagcctgtacctaagccaagagtcggggtgcgcaagagcgctttagagcctccagatatggaccaagacgcccagagccacgcaagcgtgagctgggttgtagatcctaaaccagactcaaaaaggtccttgtccacgaattag

SEQ ID NO: 185457 - DNA, 1713 bp, Artificial Sequence
  derived and/or modified sequence
atgagcagcatcggcgagggcatcgacttcagccaggagcggcagaagatttccggcctccgaaccttagagcagtccgtgggcgagtggctcgagtctattggcttacagcagtatgaaagtaagctgctgttgaacggctttgatgatgtacacttcctcgggtccaatgtgatggaggagcaggatctccgagacatcggtatctccgatccgcagcacaggcgcaagctgttgcaggcagcgcgctccctcccgaaggtcaaagcccttggttacgatggcaattcacctccttccgtgccctcttggttagatagcctaggtttgcaagattacgtgcattcattcctgagcagcggatattccagcatagacactgtgaaaaatctgtgggaattggaattggtcaatgtactgaaagtacagctcctggggcatagaaagcgcatcattgcgagtcttgctgatagaccttacgaggaaccccctcagaagcctcctaggttctcccagctgaggtgccaggacctcctgtcccagacctcatcccccctgagtcagaacgactcatgtacagggaggagcgctgacctgcttctaccacccggcgatacagggcgaaggcggcatgattcactgcacgatcccgcggccccaagcagggctgagcgcttccgaatacaggaggaacacagggaagcaaagctgactctgcgaccaccgtctctggctgcgccctacgcacctgtccaatcgtggcagcaccagccagagaagctgatctttgagtcatgtgggtacgaagccaattacctcgggagcatgttgatcaaagacctgaggggaaccgagagcacccaagatgcgtgtgctaaaatgcggaagtctactgaacacatgaagaaaatcccgactattatcctctctattacttacaagggcgtgaagttcattgatgcctcaaacaagaacgtgattgccgagcacgagatcaggaatatttcctgcgctgcgcaggaccccgaagacctgtgcactttcgcctacatcaccaaggatctacaaacaagccaccattattgtcacgtcttctccactgttgatgtaaacctcacctacgagataatcctgactctcggtcaagcctttgaggttgcatatcagctggctctgcaggctcaaaaaagcagggccaccggcgcttctgcggccgagatgatcgagactaagtctagcaagcctgtccctaagcctagggtgggagttcggaagtcagctgtccccctgccccccgactcccgatgttgctattgccatacttgtacgacgcacagaccctcgtatctccctcttcccagcgtgagccccggggttaagctcgagcctccggatatggatcaagacgctcagtcgcacgcaagtgtgtcctgggtggtcgaccccaagcccgattccaaacggagcctgtccacaaaccacacaaggctggagctcgtctgctgcagccaacccgagaacgagctggtgagtacaatcagtggcgataaaccaaaatccttcctcgagcctctgctgttcgtaatgccaaccaccgcctacaatcataattgtccggagtggcgcagtcaaaaggatggcggctgttcaaccagtgagtgtcctcaccatctttgcctcgaaaagcctggggtgctgtcattggaaatgtag

SEQ ID NO: 185458 - DNA, 963 bp, Artificial Sequence
  derived and/or modified sequence
atgggcaaggagcaggagctgctggaggccgcccggaccggccacctccccgccgtcgaaaaactgttatcagggaagcgcctttcttccggcttcgggggtggtggtggtggcggctcgggagggggcggtggcggtagtgggggggggggcgggggcctggggtcaagctctcatcccctgtccagtctcctatccatgtggcgaggcccgaatgttaactgcgtagactccacagggtatacaccacttcatcacgcagcccttaacggccataaggacgttgtggaggtcttgctgcgaaacgacgctttgacaaatgtggccgattccaagggctgctatcccttacatttggccgcatggaagggcgatgcccagatcgtcagactgctgatccatcaaggcccctcccacacacgcgtcaacgagcagaataacgacaacgagacagctctgcactgtgccgcccagtatggtcacactgaggtcgtgaaagtcctgctggaagagctcaccgatcccacgatgcgcaacaacaagttcgaaacaccgctggacctcgctgctttgtatgggcgactggaggtcgtgaagatgctgctgaatgctcatccgaatctgctctcctgtaacaccaagaagcacactcctctgcacctggccgcgagaaatgggcacaaagccgttgtgcaggtgctgttagatgctggcatggattccaattaccagaccgagatgggcagtgccttgcatgaggctgccctgttcggcaaaacggacgtggttcaaatcctccttgccgccggtactgacgttaacatcaaagacaaccacggcctgactgccctcgacaccgttcgcgagctgccatcgcagaaatcccaacagatcgctgctctgattgaggacctggatacactccagttctattttatttcttgccctttccagggtctgtag

SEQ ID NO: 185459 - DNA, 1419 bp, Artificial Sequence
  derived and/or modified sequence
atgggcaaggagcaggagctgctggaggccgcccggaccggccacttgcccgcagttgaaaaactgctatctggaaaacgccttagctccggtttcggcgggggtggcggaggtggaagtggcggtggcggaggaggctctggaggtggcggaggcggtctcgggagttcatcacacccattgagcagcttgctgagcatgtggagaggccccaacgtaaactgcgtggattccacaggatatactccactccatcatgccgctctgaacggtcataaggacgttgtcgaagttctccttcgcaatgatgcactcactaatgtggccgactcgaaggggtgttatcccctgcatctcgcagcatggaagggggacgcccagatcgtaagactcttaatccatcagggcccttctcacaccagagttaatgagcagaataatgacaatgaaaccgctctgcactgcgctgcccagtatggacacacagaggttgtcaaggtcctgctcgaggagctcaccgacccaactatgcgcaacaataaattcgagacacctttagatctggcagccctctatggacgtctggaggtcgttaagatgcttctgaacgcgcacccaaacctgctctcctgcaatacaaagaagcacaccccccttcacctggccgctaggaacgggcataaagctgtggtgcaagtgttgctggatgctgggatggactcaaattaccagaccgagatgggtagtgctctgcacgaagctgcactgtttgggaagaccgatgtggttcagatcttgctggcagctggcaccgacgtgaacatcaaggacaaccacggcttaactgctcttgacaccgtaagagagttgccatctcagaaaagtcagcagatcgcggcccttattgaggaccatatgacggggaagagatccaccaaagaagtggataagactccaccccctcaaccgccactgatctcaagcatggactctatcagccagaagtctcagggcgatgtggaaaaggcggtgaccgagctgattatcgacttcgacgccaacgccgaagaagagggaccttatgaggcactgtacaacgctatttcctgccattctttagactcgatggccagtgggagatccagcgaccaggactcaaccaataaggaggcagaagcagccggagtgaaaccagccggagtgaggcctcgggagcgcccccccccaccagctaaacctcccccggatgaggaggaggaggaccatattgataaaaagtacttccccctaacagccagtgaagtgctctccatgcggcccaggattcacggctctgcagcccgggaagaggacgagcacccatacgaactgctcctaacagcagaaaccaaaaagaaaaagaagaagaagaaaaaatag

SEQ ID NO: 185460 - DNA, 3405 bp, Artificial Sequence
  derived and/or modified sequence
atggggaaagaacaggaattgctagaggctgctcggaccggacatctgccagcagtggagaagctccttagcggaaaaagactatcaagcggtttcggagggggaggcggtggtggctccggaggcggtggcggaggctccggaggtggtgggggaggcctagggtccagtagtcaccctctctcctcactgctctcaatgtggcgtggcccaaacgtcaattgcgtggacagcaccggatatacacccttgcaccatgcagcccttaacggtcacaaagacgtggtggaagtacttctgcgcaatgacgctctcaccaacgttgcagattctaagggctgctatcctctgcaccttgcggcttggaagggggacgcgcagatcgttcggcttctgatccatcagggcccatcccatacacgagtgaatgagcagaataatgataatgagacggcgcttcattgtgccgctcagtatggccacaccgaggtggtgaaggtgctcttagaagagttgacagatcccacaatgcggaacaacaaatttgagactccgctggacttggcagctctctacggcagactagaagtagtgaaaatgctgctcaatgcccatcccaaccttctgtcatgtaacaccaagaagcacacccctttacaccttgccgcaaggaatggccataaggctgtggtgcaggtgctcctggatgcgggaatggattcaaattatcagaccgaaatgggaagcgcattgcacgaagccgcactgtttggaaaaacagatgttgtgcagattctgcttgccgctgggaccgatgttaatatcaaagataatcacggtttgacagcgttagatacggttcgggaattgccttcccaaaagtcacaacagattgctgcactgattgaagaccatatgacagggaagcggtcaacaaaagaagtggataagacccctcccccacaaccacctttaatctcaagtatggattctattagtcagaagtctcagggagacgtggagaaagctgtgactgagctgatcattgattttgatgccaacgcagaggaagagggaccatatgaggcactttataacgccatcagctgtcattcgctagactctatggcatccggcagatcatccgaccaagactcaactaacaaagaggccgaggccgctggagtgaagcccgcaggggtgagacccagggagagaccaccccctccggcaaagcctcccccagacgaagaggaggaagaccacatcgataagaaatacttccccctgactgcttctgaggtgctctcaatgcggccacgcatccacggatctgcagccagagaagaggatgaacatccatatgaactgctactgactgccgagaccaagaaggtggtgctggtggacggcaagaccaaagaccatcgaagatcctcctcctccaggtcccaagactctgcggagggtcaggacggacaggtgcccgaacagttctctggcctgctccacggctcctccccggtgtgtgaggttggacaggaccccttccaacttctctgcaccgcaggacaaagtcaccctgatggaagccctcagcagggagcatgtcacaaagcatcaatgcagctggaagaaactggcgtacatgcaccaggagccagtcagccatccgctttggaccagagcaaacgcgtgggttatttaaccgggctgccaactaccaatagtagatcccaccctgaaaccttgacccacactgctagtcctcacccgggaggtgccgaggagggtgatagaagcggcgcaaggtccagggcccctcccaccagtaagccgaaggctgagctgaaactttcgcgcagcctgagtaaatccgattcagacctacttacatgctcacccacagaagatgccaccatgggcagccgatccgagagtctcagcaattgctcaattggaaagaagcggctggagaaatccccaagttttgcttctgagtgggatgaaatagagaaaattatgtcctctatcggagaggggattgactttagtcaagagcgccagaaaataagtgggttgaggaccctcgagcagagcgtcggagaatggctagagtctatcggccttcagcaatacgagagcaagctcttgttaaacggttttgacgatgtacatttcctgggtagtaacgtgatggaggaacaggacctcagggatatcggaatcagtgacccacagcatcgtagaaagttgctgcaggccgctagaagtctgccaaaggtgaaggctctgggctacgatggcaatagtcccccttctgttccctcatggctcgacagcctggggctccaggattatgttcatagcttcctatcttcgggctacagttcgattgacaccgtgaaaaacctatgggaattggaactggtcaacgtattgaaggtgcagctgcttggacaccgcaagagaataatagcaagtcttgccgacaggccatacgaggagccccctcagaagccgccacggttctcccaactgcgctgtcaagatcttctgtctcaaacaagcagcccgctctctcaaaacgacagttgtacaggcagatcggccgatctgctcttaccccctggcgacacaggcagacgtcgacatgattccctacatgacccagccgctcccagtagagctgagcgatttagaattcaagaggagcatagggaggcaaagctcaccctacgcccaccctcattggctgccccttatgctcctgtccaaagctggcagcatcagccagaaaagctcattttcgaatcctgcggctatgaggccaattatctgggatcaatgttgatcaaggacctacggggaactgaaagtacgcaggatgcatgcgctaaaatgcgcaagagcacagagcatatgaaaaaaatacccaccatcatcttgagcatcacttacaagggagtcaagtttatcgacgcttctaacaagaacgtgattgcagaacacgagatccggaacatatcttgcgccgctcaggacccggaagatttgtgcacttttgcctatatcactaaggacctccagacatcccaccactactgccacgtcttcagcacagtggacgtaaatttaacatacgagattatcttgacactgggtcaggcctttgaagttgcctatcagctagcccttcaggcccaaaaaagcagggctacgggcgcaagcgctgcagaaatgattgagaccaaatcaagtaaaccagtgcccaaacctcgtgtgggcgtgcgtaaatctgccctggagccccctgatatggaccaggacgcgcagtctcacgcttctgttagctgggtggtcgatcccaagcctgatagcaaaagatccctcagcacaaactag

SEQ ID NO: 185461 - DNA, 1713 bp, Artificial Sequence
  derived and/or modified sequence
atgtcctccatcggcgagggcatcgatttctctcaggaaagacagaaaatatctggcctccgcactttggagcagtcagtgggcgaatggctggagtcaatcgggctgcagcagtatgaatccaaacttctgcttaacgggttcgatgacgtgcatttcctggggagcaatgttatggaggagcaggatctcagagatataggcatctcagacccccaacaccggaggaagctcctacaggccgcaagaagcctccctaaggtcaaggccttaggctatgacggtaattccccaccgtcagtccctagttggctagactcccttggccttcaagactacgtgcattcctttttgtcatccggatattcttccattgatacggtcaagaatctctgggagttggaactggttaatgtgctgaaggtgcaactcctggggcaccgcaaaagaatcatcgcctctctggcagacagaccctatgaggagccacctcagaaaccccctaggttctcacagttacgctgccaggacctgctgagccagacatcatctcccctcagtcagaacgatagctgcactgggagatctgctgaccttttattgccgcctggtgataccggacggaggcgccacgactccctgcacgacccggcagcgccatctcgtgcggagcgctttcgaatccaggaagagcatcgcgaggcaaaactcacgttgcggcctccatctctggccgctccctatgctcctgtacaatcttggcagcaccaacccgaaaagctgatttttgaatcttgtgggtacgaggctaattacctgggaagcatgttgatcaaggatctgcgcggaacagagtcaactcaagacgcatgtgctaaaatgaggaaatcaaccgagcatatgaagaagatcccaactatcatcctcagtatcacctacaaaggcgttaaatttattgacgcctctaacaaaaacgtgatcgctgaacatgaaattcggaatatcagctgcgcggctcaggacccagaagacctgtgcacttttgcatacataaccaaagatctgcagacctcacatcactattgccatgtgtttagcaccgtggacgtgaacctcacttacgaaatcatcctaaccctggggcaggccttcgaggtggcttaccagctcgcgcttcaggcacaaaaatcccgcgctaccggggcttcagctgccgaaatgattgagactaaatcatccaagcccgttccaaaaccgagggtgggcgtacggaagtctgccgtacccctgcctcctgactccaggtgctgttactgccatacctgcaccacccaccgcccatcctatctccccctcccttctgtctcacctggtgtcaagctagaaccaccagatatggatcaggacgctcaaagtcacgcctcggtttcatgggtggtagatcccaagcctgacagcaagagaagcttgtctacgaaccataccagattggagttggtgtgttgctcccaaccagagaatgagttggtgtccaccatcagcggtgacaaacctaaaagttttcttgaacccctcctgtttgtgatgcctaccacagcctataaccacaattgcccagaatggagatctcagaaagatggcggatgcagcacttccgagtgccctcaccatctgtgcttagaaaagcctggcgtgttatccctggagatgtag

SEQ ID NO: 185462 - DNA, 963 bp, Artificial Sequence
  derived and/or modified sequence
atgggcaaggaacaggagctgttggaagcagccagaactggtcacctcccagcagttgagaagctcttatcgggcaagcgactttcgtctggctttggcggtggcggaggcggaggatctggtggcggtggcggaggttcaggaggaggtggtggagggctgggctctagttcccaccccctcagttccttgctgagtatgtggaggggaccgaatgtgaactgtgttgacagtactggctataccccactgcaccacgctgcactgaatggccacaaagacgtagttgaggtgctgctccggaacgacgccctaaccaatgtggctgactcaaaaggctgttaccccctccaccttgccgcatggaagggagacgcccagatcgtgcggctcttgatccaccagggtccctcccatacaagagtcaacgaacaaaacaatgacaacgagaccgccttgcactgcgctgcccaatacggacacacagaggtggtgaaagtgcttcttgaagagctgacggacccaacgatgcgcaataacaagttcgagacccctctggatctggctgctctgtatggcaggctggaggtggtcaaaatgcttctgaacgctcatccaaaccttctgtcttgcaacactaagaagcacacaccactgcacctggcagcacgtaacggacataaggcggtagtccaggtcctcctggacgctggcatggatagcaactatcaaacagagatgggaagcgctcttcatgaagcggcactctttggcaaaaccgacgtggtgcagatactgctggccgcagggactgatgtgaacatcaaggacaatcacggactcacagcactcgatactgtgcgcgagctgcccagtcaaaaaagccagcagatagccgctctgattgaggatcttgacacactgcagttctacttcattagctgcccctttcagggcctgtag

SEQ ID NO: 185463 - DNA, 1419 bp, Artificial Sequence
  derived and/or modified sequence
atgggtaaggaacaggaactgctagaggccgctagaactggccacctgcctgccgtggaaaaacttttaagcggaaagcggttaagtagtggcttcggcggaggaggaggcggtggtagtggcggtggaggcggaggcagcggtgggggaggcggaggcctgggatcttcctctcacccgctgtcaagtctacttagtatgtggcgcggaccgaatgttaattgcgttgatagcacgggatacacacctctgcaccacgctgccctgaacgggcacaaagatgtggtcgaggtgctgttgcggaacgacgctctgactaacgtggctgatagtaaagggtgttatccattacacttagctgcgtggaagggagatgcccaaatcgtccgtctactcattcaccagggcccttcccacacccgtgtcaacgaacaaaacaatgataacgagaccgctcttcactgcgcggctcaatacggccacaccgaagttgtgaaggttttgctggaagagttaaccgaccccactatgcggaataataagttcgagactccactggatttggcagcgctgtacggtagactggaggtcgtgaaaatgcttctgaacgcccatccaaatctcctgtcctgtaacaccaaaaaacacactcccctccacctggccgctcgtaacggacacaaagctgtggtgcaggtccttctggatgccggaatggacagcaactaccagaccgagatgggttccgccctccatgaggctgccttgttcgggaagactgatgtagtacaaatcttgctggcagccggtactgatgttaacatcaaagacaaccacgggctcacggcccttgataccgtccgagagctgcctagccagaaaagccagcagatcgccgctctgatcgaggaccatatgaccggcaagcggtctactaaggaagtcgacaagacacccccaccacaaccacccctcatatcctccatggattctatttcccagaaaagtcagggcgatgtcgagaaggcggtaacggagctgatcatcgattttgacgctaatgctgaggaagaggggccttatgaggcactttataacgccatcagctgccacagcttggacagcatggctagcgggagatcctctgatcaggactcaaccaacaaggaggccgaagctgccggagtcaaaccggcaggggtgcgtcctcgtgagagaccgccacccccagcaaaacctccacctgatgaggaggaggaagatcacatcgataaaaaatactttcccctgactgcatctgaggtcctcagcatgagaccaaggattcacgggtccgccgcacgcgaggaagacgaacacccctatgagctgctgctgacggcggagacgaaaaagaaaaagaagaagaaaaagaaatag

SEQ ID NO: 185464 - DNA, 1563 bp, Artificial Sequence
  derived and/or modified sequence
cggtttggggggtgcgttgcccggagacggaaagtttgggagcccgagcaggctcggctgcagcctcggggagggggtccagcgggtggcggccctggggatggggaaggagcaggagctgctggaggcggcccgcaccgggcacctcccggcggtggagaagctgctgtccgggaagcggctctcctcaggctttgggggcggcggcggcggtggctctgggggcggcggcggcggcagcggcggcggcggcggcggcctcggctcttccagccaccccctctccagtctgctcagcatgtggagagggccaaatgtgaactgtgttgacagcactggctacacacccctgcaccatgctgctttgaatggccataaggatgtggtcgaggttcttctgaggaacgatgcgctgaccaacgtggctgactcaaaaggctgctaccctctgcatttggcagcctggaaaggagatgcccagatagtgcggttgctcatccatcaagggccttcacacaccagagtcaatgaacagaacaatgacaacgagacagccctgcattgtgcagcgcagtatggccacacagaggtggtgaaggtgctcttagaggagctgacggaccccaccatgcgcaacaacaaattcgagacccctttggacctggcagcactgtacgggcgactggaggtggtgaaaatgctccttaatgcacaccccaacctcctgagctgcaacactaagaagcacacccctctgcacttggcagcaaggaatggccacaaagccgtggtccaggtcctcctcgatgctggcatggacagcaactaccagacggagatgggcagtgctttgcatgaggctgctttgtttggcaagaccgatgtggtgcaaatcctgctggctgcaggaactgacgtcaacataaaagataaccatggactgactgccctagacactgttcgggaactgccttctcaaaagagccagcaaatagcagcattaattgaagatctcgacaccttgcagttttacttcatttcctgcccctttcagggcctgtgaggatgcccatgagctaccgctgtacagttctcggccccggctttcttccaagagttgaccaggaaccctaaagcatccagagtagactgcgctgccactgcgcacatgctggtgcccgtcttcctcctaaggggccaggccacatccaagtgggcctctgtcgggggcggggcggtaggtccgaaagaaaccgcagacactacgatgcactcctcaagctgtcttttgtgcttagatcatccataggtgtttcttctgcttgaagctgctatatcatctttatttattcagggtattttcatattggaagccttggctagtctgctctagctctgggttctgtttagagattggtttatttctgaatattcaagaaaggaaaatgactgggcctttctttcttttcttctcctctgggatgggtagtctccctttcctagaaaggttattataactttaaggacaggcttcaagtgggaaggcccctacttttgcacttc

SEQ ID NO: 185465 - DNA, 1558 bp, Artificial Sequence
  derived and/or modified sequence
gcgctcgtggggaaaaggcagggagggggtggtgtccccagccggtttggggggtgcgttgcccggagacggaaagtttgggagcccgagcaggctcggctgcagcctcggggagggggtccagcgggtggcggccctggggatggggaaggagcaggagctgctggaggcggcccgcaccgggcacctcccggcggtggagaagctgctgtccgggaagcggctctcctcaggctttgggggcggcggcggcggtggctctgggggcggcggcggcggcagcggcggcggcggcggcggcctcggctcttccagccaccccctctccagtctgctcagcatgtggagagggccaaatgtgaactgtgttgacagcactggctacacacccctgcaccatgctgctttgaatggccataaggatgtggtcgaggttcttctgaggaacgatgcgctgaccaacgtggctgactcaaaaggctgctaccctctgcatttggcagcctggaaaggagatgcccagatagtgcggttgctcatccatcaagggccttcacacaccagagtcaatgaacagaacaatgacaacgagacagccctgcattgtgcagcgcagtatggccacacagaggtggtgaaggtgctcttagaggagctgacggaccccaccatgcgcaacaacaaattcgagacccctttggacctggcagcactgtacgggcgactggaggtggtgaaaatgctccttaatgcacaccccaacctcctgagctgcaacactaagaagcacacccctctgcacttggcagcaaggaatggccacaaagccgtggtccaggtcctcctcgatgctggcatggacagcaactaccagacggagatgggcagtgctttgcatgaggctgctttgtttggcaagaccgatgtggtgcaaatcctgctggctgcaggaactgacgtcaacataaaagataaccatggactgactgccctagacactgttcgggaactgccttctcaaaagagccagcaaatagcagcattaattgaagatcacatgactggaaaaagaagtacaaaagaagtagataaaacccccccaccccagccacctctcatctccagtatggactccatatcacagaagtctcagggtgacgtggagaaagcagtgactgaactgattatagattttgatgcaaatgctgaagaagagggtccctacgaagctctgtataatgccatctcctgccattcgttggacagcatggccagcgggcgatcatctgaccaagactccacgaacaaggaggctgaggcagcaggagtgaaacctgctggagtgaggcctagggaacgtccaccacctccagcaaagccaccgcccgatgaagaggaagaagaccacatagataagaagtattttcccttgacagcttctgaggttctgtccatgagacctaggattcatgggagtgcagcccgggaagaagacgaacacccttatgaactgttgttaacagcagagacaaaaaaaaaaaaaaaaaaaaaaaaaaaa

SEQ ID NO: 185466 - protein, 576 aa, Artificial Sequence
  derived and/or modified sequence
MGSILSRRIAGVEDIDIQANSAYRYPPKSGNYFASHFFMGGEKFDTPHPEGYLFGENMDLNFLGSRPVQFPYVTPAPHEPVKTLRSLVNIRKDSLRLVRYKDDADSPTEDGDKPRVLYSLEFTFDADARVAITIYCQASEEFLNGRAVYSPKSPSLQSETVHYKRGVSQQFSLPSFKIDFSEWKDDELNFDLDRGVFPVVIQAVVDEGDVVEVTGHAHVLLAAFEKHMDGSFSVKPLKQKQIVDRVSYLLQEIYGIENKNNQETKPSDDENSDNSNECVVCLSDLRDTLILPCRHLCLCTSCADTLRYQANNCPICRLPFRALLQIRAVRKKPGALSPVSFSPVLAQSLEHDEHSCPFKKSKPHPASLASKKPKRETNSDSVPPGYEPISLLEALNGLRAVSPAIPSAPLYEEITYSGISDGLSQASCPLAAIDHILDSSRQKGRPQSKAPDSTLRSPSSPIHEEDEEKLSEDVDAPPPLGGAELALRESSSPESFITEEVDESSSPQQGTRAASIENVLQDSSPEHCGRGPPADIYLPGRPTSMETAHGLATTSPTWPPLGGPSPDPSAAELTPL

SEQ ID NO: 185467 - protein, 320 aa, Artificial Sequence
  derived and/or modified sequence
MGSILSRRIAGVEDIDIQANSAYRYPPKSGNYFASHFFMGGEKFDTPHPEGYLFGENMDLNFLGSRPVQFPYVTPAPHEPVKTLRSLVNIRKDSLRLVRYKDDADSPTEDGDKPRVLYSLEFTFDADARVAITIYCQASEEFLNGRAVYSPKSPSLQSETVHYKRGVSQQFSLPSFKIDFSEWKDDELNFDLDRGVFPVVIQAVVDEGDVVEVTGHAHVLLAAFEKHMDGSFSVKPLKQKQIVDRVSYLLQEIYGIENKNNQETKPSDDENSDNSNECVVCLSDLRDTLILPCRHLCLCTSCADTLRYQANNCPICRLQL

SEQ ID NO: 185468 - DNA, 1731 bp, Artificial Sequence
  derived and/or modified sequence
atgggctccatcctgtccagacggatcgctggcgtggaagacatcgatatccaggccaattccgcataccgctatcccccaaaatctggaaactatttcgcctctcatttcttcatgggaggcgagaaatttgacactccccaccccgagggttatctgttcggggaaaatatggatttgaactttctagggtcgagaccagtccaatttccctacgtcacaccagcccctcacgaacctgtaaagactttaaggagcttggtgaacattcgcaaggactccttacggctcgttcgttacaaggacgacgcagattcgcctactgaagatggggataaaccgcgagtactgtatagcctggaattcacttttgatgcagatgcaagagtggccattaccatctactgtcaggcttccgaggagttcctaaacggtagagctgtctatagccctaaatccccgtccctccaatctgagacagtccattacaagcgcggagttagccagcagttttcccttccatcttttaaaatcgatttctccgagtggaaggatgacgagctgaacttcgatctcgacagaggcgtatttcccgtggtgattcaagctgtggtagatgaaggcgatgtggtcgaggtgactggtcacgcacatgttctgttagccgcattcgagaaacatatggacggttccttctccgtgaagccgctgaaacaaaaacagatagtggatcgagtgagctacctgctccaggagatctacggcatcgaaaataaaaataatcaggaaactaaaccaagcgatgatgaaaactcagataactctaatgagtgcgtggtctgcctgtccgacttgagagataccctgatcctgccgtgtcgacacctgtgtctctgcactagctgtgcggatacccttcgctatcaagcaaataattgtccaatatgcagacttcccttcagggcgctattacagattcgggctgtgcggaagaagccaggtgcactttcacctgtgagctttagtcccgtgcttgcccagtctctggaacacgatgaacacagctgcccatttaaaaagagcaaaccccaccccgcttcacttgcctccaagaagcccaaacgcgaaacgaactccgactcggtgccacctggctatgaaccaatctcgctgcttgaggcactgaacggattaagagcagtgtcccctgcgattcctagcgcccccctgtacgaggaaattacctattccggaatctcagacggtttgagccaagcaagctgcccactggcagctatcgaccatattctggactcgtcacgccagaaaggacgaccccagtctaaggcccctgattcaaccttgaggagtccttcctcaccgatccacgaagaggatgaggagaaactgagtgaggacgtggacgccccgcctccattaggaggagctgagctagccttgcgggagagcagctcgcccgaaagttttatcacggaagaggtggatgagagctcatcacctcagcaaggtacccgagcagcttcaattgaaaacgtgctgcaagatagcagtcctgaacattgtggtagaggaccacccgctgacatataccttcccggccgccctacatccatggaaacagcacatggtctcgccactacttctcccacatggccgcccctgggtggtccctcccctgatccctccgccgccgaactgacacctttatag

SEQ ID NO: 185469 - DNA, 1731 bp, Artificial Sequence
  derived and/or modified sequence
atgggcagcatcctgagcagaagaattgctggggtggaggacatcgacatccaggccaacagcgcctaccgctacccacccaagagcggcaactactttgccagccacttcttcatgggcggggagaagtttgacaccccccaccctgagggctacctgtttggagagaacatggacctgaacttcctgggcagcaggcctgtgcagttcccctacgtgaccccagcccctcatgagcctgtgaagaccctgcggagcctggtgaacatcaggaaggacagcctgcggctggtgcgctacaaggatgatgctgacagccccacagaagatggagacaagccccgggtgctgtacagcctggagttcacctttgatgctgatgcccgggtggccatcaccatctactgccaggccagcgaggagttcctgaatggccgggctgtgtacagccccaagagccccagcctgcagagcgagaccgtgcactacaagaggggcgtgtcccagcagttcagcctgcccagcttcaagattgacttcagcgagtggaaggatgatgagctgaactttgacctggacagaggagtcttccctgtggtgatccaggccgtggtggatgaaggagatgtggtggaggtgacaggccacgcccacgtgctgctggccgcctttgagaagcacatggatggcagcttctctgtgaagcccctgaagcagaagcagatcgtggacagagtgtcctacctgctgcaggagatctacggcatcgagaacaagaacaaccaggagaccaagcccagtgatgatgagaacagcgacaacagcaatgaatgtgtggtgtgcctgagtgacctgcgggacaccctcatcctgccctgccgccacctgtgcctgtgcaccagctgtgccgacaccctgcgctaccaggccaacaactgccccatctgccgcctgcccttccgggccctgctgcagatccgggctgtgaggaagaagccaggggccctgagccctgtgtccttcagccctgtgctggcccagagcctggagcatgatgagcacagctgccccttcaagaagagcaagccccacccagccagcctggccagcaagaagcccaagcgggagaccaacagcgacagcgtgcccccaggctatgagcccatcagcctgctggaggccctgaatggcctgcgggctgtgtccccagccatccccagcgcccccctgtatgaggagatcacctacagcggcatcagtgatggcctgagccaggccagctgccccctggccgccatcgaccacatcctggacagcagccggcagaagggccggccccagagcaaggccccagacagcaccctgcggagccccagcagccccatccatgaagaagatgaggagaagctgtctgaagatgtggatgcccccccacccctgggcggcgctgagctggccctgcgggagagcagcagccctgagagcttcatcacagaggaggtggatgagagcagcagcccccagcagggcaccagggctgccagcattgaaaatgtgctgcaggacagcagccctgagcactgcggccggggccccccagctgacatctacctgcccggccggcccacctccatggagacagcccacggcctggccaccaccagccccacctggccacccctgggcggccccagcccagaccccagcgctgctgagctgacccccctgtag

SEQ ID NO: 185470 - DNA, 3933 bp, Artificial Sequence
  derived and/or modified sequence
tgggggctcgaggcgcctccgcggccgtggacgagcgtccgtgcggcctggtccgggccatgtccgcgtgaggaccccgccgctgtcgccgctcccgttccggccctggcccctctgcccggcagcgccgcgcaccatgggctccattctcagccgccgcatcgcgggggtggaggacatcgacatccaggcgaactcggcctatcgctaccctccgaagtccggaaactactttgcttcgcactttttcatgggaggagagaaattcgacaccccccaccctgaaggttacctctttggagagaacatggatctgaacttcctgggcagccgcccggtccagtttccctacgtcactcctgccccccacgagcccgtgaagacgctgcggagcctggtgaacatccgcaaagactccctgcggctggtgaggtacaaagacgatgccgacagccccaccgaggacggcgacaagccccgggtgctctacagcctggagttcaccttcgacgccgatgcccgcgtggccatcaccatctactgccaggcatcggaggagttcctgaacggcagggcagtatacagccccaagagcccctcgctacagtccgagaccgtccactacaagagaggggtgagccagcagttctccctgccctccttcaagattgacttctcggaatggaaggatgacgagctgaactttgacctggaccggggcgtgtttccagtagtcatccaggctgtggtggacgaaggagatgtggtggaagtgactggccacgcccacgtgctcttggctgcctttgaaaagcacatggacggcagcttctctgtgaagcctttaaagcagaagcaaattgtggaccgggtcagctacctcctgcaggagatctatggcattgagaacaagaacaaccaggagaccaagccctcggacgacgagaacagcgacaacagcaacgagtgtgtggtgtgcctgtccgacctgcgggacacgctgatcctgccctgccgccacctgtgcctctgtacctcctgcgccgacacgctgcgctaccaggccaacaactgccccatctgccggctgcctttccgggccctcctgcagatccgggcggtgcggaagaagccaggagccctgtcccccgtgtccttcagccccgtcctggcccagagcctggagcatgatgagcactcttgtccctttaaaaaatcaaagccgcaccccgcctccctggccagcaagaaacctaaaagggaaacaaactctgacagcgtcccacctggctacgagcccatctcgctgctcgaggcgctcaacggcctccgggctgtctccccggccatcccctcggcccctctttatgaagaaatcacctattcaggcatctcggacggcctgtcccaggccagctgtcccctcgcggctatcgaccacatcctggacagcagccgccagaagggcaggccgcagagcaaggcccccgacagcaccctacggtccccgtcttcccccatccacgaagaggatgaggagaagctctccgaggacgtggacgcccctcccccactgggtggcgcagagctggccctgcgggaaagcagctcccctgagagtttcataacagaagaggttgatgagtcgtcgtcaccacagcaagggacccgagcagcttccattgagaatgtcctgcaggacagcagccccgagcactgtggccgaggcccacctgctgacatctacctgccaggacggcccacctccatggagacggcccacggcctcgccaccaccagccccacctggcctccacttggtggccccagccccgatcccagcgccgccgagctgaccccactctgagagcctggccgagctggcagcatggagccctcggctccccagactttgccgaggggctgctccggaccccgttgtgagccggcctcctgtctgcatgccccctgtggccaccaggctccgaggggccgtggtgactcttgatcaaagagcacagtgaactgtcccttctgagtctcccttttctacagttgatatatttgtaactggtacaagatgaaggacagcagctttccatccctagttcagagcccccgttccccagggtcctgtgggctgagcggctggggctggggctgcccacgtgtggcctccgctggctctgcctgctcctgcaacagtgcggtccctgcccggagaactcaggaggcctgcagaagagaactgattggtggtcgaagcaccatcttcacagatgttcaggggcagtggggggctccaggcacggtcaatgaaggaaacagtgcctgtccacccaccctgcgtgtcactgtggcggcctggctgtcgctgctttttgtcctctgccgtgtttgcgcggcctcagtgccctccctggtgcgtctgcgctggggccctcagtgctcggggccttggggtgcatgggtgccgccctgggcagctagagtgtctcagcccggtgctgggcctggccgaggggcggaggcacagctgcttccagcagccagcattcagtggccttgtcaccaagctccacacctcctcctggtgctggctttggtgacatcacaaggcccctccaggtgcaggggcttctgtttggcaggcccctgccagggaggacctggtggcctcctcattctcttttgccattggaatgtccccttgcagttctcttctctttttttttttttttgagatggagtttcactcttgctgcccaggctggagtgcagtggctcaatctcgggtcactgcaacctccgcctcccgggttcaagtgatcgtcctgccttaggctcctgagtagctggggattacaggtgcctaccagcatgctcggctaatttttttgtatttttagtagagaagggatttcaccatgttggccgggctggtctcaaactcctaaggtcatccacctgcctcggcctcccagagtgctgagattacaggcgtgagcctccgcgcccggcccccttgcagttctctctgatttggtttgttctgtctcaggcttctgtggcaggactggcccagggaggaggaagccagcagcacacctggggaatggggtcccggccgggaggcttggcctctgggcgacctcgtcctgttttttttgtttgtttgtttgtttttttaaaggtaaacctcctgggccgcagatggcaaagggagtgcctgggcctggtgacccagggctggatccacccctgcggagccctgggccaggcaggtgtctgctgctcacctggctctggagggctgccctgcagctgggcctggggacaggtcggctgtggggcagctcagtaccctccctgaggctcacggtggctccgagcatgaggtccgcctcctgggcgagacccagcagtggacagcatggtcctcacacccagctccctgcacacccaggccagccacccctcccgctcgtgcacaggcacgcagatgcgctcacacgtacacacacacaaatgcacgcccacttgcacatgctcacgcacatgttcacacatgcacactcacgctcacacatgctgtcacgcatacacacacgcacatactcctgcacatgttcccatgcatgtgtgtgcactcggaccgagcatctcccacgcacctctaccccaccccaagcacctctctccccccatgcacctctccccaacaacacacacagccccctgcaccgcccgccccccgcccccaccaaggccccagcctctggccatcagtcctggtgccagagctttgcgtgaagttcgggccgcagagtggcccgctgggactcccatgtgctgccgtctgatgtgctcagatgggctcatcgttggttcgtttttactgtatatttatagtaataaaatcatgcagcaata

SEQ ID NO: 185471 - DNA, 1731 bp, Artificial Sequence
  derived and/or modified sequence
atgggcagcatcctgagccggcggatcgccggcgtggaggacatcgacatccaggcaaactcagcttatcgctatccccctaaaagtggaaattatttcgcttcacactttttcatgggcggagaaaaatttgatacacctcatcctgaaggctatcttttcggtgaaaacatggacttaaatttcctgggatcacgacctgtgcaatttccgtacgtgacgccagctccccacgaacccgtgaaaacactgcgcagcctcgtcaacatcaggaaagattcactgcgactggtgcgctataaggacgacgctgacagccccactgaagacggagataaacctagggtgctgtattcgttagaatttaccttcgacgcggacgccagggtcgccattaccatttactgtcaggctagtgaagaatttctcaatggacgcgcggtatactctccaaagtcaccatcgctgcagagcgagaccgtgcactataagcgtggggtgagccagcagttcagcctgccatccttcaaaatcgactttagtgagtggaaggacgatgaacttaatttcgatctggataggggggtgttccccgtggttatccaggctgtcgtcgacgagggcgacgtcgtggaagttacagggcatgcccacgtcttgttggcagccttcgagaaacatatggatggaagcttctcagtgaaacctctcaagcagaaacagattgtagacagagtgagttatctcctacaggaaatctacggtatagagaacaagaacaaccaggaaaccaaacccagcgacgatgagaacagcgataattccaacgaatgtgtcgtctgtctatctgacctcagggatacgctgatcctaccatgtcgtcacctctgcctctgcaccagctgcgcagatacactcaggtatcaagctaacaactgtcctatttgccgcctgccatttcgcgcacttcttcagattcgggctgttcggaagaagcctggcgctctttcgcctgtatccttttccccggtgctggcccagtccctggaacacgatgaacactcctgtcccttcaagaagagcaagcctcaccccgcgtccctcgcttccaagaaacccaagcgggagaccaactcagatagcgtacccccaggctacgagcctatttctttgctcgaagccctaaatggacttagagcggtctcaccagcgatccctagcgccccactgtacgaagagatcacatatagtgggatctccgacgggcttagccaggcatcttgccccctggctgccattgatcacattctggattcatcgaggcaaaagggacgcccacagagcaaggctcctgactctacactacggagcccctcctcccccatccacgaggaagacgaggagaagctgagcgaggatgtggacgcccctccccctctcggtggggctgaactggcgctgcgcgagtcctcatcgcccgaatcattcattacagaagaggtggacgagagttcatctccacagcaaggcacccgtgcggccagcatcgaaaacgtcctgcaggattcttcacccgagcactgtgggcgcggcccaccagctgatatctaccttcctggacgacctacatctatggagacagctcatgggttggcgacaacaagtcccacctggcctcctctcggcgggccctctccagatcccagcgccgctgaactgactccgctatag

SEQ ID NO: 185472 - DNA, 1731 bp, Artificial Sequence
  derived and/or modified sequence
atgggctcgatactgagtaggagaattgccggagttgaggacatcgacatccaggctaactccgcttaccgctatccccctaagagcggaaattattttgcatcacactttttcatgggaggtgagaaattcgacacgccccatccagagggttatctcttcggagagaacatggacctaaattttctcggatctcgacccgtccaattcccttatgtcacgcccgcaccacacgagcccgtcaagacccttcggtccctcgttaacataaggaaagactccctgcgactcgtacgctataaggatgatgccgattcacctacagaggatggggacaagccgagggttctgtattccctcgaatttaccttcgacgccgatgccagggtggccatcacgatttattgtcaggccagtgaagagttcttgaacggtagagcggtgtattcccctaagtcgccttccctacaatccgaaactgttcattacaaacgcggagtgtctcagcagtttagtctaccatccttcaagatcgacttttctgaatggaaggatgatgaactgaattttgatttggaccgcggtgtcttcccagtcgtgatccaagccgttgtagacgagggagacgtggtggaggtgactgggcacgcccatgtgctgttggccgctttcgagaagcacatggatggctctttctcggtcaagcccctgaaacagaaacagattgtggacagggtatcatacctcttacaggaaatatacggcatcgagaataaaaacaaccaagaaacaaagccatcggacgacgaaaattcagacaacagcaatgagtgtgtagtttgcttaagcgatttacgggataccttaatcctgccctgccggcatttatgcctctgtacatcctgtgcggatactctcaggtaccaggcaaataactgtccaatctgcagactgcccttccgggctctgctgcagattagagctgtgaggaagaagccgggtgccctttcaccggtctctttctctccggtactggcacagtcgctcgagcatgacgagcattcatgcccttttaagaaaagtaaaccgcaccccgcttccttagcatctaagaagcctaagcgcgagacaaatagcgatagtgtgcctcccggatacgagcctatttcattactggaggcactcaacggacttcgagcggtctcacctgcaattccctccgctccattatatgaggagattacctactctggaatctctgacggcctctcacaggcaagttgccccctggccgcaatcgatcatattttggattccagtcgtcaaaaaggcagacctcagtccaaagctcccgattctacactgagatccccatcaagcccaattcacgaggaagacgaggaaaagctgagcgaggacgtggacgcaccaccgcctctgggcggtgcggagcttgcacttcgagagagcagctcccctgagtccttcatcaccgaggaagtcgacgaatcatcgtcaccccagcagggaactcgggcagcatcaattgaaaacgtgttgcaagacagctcccctgaacactgtggcaggggcccaccggctgatatttacttgccgggtcggcctactagcatggagaccgctcacgggctagctacaactagtcccacttggcccccactgggcggacccagtccagatcctagcgccgctgagctaacacccctctag

SEQ ID NO: 185473 - DNA, 1731 bp, Artificial Sequence
  derived and/or modified sequence
atgggcagcatcctgagcagaagaatcgccggcgtggaggacatcgacatccaggccaacagcgcctacagatacccccccaagagcggcaactacttcgccagccacttcttcatgggcggcgagaagttcgacaccccccaccccgagggctacctgttcggcgagaacatggacctgaacttcctgggcagcagacccgtgcagttcccctacgtgacccccgccccccacgagcccgtgaagaccctgagaagcctggtgaacatcagaaaggacagcctgagactggtgagatacaaggacgacgccgacagccccaccgaggacggcgacaagcccagagtgctgtacagcctggagttcaccttcgacgccgacgccagagtggccatcaccatctactgccaggccagcgaggagttcctgaacggcagagccgtgtacagccccaagagccccagcctgcagagcgagaccgtgcactacaagagaggcgtgagccagcagttcagcctgcccagcttcaagatcgacttcagcgagtggaaggacgacgagctgaacttcgacctggacagaggcgtgttccccgtggtgatccaggccgtggtggacgagggcgacgtggtggaggtgaccggccacgcccacgtgctgctggccgccttcgagaagcacatggacggcagcttcagcgtgaagcccctgaagcagaagcagatcgtggacagagtgagctacctgctgcaggagatctacggcatcgagaacaagaacaaccaggagaccaagcccagcgacgacgagaacagcgacaacagcaacgagtgcgtggtgtgcctgagcgacctgagagacaccctgatcctgccctgcagacacctgtgcctgtgcaccagctgcgccgacaccctgagataccaggccaacaactgccccatctgcagactgcccttcagagccctgctgcagatcagagccgtgagaaagaagcccggcgccctgagccccgtgagcttcagccccgtgctggcccagagcctggagcacgacgagcacagctgccccttcaagaagagcaagccccaccccgccagcctggccagcaagaagcccaagagagagaccaacagcgacagcgtgccccccggctacgagcccatcagcctgctggaggccctgaacggcctgagagccgtgagccccgccatccccagcgcccccctgtacgaggagatcacctacagcggcatcagcgacggcctgagccaggccagctgccccctggccgccatcgaccacatcctggacagcagcagacagaagggcagaccccagagcaaggcccccgacagcaccctgagaagccccagcagccccatccacgaggaggacgaggagaagctgagcgaggacgtggacgcccccccccccctgggcggcgccgagctggccctgagagagagcagcagccccgagagcttcatcaccgaggaggtggacgagagcagcagcccccagcagggcaccagagccgccagcatcgagaacgtgctgcaggacagcagccccgagcactgcggcagaggcccccccgccgacatctacctgcccggcagacccaccagcatggagaccgcccacggcctggccaccaccagccccacctggccccccctgggcggccccagccccgaccccagcgccgccgagctgacccccctgtag

SEQ ID NO: 185474 - protein, 956 aa, Artificial Sequence
  derived and/or modified sequence
MSSGLWSQEKVTSPYWEERIFYLLLQECSVTDKQTQKLLKVPKGSIGQYIQDRSVGHSRIPSAKGKKNQIGLKILEQPHAVLFVDEKDVVEINEKFTELLLAITNCEERFSLFKNRNRLSKGLQIDVGCPVKVQLRSGEEKFPGVVRFRGPLLAERTVSGIFFGVELLEEGRGQGFTDGVYQGKQLFQCDEDCGVFVALDKLELIEDDDTALESDYAGPGDTMQVELPPLEINSRVSLKVGETIESGTVIFCDVLPGKESLGYFVGVDMDNPIGNWDGRFDGVQLCSFACVESTILLHINDIIPALSESVTQERRPPKLAFMSRGVGDKGSSSHNKPKATGSTSDPGNRNRSELFYTLNGSSVDSQPQSKSKNTWYIDEVAEDPAKSLTEISTDFDRSSPPLQPPPVNSLTTENRFHSLPFSLTKMPNTNGSIGHSPLSLSAQSVMEELNTAPVQESPPLAMPPGNSHGLEVGSLAEVKENPPFYGVIRWIGQPPGLNEVLAGLELEDECAGCTDGTFRGTRYFTCALKKALFVKLKSCRPDSRFASLQPVSNQIERCNSLAFGGYLSEVVEENTPPKMEKEGLEIMIGKKKGIQGHYNSCYLDSTLFCLFAFSSVLDTVLLRPKEKNDVEYYSETQELLRTEIVNPLRIYGYVCATKIMKLRKILEKVEAASGFTSEEKDPEEFLNILFHHILRVEPLLKIRSAGQKVQDCYFYQIFMEKNEKVGVPTIQQLLEWSFINSNLKFAEAPSCLIIQMPRFGKDFKLFKKIFPSLELNITDLLEDTPRQCRICGGLAMYECRECYDDPDISAGKIKQFCKTCNTQVHLHPKRLNHKYNPVSLPKDLPDWDWRHGCIPCQNMELFAVLCIETSHYVAFVKYGKDDSAWLFFDSMADRDGGQNGFNIPQVTPCPEVGEYLKMSLEDLHSLDSRRIQGCARRLLCDAYMCMYQSPTMSLYK

SEQ ID NO: 185475 - protein, 956 aa, Artificial Sequence
  derived and/or modified sequence
MSSGLWSQEKVTSPYWEERIFYLLLQECSVTDKQTQKLLKVPKGSIGQYIQDRSVGHSRIPSAKGKKNQIGLKILEQPHAVLFVDEKDVVEINEKFTELLLAITNCEERFSLFKNRNRLSKGLQIDVGCPVKVQLRSGEEKFPGVVRFRGPLLAERTVSGIFFGVELLEEGRGQGFTDGVYQGKQLFQCDEDCGVFVALDKLELIEDDDTALESDYAGPGDTMQVELPPLEINSRVSLKVGETIESGTVIFCDVLPGKESLGYFVGVDMDNPIGNWDGRFDGVQLCSFACVESTILLHINDIIPAVSESVTQERRPPKLAFMSRGVGDKGSSSHNKPKATGSTSDPGNRNRSELFYTLNGSSVDSQPQSKSKNTWYIDEVAEDPAKSLTEISTDFDRSSPPLQPPPVNSLTTENRFHSLPFSLTKMPNTNGSIGHSPLSLSAQSVMEELNTAPVQESPPLAMPPGNSHGLEVGSLAEVKENPPFYGVIRWIGQPPGLNEVLAGLELEDECAGCTDGTFRGTRYFTCALKKALFVKLKSCRPDSRFASLQPVSNQIERCNSLAFGGYLSEVVEENTPPKMEKEGLEIMIGKKKGIQGHYNSCYLDSTLFCLFAFSSVLDTVLLRPKEKNDVEYYSETQELLRTEIVNPLRIYGYVCATKIMKLRKILEKVEAASGFTSEEKDPEEFLNILFHHILRVEPLLKIRSAGQKVQDCYFYQIFMEKNEKVGVPTIQQLLEWSFINSNLKFAEAPSCLIIQMPRFGKDFKLFKKIFPSLELNITDLLEDTPRQCRICGGLAMYECRECYDDPDISAGKIKQFCKTCNTQVHLHPKRLNHKYNPVSLPKDLPDWDWRHGCIPCQNMELFAVLCIETSHYVAFVKYGKDDSAWLFFDSMADRDGGQNGFNIPQVTPCPEVGEYLKMSLEDLHSLDSRRIQGCARRLLCDAYMCMYQSPTMSLYK

SEQ ID NO: 185476 - DNA, 2871 bp, Artificial Sequence
  derived and/or modified sequence
atgagcagcggcctgtggagccaggagaaggtgaccagcccctactgggaggagagaatcttctacctgctgctgcaggagtgcagcgtgaccgacaagcagacccagaagctgctgaaggtgcccaagggcagcatcggccagtacatccaggacagaagcgtgggccacagcagaatccccagcgccaagggcaagaagaaccagatcggcctgaagatcctggagcagccccacgccgtgctgttcgtggacgagaaggacgtggtggagatcaacgagaagttcaccgagctgctgctggccatcaccaactgcgaggagagattcagcctgttcaagaacagaaacagactgagcaagggcctgcagatcgacgtgggctgccccgtgaaggtgcagctgagaagcggcgaggagaagttccccggcgtggtgagattcagaggccccctgctggccgagagaaccgtgagcggcatcttcttcggcgtggagctgctggaggagggcagaggccagggcttcaccgacggcgtgtaccagggcaagcagctgttccagtgcgacgaggactgcggcgtgttcgtggccctggacaagctggagctgatcgaggacgacgacaccgccctggagagcgactacgccggccccggcgacaccatgcaggtggagctgccccccctggagatcaacagcagagtgagcctgaaggtgggcgagaccatcgagagcggcaccgtgatcttctgcgacgtgctgcccggcaaggagagcctgggctacttcgtgggcgtggacatggacaaccccatcggcaactgggacggcagattcgacggcgtgcagctgtgcagcttcgcctgcgtggagagcaccatcctgctgcacatcaacgacatcatccccgccctgagcgagagcgtgacccaggagagaagaccccccaagctggccttcatgagcagaggcgtgggcgacaagggcagcagcagccacaacaagcccaaggccaccggcagcaccagcgaccccggcaacagaaacagaagcgagctgttctacaccctgaacggcagcagcgtggacagccagccccagagcaagagcaagaacacctggtacatcgacgaggtggccgaggaccccgccaagagcctgaccgagatcagcaccgacttcgacagaagcagcccccccctgcagcccccccccgtgaacagcctgaccaccgagaacagattccacagcctgcccttcagcctgaccaagatgcccaacaccaacggcagcatcggccacagccccctgagcctgagcgcccagagcgtgatggaggagctgaacaccgcccccgtgcaggagagcccccccctggccatgccccccggcaacagccacggcctggaggtgggcagcctggccgaggtgaaggagaacccccccttctacggcgtgatcagatggatcggccagccccccggcctgaacgaggtgctggccggcctggagctggaggacgagtgcgccggctgcaccgacggcaccttcagaggcaccagatacttcacctgcgccctgaagaaggccctgttcgtgaagctgaagagctgcagacccgacagcagattcgccagcctgcagcccgtgagcaaccagatcgagagatgcaacagcctggccttcggcggctacctgagcgaggtggtggaggagaacaccccccccaagatggagaaggagggcctggagatcatgatcggcaagaagaagggcatccagggccactacaacagctgctacctggacagcaccctgttctgcctgttcgccttcagcagcgtgctggacaccgtgctgctgagacccaaggagaagaacgacgtggagtactacagcgagacccaggagctgctgagaaccgagatcgtgaaccccctgagaatctacggctacgtgtgcgccaccaagatcatgaagctgagaaagatcctggagaaggtggaggccgccagcggcttcaccagcgaggagaaggaccccgaggagttcctgaacatcctgttccaccacatcctgagagtggagcccctgctgaagatcagaagcgccggccagaaggtgcaggactgctacttctaccagatcttcatggagaagaacgagaaggtgggcgtgcccaccatccagcagctgctggagtggagcttcatcaacagcaacctgaagttcgccgaggcccccagctgcctgatcatccagatgcccagattcggcaaggacttcaagctgttcaagaagatcttccccagcctggagctgaacatcaccgacctgctggaggacacccccagacagtgcagaatctgcggcggcctggccatgtacgagtgcagagagtgctacgacgaccccgacatcagcgccggcaagatcaagcagttctgcaagacctgcaacacccaggtgcacctgcaccccaagagactgaaccacaagtacaaccccgtgagcctgcccaaggacctgcccgactgggactggagacacggctgcatcccctgccagaacatggagctgttcgccgtgctgtgcatcgagaccagccactacgtggccttcgtgaagtacggcaaggacgacagcgcctggctgttcttcgacagcatggccgacagagacggcggccagaacggcttcaacatcccccaggtgaccccctgccccgaggtgggcgagtacctgaagatgagcctggaggacctgcacagcctggacagcagaagaatccagggctgcgccagaagactgctgtgcgacgcctacatgtgcatgtaccagagccccaccatgagcctgtacaagtag

SEQ ID NO: 185477 - DNA, 2871 bp, Artificial Sequence
  derived and/or modified sequence
atgagcagcggcctgtggagccaggagaaggtgaccagcccctactgggaggagagaatcttctacctgctgctgcaggagtgcagcgtgaccgacaagcagacccagaagctgctgaaggtgcccaagggcagcatcggccagtacatccaggacagaagcgtgggccacagcagaatccccagcgccaagggcaagaagaaccagatcggcctgaagatcctggagcagccccacgccgtgctgttcgtggacgagaaggacgtggtggagatcaacgagaagttcaccgagctgctgctggccatcaccaactgcgaggagagattcagcctgttcaagaacagaaacagactgagcaagggcctgcagatcgacgtgggctgccccgtgaaggtgcagctgagaagcggcgaggagaagttccccggcgtggtgagattcagaggccccctgctggccgagagaaccgtgagcggcatcttcttcggcgtggagctgctggaggagggcagaggccagggcttcaccgacggcgtgtaccagggcaagcagctgttccagtgcgacgaggactgcggcgtgttcgtggccctggacaagctggagctgatcgaggacgacgacaccgccctggagagcgactacgccggccccggcgacaccatgcaggtggagctgccccccctggagatcaacagcagagtgagcctgaaggtgggcgagaccatcgagagcggcaccgtgatcttctgcgacgtgctgcccggcaaggagagcctgggctacttcgtgggcgtggacatggacaaccccatcggcaactgggacggcagattcgacggcgtgcagctgtgcagcttcgcctgcgtggagagcaccatcctgctgcacatcaacgacatcatccccgccgtgagcgagagcgtgacccaggagagaagaccccccaagctggccttcatgagcagaggcgtgggcgacaagggcagcagcagccacaacaagcccaaggccaccggcagcaccagcgaccccggcaacagaaacagaagcgagctgttctacaccctgaacggcagcagcgtggacagccagccccagagcaagagcaagaacacctggtacatcgacgaggtggccgaggaccccgccaagagcctgaccgagatcagcaccgacttcgacagaagcagcccccccctgcagcccccccccgtgaacagcctgaccaccgagaacagattccacagcctgcccttcagcctgaccaagatgcccaacaccaacggcagcatcggccacagccccctgagcctgagcgcccagagcgtgatggaggagctgaacaccgcccccgtgcaggagagcccccccctggccatgccccccggcaacagccacggcctggaggtgggcagcctggccgaggtgaaggagaacccccccttctacggcgtgatcagatggatcggccagccccccggcctgaacgaggtgctggccggcctggagctggaggacgagtgcgccggctgcaccgacggcaccttcagaggcaccagatacttcacctgcgccctgaagaaggccctgttcgtgaagctgaagagctgcagacccgacagcagattcgccagcctgcagcccgtgagcaaccagatcgagagatgcaacagcctggccttcggcggctacctgagcgaggtggtggaggagaacaccccccccaagatggagaaggagggcctggagatcatgatcggcaagaagaagggcatccagggccactacaacagctgctacctggacagcaccctgttctgcctgttcgccttcagcagcgtgctggacaccgtgctgctgagacccaaggagaagaacgacgtggagtactacagcgagacccaggagctgctgagaaccgagatcgtgaaccccctgagaatctacggctacgtgtgcgccaccaagatcatgaagctgagaaagatcctggagaaggtggaggccgccagcggcttcaccagcgaggagaaggaccccgaggagttcctgaacatcctgttccaccacatcctgagagtggagcccctgctgaagatcagaagcgccggccagaaggtgcaggactgctacttctaccagatcttcatggagaagaacgagaaggtgggcgtgcccaccatccagcagctgctggagtggagcttcatcaacagcaacctgaagttcgccgaggcccccagctgcctgatcatccagatgcccagattcggcaaggacttcaagctgttcaagaagatcttccccagcctggagctgaacatcaccgacctgctggaggacacccccagacagtgcagaatctgcggcggcctggccatgtacgagtgcagagagtgctacgacgaccccgacatcagcgccggcaagatcaagcagttctgcaagacctgcaacacccaggtgcacctgcaccccaagagactgaaccacaagtacaaccccgtgagcctgcccaaggacctgcccgactgggactggagacacggctgcatcccctgccagaacatggagctgttcgccgtgctgtgcatcgagaccagccactacgtggccttcgtgaagtacggcaaggacgacagcgcctggctgttcttcgacagcatggccgacagagacggcggccagaacggcttcaacatcccccaggtgaccccctgccccgaggtgggcgagtacctgaagatgagcctggaggacctgcacagcctggacagcagaagaatccagggctgcgccagaagactgctgtgcgacgcctacatgtgcatgtaccagagccccaccatgagcctgtacaagtag

SEQ ID NO: 185478 - DNA, 8713 bp, Artificial Sequence
  derived and/or modified sequence
gtgcggttcggaggcggggcaggtgggggcgggcccaggtagcaggtttggctgcgcgggggccgcgcgtcggagtttccccctttctagggtgaggatggttctacacagccacccggagttccttagttgaaaggtgcgccctgctgtgacagaatgtggtaattgtaatctttaacattttcatgtaaaacatatttcctgatcatctttccattgtcttcatggaaaattgataaatatttgtgccttccaactctcgtcttggttgaatgacttcatcttaatacaacatggacaccacgttgctgaaaacatgctttgggactgccactgaatttatcttttgcggttttatgacaaagttattagtagtttcccttttttgaattagtattttgaagttaatatcacaatgagttcaggcttatggagccaagaaaaagtcacttcaccctactgggaagagcggattttttacttgcttcttcaagaatgcagcgttacagacaaacaaacacaaaagctccttaaagtaccgaagggaagtataggacagtatattcaagatcgttctgtggggcattcaaggattccttctgcaaaaggcaagaaaaatcagattggattaaaaattctagagcaacctcatgcagttctctttgttgatgaaaaggatgttgtagagataaatgaaaagttcacagagttacttttggcaattaccaattgtgaggagaggttcagcctgtttaaaaacagaaacagactaagtaaaggcctccaaatagacgtgggctgtcctgtgaaagtacagctgagatctggggaagaaaaatttcctggagttgtacgcttcagaggacccctgttagcagagaggacagtctccggaatattctttggagttgaattgctggaagaaggtcgtggtcaaggtttcactgacggggtgtaccaagggaaacagctttttcagtgtgatgaagattgtggcgtgtttgttgcattggacaagctagaactcatagaagatgatgacactgcattggaaagtgattacgcaggtcctggggacacaatgcaggtcgaacttcctcctttggaaataaactccagagtttctttgaaggttggagaaacaatagaatctggaacagttatattctgtgatgttttgccaggaaaagaaagcttaggatattttgttggtgtggacatggataaccctattggcaactgggatggaagatttgatggagtgcagctttgtagttttgcgtgtgttgaaagtacaattctattgcacatcaatgatatcatcccagctttatcagagagtgtgacgcaggaaaggaggcctcccaaacttgcctttatgtcaagaggtgttggggacaaaggttcatccagtcataataaaccaaaggctacaggatctacctcagaccctggaaatagaaacagatctgaattattttataccttaaatgggtcttctgttgactcacaaccacaatccaaatcaaaaaatacatggtacattgatgaagttgcagaagaccctgcaaaatctcttacagagatatctacagactttgaccgttcttcaccaccactccagcctcctcctgtgaactcactgaccaccgagaacagattccactctttaccattcagtctcaccaagatgcccaataccaatggaagtattggccacagtccactttctctgtcagcccagtctgtaatggaagagctaaacactgcacccgtccaagagagtccacccttggccatgcctcctgggaactcacatggtctagaagtgggctcattggctgaagttaaggagaaccctcctttctatggggtaatccgttggatcggtcagccaccaggactgaatgaagtgctcgctggactggaactggaagatgagtgtgcaggctgtacggatggaaccttcagaggcactcggtatttcacctgtgccctgaagaaggcgctgtttgtgaaactgaagagctgcaggcctgactctaggtttgcatcattgcagccggtttccaatcagattgagcgctgtaactctttagcatttggaggctacttaagtgaagtagtagaagaaaatactccaccaaaaatggaaaaagaaggcttggagataatgattgggaagaagaaaggcatccagggtcattacaattcttgttacttagactcaaccttattctgcttatttgcttttagttctgttctggacactgtgttacttagacccaaagaaaagaacgatgtagaatattatagtgaaacccaagagctactgaggacagaaattgttaatcctctgagaatatatggatatgtgtgtgccacaaaaattatgaaactgaggaaaatacttgaaaaggtggaggctgcatcaggatttacctctgaagaaaaagatcctgaggaattcttgaatattctgtttcatcatattttaagggtagaacctttgctaaaaataagatcagcaggtcaaaaggtacaagattgttacttctatcaaatttttatggaaaaaaatgagaaagttggcgttcccacaattcagcagttgttagaatggtcttttatcaacagtaacctgaaatttgcagaggcaccatcatgtctgattattcagatgcctcgatttggaaaagactttaaactatttaaaaaaatttttccttctctggaattaaatataacagatttacttgaagacactcccagacagtgccggatatgtggagggcttgcaatgtatgagtgtagagaatgctacgacgatccggacatctcagctggaaaaatcaagcagttttgtaaaacctgcaacactcaagtccaccttcatccgaagaggctgaatcataaatataacccagtgtcacttcccaaagacttacccgactgggactggagacacggctgcatcccttgccagaatatggagttatttgctgttctctgcatagaaacaagccactatgttgcttttgtgaagtatgggaaggacgattctgcctggctcttctttgacagcatggccgatcgggatggtggtcagaatggcttcaacattcctcaagtcaccccatgcccagaagtaggagagtacttgaagatgtctctggaagacctgcattccttggactccaggagaatccaaggctgtgcacgaagactgctttgtgatgcatatatgtgcatgtaccagagtccaacaatgagtttgtacaaataactggggtcatcgggaaaggcaaagaaactgaaggcagagtcctaacgttgcatcttattcgagctggcagttctgttcacgtccattgccggcaatggatgtctttgtggtgatgatccttcagaaaaggatgcctctgtttaaaaacaaattgcttttgtgtccctgaagtatttaataagaagcattttgcactctagaaagtatgtttgtgttggttttttaagaagtctaaatgaagttattaatacctgaagctttaagttaagtgcattgatcatatgatatttttggaagcatacaattttaattgtggaagtttaaagcctcttttagtccattgagaatgtaaataaatgtgtcttctttatggaccaaggatatgaaatcatttttcttttgtagctaacggttgccttgaggaagaaataatttggttttattaagagtctactctcaatccagttattagagatgtactgagtttgatttgttaatcctttctatatactgctgatcttgcatgtctacaatctgctcagtttttctgtgtttctgcaatagtggtcagaaaaatacttaaattcccttaatggtgttgttttctatttgttctggttttgagataaatgagtgattctgtccccaaatgtccatttttgaagtgattttcctggaggattagggtatttagcagttgaagctcttcattcatagtagttactgtcagctaacaggttttttaaggcttttaactattaatattttatggaatggggcaaagtaaattgatgaaagaattggagtgataatagtcctttacaaacatacagtccataagaaaatgaatttggcatatagaattattacaatttcctgggagagatggatatttaaacctctattattttagacaagactgtctagaacttaagtttgatctgtcagccagtactcccattaaattcagtgtagtttcacttgatagaatcagatatgttatcgaaatgttagcagcagcttcatcctccttctgattaaagtaagtagaaatgggatgttttgtttaataacagccatagtgtgtgtttagaccacagcggatgttgtagaccaggaccatagatgatacatgtcagtgctgtggaatgtgcattctctgagtgttgttttgtggtatcattgtctttcctgaatgactttctaactgtgcagaaaggcagaaaagtcatcatatgtatatgtcatatgactttataaaatatttaatgtgacaaaaagtggaaagaatctttacaaaccctgcaattacttttttaaaggcacttttactctttggttttatcattccattttgctaatatttactagctttataaattacagtaaggtacaaaaactcatcttgtaatattttcatttttgaagtgaaaaagtacatatattttgcacaaggttttatactgctaagtgcttggttggggtggtgagatgatgattagatcaggggtgaggctgagagactctgggtttagggctagccctgcctccatctcccttgggtaaaatgaagggtgtggggtaaaagatgcataaggccttttctagctctgacagcctagaagtccaatcaccctgtaataaatatgtgttgaatgaagaaatgggtgaatgagcttgtcaatgtgattttaaaaaattgactacctggaggaatgattaggaatctaaatgaagccagccctcggtatctgcaggtttctcatccatggattcaaccaactgcaaatggaaaatacgattttttttaaaaaaaggatggttacatccgtattgaacatgtacagacttttttcttgtcattattctctgaacaatacaagaactctttatgtagcatttacatttattaggtattataagtaatctagagattatttaattaaaatatacaggaggatgtgtgtcagttatatgcaaattctgtaccattttgtatcagggaattgagcatcttcagatgttggtatctgcagggatcctggaaccaaacccctgcagatactaagggctgacgatctaggtaagactggatttaacagttggaaaaaaaaaaaaaaaaggagagagaagacagttcctttcctgtagaaattaaaacaaaatacaaattgaggaagctctgctacccaggctgtcatggtagagaacttgaagaagacctgtttggatggacacctggtttcaaaagtcaggtgtggagactgttaaatgggagggcctcatccataaatgatttctggcaacgtcttcttcaggtggagcttgacgtctttttaatgttacttggggagggagtgctcattaagggatgccagggccagctctggtggttcctggggaggctgcgtccttccctgcttctgcatgtcatgaggcagcaggaaggtttcccctgcacctgtctgtcctggctccctctgggtagccccctactgttctgtgcttcagcacagcctggtttgtcaagaggcacatagttggggctgggctgcatggcacaggggcttatgtgcctgctggttatttaattttcagccttaagttttctttaatattttcctgttggctatttaaaggttttggttatcttttattccttatctacaatcaagatgacaatgtaattgaattatcttatttataacacggttcgtgattcatgattcatgattacaagtagaaaatatgtcatgttcctcacctccaaataaatatgtgtgtgtctgtgtgtgtgtatatatgtatgtggcggagagggagagagtggggaaggagagcagtgttatcatacatagagaggctaaatgtgtcccatccctcactgtcagctttataaaggagtttgactccatccacagaagaatgttttataagactaggaaaacacgttgaaaactaggataaacagcaacaaaaatcaactaaatatgttgttactgttgctaaggattttctccttagaataatttaggatttttaaaaatttctgtttgccaaatgctgtagataaatggccagattcttcctatccctaggattcctttattattttttttcacagattttgagaacaagggggagagatagtatggaagattaagattccattaatcttatagaactgtgttgtcacccaaattcctgcttgtttgaacatggcatcttcatagattcaggattcactaccctctatagctggatcttgaaaattatctggccagataattttgcatctgcttggatgattgtagactgagatgtgagtggaggataaagtattagacttttgctgagtaactgccaaccaagaagtatttatcggacacttactaggtgcctaggattgtatcagagggaatatgaaatgtgtccctgccctacctagttttaacgacagaatatctattaaaggctacttagctgaagggtaagggtgacaggtctaggggaagctttgggaggtggtgtgctgtgacagaaaaagtggcagagtagggacgagagacctgcattctagccctgtttctgtcacttgctctgtacacttagacaacagcttgacctcttgagctttagtttcctcctctgcataatgagagggttagactactgaattgtatgggaaaaaaatacaaattcctgggtcctaggccatgcctgctgaatccgactgttcaggaagaggcctaggaaatctgtgagggaatccccaggggaatctcgtgaccagccaggtgtgaaatctgctaactggaagatctcaaagcttccttcactttttgtgattttgtggtcatgtaacgttactgtattattctacgtaaatgtgggtacttggatgtttatcatactgtttctctgtgtttacatactaatttgtgtaagaaatgcattttagtctgtgtacctcaacctgctgtttgtttcctagaggtgttagtagtctttaaatacaagtaagacttaagaggatatttgatgttatttacctggatattttcttccccttttatttatttagaggaaattgagattctaggagccaaaaaaatgaaaacaaaattctaaggcaaagttaaagaaaaaaattacattatttcttaccatttgctactttataatgaaaatttaaaaattatatgggaagatttttctctgggataacaaatccttgtcataaagtaagaggtctttttaaagtaggtaggctataaggcctgtaatttaaaataatactcctttctctagggtttggtgcaattctccattaatgaagataacatttgaattccccaaagcaggtgaggagtcggggaggagaaagcgatgttaaaatgaaaactcactgcaaaagaggaggcagaggaagaaggaatgtaaaccccttaaagcagatgtgtgtggggccttatgaagaccaggattctgcgggtgtcaggggattgcccctcttgacagagactagggttttagactgaggcttcctgcagggtgttcgcattgcccttctccgttccccttcagacctttctggggagaagaggtgggaggaggggagaaagactgttcatcttattctgaatcctggagcagctgaaggttttctcttgagtcaggatgcagtggtaatgcattaaccagcaagtgtggccaaggataatgaaaaagtgggaaaggaaggtcctcctcctccctgattgtagcatccagcagtctctgtagccaggttactcaagaaccacatttgatttcctggccctttgccttggcagtgatggcatttttatttcactgtgttttaaagtcttcatttatttttataacatgggttagggagaagggccacaaatggagggattgtcctttcaagcaccacagcttcagataaaattagtactttcaaatattgtccactttaacttaaaaaattctagagggattatattggagactcaactgcccttggttttagtttataaaatggcctagtactgtggaattttaattttagaaagtcttagcatcagatcataaacattcattaaaagaactcacatcccatctgaaacttcccaggggagttgggattcttagtagattggtagaaaggggctcattttctactgcatttcccatttttggtatcttgttcagcatgttttatttttatttcttgtctgcagaacatcctatatttatgagaacattctttaagaagaccaccacatagaataccccttcctatcagctcgctctgatttagccttaattttgttaaattttttagagatgaatgaagtgctgctgtggaaagaaatgtacatatactatttctgtatcattaaaattacatttttatggttc

SEQ ID NO: 185479 - DNA, 8713 bp, Artificial Sequence
  derived and/or modified sequence
gtgcggttcggaggcggggcaggtgggggcgggcccaggtagcaggtttggctgcgcgggggccgcgcgtcggagtttccccctttctagggtgaggatggttctacacagccacccggagttccttagttgaaaggtgcgccctgctgtgacagaatgtggtaattgtaatctttaacattttcatgtaaaacatatttcctgatcatctttccattgtcttcatggaaaattgataaatatttgtgccttccaactctcgtcttggttgaatgacttcatcttaatacaacatggacaccacgttgctgaaaacatgctttgggactgccactgaatttatcttttgcggttttatgacaaagttattagtagtttcccttttttgaattagtattttgaagttaatatcacaatgagttcaggcttatggagccaagaaaaagtcacttcaccctactgggaagagcggattttttacttgcttcttcaagaatgcagcgttacagacaaacaaacacaaaagctccttaaagtaccgaagggaagtataggacagtatattcaagatcgttctgtggggcattcaaggattccttctgcaaaaggcaagaaaaatcagattggattaaaaattctagagcaacctcatgcagttctctttgttgatgaaaaggatgttgtagagataaatgaaaagttcacagagttacttttggcaattaccaattgtgaggagaggttcagcctgtttaaaaacagaaacagactaagtaaaggcctccaaatagacgtgggctgtcctgtgaaagtacagctgagatctggggaagaaaaatttcctggagttgtacgcttcagaggacccctgttagcagagaggacagtctccggaatattctttggagttgaattgctggaagaaggtcgtggtcaaggtttcactgacggggtgtaccaagggaaacagctttttcagtgtgatgaagattgtggcgtgtttgttgcattggacaagctagaactcatagaagatgatgacactgcattggaaagtgattacgcaggtcctggggacacaatgcaggtcgaacttcctcctttggaaataaactccagagtttctttgaaggttggagaaacaatagaatctggaacagttatattctgtgatgttttgccaggaaaagaaagcttaggatattttgttggtgtggacatggataaccctattggcaactgggatggaagatttgatggagtgcagctttgtagttttgcgtgtgttgaaagtacaattctattgcacatcaatgatatcatcccagctgtttcagagagtgtgacgcaggaaaggaggcctcccaaacttgcctttatgtcaagaggtgttggggacaaaggttcatccagtcataataaaccaaaggctacaggatctacctcagaccctggaaatagaaacagatctgaattattttataccttaaatgggtcttctgttgactcacaaccacaatccaaatcaaaaaatacatggtacattgatgaagttgcagaagaccctgcaaaatctcttacagagatatctacagactttgaccgttcttcaccaccactccagcctcctcctgtgaactcactgaccaccgagaacagattccactctttaccattcagtctcaccaagatgcccaataccaatggaagtattggccacagtccactttctctgtcagcccagtctgtaatggaagagctaaacactgcacccgtccaagagagtccacccttggccatgcctcctgggaactcacatggtctagaagtgggctcattggctgaagttaaggagaaccctcctttctatggggtaatccgttggatcggtcagccaccaggactgaatgaagtgctcgctggactggaactggaagatgagtgtgcaggctgtacggatggaaccttcagaggcactcggtatttcacctgtgccctgaagaaggcgctgtttgtgaaactgaagagctgcaggcctgactctaggtttgcatcattgcagccggtttccaatcagattgagcgctgtaactctttagcatttggaggctacttaagtgaagtagtagaagaaaatactccaccaaaaatggaaaaagaaggcttggagataatgattgggaagaagaaaggcatccagggtcattacaattcttgttacttagactcaaccttattctgcttatttgcttttagttctgttctggacactgtgttacttagacccaaagaaaagaacgatgtagaatattatagtgaaacccaagagctactgaggacagaaattgttaatcctctgagaatatatggatatgtgtgtgccacaaaaattatgaaactgaggaaaatacttgaaaaggtggaggctgcatcaggatttacctctgaagaaaaagatcctgaggaattcttgaatattctgtttcatcatattttaagggtagaacctttgctaaaaataagatcagcaggtcaaaaggtacaagattgttacttctatcaaatttttatggaaaaaaatgagaaagttggcgttcccacaattcagcagttgttagaatggtcttttatcaacagtaacctgaaatttgcagaggcaccatcatgtctgattattcagatgcctcgatttggaaaagactttaaactatttaaaaaaatttttccttctctggaattaaatataacagatttacttgaagacactcccagacagtgccggatatgtggagggcttgcaatgtatgagtgtagagaatgctacgacgatccggacatctcagctggaaaaatcaagcagttttgtaaaacctgcaacactcaagtccaccttcatccgaagaggctgaatcataaatataacccagtgtcacttcccaaagacttacccgactgggactggagacacggctgcatcccttgccagaatatggagttatttgctgttctctgcatagaaacaagccactatgttgcttttgtgaagtatgggaaggacgattctgcctggctcttctttgacagcatggccgatcgggatggtggtcagaatggcttcaacattcctcaagtcaccccatgcccagaagtaggagagtacttgaagatgtctctggaagacctgcattccttggactccaggagaatccaaggctgtgcacgaagactgctttgtgatgcatatatgtgcatgtaccagagtccaacaatgagtttgtacaaataactggggtcatcgggaaaggcaaagaaactgaaggcagagtcctaacgttgcatcttattcgagctggcagttctgttcacgtccattgccggcaatggatgtctttgtggtgatgatccttcagaaaaggatgcctctgtttaaaaacaaattgcttttgtgtccctgaagtatttaataagaagcattttgcactctagaaagtatgtttgtgttggttttttaagaagtctaaatgaagttattaatacctgaagctttaagttaagtgcattgatcatatgatatttttggaagcatacaattttaattgtggaagtttaaagcctcttttagtccattgagaatgtaaataaatgtgtcttctttatggaccaaggatatgaaatcatttttcttttgtagctaacggttgccttgaggaagaaataatttggttttattaagagtctactctcaatccagttattagagatgtactgagtttgatttgttaatcctttctatatactgctgatcttgcatgtctacaatctgctcagtttttctgtgtttctgcaatagtggtcagaaaaatacttaaattcccttaatggtgttgttttctatttgttctggttttgagataaatgagtgattctgtccccaaatgtccatttttgaagtgattttcctggaggattagggtatttagcagttgaagctcttcattcatagtagttactgtcagctaacaggttttttaaggcttttaactattaatattttatggaatggggcaaagtaaattgatgaaagaattggagtgataatagtcctttacaaacatacagtccataagaaaatgaatttggcatatagaattattacaatttcctgggagagatggatatttaaacctctattattttagacaagactgtctagaacttaagtttgatctgtcagccagtactcccattaaattcagtgtagtttcacttgatagaatcagatatgttatcgaaatgttagcagcagcttcatcctccttctgattaaagtaagtagaaatgggatgttttgtttaataacagccatagtgtgtgtttagaccacagcggatgttgtagaccaggaccatagatgatacatgtcagtgctgtggaatgtgcattctctgagtgttgttttgtggtatcattgtctttcctgaatgactttctaactgtgcagaaaggcagaaaagtcatcatatgtatatgtcatatgactttataaaatatttaatgtgacaaaaagtggaaagaatctttacaaaccctgcaattacttttttaaaggcacttttactctttggttttatcattccattttgctaatatttactagctttataaattacagtaaggtacaaaaactcatcttgtaatattttcatttttgaagtgaaaaagtacatatattttgcacaaggttttatactgctaagtgcttggttggggtggtgagatgatgattagatcaggggtgaggctgagagactctgggtttagggctagccctgcctccatctcccttgggtaaaatgaagggtgtggggtaaaagatgcataaggccttttctagctctgacagcctagaagtccaatcaccctgtaataaatatgtgttgaatgaagaaatgggtgaatgagcttgtcaatgtgattttaaaaaattgactacctggaggaatgattaggaatctaaatgaagccagccctcggtatctgcaggtttctcatccatggattcaaccaactgcaaatggaaaatacgattttttttaaaaaaaggatggttacatccgtattgaacatgtacagacttttttcttgtcattattctctgaacaatacaagaactctttatgtagcatttacatttattaggtattataagtaatctagagattatttaattaaaatatacaggaggatgtgtgtcagttatatgcaaattctgtaccattttgtatcagggaattgagcatcttcagatgttggtatctgcagggatcctggaaccaaacccctgcagatactaagggctgacgatctaggtaagactggatttaacagttggaaaaaaaaaaaaaaaaggagagagaagacagttcctttcctgtagaaattaaaacaaaatacaaattgaggaagctctgctacccaggctgtcatggtagagaacttgaagaagacctgtttggatggacacctggtttcaaaagtcaggtgtggagactgttaaatgggagggcctcatccataaatgatttctggcaacgtcttcttcaggtggagcttgacgtctttttaatgttacttggggagggagtgctcattaagggatgccagggccagctctggtggttcctggggaggctgcgtccttccctgcttctgcatgtcatgaggcagcaggaaggtttcccctgcacctgtctgtcctggctccctctgggtagccccctactgttctgtgcttcagcacagcctggtttgtcaagaggcacatagttggggctgggctgcatggcacaggggcttatgtgcctgctggttatttaattttcagccttaagttttctttaatattttcctgttggctatttaaaggttttggttatcttttattccttatctacaatcaagatgacaatgtaattgaattatcttatttataacacggttcgtgattcatgattcatgattacaagtagaaaatatgtcatgttcctcacctccaaataaatatgtgtgtgtctgtgtgtgtgtatatatgtatgtggcggagagggagagagtggggaaggagagcagtgttatcatacatagagaggctaaatgtgtcccatccctcactgtcagctttataaaggagtttgactccatccacagaagaatgttttataagactaggaaaacacgttgaaaactaggataaacagcaacaaaaatcaactaaatatgttgttactgttgctaaggattttctccttagaataatttaggatttttaaaaatttctgtttgccaaatgctgtagataaatggccagattcttcctatccctaggattcctttattattttttttcacagattttgagaacaagggggagagatagtatggaagattaagattccattaatcttatagaactgtgttgtcacccaaattcctgcttgtttgaacatggcatcttcatagattcaggattcactaccctctatagctggatcttgaaaattatctggccagataattttgcatctgcttggatgattgtagactgagatgtgagtggaggataaagtattagacttttgctgagtaactgccaaccaagaagtatttatcggacacttactaggtgcctaggattgtatcagagggaatatgaaatgtgtccctgccctacctagttttaacgacagaatatctattaaaggctacttagctgaagggtaagggtgacaggtctaggggaagctttgggaggtggtgtgctgtgacagaaaaagtggcagagtagggacgagagacctgcattctagccctgtttctgtcacttgctctgtacacttagacaacagcttgacctcttgagctttagtttcctcctctgcataatgagagggttagactactgaattgtatgggaaaaaaatacaaattcctgggtcctaggccatgcctgctgaatccgactgttcaggaagaggcctaggaaatctgtgagggaatccccaggggaatctcgtgaccagccaggtgtgaaatctgctaactggaagatctcaaagcttccttcactttttgtgattttgtggtcatgtaacgttactgtattattctacgtaaatgtgggtacttggatgtttatcatactgtttctctgtgtttacatactaatttgtgtaagaaatgcattttagtctgtgtacctcaacctgctgtttgtttcctagaggtgttagtagtctttaaatacaagtaagacttaagaggatatttgatgttatttacctggatattttcttccccttttatttatttagaggaaattgagattctaggagccaaaaaaatgaaaacaaaattctaaggcaaagttaaagaaaaaaattacattatttcttaccatttgctactttataatgaaaatttaaaaattatatgggaagatttttctctgggataacaaatccttgtcataaagtaagaggtctttttaaagtaggtaggctataaggcctgtaatttaaaataatactcctttctctagggtttggtgcaattctccattaatgaagataacatttgaattccccaaagcaggtgaggagtcggggaggagaaagcgatgttaaaatgaaaactcactgcaaaagaggaggcagaggaagaaggaatgtaaaccccttaaagcagatgtgtgtggggccttatgaagaccaggattctgcgggtgtcaggggattgcccctcttgacagagactagggttttagactgaggcttcctgcagggtgttcgcattgcccttctccgttccccttcagacctttctggggagaagaggtgggaggaggggagaaagactgttcatcttattctgaatcctggagcagctgaaggttttctcttgagtcaggatgcagtggtaatgcattaaccagcaagtgtggccaaggataatgaaaaagtgggaaaggaaggtcctcctcctccctgattgtagcatccagcagtctctgtagccaggttactcaagaaccacatttgatttcctggccctttgccttggcagtgatggcatttttatttcactgtgttttaaagtcttcatttatttttataacatgggttagggagaagggccacaaatggagggattgtcctttcaagcaccacagcttcagataaaattagtactttcaaatattgtccactttaacttaaaaaattctagagggattatattggagactcaactgcccttggttttagtttataaaatggcctagtactgtggaattttaattttagaaagtcttagcatcagatcataaacattcattaaaagaactcacatcccatctgaaacttcccaggggagttgggattcttagtagattggtagaaaggggctcattttctactgcatttcccatttttggtatcttgttcagcatgttttatttttatttcttgtctgcagaacatcctatatttatgagaacattctttaagaagaccaccacatagaataccccttcctatcagctcgctctgatttagccttaattttgttaaattttttagagatgaatgaagtgctgctgtggaaagaaatgtacatatactatttctgtatcattaaaattacatttttatggttc

SEQ ID NO: 185480 - DNA, 2871 bp, Artificial Sequence
  derived and/or modified sequence
atgtcctctggcctttggagtcaggagaaggtcacctcgccctactgggaggaacgaattttctatctgcttctgcaggaatgctccgtcacagataagcagacacagaaacttctcaaggttccaaagggcagtatcggtcaatacattcaggaccgttccgtcgggcattctagaattccctcggcaaaaggtaagaagaatcagataggtctaaagattctggagcagccccatgcagtgctctttgtcgacgaaaaggacgtcgtggagataaacgagaaattcacggaactgcttctggctatcacaaattgtgaggaacggttctcccttttcaaaaatcgcaacaggctctctaagggtctccaaatagacgtcggctgtccagtcaaggttcagcttcgcagcggagaagaaaaatttcctggagtcgtgcggttccgcggtcccctgttggcagagaggaccgtgtccggaatcttttttggagtggagttgttggaggaggggagaggccagggatttaccgatggcgtttaccaggggaagcagctctttcagtgtgacgaggactgcggggtgttcgtcgcgctggataagctggagctcatcgaggatgatgacacagccctggagtccgactacgctggtccgggtgacaccatgcaggtggagttgcctccgctcgagatcaacagccgggtctcgctgaaggtgggagagacgatcgagagcggtaccgtcatcttttgcgacgttctccccggcaaggaaagtctggggtacttcgtcggggtggatatggacaatccgatcggcaactgggacggtcgctttgacggtgttcagctctgctcgtttgcctgcgttgaaagtactatcctgttgcacattaacgacattatccccgccctgtctgagtcggtgactcaggaacgccgcccgcctaaacttgcatttatgagccgaggggtaggcgataaaggatcaagctcacataataagccaaaggctaccggctctacaagtgaccccggtaacagaaatagatccgagttgttttacacacttaatgggtcctctgttgactctcaacctcaaagcaagtccaagaacacctggtacatagatgaggtcgccgaggatccggccaaaagcctcacagagatctccactgattttgataggtcctcgccccccttacagcccccgcctgtcaactcattgacaaccgagaataggtttcactctctcccattctcgctcactaaaatgcccaacacgaacggctccattggtcatagccccttgtcgttgtccgcccaatccgtcatggaggaattgaatacagcacctgtgcaggagagtccgccactggcaatgcccccaggcaacagtcacgggttagaagtgggctccctcgcagaggtcaaggagaacccaccattctacggggtgattagatggattgggcaaccacctggactcaacgaggttcttgctgggctggaactcgaggacgaatgcgctggatgcaccgatggcacattcaggggcacaaggtacttcacctgcgcccttaagaaggctttattcgtgaagctgaagagctgtaggccagatagcagattcgcctccctacaacccgtttccaaccagatagagaggtgcaatagtctagcatttggaggctatctgagtgaagtagtagaggagaatactcctcctaagatggaaaaggagggtttggagatcatgattggtaaaaaaaaaggcattcaaggccattacaactcttgctacctcgattccacgctgttctgcctcttcgctttctccagcgtgctggatacagtcctgctaaggccaaaggaaaagaacgacgtagaatattactcagaaacgcaggagcttcttagaaccgagattgtgaatcctcttcgcatttacggatacgtgtgtgcaaccaagattatgaagctgcgtaagatcttagagaaagtggaagcagccagcggctttaccagcgaagagaaggatcctgaagaattcctgaatatcctcttccaccacatcctgcgagtggagcctcttcttaaaataaggtctgctggtcagaaagtgcaggactgctacttttatcagatcttcatggaaaaaaacgagaaggtgggggtgccgacaatccaacagctgttggaatggagtttcatcaactccaatctgaaattcgctgaggcaccatcctgtctgattattcaaatgcctcgtttcggaaaggactttaaactgttcaaaaaaatcttcccctctttggaattgaatataaccgacctccttgaagacactccccgacaatgccgcatctgcggcgggctcgcaatgtacgagtgccgcgagtgttacgacgacccggatattagcgctggaaagattaaacagttttgcaagacctgtaacacccaggttcatttgcaccctaagaggcttaaccacaaatataaccccgtctcattacccaaggacctaccagattgggattggcggcacggctgcatcccatgtcagaacatggaactttttgcggttttatgcatcgagacatcccactatgtggcttttgtcaaatatggcaaggacgattcagcctggctctttttcgattctatggcagacagagacggaggtcagaatggctttaacataccacaagtgaccccttgtcctgaggtgggggaatacctcaaaatgagtctggaggatttacactccctggattccaggagaattcagggttgtgcacggcgactcttatgcgacgcctatatgtgtatgtatcagtcccctaccatgtctctgtacaaatag

SEQ ID NO: 185481 - DNA, 2871 bp, Artificial Sequence
  derived and/or modified sequence
atgagctcaggcctgtggtcccaggaaaaggtgacgagcccttactgggaggagagaattttctacctcctcttgcaggagtgctctgtaacggacaagcagacgcaaaaacttctgaaggtccctaagggcagcattggacagtacatccaagataggagtgtcgggcattctagaatcccttctgcgaaggggaaaaagaaccagatcggcctgaagatacttgagcagccacacgcagtcctcttcgtagatgaaaaagatgttgtcgagatcaacgagaaattcacggagttgctgctggccatcacaaactgcgaggagcggtttagccttttcaaaaaccgcaacaggctctctaaaggcctgcagatcgacgtgggatgccctgtcaaggttcaactacggtcgggcgaagagaagtttcccggggtagtgagattccggggcccgctcttggccgaacgaactgtttcaggtatttttttcggggtggaactgcttgaagaaggccgaggccaggggttcaccgatggagtctaccaaggtaagcagctgttccagtgcgatgaagactgtggggtgtttgtggcactggacaaactcgaactgattgaggacgatgacacagccctggaaagtgactacgccgggcccggggacaccatgcaggtcgagcttcctcccctcgagatcaatagtcgtgtgtcgttaaaggtcggtgaaacaatcgaatctgggacggtgattttttgtgatgtgctccctgggaaggaatcgttaggatatttcgtgggcgtggatatggacaatcctataggcaactgggacgggcggtttgacggggtgcagctctgttcatttgcatgcgtagaaagcaccattcttctgcatatcaacgacatcatacctgcagtctcagagagtgtgacacaagaacggcgaccccccaaactcgcctttatgtcccggggagtgggggacaaggggtcatcttcccataacaagcccaaggccacggggagcacaagcgacccaggcaaccgcaacagaagtgagttgttctatactttaaacgggtctagtgtggatagccagccccaatccaaatcaaaaaacacatggtatatcgatgaggtcgcagaagatcccgcgaagagcctgactgaaatttccactgactttgatcgaagcagtcctcctctgcagcccccccccgtgaactctttgacaacagagaatcgctttcattctctgcctttcagtctcacgaaaatgccgaacacaaacgggtcaatcggtcactcacctctatcattgtccgcgcaatcagtgatggaggaattgaatactgccccagttcaagaaagtccccccctcgctatgccccctggaaacagccacggtctggaagtgggctcactcgctgaggttaaagaaaaccctcctttttatggcgtgattaggtggatcgggcagccaccaggtctgaacgaggtattagcaggcctggagctcgaggacgagtgcgcgggctgtacagacggcaccttccgaggaacccgatactttacgtgcgcgctcaaaaaggccttatttgtgaaactgaagagttgtcgccctgacagccgcttcgcaagcctccagcccgttagcaaccagatagagaggtgcaactccctggcattcggaggatatctgtccgaggtggtagaagagaacacacctcccaaaatggaaaaggaagggctggagatcatgatcggcaaaaaaaagggcatccagggccactacaattcatgctacctggattcgaccctgttctgtctttttgccttttcatccgttctcgatactgtgttacttcgcccgaaagagaagaatgatgttgagtattacagtgagacccaggagctgctccgcacagagatagtaaacccgctccgcatttatgggtacgtgtgcgcaacaaagattatgaaacttaggaaaattcttgaaaaggtggaagccgcgtcagggttcacatcagaggagaaagaccccgaggagttcctaaatatcctctttcaccacattctacgtgtggaacctcttctgaaaattcgctccgccggccagaaggttcaggactgctacttttaccagatctttatggagaagaacgaaaaggtgggcgttccaacgatccagcagttgctcgaatggagctttattaatagcaatctcaagttcgcagaagccccaagttgccttatcatacagatgcccaggtttggaaaggatttcaagcttttcaagaaaatattcccttcacttgaactgaacatcaccgacttgctagaagacaccccaagacaatgccggatctgcggaggactggccatgtacgagtgccgggaatgctatgacgacccagacatttctgctgggaaaattaaacagttctgcaagacctgcaacactcaggtgcatttgcacccaaaacgcctaaatcataaatacaatcctgtgagtttgccgaaggatttacccgactgggactggcgtcacggttgtatcccctgccagaacatggagctgttcgcagtgctgtgcattgagacctcccactatgtggccttcgttaaatatgggaaagacgattcggcttggctcttctttgacagcatggctgatagggacgggggccagaacggattcaatatcccccaggtgacgccctgtcccgaggtgggggagtacctgaagatgtcgctagaagatctacacagcctcgactcccgccgcattcaaggttgtgcccgccggctcctctgcgatgcttatatgtgcatgtaccagagccccacaatgtccctctataaatag

SEQ ID NO: 185482 - DNA, 2871 bp, Artificial Sequence
  derived and/or modified sequence
atgagcagcggcctgtggagccaggagaaggtgaccagcccctactgggaggagcgcatcttctacctgctgctgcaggagtgcagcgtgacagacaagcagacccagaagctgctgaaggtgcccaagggcagcatcggccagtacatccaggacagatctgtgggccacagccgcatccccagcgccaagggcaagaagaaccagatcggcctgaagatcctggagcagccccatgctgtgctgtttgtggatgagaaggatgtggtggagatcaatgagaagttcacagagctgctgctggccatcaccaactgtgaggagcgcttcagcctcttcaagaacagaaaccggctgagcaagggcctgcagattgatgtgggctgccctgtgaaggtgcagctgcggtctggagaggagaagtttcctggggtggtgcgcttccggggccccctgctggccgagaggacagtgtctggcatcttctttggagtggagctgctggaggagggccggggccagggcttcacagatggagtgtaccagggcaagcagctgttccagtgtgatgaggactgtggggtgtttgtggccctggacaagctggagctgattgaagatgatgacacagccctggagagtgactatgccggccctggggacaccatgcaggtggagctgccccccctggagatcaacagccgggtgtccctgaaggtgggggagaccatcgagagcggcaccgtcatcttctgtgatgtgctgcccgggaaggagagcctgggctactttgtgggcgtggacatggacaaccccatcggcaactgggatggccgctttgatggagtgcagctgtgcagctttgcctgtgtggagagcaccatcctgctgcacatcaatgacatcatcccagccctgtctgagagcgtgacccaggagcggcggccccccaagctggccttcatgagcagaggagtgggggacaagggcagcagcagccacaacaagcccaaggccaccggcagcaccagtgaccccggcaacagaaacagaagtgagctgttctacaccctgaatggcagctctgtggacagccagccccagagcaagagcaagaacacctggtacattgatgaggtggccgaggaccctgccaagagcctgacagagatcagcacagactttgacaggagcagcccccccctgcagcccccacctgtgaacagcctgaccacagaaaatcgcttccacagcctgcccttcagcctgaccaagatgcccaacaccaacggcagcatcggccacagccccctgagcctgagcgcccagagcgtgatggaggagctgaacacagcccctgtgcaggagagcccccccctggccatgcctcctggcaacagccacggcctggaggtgggcagcctggccgaggtgaaggagaacccccccttctatggagtcatccgctggattggccagcccccaggcctgaatgaggtgctggccggcctggagctggaggatgaatgtgccggctgcacagatggcaccttccggggcacccgctacttcacctgtgccctgaagaaggccctgtttgtgaagctgaagagctgcaggccagacagcagatttgccagcctgcagcctgtgagcaaccagatcgagcgctgcaacagcctggcctttggaggctacctgtctgaggtggtggaggagaacaccccacccaagatggagaaggagggcctggagatcatgattggcaagaagaagggcatccagggccactacaacagctgctacctggacagcaccctcttctgcctgtttgccttcagctctgtgctggacacagtgctgctgcggcccaaggagaagaatgatgtggagtactacagcgagacccaggagctgctgaggacagagatcgtgaaccccctgcgcatctacggctacgtgtgtgccaccaagatcatgaagctgaggaagatcctggagaaggtggaggccgccagcggcttcaccagcgaggagaaggaccctgaggagttcctgaacatcctcttccaccacatcctgcgggtggagcccctgctgaagatccgctctgctggccagaaggtgcaggactgctacttctaccagatcttcatggagaagaatgagaaggtgggcgtgcccaccatccagcagctgctggagtggagcttcatcaacagcaacctgaagtttgctgaggcccccagctgcctgatcatccagatgcccaggtttgggaaggacttcaagctgttcaagaagatcttccccagcctggagctgaacatcacagacctgctggaggacaccccccggcagtgccgcatctgtggcggcctggccatgtatgagtgcagagaatgttatgatgatcctgacatctctgctgggaagatcaagcagttctgcaagacctgcaacacccaggtgcacctgcaccccaagaggctgaaccacaagtacaaccctgtgtccctgcccaaggacctgcctgactgggactggaggcatggctgcatcccctgccagaacatggagctgtttgctgtgctgtgcatcgagaccagccactacgtggcctttgtgaagtatggcaaggatgattctgcctggctgttctttgacagcatggctgacagagatggcggccagaatggcttcaacatcccccaggtgaccccctgcccagaggtgggggagtacctgaagatgagcctggaggacctgcacagcctggacagccgccgcatccagggctgtgcccggcggctgctgtgtgatgcctacatgtgcatgtaccagagccccaccatgagcctgtacaagtag

SEQ ID NO: 185483 - DNA, 2871 bp, Artificial Sequence
  derived and/or modified sequence
atgagcagcggcctgtggagccaggagaaggtgaccagcccctactgggaggagcgcatcttctacctgctgctgcaggagtgcagcgtgacagacaagcagacccagaagctgctgaaggtgcccaagggcagcatcggccagtacatccaggacagatctgtgggccacagccgcatccccagcgccaagggcaagaagaaccagatcggcctgaagatcctggagcagccccatgctgtgctgtttgtggatgagaaggatgtggtggagatcaatgagaagttcacagagctgctgctggccatcaccaactgtgaggagcgcttcagcctcttcaagaacagaaaccggctgagcaagggcctgcagattgatgtgggctgccctgtgaaggtgcagctgcggtctggagaggagaagtttcctggggtggtgcgcttccggggccccctgctggccgagaggacagtgtctggcatcttctttggagtggagctgctggaggagggccggggccagggcttcacagatggagtgtaccagggcaagcagctgttccagtgtgatgaggactgtggggtgtttgtggccctggacaagctggagctgattgaagatgatgacacagccctggagagtgactatgccggccctggggacaccatgcaggtggagctgccccccctggagatcaacagccgggtgtccctgaaggtgggggagaccatcgagagcggcaccgtcatcttctgtgatgtgctgcccgggaaggagagcctgggctactttgtgggcgtggacatggacaaccccatcggcaactgggatggccgctttgatggagtgcagctgtgcagctttgcctgtgtggagagcaccatcctgctgcacatcaatgacatcatcccagctgtgtctgagagcgtgacccaggagcggcggccccccaagctggccttcatgagcagaggagtgggggacaagggcagcagcagccacaacaagcccaaggccaccggcagcaccagtgaccccggcaacagaaacagaagtgagctgttctacaccctgaatggcagctctgtggacagccagccccagagcaagagcaagaacacctggtacattgatgaggtggccgaggaccctgccaagagcctgacagagatcagcacagactttgacaggagcagcccccccctgcagcccccacctgtgaacagcctgaccacagaaaatcgcttccacagcctgcccttcagcctgaccaagatgcccaacaccaacggcagcatcggccacagccccctgagcctgagcgcccagagcgtgatggaggagctgaacacagcccctgtgcaggagagcccccccctggccatgcctcctggcaacagccacggcctggaggtgggcagcctggccgaggtgaaggagaacccccccttctatggagtcatccgctggattggccagcccccaggcctgaatgaggtgctggccggcctggagctggaggatgaatgtgccggctgcacagatggcaccttccggggcacccgctacttcacctgtgccctgaagaaggccctgtttgtgaagctgaagagctgcaggccagacagcagatttgccagcctgcagcctgtgagcaaccagatcgagcgctgcaacagcctggcctttggaggctacctgtctgaggtggtggaggagaacaccccacccaagatggagaaggagggcctggagatcatgattggcaagaagaagggcatccagggccactacaacagctgctacctggacagcaccctcttctgcctgtttgccttcagctctgtgctggacacagtgctgctgcggcccaaggagaagaatgatgtggagtactacagcgagacccaggagctgctgaggacagagatcgtgaaccccctgcgcatctacggctacgtgtgtgccaccaagatcatgaagctgaggaagatcctggagaaggtggaggccgccagcggcttcaccagcgaggagaaggaccctgaggagttcctgaacatcctcttccaccacatcctgcgggtggagcccctgctgaagatccgctctgctggccagaaggtgcaggactgctacttctaccagatcttcatggagaagaatgagaaggtgggcgtgcccaccatccagcagctgctggagtggagcttcatcaacagcaacctgaagtttgctgaggcccccagctgcctgatcatccagatgcccaggtttgggaaggacttcaagctgttcaagaagatcttccccagcctggagctgaacatcacagacctgctggaggacaccccccggcagtgccgcatctgtggcggcctggccatgtatgagtgcagagaatgttatgatgatcctgacatctctgctgggaagatcaagcagttctgcaagacctgcaacacccaggtgcacctgcaccccaagaggctgaaccacaagtacaaccctgtgtccctgcccaaggacctgcctgactgggactggaggcatggctgcatcccctgccagaacatggagctgtttgctgtgctgtgcatcgagaccagccactacgtggcctttgtgaagtatggcaaggatgattctgcctggctgttctttgacagcatggctgacagagatggcggccagaatggcttcaacatcccccaggtgaccccctgcccagaggtgggggagtacctgaagatgagcctggaggacctgcacagcctggacagccgccgcatccagggctgtgcccggcggctgctgtgtgatgcctacatgtgcatgtaccagagccccaccatgagcctgtacaagtag

SEQ ID NO: 185484 - DNA, 2871 bp, Artificial Sequence
  derived and/or modified sequence
atgagcagcggcctgtggagccaggagaaggtgaccagcccctactgggaagaaaggattttttacctgctgctgcaagaatgctctgtcacagataagcagactcagaagttgttgaaggtaccaaagggaagcatcggtcagtacattcaggacaggagtgtgggacatagtcgcatcccatcggccaagggcaagaagaatcaaatcggattaaagatcctcgagcagccccacgctgttttgtttgtcgatgagaaggatgtagtagagataaacgaaaagtttacggaactgctgttggcgattacgaactgtgaggagagattctccctcttcaaaaacagaaaccgcctgagtaaagggctgcagattgacgttgggtgtccagtaaaggttcaactgagaagcggcgaggaaaaatttccaggagtggtacggttccggggccctctgctagccgaacggacagtaagcggaatcttctttggcgtggaactacttgaggaaggtaggggccagggatttaccgatggcgtctaccagggtaaacaactgtttcagtgcgatgaagactgcggagtgttcgttgcactggataaacttgagttgattgaggatgacgatactgccttggagtctgattacgcagggccaggggacacaatgcaggtggaactgccccctctcgagattaatagccgcgtgagcctaaaggttggcgaaacgatcgagagtggcacggtgattttttgtgacgtcctgccgggcaaggaatccctgggttattttgttggggtcgatatggataatcctatagggaactgggatggaaggttcgatggcgtgcagctgtgtagtttcgcatgcgtcgaaagcaccatcctgctgcatataaacgacatcattcctgccctgtcggagagtgtgactcaggaaaggcgccctcctaagttggcctttatgagccgaggagtaggtgataaaggaagctcctctcataataaacccaaagccaccggtagcaccagtgatcctggtaataggaatagatcagaactgttctacacactgaacggctcctctgtggattctcagccccagtctaaatctaaaaacacatggtacattgatgaggtggccgaagatcccgccaaaagcctcaccgagatatccactgatttcgatcgctccagcccacccctccagcctccacctgtgaatagcttaactactgaaaatcggtttcactccctgccattctcactgaccaaaatgcccaacactaatggaagcattgggcactcaccactgagtcttagtgcccagtcagtgatggaggagctgaatacagcacctgtgcaggagagcccaccccttgccatgccaccaggaaattcccacggcttagaggtcggcagcctggccgaggtgaaggagaatcctcctttctacggggtaattcgttggatcgggcagcctcctgggctgaatgaagtcctggccggactggaactggaagacgaatgcgcaggctgtaccgatgggacattcaggggaacccggtatttcacttgcgctctaaaaaaggcactcttcgtgaaactgaaaagctgtcggcctgactctaggtttgcctccctgcagcccgtgtcgaatcagattgaacgctgcaattcactggctttcgggggatacctgtctgaagtggttgaggagaatactccacccaagatggagaaagaaggcttggagatcatgattggaaagaagaaaggcatccaagggcactataatagctgttacctggacagcacactcttttgtctcttcgcctttagcagcgtgctggacacggtgctactccgccccaaggaaaaaaatgacgtcgagtactatagcgaaactcaggagcttcttcggacggagatcgtaaatcccctgcgaatctatgggtacgtgtgcgccacaaagattatgaagctgcgaaaaatactggagaaggtcgaggccgccagcgggtttacaagtgaagaaaaggaccccgaggagttcttaaatatcttgttccatcacatcttgagggttgaaccactcctgaagatcagatccgcaggccaaaaagttcaggattgttatttttatcagatcttcatggaaaaaaatgagaaggtgggtgtgccaacaatccagcagctgctcgagtggtcgttcattaactcaaatctaaagttcgcggaggcacctagttgcctgatcatacagatgccccggtttgggaaagattttaagctcttcaagaaaatctttcctagtctggaacttaatatcacagaccttcttgaagacacccctcggcagtgcaggatttgtggtggactggctatgtatgaatgcagggaatgctacgacgatcctgacatcagcgctggtaagataaaacagttttgcaagacctgtaatactcaggtgcaccttcacccgaaacgcctcaaccacaagtataacccagtctccctgccaaaggacttacccgactgggactggcgacatggttgtataccatgccagaatatggaattattcgctgtgttgtgcattgaaacctcccactacgtggcctttgtgaagtatggtaaggacgattccgcttggctgttcttcgattctatggccgatcgcgatggaggacaaaatggattcaacattccgcaggtgaccccgtgtcccgaggtgggcgagtacctcaagatgagcctggaggatctgcactctcttgactctagaagaatccagggctgtgcaagaagactgttgtgcgacgcctacatgtgtatgtaccagtcccccacaatgtctctgtacaagtag

SEQ ID NO: 185485 - DNA, 2871 bp, Artificial Sequence
  derived and/or modified sequence
atgagcagcggcctgtggagccaggagaaggtgaccagcccctactgggaggagcgtatcttctatctactgttacaggagtgttcggttacggacaagcaaacccagaagctcttaaaggtgcctaaagggtcgatcggacaatatatccaagacagaagtgtgggacactctcgcatcccgtctgcaaaggggaaaaagaaccagattggacttaagatcctcgagcagccacacgccgtccttttcgtagatgagaaggacgtggtcgaaataaatgagaagtttactgagttacttctagccatcaccaattgcgaagaacgcttctccctgtttaagaataggaatcgcctaagcaagggacttcaaatcgacgtagggtgcccagtgaaggtccagctcaggagcggcgaggagaagttccctggcgtagtgcgctttcgtggcccactacttgcagagcgtaccgttagtggcatcttctttggagttgaattgctggaggaaggccgtggccaggggtttacagatggcgtgtaccaaggaaagcagctctttcagtgtgacgaggattgcggtgtatttgtggctctcgataaacttgagctcatcgaggacgatgacactgctctagaatcggactacgccggtccaggtgacacaatgcaggttgagctgccacccctggaaattaactctcgtgtctccttaaaggtgggggagaccattgagtctggtaccgttattttttgtgatgtactcccaggcaaggagagtctgggatactttgtcggcgttgatatggacaaccccattgggaattgggatgggagattcgacggagtccagctctgttccttcgcttgtgtcgaaagcaccattctcctgcacattaacgacatcattccagccgtcagtgaatcggtgacgcaggagcgtcgcccccccaaactcgcattcatgtccagaggggttggtgacaaaggcagcagctcccacaacaagcccaaagcaaccggctccacgagtgatccgggcaaccgaaatagatcagagttattctacaccctaaacgggagctcggtggactcccagccgcaatcgaagtctaagaatacatggtatatagatgaagtagcagaagatcctgcaaagagtctcactgaaataagcacagatttcgatcgaagttctcctccactacagccacctcccgttaattcgctgactacagaaaacaggtttcacagcctgccattttctttgacaaaaatgcccaataccaacggcagcattggccatagccctcttagccttagcgcccagtcagtgatggaagaactgaacaccgctcccgtgcaggaatcgccaccgcttgctatgccaccagggaatagccacgggttggaagtgggctcactcgcagaggtcaaggaaaatccgccattttacggagtaatcagatggataggtcagcccccgggtttgaacgaggtactagccggcttggagctcgaggacgaatgcgcaggttgtaccgacggaacatttagaggtacccggtatttcacgtgtgcgctgaagaaagcactgttcgtcaagcttaaaagctgccggcccgacagccgctttgcgagcctccaacctgtcagtaaccagatagaacggtgcaactcactggcgtttggggggtatctctctgaggtggttgaagaaaatacgcctccgaaaatggagaaggaaggcctggaaatcatgataggcaaaaagaaagggatccaaggtcattataactcatgctatcttgactctactctgttttgcttgttcgcctttagctccgtgcttgatacagtgcttctgaggcctaaggaaaagaatgacgtcgaatactactccgaaacgcaggagttgctgcggaccgagatagttaacccccttagaatatatgggtacgtgtgtgcgactaagattatgaagctgcggaaaattctagagaaagttgaggccgcaagtggttttacctccgaagaaaaagacccagaggaatttttgaatatcctatttcaccacatcttgcgggttgaacctttgctgaaaatccggtctgccggccaaaaggtgcaggactgttacttttatcagatttttatggaaaagaatgagaaagttggggtgccgacaatccagcagctcctcgagtggtccttcatcaattctaacttgaagtttgccgaagccccaagctgcctgatcattcagatgccaagattcggcaaagattttaaactgttcaagaagatcttcccctctctggagctaaacatcactgacttattggaagataccccccggcaatgcaggatctgtggcggcttagctatgtatgaatgtcgcgagtgctatgacgacccagacatttccgccggaaagattaaacagttctgtaaaacatgcaacactcaagtgcacctgcatcctaaaaggcttaatcataagtataacccagtatcactaccaaaggatctgccggactgggattggcggcatggttgcattccgtgtcagaacatggagctattcgccgttctttgcattgaaaccagccattatgtggcgttcgtcaagtacggaaaggatgacagcgcctggctgttttttgacagtatggcagatagggacggggggcagaacggttttaatatcccacaggtgaccccttgtcctgaagtcggtgagtatctgaagatgagtctggaagatctgcatagcctcgatagcagaagaatacaaggctgcgctagaagacttctgtgtgacgcttacatgtgtatgtaccagtctcctaccatgagcttatacaaatag

SEQ ID NO: 185486 - DNA, 2871 bp, Artificial Sequence
  derived and/or modified sequence
atgagtagcgggttatggagccaggagaaggtgaccagcccctattgggaagaacgaatcttctacttgctcctccaggagtgttctgtgacagataagcagacccagaaactcttgaaggttcctaagggcagtattggccagtacatacaagacagaagcgtaggccactctagaattccctctgccaaagggaaaaaaaaccagatcgggttgaaaatactagagcagccccatgccgtgttatttgtggacgagaaagatgtcgtagagattaacgaaaaatttaccgaactgctgcttgcaatcaccaactgtgaagaacggttttcactcttcaagaataggaatagactgtcaaagggactccagattgatgtgggctgcccagtcaaggtacagttacgatctggcgaggaaaaattcccaggcgtggtgaggtttcgcggacccctactcgcagagcgcacagtgtctgggatctttttcggggtagaactgctcgaagaaggacggggacaaggtttcacagacggcgtgtaccagggaaaacagctattccaatgcgatgaggactgcggagtctttgttgccctcgataagctggagcttattgaggatgatgacaccgcactagaaagcgactacgcaggaccaggtgacacgatgcaggtcgagctgccgcctctagagataaatagtcgagtttcactgaaggtgggcgagactatcgaaagcggtacggtaatcttctgtgacgtgctgccgggtaaagaaagtctagggtacttcgtgggagttgacatggataaccccattggcaattgggatggacgctttgatggcgtccagctgtgctccttcgcttgtgtggagtccacaattctcctccatatcaatgacatcataccggctctctccgagtctgtcacccaagagcggagacccccaaaattggcctttatgagtaggggggtaggcgacaagggatctagtagtcataacaagccaaaggcaaccggctctacttccgaccccggtaacaggaatagaagtgaactgttttatactctaaacggctcttccgtagacagtcaaccccagagtaaaagcaaaaatacatggtacattgacgaggtagccgaggatccggcaaagtcgctgactgaaatttcgactgattttgaccgatcatccccgccactccaaccgccacccgtgaattccctcaccaccgagaacagatttcacagcttacccttcagcctgacgaagatgcccaataccaatggaagtatcggacattcacccctgagcctgtcagcccagagtgtgatggaggaacttaatacagcacccgtccaggagtcaccaccactggccatgcccccaggaaatagtcacggtcttgaggtgggatcacttgctgaggttaaagagaaccctccgttctacggcgtgatccgctggataggccagccgcctggactgaatgaggtactggccggactggaactcgaggacgagtgcgctggatgcacagatggtacatttaggggaacccgctactttacatgcgcactcaaaaaggctctctttgttaaactcaaatcttgccgtccggacagtcgcttcgcctctctgcagcccgttagcaatcagatagaacgctgcaattctttggcttttggtgggtacctctcggaggtggtggaagagaacactccgcctaagatggagaaggagggtttagaaattatgatcggcaagaagaagggcatacaagggcactataattcatgttatctggatagcaccctcttttgcctgtttgccttttcatcagtgctggacacggtcttgctacggccaaaggagaagaatgacgtggaatactatagtgaaacccaagagctgctacgaaccgaaattgtcaatccattgcgaatatacgggtatgtgtgcgccaccaaaattatgaagctgcggaagatacttgagaaggttgaggccgctagcggtttcacttcagaggagaaggatccagaagaatttctcaacatactgttccatcatatactccgggtggaaccacttcttaagatccgctccgcgggtcaaaaggtccaggactgctacttctatcaaatctttatggaaaaaaatgagaaggtgggggttcctacgattcaacagctcctcgaatggagctttattaattccaacctgaaattcgctgaggcaccgagttgccttattattcaaatgccacggttcgggaaggattttaaactctttaaaaaaatttttccaagcctggagctcaatatcaccgacctcctggaagacacacccaggcagtgcaggatctgtggaggcctggctatgtatgaatgtcgggagtgttacgacgatcccgacatctctgccggtaagatcaaacagttttgtaagacgtgcaatacacaggtgcacctgcaccctaaaagactcaaccataagtacaatcctgtctctctgcccaaagaccttccagactgggactggaggcacgggtgtattccgtgccagaacatggagctattcgcggtgctgtgtatcgagacgtcacactacgtggcttttgtgaagtacggtaaagacgacagcgcctggttgttctttgacagtatggctgatcgcgacggagggcagaacgggtttaacattccgcaggttacgccctgccccgaggtgggtgagtacctgaagatgagcttggaggacctacactctctcgacagtcgtcgcattcagggttgcgccagaagattgttgtgtgatgcctacatgtgtatgtaccagtcgccaaccatgtccctgtataagtag

SEQ ID NO: 185487 - DNA, 2871 bp, Artificial Sequence
  derived and/or modified sequence
atgagctctggattatggtctcaggaaaaagtgacttcaccctactgggaagaacggatcttttacctgctgctccaagaatgctctgttaccgataagcaaacccagaagttactaaaggttccaaagggcagtattggccagtatatccaggatagatccgtcggtcacagcagaataccaagtgctaaaggcaagaagaaccaaatcggtctcaaaatcttggaacagccacacgccgtcctcttcgttgatgaaaaggacgttgtggagattaacgagaaatttactgagctacttctggcaatcacgaattgcgaggagcgcttttccctgtttaagaacagaaaccggctgtccaaaggactgcagattgatgtcggctgtcctgtgaaggtccagcttcggtctggagaagagaaattccccggagtcgttcgcttccggggtcctcttttggcagagagaaccgtgtcaggtattttctttggggtggagctcctggaggaaggcaggggccaggggtttaccgatggggtgtaccagggaaagcaattgtttcagtgtgacgaggactgtggagttttcgttgccctcgacaaactagagctgattgaggatgacgacacagccctggaaagcgattatgccggtcccggtgataccatgcaagtggaactgcccccacttgagataaacagccgcgtctctttgaaagtgggtgagacaattgaaagcgggacagtgatcttttgtgacgtcctgcctggaaaggaatcactggggtactttgtgggagtggacatggataaccccatcggaaattgggacgggaggtttgatggggttcagctatgctcctttgcgtgtgttgaatctaccatccttctgcacatcaatgatatcattcccgctgtgagcgagtctgtgactcaagaacgtagacccccaaagctggcattcatgagccggggtgtgggcgataagggcagcagttcccataataagcccaaagcgactggaagcacctctgatcccggtaataggaatcgaagtgaactgttctatactctaaatgggagctcagtggattctcagccacagtcaaaatctaagaatacatggtacatagacgaagtcgctgaggaccccgcaaagtctctcacagaaatttcaacagattttgaccgatccagcccgccactgcaacctccgcctgtcaattctctgacaaccgagaaccgattccactctctacccttctctcttaccaagatgccgaacaccaatggcagcatagggcacagcccacttagcttatccgcccagtccgtaatggaagaactgaatacggcccctgtgcaggaaagcccacctctggccatgcctcctggcaactcacacggcctcgaagtcggaagcctcgcggaagtcaaggagaatcctcccttttacggggtgatccgctggattgggcaaccacctggtcttaatgaggtcttagccggactggagttggaggacgagtgcgcgggatgcactgacggaaccttccgtggcacacgctattttacttgcgcattgaaaaaagccctgtttgtgaaactgaagagctgcagacctgactccagattcgccagcttgcagcccgtgagcaatcaaattgaacgatgcaactcactagcgttcgggggatacctctctgaagtagttgaggaaaacacaccccctaaaatggagaaggaagggctcgagataatgatcggaaaaaaaaagggtatccagggccattacaacagctgttatttggacagcaccctgttttgcctgttcgcattttcaagcgttctggacactgtcctgttgagacctaaggagaaaaacgacgtggaatattactctgagactcaagaactgttgcgtactgagatcgtcaatccactgcggatctacggatacgtgtgcgctacaaaaatcatgaaattacgcaagattctggaaaaagtggaggccgcttcaggctttacaagtgaggaaaaggatccagaagaattccttaatatcctatttcatcatatcttgcgggtggaacctctgttaaagatccggtctgcaggccagaaggtccaggactgctacttttaccagatttttatggagaaaaacgagaaagtgggggtgccaacaattcagcagctgctggagtggagcttcattaatagtaatttgaaattcgctgaggctcctagctgcctcattatacaaatgccacgctttgggaaggacttcaagctgttcaaaaaaatatttccttccctagaactgaacattacggatctgctcgaggacacaccccgacagtgccgaatttgtgggggactggccatgtatgagtgccgagaatgttacgatgaccctgacatatctgccggaaagattaagcagttctgcaaaacatgcaacacacaggtccatctgcaccccaagcgtttgaaccacaagtacaatcctgtgtctcttcccaaggatctgccagactgggactggagacatggatgtattccatgccaaaatatggaactgtttgccgtgctgtgcatagagacttctcattacgtcgcttttgtaaagtatgggaaagacgattcggcctggcttttctttgactcgatggctgaccgcgatggaggacagaatggcttcaacatcccacaagttaccccatgtcccgaagtcggagagtacctcaagatgtctctcgaagatttacactcgcttgatagtcgcaggatccagggctgcgcaagacgactgctatgcgacgcttacatgtgcatgtatcagtctcctaccatgtcgctctataaatag

SEQ ID NO: 185488 - protein, 824 aa, Artificial Sequence
  derived and/or modified sequence
MSAPSEEEEYARLVMEAQPEWLRAEVKRLSHELAETTREKIQAAEYGLAVLEEKHQLKLQFEELEVDYEAIRSEMEQLKEAFGQAHTNHKKVAADGESREESLIQESASKEQYYVRKVLELQTELKQLRNVLTNTQSENERLASVAQELKEINQNVEIQRGRLRDDIKEYKFREARLLQDYSELEEENISLQKQVSVLRQNQVEFEGLKHEIKRLEEETEYLNSQLEDAIRLKEISERQLEEALETLKTEREQKNSLRKELSHYMSINDSFYTSHLHVSLDGLKFSDDAAEPNNDAEALVNGFEHGGLAKLPLDNKTSTPKKEGLAPPSPSLVSDLLSELNISEIQKLKQQLMQMEREKAGLLATLQDTQKQLEHTRGSLSEQQEKVTRLTENLSALRRLQASKERQTALDNEKDRDSHEDGDYYEVDINGPEILACKYHVAVAEAGELREQLKALRSTHEAREAQHAEEKGRYEAEGQALTEKVSLLEKASRQDRELLARLEKELKKVSDVAGETQGSLSVAQDELVTFSEELANLYHHVCMCNNETPNRVMLDYYREGQGGAGRTSPGGRTSPEARGRRSPILLPKGLLAPEAGRADGGTGDSSPSPGSSLPSPLSDPRREPMNIYNLIAIIRDQIKHLQAAVDRTTELSRQRIASQELGPAVDKDKEALMEEILKLKSLLSTKREQITTLRTVLKANKQTAEVALANLKSKYENEKAMVTETMMKLRNELKALKEDAATFSSLRAMFATRCDEYITQLDEMQRQLAAAEDEKKTLNSLLRMAIQQKLALTQRLELLELDHEQTRRGRAKAAPKTKPATPSL

SEQ ID NO: 185489 - DNA, 2475 bp, Artificial Sequence
  derived and/or modified sequence
atgagtgctcccagtgaagaggaggaatatgcgcgcttagtgatggaagctcaacctgagtggcttagggcggaggttaagcgtctttctcatgagctggccgagacgactcgggagaagattcaagccgccgaatatgggcttgcagtgcttgaagagaagcaccagctgaagctacagtttgaggagttagaagtggactatgaggctatcagatctgagatggaacagcttaaagaggcctttgggcaggctcacactaaccacaagaaggtggcagcggatggcgaatccagggaggagtcgctgatccaggaaagtgcctcaaaagagcagtactacgtgagaaaagtcctagagttgcaaaccgagttgaagcagctgcgtaacgtactgactaacacccagtccgagaacgagcgactagcgtccgtggcacaggaattgaaagaaataaaccaaaacgtcgagatacagcgtggcaggctccgggatgacataaaggagtataagtttcgcgaagcgcggctcttgcaggactactctgagctagaggaggagaatatcagccttcagaaacaggtgagcgtcctgaggcaaaaccaagtcgaattcgagggtttgaaacatgaaatcaagcgactggaagaggaaacagagtacttaaattcacagctcgaagacgctatcagactcaaagagatctccgagcgtcagcttgaagaggctctggaaacactaaagaccgagcgggagcagaagaactcactgcggaaagagctgtcacattacatgtcaatcaatgattcgttctacacttcgcacctccatgtctcattggacggactaaagttcagcgatgacgccgcagagcctaacaatgacgccgaagctctggttaacgggtttgagcatggaggactcgcgaagctgcctctggataataaaactagcactcccaaaaaggagggtctcgcgcccccctctccttctttagtaagcgatctgctgagcgagctgaacatctccgaaatccagaaattgaagcagcagctcatgcagatggaaagagagaaggctggcctgttggctaccttgcaagatacccagaagcagctcgagcatacaagaggatctctttctgagcagcaggaaaaggttacaagactgacagagaacctcagtgctctcagaaggctccaggcttccaaagaaaggcagacagctctggataatgagaaggatcgcgattctcatgaagatggcgactactatgaggtggacattaacgggccggagattctcgcctgtaagtatcacgtggctgtggcggaagcgggcgaactgagggagcagctaaaagctctgcgctctacacatgaagccagggaagctcagcatgccgaggagaagggaaggtacgaggctgaggggcaagcgctgacggagaaagtcagcttgttggaaaaggcgtcccgtcaagatagagagttgctcgcacgacttgaaaaggagctgaagaaagtcagcgacgtggcgggagagacccagggcagcctttccgtcgcccaggatgagctggtcactttttccgaggagctggcgaatttgtaccatcacgtgtgcatgtgtaacaacgaaacccctaatcgggtcatgctcgattattatcgagagggccagggtggggccggacggacgagtcccggcggtagaacaagccccgaggcccgcgggcgtaggagtcccatcttactgcccaaggggctcttggccccggaggcaggcagagcagatgggggtaccggcgattcatctccgtccccaggctccagcctgccttctcccttgagcgaccctcggagagagccaatgaacatttataacctcatcgccataatcagggatcagatcaagcacctgcaagcggcagtagatcgtaccactgagctgagtcgccaaagaatagccagccaggaattggggccagcagttgataaggacaaggaggctttgatggaagaaattctgaaactgaagtcgcttctctctaccaagagagaacaaatcacaacattacgaactgtgctgaaagcaaacaaacagactgcggaggtggccttggcaaatttaaagagcaagtacgagaatgaaaaggctatggtgacagaaacaatgatgaagttgagaaacgaactgaaggccttgaaagaagacgcagctaccttctccagcctgcgagcaatgttcgcaacaaggtgtgacgagtatatcacgcagcttgacgagatgcaacgccaactcgccgctgccgaggacgagaaaaagaccctcaattcgctcctgaggatggctattcagcagaagcttgcactcactcagcgactggagctcctggagcttgaccatgaacagaccagacgcggtcgcgcaaaagcagcacccaagacaaagcctgcaacccctagcctgtag

SEQ ID NO: 185490 - DNA, 2475 bp, Artificial Sequence
  derived and/or modified sequence
atgtctgcccccagcgaggaggaggagtatgcccggctggtgatggaggcccagcctgagtggctgcgggcagaggtgaagaggctgagccatgagctggccgagaccacccgggagaagatccaggccgcagaatatggcctggccgtgctggaggagaagcaccagctgaagctgcagtttgaggagctggaggtggactatgaggccatccgctctgagatggagcagctgaaggaggccttcggccaggcccacaccaaccacaagaaggtggccgcagatggagagagccgggaggagagcctcatccaggagagcgccagcaaggagcagtactacgtgaggaaggtgctggagctgcagacagagctgaagcagctgagaaatgtgctgaccaacacccagagtgaaaatgaaaggctggcctctgtggcccaggagctgaaggagatcaaccagaatgtggagatccagaggggccgcctgagagatgacatcaaggagtacaagttccgggaggcccggctgctgcaggactacagcgagctggaggaggagaacatcagcctgcagaagcaggtgtctgtgctgcggcagaaccaggtggagtttgagggcctgaagcatgagatcaagaggctggaggaggagacagagtacctgaacagccagctggaggatgccatccggctgaaggagatcagcgagcggcagctggaggaggccctggagaccctgaagacagagcgggagcagaagaacagcctgaggaaggagctgagccactacatgagcatcaatgacagcttctacaccagccacctgcacgtgtccctggatggcctgaagttcagtgatgatgctgctgagcccaacaatgatgctgaggccctggtgaatggatttgaacatggaggcctggccaagctgcccctggacaacaagaccagcacccccaagaaggagggcctggccccacccagccccagcctggtgtctgacctgctgtctgagctgaacatcagcgagatccagaagctgaagcagcagctgatgcagatggagcgggagaaggccggcctgctggccaccctgcaggacacccagaagcagctggagcacacccggggcagcctgtctgagcagcaggagaaggtgacccggctgacagagaacctgagcgccctgcggcggctgcaggccagcaaggagcggcagacagccctggacaatgagaaggaccgggacagccatgaagatggagactactatgaggtggacatcaatggacctgagatcctggcctgcaagtaccacgtggccgtggccgaggccggggagctgcgggagcagctgaaggccctgcggagcacccatgaggcccgggaggcccagcacgccgaggagaagggccgctatgaggccgagggccaggccctgacagagaaggtgtccctgctggagaaggccagccggcaggaccgggagctgctggcccggctggagaaggagctgaagaaggtgtctgatgtggccggggagacccagggcagcctgtctgtggcccaggatgagctggtgaccttcagcgaggagctggccaacctgtaccaccacgtgtgcatgtgcaacaatgagacccccaacagagtgatgctggactactaccgggagggccagggcggggccggccgcaccagccctgggggccgcaccagccctgaggcccggggccgccgcagccccatcctgctgcccaagggcctgctggcccctgaggccggccgggcagatggcggcaccggggacagcagccccagccctggcagcagcctgcccagccccctgagtgacccccggcgggagcccatgaacatctacaacctgattgccatcatccgggaccagatcaagcacctgcaggccgctgtggacaggaccacagagctgagccggcagagaattgccagccaggagctgggccctgctgtggacaaggacaaggaggccctgatggaggagatcctgaagctgaagagcctgctgagcaccaagcgggagcagatcaccaccctgaggacagtgctgaaggccaacaagcagacagctgaggtggccctggccaacctgaagagcaaatatgaaaatgagaaggccatggtgacagagaccatgatgaagctgagaaatgagctgaaggccctgaaggaggatgctgccaccttcagcagcctgcgggccatgtttgccacccgctgtgatgagtacatcacccagctggatgagatgcagaggcagctggccgctgctgaagatgagaagaagaccctgaacagcctgctgaggatggccatccagcagaagctggccctgacccagaggctggagctgctggagctggaccacgagcagacccggcggggccgggccaaggccgcccccaagaccaagccagccacccccagcctgtag

SEQ ID NO: 185491 - DNA, 2475 bp, Artificial Sequence
  derived and/or modified sequence
atgagcgcccccagcgaggaggaggagtacgcccggctggtgatggaagcacagcccgagtggctccgcgcagaagtgaagagactgtcccacgagctggccgaaaccacccgagagaagattcaagctgctgagtacggtctagccgtgctggaagagaagcaccagttgaagttgcagttcgaagagttggaggtagactacgaggctatccgttccgagatggaacagctgaaggaggcctttggccaggcccacactaaccacaaaaaggtcgccgccgatggagagtcacgagaagagtcacttattcaggaatcagctagcaaagaacagtattacgtccgcaaagttctcgaactgcagacagaactcaagcaacttcgaaacgtgctcaccaatacacagtctgagaacgaacgcttagctagcgtcgcccaggaactgaaggaaatcaatcagaacgtcgagatccagaggggtcggctgagggatgacattaaagagtacaagttcagagaagcccgcctcctccaagattattcggagctagaggaagagaacatcagcctgcagaagcaggtgagtgtgctccgacagaaccaggtcgaattcgagggactgaagcacgagattaagaggctcgaggaggagacagagtatctgaactcccaacttgaagacgctattcgactaaaggaaatctccgaaaggcaattagaggaagccctcgaaactctgaagacggaacgggaacaaaaaaactccctgcgaaaagagctgtcccactacatgtccattaatgactcattttatacctcgcacctccatgttagtctcgatgggctgaaattcagtgacgacgccgccgaacctaataacgatgcggaagcgctagtgaatggttttgagcatgggggtctggctaagctgccactggataacaagaccagcactccaaaaaaggaaggcctggctccgccatcaccctccttggtgtccgacttgttatctgaactgaacatttctgaaatccagaagctaaaacagcaactaatgcagatggaaagagaaaaggctggcctcctggccaccctccaagacacgcagaaacaactggagcataccaggggctcactaagtgaacagcaggaaaaggtgacacgtctcacagagaatctgtcagccttgcgtcgcttgcaggcttctaaagaaagacagacagctcttgataacgagaaggatagagacagccatgaagatggtgattattacgaagtcgacattaatgggcccgaaattctggcatgtaagtatcatgtggcggtcgccgaggccggtgagctgcgtgagcagctgaaggccctcaggtcaactcacgaggcacgggaagcccaacacgcggaggagaaaggcagatacgaagccgaaggtcaggccttgaccgaaaaagtgagcctccttgaaaaggccagtcgtcaagatagggaactgttagcccggctggaaaaggagctgaagaaagtgtctgatgttgccggagaaacacagggatccctttctgtggcccaggacgaactggtcacattctccgaagaactcgcgaacctgtaccaccacgtgtgtatgtgcaacaacgaaaccccgaatcgggtcatgctcgattattatcgtgaggggcaaggaggtgcaggacgtacatccccaggtggcaggacctctccggaggcgcggggacggcggagtcctattctgctgcccaaaggactcctcgctcctgaggcgggtagggctgatggcggcacaggggactcttcccccagcccagggagtagcttaccgtcacccttgtcagaccctcggcgggaacctatgaatatctataatcttattgccattatccgggatcagataaaacacctacaggcggccgtcgaccggacaaccgaattaagccggcaaaggatagcaagccaggagttaggaccggccgtggacaaagacaaggaagccttgatggaggagattctgaaattaaagagtctccttagcaccaagagagagcaaattacaaccctgagaaccgttctgaaggctaacaagcagactgcagaggtggccctagccaacctaaagtctaaatacgagaacgaaaaggcaatggtgaccgaaactatgatgaagctgagaaacgaacttaaggcattgaaggaagatgccgccactttctcatccctgcgcgcaatgttcgctactcgttgtgatgagtacattacacagctcgacgaaatgcaacggcagttagctgccgccgaggacgagaagaagaccctgaactcgttgttgagaatggctatccaacagaaactggctctcacacagagactcgaactgcttgagctggatcacgaacagacgaggcgtggacgcgctaaagcagcaccaaagactaagccggctactccttctctgtag

SEQ ID NO: 185492 - DNA, 2475 bp, Artificial Sequence
  derived and/or modified sequence
atgtccgctccaagtgaggaggaggagtatgccagactggtgatggaggcgcagccggagtggctgcgggcagaggtgaaacgtctttcccacgagcttgctgaaactacccgagagaagatccaggccgcagagtacggattagcagtcttagaggaaaagcatcagcttaagctccagtttgaggagctggaggttgattatgaggctatccggagcgaaatggagcaacttaaggaggccttcggccaggcacacactaaccacaaaaaggtggccgcagacggcgagtcccgtgaagagtctctgatccaagaaagcgcgtctaaggagcaatactatgtgcggaaagttctagagttacaaactgaactcaagcagctgcggaatgtgctaaccaacacccagagtgagaacgagagactggccagtgttgcacaggaactcaaggagattaaccagaatgtggagatacagaggggacgtcttagggacgacattaaagagtacaaatttcgggaggcgagactgttgcaggactacagtgaactcgaggaagagaacatctcactgcagaagcaggtgagcgtgctccggcagaatcaagtggaattcgaagggctgaaacacgaaatcaaacggctggaggaggagaccgagtacctgaactcgcagcttgaagatgctattcgacttaaggaaatttcagagcgacagctagaggaggcactggagaccctcaaaacggagcgtgagcagaagaattcactgaggaaggaactgagccattacatgtcaatcaatgactccttctataccagccatctccacgtgtcgcttgacggcctcaaattttctgatgatgcagccgagccaaataacgacgctgaggcactcgtcaacggcttcgagcacgggggtctggccaaactgccgctggataataaaacatcaacacctaagaaggaggggctggcacccccatcaccctccctggtgtctgaccttctctcagaactcaatatttcagagattcagaagctgaagcaacaactcatgcagatggaaagagaaaaggccggattactagccacactgcaggatacacagaagcaactcgagcacacccgaggctccctgtcagaacagcaggaaaaggtgacgcgactgacagagaatctgagcgcgctaaggcgactgcaggccagtaaggaaaggcagactgccctggacaatgagaaggatcgagatagtcacgaggacggcgactattacgaagtggacatcaacgggccagaaatccttgcatgtaagtatcacgtggccgtggcagaagccggtgagctaagggagcagctcaaggctcttagatcaactcatgaagcccgtgaggcccagcacgccgaggagaaaggcagatatgaagccgagggtcaggcccttactgagaaagtgagtctgctagaaaaagccagtaggcaggaccgcgagttgctcgctcggctggagaaagagttgaaaaaggtcagtgacgttgccggtgaaactcaggggtccctatccgttgcccaagatgagcttgtcacgttcagcgaggagttggcgaatctctatcaccacgtgtgcatgtgcaataacgagacgcctaaccgcgtaatgctagattactaccgggagggccaggggggagcgggtcggacgagccccggtgggcgtacttcccccgaagcccgagggaggcgtagccccatcctgttgcctaaggggcttttagcccctgaagctgggcgagccgacggcggtacaggggactcttcgccctcccctggtagttcccttcccagtccactgtctgacccacggagggagccaatgaacatttacaatttaatcgcaattatacgagatcagatcaaacatctgcaggccgctgttgaccgcaccactgagttgagccgccagcgcatcgcatctcaggaactgggcccagctgtggataaggataaggaagccctcatggaggagattcttaagctcaaatctctgctatccacaaagagagagcagataacaacactccgtacagtgctgaaggccaacaaacagacagccgaagtggctctggccaatctgaaaagtaagtacgagaatgaaaaggcaatggtaactgaaaccatgatgaagctgcgcaacgagttgaaagcattgaaggaggatgctgcaacattttcaagcctccgggcaatgttcgccacacgctgcgacgaatacataacacagctggacgagatgcagcgccagcttgccgctgccgaagatgaaaagaaaaccctgaactccttgttgagaatggccattcagcagaagctagcactcacccaacggctagagttgctcgaactcgatcacgaacaaactaggcggggtagagctaaggccgcaccaaaaactaaacctgccacacccagcctgtag

SEQ ID NO: 185493 - DNA, 4636 bp, Artificial Sequence
  derived and/or modified sequence
gcggcggcggctgaggagggcccggcctgcgagagcctcagtgggagccggctcagccctcggccaccatgtcggcgccgtcggaggaggaggagtacgcgcggctggtgatggaggcgcagccggagtggctgcgcgccgaggtgaagcggctgtcccacgagctggccgagaccacgcgtgagaagatccaggcggccgagtacgggctggcggtgctcgaggagaagcaccagctcaagctgcagttcgaggagctcgaggtggactatgaggctatccgcagcgagatggagcagctcaaggaggcctttggacaagcacacacaaaccacaagaaggtggctgctgacggagagagccgggaggagagcctgatccaggagtcggcctccaaggagcagtactacgtgcggaaggtgctagagctgcagacggagctgaagcagttgcgcaatgtcctcaccaacacgcagtcggagaatgagcgcctggcctctgtggcccaggagctgaaggagatcaaccagaatgtggagatccagcgtggccgcctgcgggatgacatcaaggagtacaaattccgggaagctcgtctgctgcaggactactcggaactggaggaggagaacatcagcctgcagaagcaagtgtctgtgctcagacagaaccaggtggagtttgagggcctcaagcatgagatcaagcgtctggaggaggagaccgagtacctcaacagccagctggaggatgccatccgcctcaaggagatctcagagcggcagctggaggaggcgctggagaccctgaagacggagcgcgaacagaagaacagcctgcgcaaggagctgtcacactacatgagcatcaatgactccttctacaccagccacctgcatgtctcgctggatggcctcaagttcagtgacgatgctgccgagcccaacaacgatgccgaggccctggtcaatggctttgagcacggcggcctggccaagctgccactggacaacaagacctccacgcccaagaaggagggcctcgcaccgccctcccccagcctcgtctccgacctactcagtgagctcaacatctctgagatccagaagctgaagcagcagctgatgcagatggagcgggaaaaggcgggcctgctggcaacgctgcaggacacacagaagcagctggagcacacgcggggctccctgtcagaacagcaggagaaggtgacccgcctcacagagaatctgagtgccctgcggcgcctgcaggccagcaaggagcggcagacagccctggacaacgagaaggaccgtgacagccatgaggatggggactactacgaggtggacatcaacgggcctgagatcttggcctgcaagtaccatgtggctgtggctgaggctggcgagctccgcgagcagctcaaggcactgcgcagcacgcacgaggctcgtgaggcccagcacgccgaggagaagggccgctatgaggctgagggccaggcactcacggagaaggtctccctgctagagaaggccagccgccaggaccgcgagctgctggcccggctggagaaggagctaaagaaggtgagcgacgtcgccggcgagacacagggcagcctgagtgtggcccaggatgagctggtgaccttcagtgaggagctggccaatctctaccaccacgtgtgcatgtgcaacaatgagacacccaaccgtgtcatgctggactactaccgcgagggccagggcggggccggccgcaccagtcccgggggccgcaccagccccgaggcgcgtggccggcgctcacccatcctcctacccaaggggctgctggctcctgaggcgggccgagcagatggtgggacgggggacagcagcccctcgcctggctcctcactgccatcacccctgagtgacccacgccgggagcccatgaacatctacaacctgatcgctatcatccgtgaccagatcaagcacctgcaggcagccgtggaccgcaccacggagctgtcacgccagcgcattgcctctcaggagctgggccccgccgtggacaaggacaaggaagcgcttatggaggagatcctcaagctgaagtcgctgctcagcaccaagcgggagcagatcaccacgctgcgcactgtgctcaaggccaacaagcagacggccgaggtggcccttgccaacctgaagagcaagtatgagaatgagaaggccatggttaccgagaccatgatgaagctgcgcaatgagctcaaggccctcaaggaggacgcagccaccttctcctcgctgcgtgctatgtttgccaccaggtgtgacgagtacattacacagctggatgagatgcagcggcagctggcggctgctgaggacgagaagaagacgctgaactcgctgctgcgcatggccatccagcagaagctggcgctgacccagcggctggagctgctcgagctggaccatgagcagacccggcgtggccgtgccaaagccgccccgaagaccaagccagccacaccgagcctgtagagtagctgccaggaggacttggccacccggccctgtcacactgcagccccttccccttccctctcgtggcccacaaggaggaaggaagggcaacctaaaagcccacttagaaactttttggatatgccactgcaattcttttcaaaatagcattccccaggtttttaatgggaggaaaaaaagctttaatgttgagcatgctgcgagctgctgcgtggaaaggcctctgtatgggccgaagacccttcttccctggctgccaggctcgccaggagcccactggaaacgcccaccacgggggctccttgttacacatgttctttttttatccgatcaacctgtgcacttttgatattttgatattatatttgcttccttaattcctcgcgtagagacggtctcaggtgccgtggtctatgctcgtggtcctgtagctgtccgcctcagctcccaccgtgtttgtctggtgtcagcacgaggcagagctgtgtgctccatagcgtgtagctttagactcggagatgagtgctttgacccagcgaggagctcagctaagtgtatccacgctgtggttcagcagcctttagatcatacggcattgtggttcatgtttgaaattacagattttaaatgccatgttcattaagaaatccagggtattcagattctggggtttttcatattgtattattattattcttaggaatagttcaatgtaacaagaagaaaacttgacctttgctctggttaaaacagtaataggcacttgaaaaaaaaagataaattattgaatgagtagtattacctacaaattccagaattttctgggttttaggacgttgtgaagcatgactgattaacagaattttatacaactgtaccaataaaattccaaattggaattgttttgttactctggttgttgtgccaaattgtggtacacttagaaaattctacagtcgtcgatttttagggtgttctctttcaacacctttttgttagtaatcattgccagtagtgccttcatcagttaagggaggtgtcccagcacagatcattctcaaaagcgagcagggaagagctagtgggcatgctgaaggccagcgtggacagcaggtgaggcaggtgctcctcacacccagacctgggcatcttcattgagggaaagaaaacagtcattgtgcaaaattctgttagtcagtgattctttacttgcaaattcaggggcttagaaaatgaaagcaaacacaaaaccttgagtgtgctttgggaaccaaatggaccttctgggacaagctgagcaagctgtatgaacgccacgtttgtgaagagctgagggtatcaggagggccgacgctgtgttggcatgcgcagtaggggatgagggttagccatagtattctttgcaaatgtgaaagcgagacattatatcttctcttgcttggtgtaactaatcactgttaatttcaggaaacagaactcattaaaactccttagcaaaccaggtctacatcctgttttgtttgctgagtgaggttagtgggagtggtcaaattggtactcttggaggaagaaaaactgtccttccttctccaaaaaaggaaaaattataataatataaatgacaaaaataaaagaattctgtttcctggaataagcatttcttattcctagttgtagggactcctatttttaccttccgttacagtgttgattcataagaaatattgttacatttgagataacttcatctgtatggggtatttatttgcaatgatgtctgagtactgtattttttctgtgcattaccttagtgtcagaatgttggtctttattttaaagtcatatgcatgttctcctgccaaggaacctttacacagacccaaacaaaaaaataataatcaaatgccttcaatttctgagaaaatgaggcagagcatggaaaaggaataggaaggagaaattaattgagattttcaggacacagacatatgatgtgaatgcctacaaagccagtgcgcataggaacagtgggcctgggtaaagagtcacattggtaggaccaataaagaataataaaaagacaaagcaca

SEQ ID NO: 185494 - DNA, 2475 bp, Artificial Sequence
  derived and/or modified sequence
atgagcgcccccagcgaggaggaggagtacgccagactggtgatggaggcccagcccgagtggctgagagccgaggtgaagagactgagccacgagctggccgagaccaccagagagaagatccaggccgccgagtacggcctggccgtgctggaggagaagcaccagctgaagctgcagttcgaggagctggaggtggactacgaggccatcagaagcgagatggagcagctgaaggaggccttcggccaggcccacaccaaccacaagaaggtggccgccgacggcgagagcagagaggagagcctgatccaggagagcgccagcaaggagcagtactacgtgagaaaggtgctggagctgcagaccgagctgaagcagctgagaaacgtgctgaccaacacccagagcgagaacgagagactggccagcgtggcccaggagctgaaggagatcaaccagaacgtggagatccagagaggcagactgagagacgacatcaaggagtacaagttcagagaggccagactgctgcaggactacagcgagctggaggaggagaacatcagcctgcagaagcaggtgagcgtgctgagacagaaccaggtggagttcgagggcctgaagcacgagatcaagagactggaggaggagaccgagtacctgaacagccagctggaggacgccatcagactgaaggagatcagcgagagacagctggaggaggccctggagaccctgaagaccgagagagagcagaagaacagcctgagaaaggagctgagccactacatgagcatcaacgacagcttctacaccagccacctgcacgtgagcctggacggcctgaagttcagcgacgacgccgccgagcccaacaacgacgccgaggccctggtgaacggcttcgagcacggcggcctggccaagctgcccctggacaacaagaccagcacccccaagaaggagggcctggccccccccagccccagcctggtgagcgacctgctgagcgagctgaacatcagcgagatccagaagctgaagcagcagctgatgcagatggagagagagaaggccggcctgctggccaccctgcaggacacccagaagcagctggagcacaccagaggcagcctgagcgagcagcaggagaaggtgaccagactgaccgagaacctgagcgccctgagaagactgcaggccagcaaggagagacagaccgccctggacaacgagaaggacagagacagccacgaggacggcgactactacgaggtggacatcaacggccccgagatcctggcctgcaagtaccacgtggccgtggccgaggccggcgagctgagagagcagctgaaggccctgagaagcacccacgaggccagagaggcccagcacgccgaggagaagggcagatacgaggccgagggccaggccctgaccgagaaggtgagcctgctggagaaggccagcagacaggacagagagctgctggccagactggagaaggagctgaagaaggtgagcgacgtggccggcgagacccagggcagcctgagcgtggcccaggacgagctggtgaccttcagcgaggagctggccaacctgtaccaccacgtgtgcatgtgcaacaacgagacccccaacagagtgatgctggactactacagagagggccagggcggcgccggcagaaccagccccggcggcagaaccagccccgaggccagaggcagaagaagccccatcctgctgcccaagggcctgctggcccccgaggccggcagagccgacggcggcaccggcgacagcagccccagccccggcagcagcctgcccagccccctgagcgaccccagaagagagcccatgaacatctacaacctgatcgccatcatcagagaccagatcaagcacctgcaggccgccgtggacagaaccaccgagctgagcagacagagaatcgccagccaggagctgggccccgccgtggacaaggacaaggaggccctgatggaggagatcctgaagctgaagagcctgctgagcaccaagagagagcagatcaccaccctgagaaccgtgctgaaggccaacaagcagaccgccgaggtggccctggccaacctgaagagcaagtacgagaacgagaaggccatggtgaccgagaccatgatgaagctgagaaacgagctgaaggccctgaaggaggacgccgccaccttcagcagcctgagagccatgttcgccaccagatgcgacgagtacatcacccagctggacgagatgcagagacagctggccgccgccgaggacgagaagaagaccctgaacagcctgctgagaatggccatccagcagaagctggccctgacccagagactggagctgctggagctggaccacgagcagaccagaagaggcagagccaaggccgcccccaagaccaagcccgccacccccagcctgtag

SEQ ID NO: 185495 - protein, 575 aa, Artificial Sequence
  derived and/or modified sequence
MAKPFFRLQKFLRRTQFLLFFLTAAYLMTGSLLLLQRVRVALPQGPRAPGPLQTLPVAAVALGVGLLDSRALHDPRVSPELLLGVDMLQSPLTRPRPGPRWLRSRNSELRQLRRRWFHHFMSDSQGPPALGPEAARPAIHSRGTYIGCFSDDGHERTLKGAVFYDLRKMTVSHCQDACAERSYVYAGLEAGAECYCGNRLPAVSVGLEECNHECKGEKGSVCGAVDRLSVYRVDELQPGSRKRRTATYRGCFRLPENITHAFPSSLIQANVTVGTCSGFCSQKEFPLAILRGWECYCAYPTPRFNLRDAMDSSVCGQDPEAQRLAEYCEVYQTPVQDTRCTDRRFLPNKSKVFVALSSFPGAGNTWARHLIEHATGFYTGSYYFDGTLYNKGFKGEKDHWRSRRTICVKTHESGRREIEMFDSAILLIRNPYRSLVAEFNRKCAGHLGYAADRNWKSKEWPDFVNSYASWWSSHVLDWLKYGKRLLVVHYEELRRSLVPTLREMVAFLNVSVSEERLLCVENNKEGSFRRRGRRSHDPEPFTPEMKDLINGYIRTVDQALRDHNWTGLPREYVPR

SEQ ID NO: 185496 - DNA, 1728 bp, Artificial Sequence
  derived and/or modified sequence
atggccaagcccttcttcagactgcagaagttcctgagaagaacccagttcctgctgttcttcctgaccgccgcctacctgatgaccggcagcctgctgctgctgcagagagtgagagtggccctgccccagggccccagagcccccggccccctgcagaccctgcccgtggccgccgtggccctgggcgtgggcctgctggacagcagagccctgcacgaccccagagtgagccccgagctgctgctgggcgtggacatgctgcagagccccctgaccagacccagacccggccccagatggctgagaagcagaaacagcgagctgagacagctgagaagaagatggttccaccacttcatgagcgacagccagggcccccccgccctgggccccgaggccgccagacccgccatccacagcagaggcacctacatcggctgcttcagcgacgacggccacgagagaaccctgaagggcgccgtgttctacgacctgagaaagatgaccgtgagccactgccaggacgcctgcgccgagagaagctacgtgtacgccggcctggaggccggcgccgagtgctactgcggcaacagactgcccgccgtgagcgtgggcctggaggagtgcaaccacgagtgcaagggcgagaagggcagcgtgtgcggcgccgtggacagactgagcgtgtacagagtggacgagctgcagcccggcagcagaaagagaagaaccgccacctacagaggctgcttcagactgcccgagaacatcacccacgccttccccagcagcctgatccaggccaacgtgaccgtgggcacctgcagcggcttctgcagccagaaggagttccccctggccatcctgagaggctgggagtgctactgcgcctaccccacccccagattcaacctgagagacgccatggacagcagcgtgtgcggccaggaccccgaggcccagagactggccgagtactgcgaggtgtaccagacccccgtgcaggacaccagatgcaccgacagaagattcctgcccaacaagagcaaggtgttcgtggccctgagcagcttccccggcgccggcaacacctgggccagacacctgatcgagcacgccaccggcttctacaccggcagctactacttcgacggcaccctgtacaacaagggcttcaagggcgagaaggaccactggagaagcagaagaaccatctgcgtgaagacccacgagagcggcagaagagagatcgagatgttcgacagcgccatcctgctgatcagaaacccctacagaagcctggtggccgagttcaacagaaagtgcgccggccacctgggctacgccgccgacagaaactggaagagcaaggagtggcccgacttcgtgaacagctacgccagctggtggagcagccacgtgctggactggctgaagtacggcaagagactgctggtggtgcactacgaggagctgagaagaagcctggtgcccaccctgagagagatggtggccttcctgaacgtgagcgtgagcgaggagagactgctgtgcgtggagaacaacaaggagggcagcttcagaagaagaggcagaagaagccacgaccccgagcccttcacccccgagatgaaggacctgatcaacggctacatcagaaccgtggaccaggccctgagagaccacaactggaccggcctgcccagagagtacgtgcccagatag

SEQ ID NO: 185497 - DNA, 1728 bp, Artificial Sequence
  derived and/or modified sequence
atggctaaacctttttttcgcctccagaagttcctcaggagaacacagttcctgcttttttttctgactgctgcgtatcttatgacagggtccctgctgctgttgcagagggtgagggtggcgctccctcaaggccctcgcgcgcctggaccgctccaaactctgccagtcgcggccgtagccctcggtgtgggtctgcttgattctagggccctgcatgacccccgggtcagccccgagctgttattaggcgttgacatgctgcagagccccctcactcgcccgaggcccggtcctcgctggctccggtccaggaactcagaactgcgccagctgcgcaggcgatggttccatcatttcatgtcagacagccaggggcctccggcgctgggtcccgaagccgcccgccccgctatccacagtaggggaacttacatcggctgtttcagcgacgacggtcacgagcggactctgaaaggtgcagtgttttacgatctgagaaaaatgacagtctcccactgccaagacgcctgtgccgagcgttcttatgtgtatgccggactcgaagcgggtgcagagtgctattgtggcaacagactgccagcagttagtgtgggtttagaggagtgtaaccacgagtgtaaaggcgaaaaaggcagcgtctgcggtgctgttgaccggttgagtgtgtatagggtcgacgaactgcagcctggtagcaggaaacgcagaacagccacctatcgggggtgttttcgactgccagagaacatcactcatgcattcccatcctctctgattcaggcgaatgtcactgtggggacttgtagcggattttgttctcagaaggagtttcccctagccatcctgcgcggctgggagtgttactgcgcgtatcctacacccaggttcaacctgagagatgccatggacagctccgtctgcggacaagatccagaagcccagaggctggcggagtattgtgaggtgtaccagaccccggtgcaggacacaaggtgcacggaccggcggttcctccctaataagtctaaggtgtttgtggccttgagcagcttccctggcgccggaaatacgtgggcgagacacctcattgagcatgccaccggtttttatacgggatcctattactttgacggcacgctctataacaagggcttcaagggcgagaaggatcattggcgatcacgacgcacaatctgtgtgaaaacacatgagtcaggccggagagagatcgaaatgttcgactcagccatcctattgatccgcaatccgtatagatctctagtcgctgaattcaataggaagtgtgccggccacctcggctacgcagctgatcggaactggaagtcgaaagagtggccggactttgtgaatagctacgcctcgtggtggtcaagtcatgtgctggactggttaaagtacggcaagcgcctcttggtcgtgcattatgaggaattgcgacgatctttggttcctactctcagggaaatggtcgcctttctgaatgttagtgtgtctgaggagcggctgctatgtgtggaaaacaataaggaagggtccttccgaaggcggggtcgtcgtagccatgacccagagccattcacccccgaaatgaaggatctgataaacggatacatcagaaccgtggaccaagcccttagagaccataattggacaggattaccaagggagtatgtccccaggtag

SEQ ID NO: 185498 - DNA, 1728 bp, Artificial Sequence
  derived and/or modified sequence
atggccaaaccgtttttcaggttgcagaagtttttacggcgcacacagttcctgctgttcttccttaccgccgcatacttgatgactggatctttgttgctactgcaaagagtgcgtgtggcgcttcctcagggaccaagagcccccgggccactccaaaccctaccggtcgcagccgtcgcactcggcgtaggcctacttgatagccgagctctccacgaccctcgggtctcgcctgagcttttattgggggtggatatgctgcagtctcccctgaccaggccgaggcccgggcccagatggctaaggagtagaaactcagagcttcggcagctacgtagacgctggtttcatcacttcatgtccgactcacagggcccacccgcactgggccccgaagccgcgagacccgctatccacagtaggggcacttacatcggatgcttttctgacgacggacatgagcggactctaaagggcgctgtgttctatgatctgaggaagatgaccgttagccattgccaagatgcatgtgcggagcgttcatatgtgtatgccggcctggaggctggagctgagtgctactgtgggaatcgccttcccgccgtctctgtaggcctggaagagtgtaaccacgagtgtaaaggcgagaaagggtcagtgtgcggcgcggtggacagactgagcgtttaccgagtcgatgagcttcagcccggatcccgcaagcgtcgaaccgctacttatcgtggatgtttccgacttccagagaacatcactcacgcgtttcctagctcactgatccaagctaatgtcaccgtaggaacttgctccggattctgctcccagaaggaatttccactggcaatattgaggggctgggaatgttattgcgcctaccccacaccgaggttcaaccttcgcgacgctatggatagctccgtttgcggacaggatccggaagcgcaaagactggcagagtactgcgaggtgtaccagacccctgttcaggacacaaggtgtacagacaggcgatttctgcctaataagtccaaggtcttcgtggccctcagcagcttcccaggcgctggcaatacgtgggccagacatctgattgagcacgctacaggcttttacactggcagttattactttgacggcacattgtacaacaaagggtttaaaggagaaaaggatcactggcgtagtcggcggaccatctgtgtcaagactcatgagagcggtcgccgcgaaatcgaaatgttcgacagtgcaatccttctgattcgtaacccttatcgaagcctggttgccgaattcaaccggaagtgtgcaggccacttaggttacgctgccgatcgaaattggaaatcgaaagaatggcccgattttgtaaactcttacgcatcttggtggtcttcccacgtgctcgactggctgaaatatggaaaacgcctcttagtggttcactatgaagagctgcgccgcagcctggtgcctacactcagggaaatggtcgcctttctgaacgtctctgtttctgaagagaggctgttgtgtgtggagaataataaagaagggtccttcagaagacgtggaagacgctctcacgatcctgaaccctttacacccgaaatgaaggacctgataaatggttatataaggactgtggatcaggcactgagagaccataactggacaggcctgccccgagagtacgtaccccggtag

SEQ ID NO: 185499 - DNA, 1728 bp, Artificial Sequence
  derived and/or modified sequence
atggccaagcccttcttccggctgcagaagttcctgcggaggacccagttcctgctcttcttcctgacagctgcctacctgatgacaggcagcctgctgctgctgcagagggtgcgggtggccctgccccagggcccccgggcccctggccccctgcagaccctgcctgtggccgctgtggccctgggcgtgggcctgctggacagccgggccctgcatgacccccgggtgtccccagagctgctgctgggcgtggacatgctgcagagccccctgacccggcccaggcctggcccccgctggctgcggagcagaaattctgagctgcggcagctgcggcggcgctggttccaccacttcatgtctgacagccagggccccccagccctgggccctgaggccgcccggcctgccatccacagccggggcacctacatcggctgcttcagtgatgatggccacgagaggaccctgaagggagctgtgttctatgacctgaggaagatgacagtgagccactgccaggatgcctgtgccgagaggagctatgtgtatgccggcctggaggccggggctgagtgctactgcggcaaccggctgcctgctgtgtctgtgggcctggaggagtgcaaccatgaatgtaaaggagagaagggctctgtgtgtggggctgtggaccggctgtctgtgtacagagtggatgagctgcagcccggcagcaggaagagaagaacagccacctaccggggctgcttccggctgcctgagaacatcacccacgccttccccagcagcctcatccaggccaacgtgacagtgggcacctgcagcggcttctgcagccagaaggagttccccctggccatcctgcggggctgggagtgctactgtgcctaccccaccccccgcttcaacctgagagatgccatggacagctctgtgtgtggccaggaccctgaggcccagaggctggccgagtactgtgaggtgtaccagacccctgtgcaggacacccgctgcacagaccggcgcttcctgcccaacaagagcaaggtgtttgtggccctgagcagcttccctggggccggcaacacctgggcccggcacctgattgaacatgccaccggcttctacacaggcagctactactttgatggcaccctgtacaacaagggcttcaagggggagaaggaccactggaggagcaggaggaccatctgtgtgaagacccatgaaagtggaagaagagaaattgagatgtttgattctgccatcctgctgatccggaacccctaccgcagcctggtggccgagttcaacagaaaatgtgccggccacctgggctacgccgctgacaggaactggaagagcaaggagtggccagactttgtgaacagctatgcctcctggtggagcagccacgtgctggactggctgaagtatggcaagaggctgctggtggtgcactatgaggagctgcggcgcagcctggtgcccaccctgcgggagatggtggccttcctgaatgtgtctgtgtctgaggagcggctgctgtgtgtggagaacaacaaggagggcagcttcagaagaagaggaagaagaagccatgaccctgagcccttcaccccagagatgaaggacctgatcaatggctacatcagaacagtggaccaggccctgcgggaccacaactggacaggcctgccccgggagtatgtgcccaggtag

SEQ ID NO: 185500 - DNA, 1728 bp, Artificial Sequence
  derived and/or modified sequence
atggccaagcccttcttccggctgcagaagttcctgcggcggacccaatttctgctgttcttcctcacggcggcgtatcttatgacagggagtctcctgctgttgcaacgcgtgcgcgtcgccctaccacaagggcccagggctcccggaccattgcagacgctgcctgtggctgctgtggctctgggcgtgggtctcttggactccagggctctgcatgatccaagggttagcccggagctgcttctgggcgttgacatgctgcagtccccactgacacgaccacggcctggaccgcggtggctgagatcaaggaatagcgagttgcgccagctacggcggcgatggtttcatcacttcatgtctgacagccagggaccccctgcacttggaccggaggctgctcggccagccattcacagccgaggaacatatatcggttgcttttcagatgacggtcacgaacggacgctgaaaggtgctgttttctacgaccttcggaagatgaccgtgagtcactgtcaggacgcctgcgcagagcggtcctatgtctatgccggcctcgaggctggggccgagtgttattgcggaaatagattgccggcagtgtcggttggcctggaggagtgcaatcatgaatgtaagggagagaaggggtctgtgtgtggggccgtggatagattgtcagtgtacagagtggatgagctgcagcctggtagccggaagcgcagaacggccacttacagggggtgctttaggctgccggaaaacatcacccacgcctttccctcctcccttatccaagccaatgtaaccgtcggtacctgctcaggcttttgcagtcaaaaagaatttccgctcgccatcctcagaggctgggaatgctactgtgcttaccccaccccaaggttcaacctgcgggacgcaatggacagctccgtctgtggtcaagatccagaggcccaaagattggccgaatactgtgaagtgtaccagactcctgttcaggatacccggtgcacagatcgacggttcctgccaaataaaagtaaggtgtttgttgccttgtcttccttccctggggccggaaacacttgggctcgtcatctaattgaacacgccaccggattctatactggaagttactactttgacggcacactctacaacaaaggattcaagggcgaaaaagaccactggcgtagcagacggaccatatgcgtgaaaactcatgaaagtggacgccgagaaatagaaatgttcgactccgcaattctgctgattaggaatccctaccgttctctggtcgctgagttcaacagaaagtgtgcagggcatctcgggtacgcagccgatcgaaactggaaatcaaaagaatggccggatttcgtgaacagctacgcctcttggtggtctagtcatgtgttggactggttgaaatacgggaagagactgttggtcgtgcactatgaagagttgcgacgctccctggttccgaccctccgggagatggttgccttcctcaacgtctccgtgagcgaggagcggctgctgtgtgttgagaacaataaagaaggtagtttcagaaggaggggccggcggagtcacgatcccgaaccatttactcctgaaatgaaggacctaatcaacgggtatattaggaccgtagatcaggccctgcgggatcataactggactggtttaccacgggaatacgtgccccgctag

SEQ ID NO: 185501 - DNA, 1728 bp, Artificial Sequence
  derived and/or modified sequence
atggccaagcccttcttccggctgcagaagttcctgcggcggacccagttcttgctgtttttcctgaccgccgcatatctcatgaccggctcacttctcttactccaacgggtgagagttgcattaccacagggcccccgtgctccaggacctctacaaactctcccagtcgctgctgtggcgctgggagtggggttgctggactcacgagccctgcatgacccacgtgtctcgccagagttactattgggcgttgatatgctgcagtcgccactaacccggcccaggcccggtcctcgttggctaagaagtagaaatagcgaattgcgccagttgagaaggcggtggttccatcacttcatgtctgactctcagggccctcccgcattgggaccagaggcggcccgtcctgccatacacagtagaggtacctacattggatgttttagcgacgatggccatgaaagaacactgaagggggccgtattctatgacttaagaaagatgaccgtgtcccactgtcaggatgcatgcgccgagcgcagttacgtatacgccgggttggaggctggggctgagtgttactgtggcaacagactccccgccgtgtctgtggggctagaagagtgtaatcacgaatgtaagggggaaaagggcagcgtgtgtggtgccgtggatagactgtccgtttacagggttgacgaactgcagcccggtagccgaaaaaggcgaacagctacctacaggggctgtttccggctacctgaaaacataacgcatgccttcccctctagtctcatccaggccaacgtgaccgtggggacctgctctggcttttgctcccagaaggagttccccttagccatcctgcgaggttgggaatgctattgtgcctacccaacacccagatttaatcttagagacgctatggatagcagtgtgtgcgggcaggaccctgaggcccaacggctggccgagtactgtgaagtttatcagactccagtccaagacaccaggtgcactgaccggagattcctccccaacaaatcaaaagtgttcgtcgcactgtcatcatttccaggggcaggaaacacatgggcgcgccacctcatcgagcacgcaaccggattctatacaggtagctactacttcgacggcacactttataacaaaggttttaaaggcgagaaggatcactggcgttcccgtcggacaatctgcgttaagacccatgagtccggacgccgggagattgaaatgttcgactctgcaattcttctgatccggaatccttatcggtctctggtcgcagagtttaatcggaaatgcgcggggcatctgggatacgccgctgatcgaaactggaagagcaaagagtggcctgatttcgtgaacagctatgcctcctggtggtcatctcatgtccttgattggctgaaatacgggaaaaggttgctggttgtgcactatgaggaactacggcgaagcctggtgcctaccctgagagagatggtggcattcctcaacgtcagcgttagcgaggagagactgttgtgtgttgagaataacaaggaaggcagctttaggcggaggggtaggcgcagtcacgaccctgaacctttcacccccgagatgaaggacctcatcaacggatacataagaaccgtggaccaggcattgcgcgaccataactggaccggcctcccacgggaatacgttccccgctag

SEQ ID NO: 185502 - DNA, 1728 bp, Artificial Sequence
  derived and/or modified sequence
atggccaaaccattttttcggctgcagaagtttctccgccgtacacagttcctcctcttctttcttaccgccgcttatttaatgactggctctctgttgttacttcagcgcgttagggtggccctgccacagggtcctcgtgcccctgggcctctgcaaactttgcccgtggctgcagtcgctttgggagttggactgcttgacagtcgagcactgcacgacccgcgtgtgagcccagagctcctccttggcgttgacatgttgcaatcccccttgacccggcctaggcccggacccaggtggctgcgttcgcggaattctgagctgcggcagctgcgacgtaggtggttccaccatttcatgtcagactctcaggggccaccagctctcggacctgaagcagctcgtcccgcaattcacagccgcggaacatatattggctgctttagcgatgatggacatgaacgaactctgaagggggcagtgttttatgacctgcgcaaaatgactgtgtcacactgccaagacgcctgcgcagaacggagctacgtgtacgccggtctggaagctggtgcggagtgctattgtggtaatagactgcccgcagtttcagttggcttggaagagtgtaatcatgagtgtaaaggggaaaaaggctcagtatgtggggctgtggatcggttgtccgtctatcgtgtagacgagctccagcctggctctaggaagcgcagaacagccacatatcggggatgtttcaggctccctgagaatatcacacacgcattcccctcctccctcatacaggcgaatgtgaccgttggcacctgctccggcttctgctctcaaaaagagttccccctggccatcctccgaggttgggaatgttactgcgcctatcccaccccaaggttcaatctgcgggacgcgatggatagttctgtgtgcggccaggacccggaggctcagcggctggctgaatactgcgaagtttaccaaactcctgtccaggacacacgatgtaccgaccggagattcctgccgaataaaagcaaggtcttcgtggccttatcttccttccctggtgccggaaacacctgggctaggcatttgattgaacacgccacaggattctacacgggatcctactattttgatgggactttatacaacaaaggatttaagggcgagaaggatcactggagatctaggcggaccatatgcgtcaaaactcatgaatctgggcgtagggagatcgaaatgtttgacagtgctatattgttaatccggaacccatatcgatctctggtggctgagttcaatcgcaaatgtgcaggacatttgggctatgccgctgatcggaattggaagtctaaagagtggcctgatttcgttaatagctacgcctcctggtggtcctcccatgtactggactggttgaagtacggtaaacgcctgctggtggtccattacgaggaattacggagaagtctcgtgccgacgttgagagaaatggtggctttcctaaacgtgtcagtgtcagaagaaaggctactctgcgtcgagaacaataaggagggcagcttcagacgcaggggccgacggtctcacgacccagaacccttcactccagagatgaaagacctcatcaatggatatattagaactgtagatcaggccctaagagaccataactggacgggactccctcgggagtatgtccccaggtag

SEQ ID NO: 185503 - DNA, 1728 bp, Artificial Sequence
  derived and/or modified sequence
atggctaaaccattcttccgtttacagaaatttctgcggaggactcagttcctgctattcttcctgacagcggcttatctgatgaccgggagcctcctcctgttacaaagagttcgcgtggctctaccccaaggccctagggctccagggcctctgcagacgttgcccgtggccgctgtagccctcggggtggggttgctggactcccgtgcgctgcatgacccacgcgtaagtcccgaactgctcttgggggtggatatgttgcagagtccccttaccagaccgagacccggacccaggtggttgcggagtcgtaacagtgagctgcgacagctgcgtaggcgctggtttcaccactttatgagcgattcccagggacccccagccctgggacccgaggctgctagaccagctattcattctcggggaacttacatcgggtgcttcagcgacgatggtcacgaacgaacactgaaaggcgcagttttctacgatctcagaaaaatgacggtctcccattgccaggacgcttgcgcagagagatcctatgtatacgccggtctggaggctggggcagaatgttattgcggcaaccgactgcccgcagtctccgtcggcctagaagagtgcaatcacgagtgtaaaggcgagaaggggtccgtctgtggggctgtggaccgattgtccgtgtacagggtggacgagttacaaccagggagccgaaagcggcgaactgctacttataggggatgtttcagattgcctgaaaatattacccatgcattcccctcgtccctgatacaggccaatgttacagtgggaacatgttcaggtttctgtagtcagaaagaatttcccctggccattttacgcggatgggaatgctattgcgcttatccaacacccaggtttaacctgcgggatgccatggatagtagtgtctgcgggcaggacccagaggcccaacggctggctgaatactgcgaggtctatcagactcctgttcaagatacccgatgcacggatcgcagattcctacctaacaagagtaaagtatttgtggcactctcctcctttcccggtgctggaaacacttgggcgagacatctgatagagcacgccaccggcttttacactggatcttactacttcgatggtaccctctataacaaggggtttaaaggggagaaggatcattggaggtctcgtaggaccatttgcgttaaaacacacgagagcggccgtagagagatcgaaatgtttgacagtgccatcctcttgattagaaatccatacaggagccttgttgccgagttcaaccgcaaatgtgccggacatctgggatatgccgcagaccgcaactggaaatctaaggaatggcccgatttcgtgaacagctacgccagctggtggagcagccatgtgctggattggctgaagtatgggaagaggcttctggttgtccattatgaggagttgcggaggtctctggtaccgaccctgagggaaatggtcgccttccttaatgtatcagtttccgaggaaaggctgctgtgcgtagaaaataataaagaaggcagttttcgcagacggggtcgtaggtcacacgatcctgagccatttacaccagagatgaaggacttgataaatggatacatccgtaccgtcgaccaggccctgagggaccataattggactggacttcccagggagtatgtccccaggtag

SEQ ID NO: 185504 - DNA, 5819 bp, Artificial Sequence
  derived and/or modified sequence
ggcgcgggtgcgggcgccccagccggccgcgatcgcgggatttctgcgccaggagatgaggggcggtagagccctggaatggagatgtccttgacgcctgggcagaggctgcagctgcaggaccctgtggccactggagataagtaatggtgccatttgaacacctactggaaacggggcaggaacagtgagtgaccccaggcgagcacaggcaggtgccaggagccaggatgcaaggatgacgcctccggaggccctggcctcactcccacctgggcgctaggagccatcccggggctccagccaggagccctgctgcccaggggcatggccaaacctttcttccgactccagaagtttctccgccgaacacagttcctgctgttcttcctcacggctgcctacctgatgaccggcagcctgctgctgctgcagcgggtccgcgtggctctcccacagggcccccgggcacccggccccctgcagaccttgccagtggccgccgtggcgctgggcgtgggcttgctggacagcagagccctgcacgaccctcgagtcagcccagagctgctgctgggtgtggacatgctgcagagccccctgacccggccccggcccggcccccgctggctccggagccgcaactcggagctgcgtcagttgcgtcgccgctggttccaccacttcatgagtgactcccagggaccgcccgccctgggccccgaggctgccaggcccgccatccacagccgaggcacctacattggatgcttcagtgacgatggccacgagaggactctgaaaggagctgtgttttatgacttgagaaagatgactgtctcccactgccaggatgcgtgtgctgagcggtcctatgtctacgccggcttggaggccggggcggagtgttactgcgggaaccggctgccagcggtgagcgtggggctggaagagtgtaaccatgagtgcaaaggcgagaagggctctgtgtgcggggctgtggaccggctctccgtgtaccgtgtggacgagctgcagccgggctccaggaagcggcggaccgccacctaccgcggatgcttccgactgccagagaacatcacacatgccttccccagctccctgatacaggccaatgtgaccgtggggacttgctcgggcttttgttcccagaaagagttccccttggccattctcaggggctgggaatgctactgtgcttaccctaccccccggttcaacctgcgggatgccatggacagctcagtatgtggccaggaccctgaggcacagaggctggcagaatactgtgaggtctaccagacacctgtgcaagacactcgttgtacagacaggaggttcctgcctaacaaatccaaagtgtttgtggctttgtcaagcttcccaggagccgggaacacatgggcacggcacctcattgagcatgccactggcttctatacagggagctactactttgatggaaccctctacaacaaagggttcaagggcgaaaaggaccactggcggagccgacgcaccatctgtgtcaaaacccacgagagtggcaggagggagattgagatgtttgattcagccatcctgctaatccggaacccatacaggtccctggtggcagaattcaacagaaaatgtgccgggcacctgggatatgcagctgaccgcaactggaagagcaaagagtggccggactttgtcaacagctacgcctcgtggtggtcctcgcacgtcctggactggctcaagtacgggaagcggctgctggtggtgcactacgaggagctgcggcgcagcctggtgcccacgttacgggagatggtggccttcctcaacgtgtctgtgagcgaggagcggctgctctgcgtggagaacaacaaggagggcagcttccggcggcgcggccggcgctcccacgaccctgagcccttcaccccggagatgaaagacttgatcaatggctacatccggacggtggaccaagccctgcgtgaccacaactggacggggctgcccagggagtatgtgcccagatgataggcctggcccacgccgccgcccccgctgagtgacgcaatcgcaccacggggctgcgctccccactctgatgctcaggcccgtggcctcactgggacgaacggtgggtggggggctcaccctggtgctgcctcccgcacaaggagacctggacacaacagacacacatcacaaggcgaacacaaatggacacacatacctggccacgaacccacacctcctcagacactcagacaccactccaggctcatagccccgtcttgatgcagagaagccacccacgtggggtgtgccaggcacccccagatacaaatgcagccacgcacagacgtaacacacaggtgccaggccgtgtgctcctggaggctggctggctgtctctctcacacagatacacgtgcgctccctgggatccgggaggccctgggcttcctgtgtgtagccctggcatagacttgctcgtcagggtgttcgactctgggatgctgggccgggcagacatttatgctctgagcagcaaggaccattgggatggaggtgggcacaaagactgctgcttccagggtgtgcggccctggccgtgtgtctgacatcccataaatgtgtgtgtggtgtgactacgggcaccacaaactccgcagccttgcctctcttttctctgtggctgggctggctgcaccatgggcagggttgaggactgccccccaccccgcccaagccaatgcagacactgacctcaagaccagccacaccaagtctgtgcactgcccaccacccccttcaacccctcctacaccatgctccggggcctggggcctccttgcctggcttcttcctccagctatcctcagggaagctggagattcaagtcatgccccagaagcaaggtgtaagcatgggggcgtggggaagagggcaggagctgaagttccaggggagcccaggacccctggggacctgtacactagcaggatgggtcttgggagttggcatggggagattgtaagggctgtatctccgcgattactggtactggtgctccacccataggggccctgttctctctggggtcccacactggggtcatgagagctagttagtactcagcctgacccctaggtctggtcctgccagcctgggatgggggtcaatgtatgctacacatcttgggctcacaagtgaggctgtggaggccaggaggttcaagtatggagggtaggagtgcaacccaggagcaacgctcaaggtggccgagatgcagggaggattgtggcgatccggttgcacactggcctctgtggaggtcagggaggtgggaaggtgggtgggcctgaactcaggcagcccttcagtggcttcttcaggcctaggataaccctggccaggccccatggtcctgctctgggtcagctgtcagggagacctcccttcagcctgagccaagctgcattgggaggagaaggcagggtgagggatctgggagagcaggacgttgagatatcctgaccctctgcttcctagcctgatgatggggaacccagagccacccgctatgagcacaggccgggggtggaaggcccagtagagctgcccttccccagatggaagcttcctccaaccttcagtttggccagtgggtgggtttgggcatctgtgcccctggtggcctccaaatccttcctgggattcccccaaacccacactgatgcgaagctgttcttgaccctcccatagcatcaactcagttcagctcaaagctagaaacaccaaggtctttgaaaatgtttattggctcaggatagcttcggcatccaatctgcgaaggcccctgatggagctatttcttcctagtatcaggagcaattgagacccctcaggagtttccacactgctgtggacgggatagccagggcagacctgcatcccagagcaagcctagatccttgaaagcaatgtcaggcgtggcagtggggaagccatggaggctgggaagggcaaagtgtggagagaggagtgaccgggactggagccagggtctggggagagcaacagcaccaggcttttcctggtagttggattggtacattcactgctgccaggtacccagagatgtcatctctctccaggtagagcatcaccagctcctgtggccttgtagatgactctgtacctcagtgaagagtgcaggcaagtagagtgatggggtcagtgtccatccagtttacgctgagtcagtccatacagcaagacacctggcacttggcaggtactcctggatgttgatgagcaaggaagagcaacggccctgtcagctggcagtggtcctcacagccttcatcccaggtctgcctacgtgggagatctcatcagaaacaggaacggggatctgtctgtgcttgcaggaaagtccatttgtttttctccaagttaggtctcatctacagctcttagcttctcagtaaagaggatactctcccaaccagccaaggaataaaagctgatctgtatgtagggcagaagtgtggcaaatgcatcaggaaccggttagaacagaacagagaaaccctgactgtctacagattccaactttaatagcaagcctgtggagttacacaaacctgtgttaaaacatgtaatttttatggatttcatctcccgttgtggatcaatttggaaaaaccaaaatatgtaattttaaaaaactaaaacacatcctggtagtcccagtgatgtgtaaatgagagagaagaatagacaggcttccaaaccctgggaagaaagctgcttaattatgtgaacatcttataatgaagtctcttgcagctaaaattagattttgagtgcatgaatctgtgataatgtttgcatatcagaatgcattctccccttaaaagtagcagtagccacttggttcttagggggccccaagaggagaggagaagtgctgaggttgatgttacgactgcaagaattcttgggacacaggtttgttttctgctgacttgctcggaaacccattggaggtatctgaaatgtgatgactccaaaggggttcatttcactatagggagaaattgattcgtctgacttcctatttatcaccactcaatattgggtgagttggtctgaacaaggtggggataaagtagagtggaaataatgtagagtcgtcagactgaaaggccaggttgtagtcccagctcttatctgccatcttggacaaagcttttcccatctccagtctcagtttcccatccataaaatgggggaagtggtaggtcttgctgattgcatccacattcattcctccatttcctttcccagcaaccccccatttctgtttgggaattcatatgatctgccagagcctctccaggggtggaatacatgtcctggactaagccaatgacaccttccatctttccagctatggtgactgggttaggtatgatcttgtgagttaagacaatgaagccagagggaatttcaagacttatgggaatgctgggtagaagctgttttaattcccctgttgaatgtgaaaaaggtagtagtattcctgggtctttatgatgaccaccttgggccttgggatcatgaccaggaatcacgtgaagctgacaccactgaagggagagttgagaggcagaaagagatcaagtccttggtgaaattgtttaagtacaggatcaagccttgcttgagattggccttacctctggactttttttgttatatgagctaataaattctgtttattgttt

SEQ ID NO: 185505 - DNA, 2665 bp, Artificial Sequence
  derived and/or modified sequence
ggtcagcggagggtttgctccgtctcttggtgaacttgaacagaggcagaggcaaaagcaaaacatttctgcgccaggagatgaggggcggtagagccctggaatggagatgtccttgacgcctgggcagaggctgcagctgcaggaccctgtggccactggagataagtaatggtgccatttgaacacctactggaaacggggcaggaacagtgagtgaccccaggcgagcacaggcaggtgccaggagccaggatgcaaggatgacgcctccggaggccctggcctcactcccacctgggcgctaggagccatcccggggctccagccaggagccctgctgcccaggggcatggccaaacctttcttccgactccagaagtttctccgccgaacacagttcctgctgttcttcctcacggctgcctacctgatgaccggcagcctgctgctgctgcagcgggtccgcgtggctctcccacagggcccccgggcacccggccccctgcagaccttgccagtggccgccgtggcgctgggcgtgggcttgctggacagcagagccctgcacgaccctcgagtcagcccagagctgctgctgggtgtggacatgctgcagagccccctgacccggccccggcccggcccccgctggctccggagccgcaactcggagctgcgtcagttgcgtcgccgctggttccaccacttcatgagtgactcccagggaccgcccgccctgggccccgaggctgccaggcccgccatccacagccgaggcacctacattggatgcttcagtgacgatggccacgagaggactctgaaaggagctgtgttttatgacttgagaaagatgactgtctcccactgccaggatgcgtgtgctgagcggtcctatgtctacgccggcttggaggccggggcggagtgttactgcgggaaccggctgccagcggtgagcgtggggctggaagagtgtaaccatgagtgcaaaggcgagaagggctctgtgtgcggggctgtggaccggctctccgtgtaccgtgtggacgagctgcagccgggctccaggaagcggcggaccgccacctaccgcggatgcttccgactgccagagaacatcacacatgccttccccagctccctgatacaggccaatgtgaccgtggggacttgctcgggcttttgttcccagaaagagttccccttggccattctcaggggctgggaatgctactgtgcttaccctaccccccggttcaacctgcgggatgccatggacagctcagtatgtggccaggaccctgaggcacagaggctggcagaatactgtgaggtctaccagacacctgtgcaagacactcgttgtacagacaggaggttcctgcctaacaaatccaaagtgtttgtggctttgtcaagcttcccaggagccgggaacacatgggcacggcacctcattgagcatgccactggcttctatacagggagctactactttgatggaaccctctacaacaaagggttcaagggcgaaaaggaccactggcggagccgacgcaccatctgtgtcaaaacccacgagagtggcaggagggagattgagatgtttgattcagccatcctgctaatccggaacccatacaggtccctggtggcagaattcaacagaaaatgtgccgggcacctgggatatgcagctgaccgcaactggaagagcaaagagtggccggactttgtcaacagctacgcctcgtggtggtcctcgcacgtcctggactggctcaagtacgggaagcggctgctggtggtgcactacgaggagctgcggcgcagcctggtgcccacgttacgggagatggtggccttcctcaacgtgtctgtgagcgaggagcggctgctctgcgtggagaacaacaaggagggcagcttccggcggcgcggccggcgctcccacgaccctgagcccttcaccccggagatgaaagacttgatcaatggctacatccggacggtggaccaagccctgcgtgaccacaactggacggggctgcccagggagtatgtgcccagatgataggcctggcccacgccgccgcccccgctgagtgacgcaatcgcaccacggggctgcgctccccactctgatgctcaggcccgcacaaggagacctggacacaacagacacacatcacaaggcgaacacaaatggacacacatacctggccacgaacccacacctcctcagacactcagacaccactccaggctcatagccccgtcttgatgcagagaagccacccacgtggggtgtgccaggcacccccagatacaaatgcagccacgcacagacgtaacacacaggtgccaggccgtgtgctcctggaggctggctggctgtctctctcacacagatacacgtgcgctccctgggatccgggaggccctgggcttcctgtgtgtagccctggcatagacttgctcgtcagggtgttcgactctgggatgctgggccgggcagacatttatgctctgagcagcaaggaccattgggatggaggtgggcacaaagactgctgcttccagggtgtgcggccctggccgtgtgtctgacatcccataaatgtgtgtgtggtgtgactacgggcaccacaaactccgc

SEQ ID NO: 185506 - protein, 722 aa, Artificial Sequence
  derived and/or modified sequence
MLTFFLVSGGSLWLFVEFVLSLLEKMQTQEILRILRLPELGDLGQFFRSLSATTLVSMGALAAILAYWFTHRPKALQPPCNLLMQSEEVEDSGGARRSVIGSGPQLLTHYYDDARTMYQVFRRGLSISGNGPCLGFRKPKQPYQWLSYQEVADRAEFLGSGLLQHNCKACTDQFIGVFAQNRPEWIIVELACYTYSMVVVPLYDTLGPGAIRYIINTADISTVIVDKPQKAVLLLEHVERKETPGLKLIILMDPFEEALKERGQKCGVVIKSMQAVEDCGQENHQAPVPPQPDDLSIVCFTSGTTGNPKGAMLTHGNVVADFSGFLKVTESQWAPTCADVHISYLPLAHMFERMVQSVVYCHGGRVGFFQGDIRLLSDDMKALCPTIFPVVPRLLNRMYDKIFSQANTPLKRWLLEFAAKRKQAEVRSGIIRNDSIWDELFFNKIQASLGGCVRMIVTGAAPASPTVLGFLRAALGCQVYEGYGQTECTAGCTFTTPGDWTSGHVGAPLPCNHIKLVDVEELNYWACKGEGEICVRGPNVFKGYLKDPDRTKEALDSDGWLHTGDIGKWLPAGTLKIIDRKKHIFKLAQGEYVAPEKIENIYIRSQPVAQIYVHGDSLKAFLVGIVVPDPEVMPSWAQKRGIEGTYADLCTNKDLKKAILEDMVRLGKESGLHSFEQVKAIHIHSDMFSVQNGLLTPTLKAKRPELREYFKKQIEELYSISM

SEQ ID NO: 185507 - protein, 697 aa, Artificial Sequence
  derived and/or modified sequence
MQTQEILRILRLPELGDLGQFFRSLSATTLVSMGALAAILAYWFTHRPKALQPPCNLLMQSEEVEDSGGARRSVIGSGPQLLTHYYDDARTMYQVFRRGLSISGNGPCLGFRKPKQPYQWLSYQEVADRAEFLGSGLLQHNCKACTDQFIGVFAQNRPEWIIVELACYTYSMVVVPLYDTLGPGAIRYIINTADISTVIVDKPQKAVLLLEHVERKETPGLKLIILMDPFEEALKERGQKCGVVIKSMQAVEDCGQENHQAPVPPQPDDLSIVCFTSGTTGNPKGAMLTHGNVVADFSGFLKVTESQWAPTCADVHISYLPLAHMFERMVQSVVYCHGGRVGFFQGDIRLLSDDMKALCPTIFPVVPRLLNRMYDKIFSQANTPLKRWLLEFAAKRKQAEVRSGIIRNDSIWDELFFNKIQASLGGCVRMIVTGAAPASPTVLGFLRAALGCQVYEGYGQTECTAGCTFTTPGDWTSGHVGAPLPCNHIKLVDVEELNYWACKGEGEICVRGPNVFKGYLKDPDRTKEALDSDGWLHTGDIGKWLPAGTLKIIDRKKHIFKLAQGEYVAPEKIENIYIRSQPVAQIYVHGDSLKAFLVGIVVPDPEVMPSWAQKRGIEGTYADLCTNKDLKKAILEDMVRLGKESGLHSFEQVKAIHIHSDMFSVQNGLLTPTLKAKRPELREYFKKQIEELYSISM

SEQ ID NO: 185508 - protein, 667 aa, Artificial Sequence
  derived and/or modified sequence
MQTQEILRILRLPELGDLGQFFRSLSATTLVSMGALAAILAYWFTHRPKALQPPCNLLMQSEEVEDSGGARRSVIGSGPQLLTHYYDDARTMYQVFRRGLSISGNGPCLGFRKPKQPYQWLSYQEVADRAEFLGSGLLQHNCKACTDQFIGVFAQNRPEWIIVELACYTYSMVVVPLYDTLGPGAIRYIINTADISTVIVDKPQKAVLLLEHVERKETPGLKLIILMDPFEEALKERGQKCGVVIKSMQAVEDCGQENHQAPVPPQPDDLSIVCFTSGTTGNPKGAMLTHGNVVADFSGFLKVTESQWAPTCADVHISYLPLAHMFERMVQSVVYCHGGRVGFFQGDIRLLSDDMKALCPTIFPVVPRLLNRMYDKIFSQANTPLKRWLLEFAAKRKQAEVRSGIIRNDSIWDELFFNKIQASLGGCVRMIVTGAAPASPTVLGFLRAALGCQVYEGYGQTECTAGCTFTTPGDWTSGHVGAPLPCNHIKLVDVEELNYWACKGEGEICVRGPNVFKGYLKDPDRTKEALDSDGWLHTGDIGKWLPAGTLKIIDRKKHIFKLAQGEYVAPEKIENIYIRSQPVAQIYVHGDSLKAFLVGIVVPDPEVMPSWAQKRGIEGTYADLCTNKDLKKAILEDMVRLGKESGLHSFEQDLPQCLIQIKVFSKY

SEQ ID NO: 185509 - DNA, 2169 bp, Artificial Sequence
  derived and/or modified sequence
atgctgacattcttcctagtgtcaggaggtagtctgtggttatttgtcgaattcgtactgagtctgctggagaaaatgcagacacaagaaatactgcggatactgcgtctccccgaactcggggaccttggacaattcttccgatctcttagtgctacaacactggtcagcatgggtgctctcgctgccatcctggcttactggttcacgcatcgccctaaagcattacagcccccctgcaatttgttgatgcagagtgaagaagtcgaagattctggaggagcaaggaggagcgtgatcgggtcggggccccagttgctcacacactattacgatgatgctcggaccatgtaccaagttttccgtcgcgggctgagcataagcggcaatgggccttgtttggggttcagaaagccaaagcagccatatcaatggctctcgtaccaagaggttgctgacagggcggagttcttggggagtggcctcctgcaacataactgcaaggcctgcaccgatcagttcatcggcgtcttcgcccagaaccgccctgaatggatcatcgttgaactggcttgttacacttatagcatggtcgtggtgcctctttatgatacgcttgggccaggggccattagatacattatcaatacagcggatatttcaaccgtgattgtggacaagcctcaaaaggctgtgctccttctggagcatgtagaacgcaaagaaacaccgggcctcaaattgatcatcctgatggatccattcgaagaggctctgaaggagcgcggtcagaaatgcggcgtggtaattaaatccatgcaggcagtagaggactgcggccaggaaaatcaccaggcgcccgtgcccccgcagcccgatgacttgtctattgtctgctttacctcaggaactaccggcaatccgaagggggcaatgctgacacacgggaacgtagtggccgacttcagtgggtttttgaaggtcaccgagagccagtgggcccccacttgcgcagacgttcatatcagctacctgccattagcccatatgtttgagcgcatggtgcaatcagtagtttactgccatggcggccgcgtcggattcttccaaggggacattagattacttagtgacgacatgaaagccctgtgccctaccatcttccctgttgtcccccgtcttttaaaccgtatgtatgacaagatcttttcacaggccaacacaccactcaagaggtggcttctagaattcgccgctaagagaaaacaagcagaggtcaggtctggtatcatcaggaacgactccatatgggacgaattgtttttcaataaaattcaggcctctctgggtggatgtgtaagaatgatagttacaggtgcagcaccagcctctccaactgtgctaggttttctcagagctgccttggggtgccaggtatatgaaggctatggtcagacagagtgtacggccggctgtactttcactactcccggcgattggacttcagggcatgtcggggcccccctcccttgcaatcatataaagctggttgatgtggaggaactgaactattgggcctgcaagggggagggcgaaatctgtgtcagaggaccgaatgtgttcaaggggtatttgaaggatcccgatagaactaaggaagcgctagacagtgatggctggctccacactggcgacattgggaaatggctacccgccggcactttaaagataattgaccgcaagaaacatatatttaagctggcccagggcgagtatgttgcccccgaaaagatcgagaatatctatatcagaagtcagccggttgcacagatctatgtgcacggagactcactgaaagcttttctggtaggcattgtggttccagatccagaggttatgccctcctgggctcagaagcgcggaatcgaaggcacctacgctgacctctgtacaaacaaggatctgaaaaaggctatccttgaggatatggtgcgcctgggaaaggagtctggactccacagcttcgagcaggttaaagccatccacatccatagtgacatgttcagtgtgcagaacggattgctcactcccacgcttaaggccaaaagacccgaattacgggaatatttcaaaaaacaaatcgaagagctatattccataagcatgtag

SEQ ID NO: 185510 - DNA, 2169 bp, Artificial Sequence
  derived and/or modified sequence
atgctgaccttcttcctggtgtctgggggcagcctgtggctgtttgtggagtttgtgctgagcctgctggagaagatgcagacccaggagatcctgcgcatcctgcggctgcctgagctgggggacctgggccagttcttccgcagcctgagcgccaccaccctggtgtccatgggcgccctggccgccatcctggcctactggttcacccaccggcccaaggccctgcagcccccctgcaacctgctgatgcagagcgaggaggtggaggacagcggcggggcccggcgcagcgtcatcggcagcggcccccagctgctgacccactactatgatgatgcccggaccatgtaccaggtgttccggcggggcctgagcatctctggaaatggcccctgcctgggcttcaggaagcccaagcagccctaccagtggctgagctaccaggaggtggccgacagagctgagttcctgggcagcggcctgctgcagcacaactgcaaggcctgcacagaccagttcatcggcgtgtttgcccagaacagacctgagtggatcatcgtggagctggcctgctacacctacagcatggtggtggtgcccctgtatgacaccctgggccctggggccatccgctacatcatcaacacagctgacatcagcaccgtcatcgtggacaagccccagaaggctgtgctgctgctggagcacgtggagaggaaggagaccccaggcctgaagctgatcatcctgatggacccctttgaggaggccctgaaggagcggggccagaagtgtggggtggtgatcaagtccatgcaggccgtggaggactgtggccaggagaaccaccaggcccctgtgcccccccagccagatgacctgagcatcgtgtgcttcaccagcggcaccactggaaaccccaagggggccatgctgacccatggaaatgtggtggccgacttcagcggcttcctgaaggtgacagagagccagtgggcccccacctgtgctgatgtgcacatctcctacctgcccctggcccacatgtttgagaggatggtgcagagcgtggtgtactgccacggcggccgggtgggcttcttccagggcgacatccggctgctgagtgatgacatgaaggccctgtgccccaccatcttccctgtggtgccccggctgctgaacaggatgtatgacaagatcttcagccaggccaacacccccctgaagcgctggctgctggagtttgctgccaagaggaagcaggccgaggtgcgcagcggcatcatcagaaatgacagcatctgggatgagctgttcttcaacaagatccaggccagcctgggcggctgtgtgaggatgattgtgactggagctgccccagccagccccaccgtgctgggcttcctgcgggccgccctgggctgccaggtgtatgagggctacggccagacagaatgtacagctggctgcaccttcaccacccctggggactggaccagcggccacgtgggcgcccccctgccctgcaaccacatcaagctggtggatgtggaggagctgaactactgggcctgcaagggggagggggagatctgtgtgcggggccccaacgtgttcaagggctacctgaaggaccctgacaggaccaaggaggccctggacagtgatggctggctgcacactggagacatcggcaagtggctgcctgctggcaccctgaagatcatcgacaggaagaagcacatcttcaagctggcccagggcgagtatgtggcccctgagaagattgagaacatctacatccgcagccagcctgtggcccagatctacgtgcacggggacagcctgaaggccttcctggtgggcatcgtggtgcctgaccctgaggtgatgcccagctgggcccagaagaggggcatcgagggcacctatgctgacctgtgcaccaacaaggacctgaagaaggccatcctggaggacatggtgcggctgggcaaggagagcggcctgcacagctttgagcaggtgaaggccatccacatccacagcgacatgttttctgtgcagaatggcctgctgacccccaccctgaaggccaagaggcctgagctgcgggagtacttcaagaagcagatcgaggagctgtacagcatctccatgtag

SEQ ID NO: 185511 - DNA, 2169 bp, Artificial Sequence
  derived and/or modified sequence
atgctgaccttcttcctggtgagcggcggcagcctgtggctgttcgttgagttcgttctttctctcttggagaaaatgcagactcaggaaatcctccgaatcctgaggcttcccgaactgggagatttgggtcaatttttcaggtccttgagtgctaccactctggttagcatgggggccctggccgcaatactggcctactggtttacacatagaccaaaagccctgcaacccccatgtaatctgctaatgcagtccgaggaggtagaagattccggaggcgcacgccggtctgtcatcggatccggaccacaattacttacccactactacgatgatgcacggacgatgtatcaggtttttcgccgaggtctgtcaattagcggcaatgggccatgtctgggattccgcaaacccaaacaaccctaccagtggctcagttaccaggaagttgctgatcgcgctgaatttctgggtagtggcctgctgcaacacaattgcaaggcttgtacggaccaattcattggggtgttcgcccagaatcggcccgagtggattattgtggagcttgcgtgctacacctattccatggtggttgtgcctctgtacgacactctgggcccgggagccatacggtacataatcaacaccgccgatatttccacggtcatcgtcgataagcctcaaaaggccgtgttgctccttgaacacgtggaaagaaaggaaaccccaggcctcaaacttatcattctgatggaccccttcgaggaggcactcaaggaaagaggtcaaaagtgcggcgtggtgatcaaatctatgcaagcagtggaggactgtggacaggaaaatcatcaggctcccgtgcctcctcaaccggatgacctgtcgatcgtttgtttcacgagtggaacaaccggtaacccaaagggcgccatgctgacccatgggaatgtggtggccgattttagcggcttcttaaaagtgaccgagtcacagtgggcaccgacatgtgcagacgttcatatctcctatctgcccctagctcacatgtttgaaagaatggtgcagtccgtagtatactgtcacggcggcagagttggcttctttcagggcgacatacgactgctgagcgatgatatgaaagctttgtgccccacaattttccccgtggttcccagactgcttaacaggatgtatgacaagatcttttcccaggccaacacacctctaaaacgctggctgctggaatttgcagcaaaacggaaacaggccgaggtgcgcagtggaatcattaggaatgactctatctgggatgagcttttttttaataagatccaggcttcgcttggagggtgcgtacgaatgatcgtaacgggcgctgcaccagcctcccccacagtactcggtttccttcgcgctgccttgggttgccaggtttacgagggatacggccagacagaatgcaccgccggttgcacctttaccacccccggagattggacaagtgggcatgtgggggctccactcccctgtaaccacatcaagttagtggacgtggaggaactgaactactgggcctgcaagggagagggcgagatctgcgtgagaggccccaacgtgtttaagggctacctgaaggatcctgaccgcactaaagaagctctggattctgacggctggcttcacacaggtgacataggcaaatggttacctgctgggacactgaagatcatagataggaagaaacatatttttaagctcgctcagggggaatacgtggccccagagaagatcgagaatatctatataaggagccaacctgtagcccaaatttacgttcatggggacagtttgaaggccttcctcgtcggtattgtggtgcccgatccagaggtaatgccctcttgggcccaaaaaaggggcatagagggtacctacgctgacctgtgcaccaacaaggatcttaagaaggcaatactggaggatatggtgcggctaggcaaagagagcggcctgcactcgtttgagcaagtcaaagccattcacatccactcagatatgttttctgtgcagaatgggctgctgacacctacccttaaggctaaacgacccgaattgcgggagtattttaaaaaacaaatcgaggagctgtattccatcagtatgtag

SEQ ID NO: 185512 - DNA, 2169 bp, Artificial Sequence
  derived and/or modified sequence
atgctgactttttttctagtgagcgggggatcgctatggctcttcgtagagttcgtgttaagcctactcgagaagatgcagacccaagagatattgcgcatcttaagattgcccgagctcggcgatctcggacagttctttcgatctctgtcagcgaccaccctagtgtccatgggcgcactcgccgcaatccttgcttattggtttacgcaccggcctaaggccctgcagcccccttgcaatttgctaatgcaatctgaggaagtggaggacagtgggggagctagacggtctgtgattggcagcggaccacagctactcacacattactacgatgatgctagaacgatgtaccaggtttttcgtcggggactgtccatctctggcaatggaccatgcctcgggttccgtaagcccaagcagccctaccagtggctgagctaccaggaggtggccgaccgggctgagttcctgggctccgggctgctgcagcacaactgtaaagcatgtactgatcagttcatcggcgtgttcgcccagaatcgccctgagtggataattgttgagctggcgtgttacacctattcaatggtggtcgtccccctgtatgacacactgggccctggggctatacgatatatcattaacaccgccgatattagcactgttatcgtggacaagccgcaaaaggccgtgctgctcctggagcacgtggagcgaaaggaaactccgggactgaaactgatcattcttatggaccccttcgaggaagctctgaaggagcgaggacagaaatgcggcgtagtgatcaaaagcatgcaggcagttgaggactgtggacaggaaaatcaccaggccccagtaccgccacagcctgatgatctatccatcgtttgcttcactagtggaacaacaggtaatcctaagggtgcgatgttaacacacggaaatgtggtggctgatttttccggctttctcaaggtgactgaaagtcagtgggccccaacgtgcgctgacgttcacattagttacctccccctcgcccacatgtttgaacgcatggtgcagtcggtagtctactgtcacggaggtcgcgtgggcttctttcaaggagatataaggttgttgtctgatgacatgaaagccctttgccccacaattttcccagtggtgcctagacttctgaaccgcatgtacgataagatttttagtcaggcaaacacaccccttaagaggtggcttctcgaattcgccgcaaaacgaaagcaggctgaagtgcggagcggtattataagaaacgactccatctgggatgagctgttcttcaataagatccaggcctccctcgggggatgcgtgaggatgattgtgacgggagctgcccctgcctccccgacagtgctggggttcctgcgggctgcactgggatgtcaagtgtatgaaggctacgggcagaccgagtgtaccgccggttgtacttttactacacccggagattggacgagcggtcacgttggcgcacctctgccgtgcaaccatatcaaactggttgacgtcgaagaactgaactattgggcgtgtaagggggagggcgagatctgcgtgagaggaccaaatgtcttcaagggatatctgaaagaccccgatcggacaaaggaagcactcgattccgacggctggctccacaccggagacatagggaagtggcttccagccggaacccttaaaatcattgacaggaaaaaacacattttcaaactggcccagggcgaatacgtggcccctgagaagattgaaaatatttatatccggagccaacccgtggcccagatctacgtccatggggatagtttgaaggcattcctcgtaggaatcgtggttcccgaccccgaggtgatgccttcatgggcccaaaaacggggaatagaaggtacctatgccgacttatgtacaaacaaggatcttaagaaggcaatacttgaggacatggtgaggctgggcaaggagtccggtctccactccttcgaacaagttaaagccattcacattcacagcgacatgttctctgtgcagaacggcttgttaactccaacactaaaagccaagaggcctgaattgcgtgagtatttcaaaaagcagatcgaggagctttactccatatccatgtag

SEQ ID NO: 185513 - DNA, 2169 bp, Artificial Sequence
  derived and/or modified sequence
atgctgaccttcttcctggtgagcggcggcagcctgtggctgttcgtggagttcgtgctgagcctgctggagaagatgcagacccaggagatcctgagaatcctgagactgcccgagctgggcgacctgggccagttcttcagaagcctgagcgccaccaccctggtgagcatgggcgccctggccgccatcctggcctactggttcacccacagacccaaggccctgcagcccccctgcaacctgctgatgcagagcgaggaggtggaggacagcggcggcgccagaagaagcgtgatcggcagcggcccccagctgctgacccactactacgacgacgccagaaccatgtaccaggtgttcagaagaggcctgagcatcagcggcaacggcccctgcctgggcttcagaaagcccaagcagccctaccagtggctgagctaccaggaggtggccgacagagccgagttcctgggcagcggcctgctgcagcacaactgcaaggcctgcaccgaccagttcatcggcgtgttcgcccagaacagacccgagtggatcatcgtggagctggcctgctacacctacagcatggtggtggtgcccctgtacgacaccctgggccccggcgccatcagatacatcatcaacaccgccgacatcagcaccgtgatcgtggacaagccccagaaggccgtgctgctgctggagcacgtggagagaaaggagacccccggcctgaagctgatcatcctgatggaccccttcgaggaggccctgaaggagagaggccagaagtgcggcgtggtgatcaagagcatgcaggccgtggaggactgcggccaggagaaccaccaggcccccgtgcccccccagcccgacgacctgagcatcgtgtgcttcaccagcggcaccaccggcaaccccaagggcgccatgctgacccacggcaacgtggtggccgacttcagcggcttcctgaaggtgaccgagagccagtgggcccccacctgcgccgacgtgcacatcagctacctgcccctggcccacatgttcgagagaatggtgcagagcgtggtgtactgccacggcggcagagtgggcttcttccagggcgacatcagactgctgagcgacgacatgaaggccctgtgccccaccatcttccccgtggtgcccagactgctgaacagaatgtacgacaagatcttcagccaggccaacacccccctgaagagatggctgctggagttcgccgccaagagaaagcaggccgaggtgagaagcggcatcatcagaaacgacagcatctgggacgagctgttcttcaacaagatccaggccagcctgggcggctgcgtgagaatgatcgtgaccggcgccgcccccgccagccccaccgtgctgggcttcctgagagccgccctgggctgccaggtgtacgagggctacggccagaccgagtgcaccgccggctgcaccttcaccacccccggcgactggaccagcggccacgtgggcgcccccctgccctgcaaccacatcaagctggtggacgtggaggagctgaactactgggcctgcaagggcgagggcgagatctgcgtgagaggccccaacgtgttcaagggctacctgaaggaccccgacagaaccaaggaggccctggacagcgacggctggctgcacaccggcgacatcggcaagtggctgcccgccggcaccctgaagatcatcgacagaaagaagcacatcttcaagctggcccagggcgagtacgtggcccccgagaagatcgagaacatctacatcagaagccagcccgtggcccagatctacgtgcacggcgacagcctgaaggccttcctggtgggcatcgtggtgcccgaccccgaggtgatgcccagctgggcccagaagagaggcatcgagggcacctacgccgacctgtgcaccaacaaggacctgaagaaggccatcctggaggacatggtgagactgggcaaggagagcggcctgcacagcttcgagcaggtgaaggccatccacatccacagcgacatgttcagcgtgcagaacggcctgctgacccccaccctgaaggccaagagacccgagctgagagagtacttcaagaagcagatcgaggagctgtacagcatcagcatgtag

SEQ ID NO: 185514 - DNA, 2561 bp, Artificial Sequence
  derived and/or modified sequence
ggctgcggggctgcgggtcggggaggccgggccgggccgggccgggccccgctgaccgccatgctgaccttcttcctcgtgtcggggggctccctctggctattcgtagagtttgtcctctcacttctggagaagatgcagacacaggagatcctgaggatactgcgactgcctgagctaggtgacttgggacagtttttccgcagcctctcggccaccaccctcgtgagtatgggtgccctggctgccatccttgcctactggttcactcaccggccaaaggccttgcagccgccatgcaacctcctgatgcagtcagaagaagtagaggacagtggcggggcacggcgatctgtgattgggtctggccctcagctacttacccactactatgatgatgcccggaccatgtaccaggtgttccgccgtgggcttagcatctcagggaatgggccctgtcttggtttcaggaagcctaagcagccttaccagtggctgtcctaccaggaggtggccgacagggctgaatttctggggtccggacttctccagcacaattgtaaagcatgcactgatcagtttattggtgtttttgcacaaaatcggccagagtggatcattgtggagctggcctgctacacatattccatggtggtggtcccgctctatgacaccctgggccctggggctatccgctacatcatcaatacagcggacatcagcaccgtgattgtggacaaacctcagaaggctgtgcttctgctagagcatgtggagaggaaggagactccaggcctcaagctgatcatcctcatggacccattcgaagaagccctgaaagagagagggcagaagtgcggggtggtcattaagtccatgcaggccgtggaggactgtggccaagagaatcaccaggctcctgtgcccccgcagcctgatgacctctccattgtgtgtttcacaagcggcacgacagggaacccaaaaggtgcgatgctcacccatgggaacgtggtggctgatttctcaggctttctgaaagtgacagagagtcagtgggctcccacttgtgcggatgtgcacatttcctatttgcctttagcacacatgtttgagcgaatggtgcagtctgtcgtctattgccacggagggcgtgttggcttcttccagggagatatccgccttctctcagatgacatgaaggctctatgccccaccatcttccctgtggtcccacgactgctgaaccggatgtacgacaagatcttcagccaggcaaacacaccattaaagcgctggctcctggagtttgcagcaaagcgtaagcaagccgaggtccggagtggaatcatcaggaatgatagtatctgggatgaactcttctttaataagattcaggccagtcttggtgggtgtgtgcggatgattgttactggagcagccccagcatcaccaacagttctgggatttctccgggcagctctagggtgccaggtttatgaaggttatggccaaactgagtgcacagctggatgtaccttcaccactcctggcgactggacctcagggcacgtaggggcgccacttccctgcaatcatatcaagctcgttgatgttgaggaactgaactactgggcctgcaaaggagagggagagatatgtgtgagaggaccaaatgtgttcaaaggctacttgaaagatccagacaggacgaaggaggccctggacagcgatggctggcttcacactggagacatcggaaaatggctgccggcaggaactcttaaaattattgatcggaaaaagcatatatttaaacttgctcagggagaatatgttgcacccgagaagattgagaacatctacatccggagccaacctgtggcgcaaatctatgtccatggggacagcttaaaggcctttttggtaggcattgttgtgcctgaccctgaagttatgccctcctgggcccagaagagaggaattgaaggaacatatgcagatctctgcacaaataaggatctgaagaaagccattttggaagatatggtgaggttaggaaaagaaagtggactccattcttttgagcaggttaaagccattcacatccattctgacatgttctcagttcaaaatggcttgctgacaccaacactaaaagctaagagacctgagctgagagagtacttcaaaaaacaaatagaagagctttactcaatctccatgtgaagttcaaggaaagttcttctcagtgtaatgaactgtctagcaatattatagttattcttgaaagtaatgagtcaaaatgacacagctgaaaatgaataagcatctgattttatgactgagccttttcctgtcccaagaggtctttaacaatattttctctatcatcaatgagtatattttatttttattataaaaatgatattgtggtggactgctaaaaatatcacaaatggcaatgtaaaaatcaagacattttctcaagaactgtgtaccactaaaagtaatatattgtcaatgttcacagaactattaaacataaaggaaaaacataa

SEQ ID NO: 185515 - DNA, 2658 bp, Artificial Sequence
  derived and/or modified sequence
ggctctaccaccacccggcttctcagagcaggcggctgttgccatcgactgtccccaggagggcagactcggggcagggccttcgccacttttgtgctttgatcaagatgtggtaacttctttccctgggccccacaggccctataaagggaggctggttctagtgggacgagctcagccgcctcctcagtgccaggagcctgctggaaagagtttgtcctctcacttctggagaagatgcagacacaggagatcctgaggatactgcgactgcctgagctaggtgacttgggacagtttttccgcagcctctcggccaccaccctcgtgagtatgggtgccctggctgccatccttgcctactggttcactcaccggccaaaggccttgcagccgccatgcaacctcctgatgcagtcagaagaagtagaggacagtggcggggcacggcgatctgtgattgggtctggccctcagctacttacccactactatgatgatgcccggaccatgtaccaggtgttccgccgtgggcttagcatctcagggaatgggccctgtcttggtttcaggaagcctaagcagccttaccagtggctgtcctaccaggaggtggccgacagggctgaatttctggggtccggacttctccagcacaattgtaaagcatgcactgatcagtttattggtgtttttgcacaaaatcggccagagtggatcattgtggagctggcctgctacacatattccatggtggtggtcccgctctatgacaccctgggccctggggctatccgctacatcatcaatacagcggacatcagcaccgtgattgtggacaaacctcagaaggctgtgcttctgctagagcatgtggagaggaaggagactccaggcctcaagctgatcatcctcatggacccattcgaagaagccctgaaagagagagggcagaagtgcggggtggtcattaagtccatgcaggccgtggaggactgtggccaagagaatcaccaggctcctgtgcccccgcagcctgatgacctctccattgtgtgtttcacaagcggcacgacagggaacccaaaaggtgcgatgctcacccatgggaacgtggtggctgatttctcaggctttctgaaagtgacagagagtcagtgggctcccacttgtgcggatgtgcacatttcctatttgcctttagcacacatgtttgagcgaatggtgcagtctgtcgtctattgccacggagggcgtgttggcttcttccagggagatatccgccttctctcagatgacatgaaggctctatgccccaccatcttccctgtggtcccacgactgctgaaccggatgtacgacaagatcttcagccaggcaaacacaccattaaagcgctggctcctggagtttgcagcaaagcgtaagcaagccgaggtccggagtggaatcatcaggaatgatagtatctgggatgaactcttctttaataagattcaggccagtcttggtgggtgtgtgcggatgattgttactggagcagccccagcatcaccaacagttctgggatttctccgggcagctctagggtgccaggtttatgaaggttatggccaaactgagtgcacagctggatgtaccttcaccactcctggcgactggacctcagggcacgtaggggcgccacttccctgcaatcatatcaagctcgttgatgttgaggaactgaactactgggcctgcaaaggagagggagagatatgtgtgagaggaccaaatgtgttcaaaggctacttgaaagatccagacaggacgaaggaggccctggacagcgatggctggcttcacactggagacatcggaaaatggctgccggcaggaactcttaaaattattgatcggaaaaagcatatatttaaacttgctcagggagaatatgttgcacccgagaagattgagaacatctacatccggagccaacctgtggcgcaaatctatgtccatggggacagcttaaaggcctttttggtaggcattgttgtgcctgaccctgaagttatgccctcctgggcccagaagagaggaattgaaggaacatatgcagatctctgcacaaataaggatctgaagaaagccattttggaagatatggtgaggttaggaaaagaaagtggactccattcttttgagcaggttaaagccattcacatccattctgacatgttctcagttcaaaatggcttgctgacaccaacactaaaagctaagagacctgagctgagagagtacttcaaaaaacaaatagaagagctttactcaatctccatgtgaagttcaaggaaagttcttctcagtgtaatgaactgtctagcaatattatagttattcttgaaagtaatgagtcaaaatgacacagctgaaaatgaataagcatctgattttatgactgagccttttcctgtcccaagaggtctttaacaatattttctctatcatcaatgagtatattttatttttattataaaaatgatattgtggtggactgctaaaaatatcacaaatggcaatgtaaaaatcaagacattttctcaagaactgtgtaccactaaaagtaatatattgtcaatgttcacagaactattaaacataaaggaaaaa

SEQ ID NO: 185516 - DNA, 2148 bp, Artificial Sequence
  derived and/or modified sequence
gggctgcggggctgcggggctgcgggtcggggaggccgggccgggccgggccgggccccgctgaccgccatgctgaccttcttcctcgtgtcggggggctccctctggctattcgtagagtttgtcctctcacttctggagaagatgcagacacaggagatcctgaggatactgcgactgcctgagctaggtgacttgggacagtttttccgcagcctctcggccaccaccctcgtgagtatgggtgccctggctgccatccttgcctactggttcactcaccggccaaaggccttgcagccgccatgcaacctcctgatgcagtcagaagaagtagaggacagtggcggggcacggcgatctgtgattgggtctggccctcagctacttacccactactatgatgatgcccggaccatgtaccaggtgttccgccgtgggcttagcatctcagggaatgggccctgtcttggtttcaggaagcctaagcagccttaccagtggctgtcctaccaggaggtggccgacagggctgaatttctggggtccggacttctccagcacaattgtaaagcatgcactgatcagtttattggtgtttttgcacaaaatcggccagagtggatcattgtggagctggcctgctacacatattccatggtggtggtcccgctctatgacaccctgggccctggggctatccgctacatcatcaatacagcggacatcagcaccgtgattgtggacaaacctcagaaggctgtgcttctgctagagcatgtggagaggaaggagactccaggcctcaagctgatcatcctcatggacccattcgaagaagccctgaaagagagagggcagaagtgcggggtggtcattaagtccatgcaggccgtggaggactgtggccaagagaatcaccaggctcctgtgcccccgcagcctgatgacctctccattgtgtgtttcacaagcggcacgacagggaacccaaaaggtgcgatgctcacccatgggaacgtggtggctgatttctcaggctttctgaaagtgacagagagtcagtgggctcccacttgtgcggatgtgcacatttcctatttgcctttagcacacatgtttgagcgaatggtgcagtctgtcgtctattgccacggagggcgtgttggcttcttccagggagatatccgccttctctcagatgacatgaaggctctatgccccaccatcttccctgtggtcccacgactgctgaaccggatgtacgacaagatcttcagccaggcaaacacaccattaaagcgctggctcctggagtttgcagcaaagcgtaagcaagccgaggtccggagtggaatcatcaggaatgatagtatctgggatgaactcttctttaataagattcaggccagtcttggtgggtgtgtgcggatgattgttactggagcagccccagcatcaccaacagttctgggatttctccgggcagctctagggtgccaggtttatgaaggttatggccaaactgagtgcacagctggatgtaccttcaccactcctggcgactggacctcagggcacgtaggggcgccacttccctgcaatcatatcaagctcgttgatgttgaggaactgaactactgggcctgcaaaggagagggagagatatgtgtgagaggaccaaatgtgttcaaaggctacttgaaagatccagacaggacgaaggaggccctggacagcgatggctggcttcacactggagacatcggaaaatggctgccggcaggaactcttaaaattattgatcggaaaaagcatatatttaaacttgctcagggagaatatgttgcacccgagaagattgagaacatctacatccggagccaacctgtggcgcaaatctatgtccatggggacagcttaaaggcctttttggtaggcattgttgtgcctgaccctgaagttatgccctcctgggcccagaagagaggaattgaaggaacatatgcagatctctgcacaaataaggatctgaagaaagccattttggaagatatggtgaggttaggaaaagaaagtggactccattcttttgagcaggacctaccacagtgcttaatacagattaaggtgttcagtaaatattga

SEQ ID NO: 185517 - DNA, 2180 bp, Artificial Sequence
  derived and/or modified sequence
gacaccgcggtcagtgcggggcaagccccagacccggccggccaggctgcagggcagggaagtttgtcctctcacttctggagaagatgcagacacaggagatcctgaggatactgcgactgcctgagctaggtgacttgggacagtttttccgcagcctctcggccaccaccctcgtgagtatgggtgccctggctgccatccttgcctactggttcactcaccggccaaaggccttgcagccgccatgcaacctcctgatgcagtcagaagaagtagaggacagtggcggggcacggcgatctgtgattgggtctggccctcagctacttacccactactatgatgatgcccggaccatgtaccaggtgttccgccgtgggcttagcatctcagggaatgggccctgtcttggtttcaggaagcctaagcagccttaccagtggctgtcctaccaggaggtggccgacagggctgaatttctggggtccggacttctccagcacaattgtaaagcatgcactgatcagtttattggtgtttttgcacaaaatcggccagagtggatcattgtggagctggcctgctacacatattccatggtggtggtcccgctctatgacaccctgggccctggggctatccgctacatcatcaatacagcggacatcagcaccgtgattgtggacaaacctcagaaggctgtgcttctgctagagcatgtggagaggaaggagactccaggcctcaagctgatcatcctcatggacccattcgaagaagccctgaaagagagagggcagaagtgcggggtggtcattaagtccatgcaggccgtggaggactgtggccaagagaatcaccaggctcctgtgcccccgcagcctgatgacctctccattgtgtgtttcacaagcggcacgacagggaacccaaaaggtgcgatgctcacccatgggaacgtggtggctgatttctcaggctttctgaaagtgacagagagtcagtgggctcccacttgtgcggatgtgcacatttcctatttgcctttagcacacatgtttgagcgaatggtgcagtctgtcgtctattgccacggagggcgtgttggcttcttccagggagatatccgccttctctcagatgacatgaaggctctatgccccaccatcttccctgtggtcccacgactgctgaaccggatgtacgacaagatcttcagccaggcaaacacaccattaaagcgctggctcctggagtttgcagcaaagcgtaagcaagccgaggtccggagtggaatcatcaggaatgatagtatctgggatgaactcttctttaataagattcaggccagtcttggtgggtgtgtgcggatgattgttactggagcagccccagcatcaccaacagttctgggatttctccgggcagctctagggtgccaggtttatgaaggttatggccaaactgagtgcacagctggatgtaccttcaccactcctggcgactggacctcagggcacgtaggggcgccacttccctgcaatcatatcaagctcgttgatgttgaggaactgaactactgggcctgcaaaggagagggagagatatgtgtgagaggaccaaatgtgttcaaaggctacttgaaagatccagacaggacgaaggaggccctggacagcgatggctggcttcacactggagacatcggaaaatggctgccggcaggaactcttaaaattattgatcggaaaaagcatatatttaaacttgctcagggagaatatgttgcacccgagaagattgagaacatctacatccggagccaacctgtggcgcaaatctatgtccatggggacagcttaaaggcctttttggtaggcattgttgtgcctgaccctgaagttatgccctcctgggcccagaagagaggaattgaaggaacatatgcagatctctgcacaaataaggatctgaagaaagccattttggaagatatggtgaggttaggaaaagaaagtggactccattcttttgagcaggttaaagccattcacatccattctgacatgttctcagttcaaaatggcttgctgacaccaacactaaaagctaagagacctgagctgagagagtacttcaaaaaacaaatagaagagctttactcaatctccatgtga

SEQ ID NO: 185518 - protein, 1219 aa, Artificial Sequence
  derived and/or modified sequence
MFGAGDEDDTDFLSPSGGARLASLFGLDQAAAGHGNEFFQYTAPKQPKKGQGTAATGNQATPKTAPATMSTPTILVATAVHAYRYTNGQYVKQGKFGAAVLGNHTAREYRILLYISQQQPVTVARIHVNFELMVRPNNYSTFYDDQRQNWSIMFESEKAAVEFNKQVCIAKCNSTSSLDAVLSQDLIVADGPAVEVGDSLEVAYTGWLFQNHVLGQVFDSTANKDKLLRLKLGSGKVIKGWEDGMLGMKKGGKRLLIVPPACAVGSEGVIGWTQATDSILVFEVEVRRVKFARDSGSDGHSVSSRDSAAPSPIPGADNLSADPVVSPPTSIPFKSGEPALRTKSNSLSEQLAINTSPDAVKAKLISRMAKMGQPMLPILPPQLDSNDSEIEDVNTLQGGGQPVVTPSVQPSLHPAHPALPQMTSQAPQPSVTGLQAPSAALMQVSSLDSHSAVSGNAQSFQPYAGMQAYAYPQASAVTSQLQPVRPLYPAPLSQPPHFQGSGDMASFLMTEARQHNTEIRMAVSKVADKMDHLMTKVEELQKHSAGNSMLIPSMSVTMETSMIMSNIQRIIQENERLKQEILEKSNRIEEQNDKISELIERNQRYVEQSNLMMEKRNNSLQTATENTQARVLHAEQEKAKVTEELAAATAQVSHLQLKMTAHQKKETELQMQLTESLKETDLLRGQLTKVQAKLSELQETSEQAQSKFKSEKQNRKQLELKVTSLEEELTDLRVEKESLEKNLSERKKKSAQERSQAEEEIDEIRKSYQEELDKLRQLLKKTRVSTDQAAAEQLSLVQAELQTQWEAKCEHLLASAKDEHLQQYQEVCAQRDAYQQKLVQLQEKCLALQAQITALTKQNEQHIKELEKNKSQMSGVEAAASDPSEKVKKIMNQVFQSLRREFELEESYNGRTILGTIMNTIKMVTLQLLNQQEQEKEESSSEEEEEKAEERPRRPSQEQSASASSGQPQAPLNRERPESPMVPSEQVVEEAVPLPPQALTTSQDGHRRKGDSEAEALSEIKDGSLPPELSCIPSHRVLGPPTSIPPEPLGPVSMDSECEESLAASPMAAKPDNPSGKVCVREVAPDGPLQESSTRLSLTSDPEEGDPLALGPESPGEPQPPQLKKDDVTSSTGPHKELSSTEAGSTVAGAALRPSHHSQRSSLSGDEEDELFKGATLKALRPKAQPEEEDEDEVSMKGRPPPTPLFGDDDDDDDIDWLG

SEQ ID NO: 185519 - protein, 497 aa, Artificial Sequence
  derived and/or modified sequence
DVGGDRPWDSGNTQLPPRNPVKANAMFGAGDEDDTDFLSPSGGARLASLFGLDQAAAGHGNEFFQYTAPKQPKKGQGTAATGNQATPKTAPATMSTPTILVATAVHAYRYTNGQYVKQGKFGAAVLGNHTAREYRILLYISQQQPVTVARIHVNFELMVRPNNYSTFYDDQRQNWSIMFESEKAAVEFNKQVCIAKCNSTSSLDAVLSQDLIVADGPAVEVGDSLEVAYTGWLFQNHVLGQVFDSTANKDKLLRLKLGSGKVIKGWEDGMLGMKKGGKRLLIVPPACAVGSEGVIGWTQATDSILVFEVEVRRVKFARDSGSDGHSVSSRDSAAPSPIPGADNLSADPVVSPPTSIPFKSGEPALRTKSNSLSEQLAINTSPDAVKAKLISRMAKMGQPMLPILPPQLDSNDSEIEDVNTLQGGGQPVVTPSVQPSLHPAHPALPQMTSQAPQPSVTGLQAPSAALMQVSSLDSHSAVSGNAQSFQVTFYNRINYIL

SEQ ID NO: 185520 - protein, 1244 aa, Artificial Sequence
  derived and/or modified sequence
DVGGDRPWDSGNTQLPPRNPVKANAMFGAGDEDDTDFLSPSGGARLASLFGLDQAAAGHGNEFFQYTAPKQPKKGQGTAATGNQATPKTAPATMSTPTILVATAVHAYRYTNGQYVKQGKFGAAVLGNHTAREYRILLYISQQQPVTVARIHVNFELMVRPNNYSTFYDDQRQNWSIMFESEKAAVEFNKQVCIAKCNSTSSLDAVLSQDLIVADGPAVEVGDSLEVAYTGWLFQNHVLGQVFDSTANKDKLLRLKLGSGKVIKGWEDGMLGMKKGGKRLLIVPPACAVGSEGVIGWTQATDSILVFEVEVRRVKFARDSGSDGHSVSSRDSAAPSPIPGADNLSADPVVSPPTSIPFKSGEPALRTKSNSLSEQLAINTSPDAVKAKLISRMAKMGQPMLPILPPQLDSNDSEIEDVNTLQGGGQPVVTPSVQPSLHPAHPALPQMTSQAPQPSVTGLQAPSAALMQVSSLDSHSAVSGNAQSFQPYAGMQAYAYPQASAVTSQLQPVRPLYPAPLSQPPHFQGSGDMASFLMTEARQHNTEIRMAVSKVADKMDHLMTKVEELQKHSAGNSMLIPSMSVTMETSMIMSNIQRIIQENERLKQEILEKSNRIEEQNDKISELIERNQRYVEQSNLMMEKRNNSLQTATENTQARVLHAEQEKAKVTEELAAATAQVSHLQLKMTAHQKKETELQMQLTESLKETDLLRGQLTKVQAKLSELQETSEQAQSKFKSEKQNRKQLELKVTSLEEELTDLRVEKESLEKNLSERKKKSAQERSQAEEEIDEIRKSYQEELDKLRQLLKKTRVSTDQAAAEQLSLVQAELQTQWEAKCEHLLASAKDEHLQQYQEVCAQRDAYQQKLVQLQEKCLALQAQITALTKQNEQHIKELEKNKSQMSGVEAAASDPSEKVKKIMNQVFQSLRREFELEESYNGRTILGTIMNTIKMVTLQLLNQQEQEKEESSSEEEEEKAEERPRRPSQEQSASASSGQPQAPLNRERPESPMVPSEQVVEEAVPLPPQALTTSQDGHRRKGDSEAEALSEIKDGSLPPELSCIPSHRVLGPPTSIPPEPLGPVSMDSECEESLAASPMAAKPDNPSGKVCVREVAPDGPLQESSTRLSLTSDPEEGDPLALGPESPGEPQPPQLKKDDVTSSTGPHKELSSTEAGSTVAGAALRPSHHSQRSSLSGDEEDELFKGATLKALRPKAQPEEEDEDEVSMKGRPPPTPLFGDDDDDDDIDWLG

SEQ ID NO: 185521 - DNA, 3735 bp, Artificial Sequence
  derived and/or modified sequence
gacgtgggcggcgacagaccctgggacagcggcaacacccagctgccccccagaaaccccgtgaaggccaacgccatgttcggcgccggcgacgaggacgacaccgacttcctgagccccagcggcggcgccagactggccagcctgttcggcctggaccaggccgccgccggccacggcaacgagttcttccagtacaccgcccccaagcagcccaagaagggccagggcaccgccgccaccggcaaccaggccacccccaagaccgcccccgccaccatgagcacccccaccatcctggtggccaccgccgtgcacgcctacagatacaccaacggccagtacgtgaagcagggcaagttcggcgccgccgtgctgggcaaccacaccgccagagagtacagaatcctgctgtacatcagccagcagcagcccgtgaccgtggccagaatccacgtgaacttcgagctgatggtgagacccaacaactacagcaccttctacgacgaccagagacagaactggagcatcatgttcgagagcgagaaggccgccgtggagttcaacaagcaggtgtgcatcgccaagtgcaacagcaccagcagcctggacgccgtgctgagccaggacctgatcgtggccgacggccccgccgtggaggtgggcgacagcctggaggtggcctacaccggctggctgttccagaaccacgtgctgggccaggtgttcgacagcaccgccaacaaggacaagctgctgagactgaagctgggcagcggcaaggtgatcaagggctgggaggacggcatgctgggcatgaagaagggcggcaagagactgctgatcgtgccccccgcctgcgccgtgggcagcgagggcgtgatcggctggacccaggccaccgacagcatcctggtgttcgaggtggaggtgagaagagtgaagttcgccagagacagcggcagcgacggccacagcgtgagcagcagagacagcgccgcccccagccccatccccggcgccgacaacctgagcgccgaccccgtggtgagcccccccaccagcatccccttcaagagcggcgagcccgccctgagaaccaagagcaacagcctgagcgagcagctggccatcaacaccagccccgacgccgtgaaggccaagctgatcagcagaatggccaagatgggccagcccatgctgcccatcctgcccccccagctggacagcaacgacagcgagatcgaggacgtgaacaccctgcagggcggcggccagcccgtggtgacccccagcgtgcagcccagcctgcaccccgcccaccccgccctgccccagatgaccagccaggccccccagcccagcgtgaccggcctgcaggcccccagcgccgccctgatgcaggtgagcagcctggacagccacagcgccgtgagcggcaacgcccagagcttccagccctacgccggcatgcaggcctacgcctacccccaggccagcgccgtgaccagccagctgcagcccgtgagacccctgtaccccgcccccctgagccagcccccccacttccagggcagcggcgacatggccagcttcctgatgaccgaggccagacagcacaacaccgagatcagaatggccgtgagcaaggtggccgacaagatggaccacctgatgaccaaggtggaggagctgcagaagcacagcgccggcaacagcatgctgatccccagcatgagcgtgaccatggagaccagcatgatcatgagcaacatccagagaatcatccaggagaacgagagactgaagcaggagatcctggagaagagcaacagaatcgaggagcagaacgacaagatcagcgagctgatcgagagaaaccagagatacgtggagcagagcaacctgatgatggagaagagaaacaacagcctgcagaccgccaccgagaacacccaggccagagtgctgcacgccgagcaggagaaggccaaggtgaccgaggagctggccgccgccaccgcccaggtgagccacctgcagctgaagatgaccgcccaccagaagaaggagaccgagctgcagatgcagctgaccgagagcctgaaggagaccgacctgctgagaggccagctgaccaaggtgcaggccaagctgagcgagctgcaggagaccagcgagcaggcccagagcaagttcaagagcgagaagcagaacagaaagcagctggagctgaaggtgaccagcctggaggaggagctgaccgacctgagagtggagaaggagagcctggagaagaacctgagcgagagaaagaagaagagcgcccaggagagaagccaggccgaggaggagatcgacgagatcagaaagagctaccaggaggagctggacaagctgagacagctgctgaagaagaccagagtgagcaccgaccaggccgccgccgagcagctgagcctggtgcaggccgagctgcagacccagtgggaggccaagtgcgagcacctgctggccagcgccaaggacgagcacctgcagcagtaccaggaggtgtgcgcccagagagacgcctaccagcagaagctggtgcagctgcaggagaagtgcctggccctgcaggcccagatcaccgccctgaccaagcagaacgagcagcacatcaaggagctggagaagaacaagagccagatgagcggcgtggaggccgccgccagcgaccccagcgagaaggtgaagaagatcatgaaccaggtgttccagagcctgagaagagagttcgagctggaggagagctacaacggcagaaccatcctgggcaccatcatgaacaccatcaagatggtgaccctgcagctgctgaaccagcaggagcaggagaaggaggagagcagcagcgaggaggaggaggagaaggccgaggagagacccagaagacccagccaggagcagagcgccagcgccagcagcggccagccccaggcccccctgaacagagagagacccgagagccccatggtgcccagcgagcaggtggtggaggaggccgtgcccctgcccccccaggccctgaccaccagccaggacggccacagaagaaagggcgacagcgaggccgaggccctgagcgagatcaaggacggcagcctgccccccgagctgagctgcatccccagccacagagtgctgggcccccccaccagcatcccccccgagcccctgggccccgtgagcatggacagcgagtgcgaggagagcctggccgccagccccatggccgccaagcccgacaaccccagcggcaaggtgtgcgtgagagaggtggcccccgacggccccctgcaggagagcagcaccagactgagcctgaccagcgaccccgaggagggcgaccccctggccctgggccccgagagccccggcgagccccagcccccccagctgaagaaggacgacgtgaccagcagcaccggcccccacaaggagctgagcagcaccgaggccggcagcaccgtggccggcgccgccctgagacccagccaccacagccagagaagcagcctgagcggcgacgaggaggacgagctgttcaagggcgccaccctgaaggccctgagacccaaggcccagcccgaggaggaggacgaggacgaggtgagcatgaagggcagacccccccccacccccctgttcggcgacgacgacgacgacgacgacatcgactggctgggctag

SEQ ID NO: 185522 - DNA, 3660 bp, Artificial Sequence
  derived and/or modified sequence
atgtttggagcgggagacgaggacgacactgactttctttcacctagtggcggagcacgcctcgcttcactcttcgggctggaccaagctgccgctgggcatggaaatgaatttttccagtataccgctcccaaacagcctaaaaagggccagggcactgctgccaccggcaaccaggcaacacccaaaaccgctccagctaccatgagcacccctaccattctggtggctacagctgtgcacgcttatcgatacacaaatggccagtacgtaaagcaaggaaagttcggagctgcggtcctgggaaaccacacagcacgtgaataccggatcttattgtatatttcccagcagcagccagtcactgtggctcgtattcatgttaatttcgaattgatggttaggccaaataactactctactttttacgatgaccagagacagaattggtcaataatgttcgagagtgagaaagctgcagtcgagttcaataagcaggtctgcatcgccaaatgtaactccacgagttccctggacgccgtcctcagccaggacctgattgtggccgatggacctgccgtggaagttggagactcactcgaggtcgcctacacgggatggctttttcagaatcacgtcctggggcaagtgttcgattcgacagccaacaaagacaagctgctgagattaaaactgggttccggtaaggtaatcaagggctgggaagatgggatgctggggatgaagaaaggcggcaagcgtctgctgattgtccccccggcctgcgccgtgggttctgaaggtgttatcgggtggacacaggccacggatagtattttagtgttcgaggtggaggtccggcgggtcaagttcgctagggacagcggtagcgatggccattccgtgtccagcagagacagtgccgctccaagccctatccccggcgccgacaatctcagcgctgaccctgttgtttccccgccgacctccattccctttaagtctggggaacctgccttgcgcaccaagagcaactccctctctgagcagctggccattaacactagccctgacgccgtgaaggctaagcttatctcccggatggccaaaatggggcagcctatgcttccaattttacccccacaattagacagcaatgactctgagatcgaagatgtaaacacactgcagggtggcggccaaccagtggtgaccccgtcagtgcaaccctccctgcatccagctcacccagccctcccccagatgacctcgcaagcgccacaaccaagcgtgacagggctgcaggcaccttcagccgccttgatgcaggtgagttcacttgattcccacagtgccgtttctggaaatgctcagtctttccagccttatgccggaatgcaagcatatgcatatccgcaagcatcagcagtcacgtcccagttacaacctgttaggcctctataccctgcccccttgtcccagcccccccactttcaggggtccggggacatggcgtcctttctgatgacggaggcaaggcagcataataccgaaatccggatggccgtgagcaaggtggctgacaagatggatcacctaatgacgaaggtggaagagctgcaaaaacactcggcaggtaactctatgttgatccccagcatgtcagttactatggagacctccatgatcatgtcgaacatccagcgtattattcaggagaacgaacgactgaagcaggagatcttagaaaagtccaatcgtatcgaggagcagaacgataagatttctgagctaattgaacgcaaccagcggtatgtagagcaaagcaaccttatgatggaaaagcgcaacaacagtttgcagacagccacagaaaacacccaggctcgggttctgcacgctgaacaggagaaagctaaggtcacagaggagctggcagctgctactgcgcaggtttctcacctgcagctcaaaatgaccgctcaccagaagaaagagacggaacttcagatgcagctcacagagtccttgaaggaaacagacctcctgagagggcaactgacgaaggtgcaagccaagctcagtgaactgcaggagacatctgagcaggcccagagcaagttcaagtcggagaaacagaatcgtaagcagttagaactgaaggtgactagcctggaagaagagctcaccgatctcagagtggagaaagaatcactggagaaaaacttgtctgagagaaagaaaaagtcagcccaagaacggtcacaggctgaggaggagatcgacgagatcaggaagtcttaccaagaggaactagacaagttgagacaactgctaaaaaaaacgagggtgtcaaccgaccaggcagccgctgagcagctctccttagtccaagctgagctgcagacccagtgggaagccaaatgcgagcacctcctggccagtgcaaaagatgaacatttgcagcagtaccaagaagtctgtgctcagcgcgacgcttaccaacaaaagttggtccagctgcaggaaaaatgcctcgctctacaagctcagatcacagcactcaccaaacagaacgagcagcacatcaaggaactcgaaaaaaacaagagtcagatgagtggcgtcgaggcagccgcatccgaccccagcgagaaagtcaaaaaaatcatgaaccaggtatttcagtccttacgacgcgagtttgaactcgaagagtcttacaacggtcgcaccatacttggcacgatcatgaacaccattaaaatggtgacactgcagctacttaaccagcaggagcaagaaaaggaggagtctagttctgaggaggaggaagaaaaggctgaggagcgccctagacgcccttcccaggagcaaagcgcctccgcctcctcaggacagcctcaagcacctttgaatcgggaacggccagagagtcccatggtgcctagcgaacaggtggttgaagaagctgtgcccttacctccccaagcgctcaccacgagtcaggatggacaccgcaggaagggagatagcgaagcggaggcgcttagtgaaataaaagatggttcactgcctcccgaactgtcttgtatcccaagtcatcgggtcctagggccaccaacttcaataccccctgaacccctgggcccggtgtcaatggattccgaatgtgaagaaagcttggccgcctccccgatggcagccaaaccagataacccatctggaaaggtttgcgtcagagaggtggcgccggacggcccactgcaggaatcctccacccggctctccctcacgagcgatcccgaggagggagacccactggccctggggcctgagagtccgggtgaaccccagcctccccagctgaaaaaagacgatgtgacttcaagcacaggaccccataaagagctgagctcaactgaagcagggagcaccgtggccggagccgccctacgccctagccaccacagccagcggagcagtcttagcggggacgaggaggatgagctgtttaaaggcgctacactgaaggcattgcgacccaaggcacagcctgaggaggaggatgaggacgaagtcagtatgaagggtagaccgccccctactcccctctttggtgatgacgatgacgacgacgacatcgattggttgggctag

SEQ ID NO: 185523 - DNA, 3735 bp, Artificial Sequence
  derived and/or modified sequence
gatgttggaggcgaccggccctgggactctggaaacacccagctgcccccaagaaaccccgtgaaggcaaacgcaatgtttggagcgggagacgaggatgataccgatttcctatctccttctgggggtgcacggctggcttctctcttcggtctggaccaggccgctgccggacatggaaatgaattttttcagtacacagcaccgaaacagcctaagaaagggcagggcaccgctgccacgggtaaccaggccaccccaaagaccgctcctgccacaatgagcaccccaaccatcctggtggctacagcggtccatgcgtaccgctataccaatggccagtatgtgaagcagggaaagtttggggccgccgtgctggggaatcacactgctcgcgagtaccgtatcctgctctacatctcccaacagcagcccgtgacagtcgcacggattcacgttaactttgagctgatggttcgcccaaataactacagtactttctatgatgaccagcgtcagaattggagcatcatgttcgagtccgagaaggcggcagtggaatttaataagcaggtgtgcattgctaaatgtaattctacatcatctttagacgcagttctgagccaggatctcatagtggcagacggaccagccgtggaagttggcgactccctggaagtcgcctatacagggtggctcttccagaatcacgttctgggccaggtctttgatagcacagctaataaggacaagctcctgaggttgaagctgggctcaggcaaagtgatcaagggttgggaagacggaatgctcgggatgaagaagggaggaaaaaggctcctcattgttcctccagcctgcgctgtggggagtgaaggcgttatagggtggacccaagcaaccgactcaatactcgtattcgaagtggaagtgaggagagtgaagttcgcccgcgattcaggaagcgatggtcactccgtaagtagccgagactctgccgctccttcacctatccccggagctgacaatctgagcgccgaccctgtcgtatcaccccctacttcaatacccttcaaaagcggagaacctgcccttcgaacaaagtccaattccctctcagagcagctggctattaacacctctcctgacgccgttaaggctaagctcatatcccgaatggcaaaaatggggcagcccatgctccctatcctgccaccgcagcttgatagcaatgactccgagattgaagacgtgaacacacttcagggcggagggcagcctgtggtcaccccttcagtgcaaccttccctgcaccccgcgcaccccgcgctgcctcagatgacctcacaggcccctcagccgtctgtaactggcctgcaggccccatcagctgctctgatgcaggtgagttcccttgatagccactcagccgtcagcggcaacgctcagtcattccaaccatacgccggtatgcaagcatatgcgtacccccaggcctcagccgttactagtcagctccagccagtgaggcccctataccctgcccctctgagtcagcccccccacttccaaggaagcggtgacatggcctcgttcctaatgacagaagcgagacagcacaacactgaaatccggatggccgtgtctaaggtagccgataaaatggaccacctgatgactaaggtggaagagctgcagaagcactccgctggcaactctatgctgatcccttctatgtccgtaacgatggagacatccatgatcatgtctaatatacagaggataattcaggagaacgaacggctcaagcaggagatcttggaaaaaagcaacagaatcgaagaacagaacgataaaatctcagagttaatcgagcgaaaccagagatatgtagagcagagcaacctcatgatggagaaaagaaataactctcttcaaaccgctaccgaaaatacccaggcacgggttttacacgcagagcaagagaaagccaaggtgactgaggagcttgcagcagctacggcacaggtttcgcacctgcagctgaagatgaccgcccaccagaagaaagaaacagaactgcagatgcagctaaccgaaagtctcaaggagaccgatctgctccgtgggcagctgactaaggtccaggctaaactttccgaactccaggagacatcggaacaggcgcaaagcaaattcaaatctgaaaaacaaaatagaaaacaacttgaactcaaagtgaccagcttggaggaggaactgactgacctacgcgtagagaaagagtccctggaaaagaatctgtccgagaggaagaaaaaatccgctcaggaaaggtctcaggcagaagaggagatcgatgagatccgtaaatcctatcaggaagaactggataagcttagacagctgctgaagaagactagagtgagcacagaccaggcagcggcagaacagctctcactcgtgcaggcagagctccagacacagtgggaagccaagtgcgagcacctgctcgcttcagccaaagacgagcaccttcagcagtatcaagaagtttgcgcccagcgggacgcttaccagcagaagctagtgcaactgcaggaaaagtgccttgctcttcaggcgcaaatcacggcattgactaaacagaacgaacaacatattaaggagctggagaagaataagtctcagatgagcggcgtcgaggccgccgcttccgaccccagcgaaaaagtaaagaagatcatgaaccaagttttccaaagcctgagaagagaatttgagctggaggagagttacaacgggcgtactatactgggaacaattatgaatacaatcaagatggttactctccagctcttgaaccagcaggaacaggagaaagaagagtcttcttctgaagaagaggaggagaaagctgaggaacggccccgacgccccagccaggaacagtctgcttctgccagcagcggtcagccgcaagcgccactgaacagagaacgccctgaatcgccgatggtccccagtgagcaagtggtggaagaggccgtgcctctcccccctcaggccctgacgacttctcaagatgggcaccggcgcaagggggattcagaggctgaggcattgagcgagatcaaagatggtagtctacctcctgaactaagctgtattccatctcaccgcgtgctggggccaccaactagtattccccccgaacctctgggtccagtttctatggactctgagtgtgaagaaagtctcgcagctagccctatggctgcaaagcctgataacccctctgggaaagtgtgcgtcagggaagtggcgcctgatggtcctctgcaggagtcttctacaagactgtcactaacaagtgaccccgaagagggtgatccgctagcattgggcccagagtctccaggcgagccccagccccctcagctgaagaaagatgatgtgacgagcagtaccggaccccacaaagaactgtcttccacagaagccggctctacagtcgccggcgcggcacttagaccaagtcaccacagccagagaagcagtctctctggggatgaggaggacgaattgttcaaaggagctacgctcaaagcacttcgccctaaggcgcagccagaggaggaagacgaggacgaggtttccatgaagggtagaccaccccctaccccactgtttggggatgacgacgacgatgatgatatagactggctgggttag

SEQ ID NO: 185524 - DNA, 3660 bp, Artificial Sequence
  derived and/or modified sequence
atgtttggagctggagatgaagatgacacagacttcctgagccccagcggcggggcccggctggccagcctgtttggcctggaccaggccgccgccggccacggcaatgagttcttccagtacacagcccccaagcagcccaagaagggccagggcacagctgccaccggcaaccaggccacccccaagacagccccagccaccatgagcacccccaccatcctggtggccacagctgtgcacgcctaccgctacaccaacggccagtatgtgaagcagggcaagtttggagctgctgtgctgggcaaccacacagcccgggagtaccgcatcctgctgtacatcagccagcagcagcctgtgacagtggcccgcatccacgtgaactttgagctgatggtgcggcccaacaactacagcaccttctatgatgaccagaggcagaactggagcatcatgtttgagagcgagaaggctgctgtggagttcaacaagcaggtgtgcatcgccaagtgcaacagcaccagcagcctggatgctgtgctgagccaggacctgattgtggctgatggccctgctgtggaggtgggggacagcctggaggtggcctacacaggctggctgttccagaaccacgtgctgggccaggtgtttgacagcacagccaacaaggacaagctgctgcggctgaagctgggcagcggcaaggtgatcaagggctgggaggatggcatgctgggcatgaagaagggcggcaagaggctgctgattgtgcccccagcctgtgctgtgggcagcgagggcgtcatcggctggacccaggccacagacagcatcctggtgtttgaggtggaggtgagaagagtgaagtttgcccgggacagcggcagtgatggccacagcgtgagcagccgggacagcgctgcccccagccccatccctggagctgacaacctgtctgctgaccctgtggtgtccccacccaccagcatccccttcaagtctggagagcccgccctgcggaccaagagcaacagcctgtctgagcagctggccatcaacaccagcccagatgctgtgaaggccaagctgatcagcaggatggccaagatgggccagcccatgctgcccatcctgcccccccagctggacagcaatgacagcgagattgaagatgtgaacaccctgcagggcggcggccagcctgtggtgaccccatctgtgcagcccagcctgcacccagcccacccagccctgccccagatgaccagccaggccccccagcccagcgtgacaggcctgcaggcccccagcgctgccctgatgcaggtgagcagcctggacagccacagcgctgtgtctggaaatgcccagagcttccagccctatgccggcatgcaggcctatgcctacccccaggccagcgctgtgaccagccagctgcagcctgtgcggcccctgtacccagcccccctgagccagcccccccacttccagggcagcggggacatggccagcttcctgatgacagaggcccggcagcacaacacagagatccgcatggctgtgtccaaggtggccgacaagatggaccacctgatgaccaaggtggaggagctgcagaagcacagcgctggcaacagcatgctgatccccagcatgtctgtgaccatggagacctccatgatcatgagcaacatccagaggatcatccaggagaatgaaaggctgaagcaggagatcctggagaagagcaaccgcatcgaggagcagaatgacaagatcagcgagctgattgaaagaaaccagagatatgtggagcagagcaacctgatgatggagaagaggaacaacagcctgcagacagccacagagaacacccaggcccgggtgctgcacgccgagcaggagaaggccaaggtgacagaggagctggccgccgccacagcccaggtgagccacctgcagctgaagatgacagcccaccagaagaaggagacagagctgcagatgcagctgacagagagcctgaaggagacagacctgctgcggggccagctgaccaaggtgcaggccaagctgtctgagctgcaggagaccagcgagcaggcccagagcaagttcaagtctgagaagcagaacaggaagcagctggagctgaaggtgaccagcctggaggaggagctgacagacctgcgggtggagaaggagagcctggagaagaacctgtctgagaggaagaagaagagcgcccaggagaggagccaggccgaggaggagattgatgagatcaggaagagctaccaggaggagctggacaagctgcggcagctgctgaagaagaccagggtgtccacagaccaggccgctgctgagcagctgagcctggtgcaggccgagctgcagacccagtgggaggccaagtgtgagcacctgctggccagcgccaaggatgagcacctgcagcagtaccaggaggtgtgtgcccagagagatgcctaccagcagaagctggtgcagctgcaggagaagtgcctggccctgcaggcccagatcacagccctgaccaagcagaatgagcagcacatcaaggagctggagaagaacaagagccagatgtctggagtggaggccgccgccagtgaccccagcgagaaggtgaagaagatcatgaaccaggtgttccagagcctgcggcgggagtttgagctggaggagagctacaatggaagaaccatcctgggcaccatcatgaacaccatcaagatggtgaccctgcagctgctgaaccagcaggagcaggagaaggaggagagcagcagcgaggaggaggaggagaaggccgaggagcggccccggcggcccagccaggagcagagcgccagcgccagcagcggccagccccaggcccccctgaaccgggagaggcctgagagccccatggtgcccagcgagcaggtggtggaggaggccgtgcccctgcccccccaggccctgaccaccagccaggacggccacagaagaaaaggagacagcgaggccgaggccctgtctgagatcaaggatggcagcctgcccccagagctgagctgcatccccagccaccgggtgctgggcccccccaccagcatccccccagagcccctgggccctgtgtccatggacagtgaatgtgaggagagcctggccgccagccccatggccgccaagccagacaaccccagcggcaaggtgtgtgtgcgggaggtggccccagatggccccctgcaggagagcagcacccggctgagcctgaccagtgaccctgaggagggggaccccctggccctgggccctgagagccctggagagccccagcccccccagctgaagaaggatgatgtgaccagcagcacaggcccccacaaggagctgagcagcacagaagctggcagcacagtggccggggccgccctgcggcccagccaccacagccagaggagcagcctgtctggagatgaggaggatgagctgttcaagggggccaccctgaaggccctgcggcccaaggcccagcctgaggaggaggatgaagatgaggtgtccatgaagggccggcccccacccacccccctgtttggagatgatgatgatgatgatgacatcgactggctgggctag

SEQ ID NO: 185525 - DNA, 3735 bp, Artificial Sequence
  derived and/or modified sequence
gatgtgggcggggaccggccctgggacagcggcaacacccagctgccccccaggaaccctgtgaaggccaatgccatgtttggagctggagatgaagatgacacagacttcctgagccccagcggcggggcccggctggccagcctgtttggcctggaccaggccgctgctggccatggaaatgagttcttccagtacacagcccccaagcagcccaagaagggccagggcacagctgccactggaaaccaggccacccccaagacagccccagccaccatgagcacccccaccatcctggtggccacagctgtgcacgcctaccgctacaccaacggccagtatgtgaagcagggcaagtttggagctgctgtgctgggcaaccacacagcccgggagtaccgcatcctgctgtacatcagccagcagcagcctgtgacagtggcccgcatccacgtgaactttgagctgatggtgcggcccaacaactacagcaccttctatgatgaccagaggcagaactggagcatcatgtttgaaagtgagaaggctgctgtggagttcaacaagcaggtgtgcatcgccaagtgcaacagcaccagcagcctggatgctgtgctgagccaggacctgattgtggctgatggccctgctgtggaggtgggggacagcctggaggtggcctacacaggctggctgttccagaaccacgtgctgggccaggtgtttgacagcacagccaacaaggacaagctgctgcggctgaagctgggcagcggcaaggtgatcaagggctgggaggatggcatgctgggcatgaagaagggcggcaagaggctgctgattgtgcccccagcctgtgctgtgggcagcgagggcgtgattggctggacccaggccacagacagcatcctggtgtttgaggtggaggtgcggcgggtgaagtttgcccgggacagcggcagtgatggccacagcgtgagcagccgggacagcgctgcccccagccccatccctggagctgacaacctgtctgctgaccctgtggtgagcccccccaccagcatccccttcaagagcggggagcccgccctgcggaccaagagcaacagcctgtctgagcagctggccatcaacaccagcccagatgctgtgaaggccaagctgatcagcaggatggccaagatgggccagcccatgctgcccatcctgcccccccagctggacagcaatgattctgaaattgaagatgtgaacaccctgcagggcggcggccagcctgtggtgacccccagcgtgcagcccagcctgcacccagcccacccagccctgccccagatgaccagccaggccccccagcccagcgtgacaggcctgcaggcccccagcgctgccctgatgcaggtgagcagcctggacagccacagcgctgtgtctggaaatgcccagagcttccagccctatgccggcatgcaggcctatgcctacccccaggccagcgctgtgaccagccagctgcagcctgtgcggcccctgtacccagcccccctgagccagcccccccacttccagggcagcggggacatggccagcttcctgatgacagaggcccggcagcacaacacagagatccgcatggctgtgtccaaggtggccgacaagatggaccacctgatgaccaaggtggaggagctgcagaagcacagcgctggcaacagcatgctgatccccagcatgtctgtgaccatggagacctccatgatcatgagcaacatccagaggatcatccaggagaatgaaaggctgaagcaggagatcctggagaagagcaacagaattgaggagcagaatgacaagatcagcgagctgattgaaagaaaccagcgctacgtggagcagagcaacctgatgatggagaagaggaacaacagcctgcagacagccacagagaacacccaggcccgggtgctgcatgctgagcaggagaaggccaaggtgacagaggagctggccgccgccacagcccaggtgagccacctgcagctgaagatgacagcccaccagaagaaggagacagagctgcagatgcagctgacagagagcctgaaggagacagacctgctgcggggccagctgaccaaggtgcaggccaagctgtctgagctgcaggagaccagcgagcaggcccagagcaagttcaagtctgagaagcagaacaggaagcagctggagctgaaggtgaccagcctggaggaggagctgacagacctgcgggtggagaaggagagcctggagaagaacctgtctgagaggaagaagaagagcgcccaggagaggagccaggccgaggaggagattgatgagatcaggaagagctaccaggaggagctggacaagctgcggcagctgctgaagaagaccagggtgtccacagaccaggccgctgctgagcagctgagcctggtgcaggccgagctgcagacccagtgggaggccaagtgtgagcacctgctggccagcgccaaggatgagcacctgcagcagtaccaggaggtgtgtgcccagagagatgcctaccagcagaagctggtgcagctgcaggagaagtgcctggccctgcaggcccagatcacagccctgaccaagcagaatgagcagcacatcaaggagctggagaagaacaagagccagatgtctggagtggaggccgccgccagtgaccccagcgagaaggtgaagaagatcatgaaccaggtgttccagagcctgcggcgggagtttgagctggaggagagctacaacggccgcaccatcctgggcaccatcatgaacaccatcaagatggtgaccctgcagctgctgaaccagcaggagcaggagaaggaggagagcagcagcgaggaggaggaggagaaggccgaggagcggccccggcggcccagccaggagcagagcgccagcgccagcagcggccagccccaggcccccctgaaccgggagaggcctgagagccccatggtgcccagcgagcaggtggtggaggaggccgtgcccctgcccccccaggccctgaccaccagccaggacggccacaggaggaagggggacagcgaggccgaggccctgtctgagatcaaggatggcagcctgcccccagagctgagctgcatccccagccaccgggtgctgggcccccccaccagcatccccccagagcccctgggccctgtgtccatggattctgaatgtgaggagagcctggccgccagccccatggccgccaagccagacaaccccagcggcaaggtgtgtgtgcgggaggtggccccagatggccccctgcaggagagcagcacccggctgagcctgaccagtgaccctgaggagggggaccccctggccctgggccctgagagccctggagagccccagcccccccagctgaagaaggatgatgtgaccagcagcacaggcccccacaaggagctgagcagcacagaggccggcagcacagtggccggggccgccctgcggcccagccaccacagccagaggagcagcctgtctggagatgaagaagatgagctgttcaagggggccaccctgaaggccctgcggcccaaggcccagcctgaggaggaggatgaagatgaggtgtccatgaagggccggcccccacccacccccctgtttggagatgatgatgatgatgatgacatcgactggctgggctag

SEQ ID NO: 185526 - DNA, 3660 bp, Artificial Sequence
  derived and/or modified sequence
atgttcggcgccggcgacgaggacgacaccgacttcctgagcccctccggaggcgcacgcttagcctccctgttcggcctagaccaggctgccgctggtcacgggaacgagttcttccagtatacagcgcctaagcagcccaagaagggtcaagggacagccgctaccgggaaccaagccacacccaaaaccgctcctgctactatgagtactccaaccattttggttgctacggctgtgcatgcctataggtatacaaacgggcagtatgtgaagcaggggaaatttggtgcagccgtcctaggtaaccacacagccagagagtataggatcctcttatatattagtcagcagcagccggtgacagtggcaagaattcacgttaattttgaactcatggttcgccctaataattatagcaccttctatgacgatcagcgacagaactggtctatcatgttcgagagcgaaaaggctgcagtggagtttaacaaacaggtgtgtatcgccaaatgcaattcaaccagttccctcgacgctgttcttagccaagatctgatcgtggcagacggccccgcagtggaggtgggcgacagcctggaagtggcctatactggctggctcttccagaatcatgtgcttggccaagtgttcgacagtaccgctaacaaggacaagctgctgagacttaaactgggcagcggcaaagtaatcaagggttgggaggacggtatgcttggcatgaagaaagggggcaagcgactgctaatcgttccccctgcctgtgccgttggcagtgaaggagtgataggttggacccaggcaaccgactccatcctggtcttcgaagtagaagtaagacgtgtcaagttcgctcgcgattccggcagtgacggccacagcgtgagttctcgagactctgccgccccttcacccattcctggggcagacaacctgtccgccgaccccgtggttagtcctccaaccagtataccattcaagtcaggagaaccagccctgcggaccaaaagtaatagcctgtcagagcagctggccatcaacacctcccccgacgctgttaaagcgaagctgattagcagaatggcaaagatgggccagcccatgcttccgatccttccaccccaattggatagcaacgatagcgagatcgaggatgtcaatacgctccaaggcggtggccaacccgtcgtgaccccatctgtccagcccagcttgcatcccgcgcatcccgcgctcccccagatgaccagtcaagctccccaaccctcagtgactgggctgcaggcaccctcagcggctctcatgcaggtttccagcctcgattcgcattctgctgtttccggtaacgcccagtcatttcagccatacgctggcatgcaagcttacgcctacccgcaggcctctgcagtgaccagtcagttgcaacctgtcagacccctgtacccggcccccctctcacagcccccgcatttccagggctcgggggatatggcttcatttctgatgaccgaggcccggcaacacaacacagaaatccgtatggcagtgtccaaggtggcggataaaatggaccacctaatgaccaaggtggaagagctgcagaaacactccgccgggaatagtatgttgatccccagcatgtccgttaccatggagacttccatgataatgagcaacattcagcgcatcattcaagagaacgaaaggctcaaacaggaaatactggagaagagtaatagaatcgaggagcaaaacgataagatctcagagctgattgaaaggaaccagcgatatgtggaacagtctaacttaatgatggagaaacggaataatagcctccagacagccaccgaaaacacacaagcccgcgtgctccatgcagagcaagaaaaggccaaggtgacggaggaactcgcggccgccaccgctcaggtgtcccacctccagctgaagatgaccgcccaccagaagaaagaaactgaactgcagatgcagctgaccgagagtctgaaggaaactgatttgctgaggggacagctcaccaaggttcaggctaagttatccgaactgcaggagactagcgagcaagcacagtccaaattcaagagtgaaaagcagaacaggaagcaacttgagcttaaagtgacgtctttggaggaagaactaactgatcttcgtgtggaaaaagaatccctggaaaagaatctgagtgagaggaagaaaaagagcgcacaggaaagaagccaagctgaagaggagatcgatgagatccgtaaaagttaccaggaagagttggataaactgaggcagctcctgaaaaagacaagagtttccaccgatcaggccgccgcggaacagctgagtctggtgcaggctgagctgcagacacagtgggaggcaaagtgcgaacaccttttagcttctgcaaaggatgagcacttacagcagtaccaagaggtctgcgcacagagggacgcctatcagcagaagctggtacagctacaggagaaatgccttgcactccaggctcaaattaccgcccttacaaaacagaatgaacaacacatcaaagagctggaaaagaataagagccagatgtctggcgtggaggctgctgcttctgatccatctgagaaagttaagaaaataatgaaccaggtgttccagtccttgcggcgggagttcgagctcgaggaatcctataatggacgaacgattttgggtaccattatgaacaccataaagatggtgacattacagttgctgaaccagcaggaacaagagaaggaggaaagttccagcgaagaggaagaagagaaagccgaggagcgcccccggagaccatcccaggagcagagcgcttccgctagctctggacagcctcaggctccactgaacagggagcgacctgaatcccccatggtgccctccgaacaggttgtggaggaggctgtgccacttccccctcaggcgctaaccacgtctcaggacggccaccgcagaaagggcgactcggaggctgaagcactatctgagattaaggatggcagtctgccgccagaactctcctgcattccatcccacagagttttggggccaccaacgagcatacctccggagcctctgggccccgtttccatggactccgaatgcgaagagtctcttgccgcttctcccatggccgccaagccggataaccctagcgggaaagtttgtgttagggaggtggcgcccgacgggcccctccaggaatccagcacacgcctgtccctgaccagtgaccccgaggagggcgatcctctggctttggggcctgagtcccctggggagccacaacctccccagctgaagaaggacgacgtcacaagcagtacaggaccacacaaagagctctcatctaccgaagccggtagcacagtagcaggtgctgccctgcgcccctcgcaccacagtcaacggtcctctctgtctggggacgaggaggatgagctgtttaaaggagccaccctcaaggccctgaggcctaaggcacaacccgaggaggaagacgaggacgaggtgtcgatgaaagggagaccaccccccacccctttatttggcgatgacgatgatgatgatgatatcgactggcttgggtag

SEQ ID NO: 185527 - DNA, 4336 bp, Artificial Sequence
  derived and/or modified sequence
agttcgccctgccggaaagcagcacgccgccgcggcattttacgacgtcggcggtgacaggccctgggactctgggaatacccagcttcctccccgcaacccggtgaaagccaacgcaatgttcggtgcgggggacgaggacgacaccgatttcctctcgccgagcggcggtgccagattggcctcactttttggactggatcaggcagctgctggccatggaaatgaatttttccagtacacagccccaaaacagcctaagaaaggccagggaacggcagcaacaggaaatcaggcaacaccaaaaacagcaccagccaccatgagcactcccacaatactggtcgcaacagcagtccatgcatatcgatacacaaatggtcaatatgtaaagcagggcaaatttggtgctgcagttctggggaaccacacagccagagagtataggattcttctttatatcagtcaacaacagccagttacggttgctaggattcatgtgaactttgagctaatggttcggcccaataactatagcaccttttatgatgaccagagacagaactggtccatcatgtttgagtcggaaaaggctgctgtggagttcaataagcaggtgtgcattgctaagtgcaacagtacctcttccctggatgcagtgctctcccaggacctcattgtggcagacggccctgctgtagaagttggagattctttggaagtggcctataccggctggctctttcagaatcatgtgctgggccaggttttcgactccactgctaacaaagataagttgcttcgcttgaagttaggatcaggaaaagtcatcaagggctgggaggatggaatgctgggcatgaaaaaaggaggaaagcgattgcttattgtccctccagcctgtgctgttggctcagaaggggtaataggctggactcaagcaacggactcgatcctggtgttcgaggtggaggttaggcgggtgaagtttgccagagattctggctctgatggtcacagtgttagttcccgcgattctgcagctccgtctcccatccctggtgctgacaacctctctgctgatcctgttgtgtcaccacccacatcaatacctttcaaatcaggggagccagctcttcgtaccaaatctaactccctcagtgaacaacttgcaataaatacaagtcccgatgcagtcaaagccaagttgatctctcggatggctaaaatgggccagcccatgctgcccatccttccaccacagctggattccaatgattcagaaatcgaagatgtgaacactctgcaaggaggtgggcagcctgtggtgactccgtccgtccagccctctcttcatccggcccatccagcgttaccacagatgacctcacaggcacctcagccatctgttactgggctccaggcaccttctgctgccttaatgcaagtgtcatctctcgattcccactcagctgtatctggaaatgcccaatcctttcagccctatgcaggtatgcaagcctacgcttatccccaggcatctgccgtcacctcccagctgcagcccgttcggcctttgtacccagcaccgctctctcagcctccccatttccaaggatcaggtgatatggcttcatttctcatgactgaagcccggcaacataacactgaaattcgaatggcagtcagcaaagtggctgataaaatggatcatctcatgactaaggttgaagagttacagaaacatagtgctggcaattccatgcttattcctagcatgtcagttacaatggaaacaagcatgattatgagcaacatccagcgaatcattcaggaaaatgaaagattgaagcaagagatccttgaaaagagcaatcggatagaagaacagaatgacaagattagtgaactaattgaacgaaatcagaggtatgttgagcagagtaacctgatgatggagaagaggaacaactcacttcagacagccacagaaaacacacaggcaagagtattgcatgctgaacaagagaaggccaaggtgacagaggagttagcagcggccactgcacaggtctctcatctgcagctgaaaatgactgctcaccaaaaaaaggaaacagagctgcagatgcagctgacagaaagcctgaaggagacagatcttctcaggggccagctcaccaaagtgcaggcaaagctctcagagctccaagaaacctctgagcaagcacagtccaaattcaaaagtgaaaagcagaaccggaaacaactggaactcaaggtgacatccctggaggaggaactgactgaccttcgagttgagaaggagtccttggaaaagaacctctcagaaaggaaaaagaagtcagctcaagagcgttctcaggccgaggaggagatagatgaaattcgcaagtcataccaggaggaattggacaaacttcgacagctcttgaaaaagactcgagtgtccacagaccaagcagctgcagagcagctgtctttagtacaggctgagctacagacccagtgggaagcaaaatgtgaacatttgttggcctccgccaaggatgagcacctgcagcagtaccaggaggtgtgcgcacagagagatgcctaccagcagaagctggtacaacttcaggaaaagtgtttagccctccaggcccaaatcacagctctcaccaagcaaaatgaacagcacatcaaggaactagagaagaacaagtcccagatgtctggggttgaagctgctgcatctgacccctcagagaaggtcaagaagatcatgaaccaggtgttccagtccttacggagagagtttgagctggaggaatcttacaatggcaggaccattctgggaaccatcatgaatacgatcaagatggtgactcttcagctgttaaaccaacaggagcaagagaaggaagagagcagcagtgaagaagaagaagaaaaagcagaagagcggccacgaagaccttcccaggagcagtcagcctcagccagttctgggcagcctcaagcacccctgaatagggagaggccagagtcccccatggtgccctcagagcaggtggtcgaggaagctgtcccgttgcctcctcaggccctcaccacttcccaggatggacacagaaggaaaggggactcagaagctgaggcactctcagagataaaagatggttcccttccacccgaactgtcttgcatcccatcccacagagttctagggcccccgacttcaattccacctgagcccctaggccctgtatccatggactctgagtgtgaggagtcacttgctgccagcccaatggcagctaagcccgacaacccatcaggaaaggtctgtgtcagggaagtagcaccagatggcccactacaagaaagctccacaagactgtccctgacttcagaccccgaggagggggacccactggccttagggcctgaaagcccaggagagcctcagcctccacagctcaagaaagatgatgtcactagctccaccggtccccacaaggagctgtcaagcacagaggcaggttccacagttgcaggagcagccctcagacccagccatcattcccagcgttccagtctctctggggatgaagaggatgaactgtttaaaggggcaactctgaaagctctgaggcccaaagcacagcctgaggaggaggatgaagacgaggtgagcatgaagggacgcccgcccccaacgcccctttttggagatgatgatgatgacgatgacattgactggctgggatgaagacccaggaaactggtgcaaaggtttctctgcaacccttccctaagcatgattttgcacagccaaccctgggtctaggcgaaccacagggtgaggtcaaggtgagcattctgggaacaatatttgggctcagagggtgggttggccaccttctgagccccacccccgccagacctggtgaagaggatcataaccctgtcttcaagaacactgggatttcagcagcaagttggaagaaggactggtaggttcccctccaagccagtcacctgtaagagtcctgtcctctgccagactttttaatctcttcattaactctcagactgacctgggagccctcctctacctgaatccagtgctcaactgtgccccggcaacaagacctgggctgaggtctccctggtagaactaagggagattacaccatctaaatcccagtgcagtcaacagcctggcctatagtcctgggacatgtatcttcttctttgccttaaatctgatacaagaggtcaatgactttgaaaataaaactaaaataaatgtctataatgaaacttg

SEQ ID NO: 185528 - DNA, 3735 bp, Artificial Sequence
  derived and/or modified sequence
gacgtgggcggcgaccggccctgggacagcggcaacacccagctgccacctcggaacccggtgaaggctaatgcaatgttcggagccggtgatgaggacgacactgacttcctgagtccctcaggaggagctcgactggccagtctgtttggcctggatcaggcagcagctggacatggcaatgaattctttcaatacactgcgcctaagcagccgaaaaaaggccagggcactgccgctaccggcaatcaggcgacccccaagaccgcccccgcaaccatgtcaactccaaccattctggtggcaacagctgtgcacgcctatcgctacaccaatggacagtatgttaaacaaggaaagttcggagctgccgtgctcgggaatcatacagctagagagtaccggatcctgctatacatttcacagcagcagcctgtgacagttgcacggatccacgttaacttcgagctcatggtccggcccaacaattactctacgttctatgacgaccagcgccagaactggtccattatgtttgagtcggaaaaggccgctgtcgagttcaataagcaggtctgtatcgcaaagtgcaattcgacatccagccttgacgctgttctgtcccaagatttgatagtggccgatggaccagcagttgaagttggcgattccctagaggttgcctataccggctggcttttccagaaccacgtgctcgggcaggtttttgactctacagctaacaaagataaacttcttaggctgaagctggggagtggcaaagtgatcaagggatgggaagacgggatgctgggaatgaaaaaaggagggaagcgccttctcattgtgcctcccgcttgcgccgtagggtccgaaggggttattggatggacacaagcaacagatagtatactggtattcgaggtcgaggtgcggagggtcaaattcgccagagacagtggttctgacggacactctgtgagttccagggattccgcagcaccctcgcctatcccaggagctgataatctgagcgctgaccctgtcgtgtcacccccgacctccattcccttcaaatccggggaacctgcactccggacaaagtcgaactcattatctgagcaacttgcaatcaatacaagccccgacgctgtgaaggccaaactgatctcaaggatggccaagatgggccagccaatgcttccaatcctgcctccgcaactcgactctaacgactccgaaattgaagacgtcaacacactccagggcggcggccagcccgtggtgacccctagcgttcagcctagcctgcatccagcacatccggcccttcctcagatgacctctcaggcgccacagccatcagtcacaggcctccaggctccgagtgccgccctgatgcaagtgtccagtttggatagccactctgccgtctctggcaacgctcagtcctttcagccatacgctggcatgcaggcctatgcttatccccaggcatctgccgttacctcccaactgcagccagttcggccgctctatccggcgcctctttcccagccacctcatttccagggatctggagacatggctagctttctgatgacagaagccagacagcataataccgaaatcaggatggcagtatccaaggtagcggataaaatggatcacttgatgactaaagttgaggaactgcagaaacactctgctgggaatagcatgctgatcccctcaatgtccgtgaccatggagacttctatgattatgagtaacattcagagaattatccaagagaacgaacgtcttaagcaagaaatcctcgaaaaatctaataggattgaggagcagaacgataaaatttcagaactcatcgaaaggaatcagcgatatgttgaacagtctaaccttatgatggagaagcgaaataacagtcttcagaccgcgacagagaatacacaggccagagtgctgcatgctgagcaggagaaagccaaagtaactgaagagctggctgccgcgacagcccaggtgtcacacctgcagctgaagatgacagctcaccagaagaaggagaccgaactgcagatgcagctcacagagtcactgaaggagacagacctcttgagagggcagctgacaaaggtgcaggctaaattgtctgaacttcaggagacctccgagcaagcacaatccaaattcaaatccgagaaacagaacaggaaacaacttgaactgaaagtcacttctctggaagaagagctgacagatcttcgggtcgaaaaggagtctctggaaaagaacctctccgagcggaaaaagaagtctgcacaggagcggtctcaggcggaggaagagatagacgagatcaggaaaagctaccaggaagaactggacaagttgcggcagctgctgaagaaaacaagggtgagtactgaccaagcagcagccgaacaactgagtctcgtgcaggcggaactacagacacagtgggaagctaagtgcgaacacttgcttgcttccgctaaggatgaacaccttcagcagtaccaggaggtctgtgcccagcgcgatgcgtaccaacagaaactggttcaactgcaggagaagtgccttgcactgcaggctcagatcacggccctgactaaacagaacgagcagcacatcaaggaactggaaaagaataagtcacaaatgtctggcgtcgaggctgctgcatccgacccttcagaaaaagtgaagaaaatcatgaatcaggttttccagtccctgcgacgagaatttgagcttgaggagagttacaatggtcggaccattctcggtaccatcatgaacaccatcaagatggttacgctgcagctgctcaaccagcaagaacaagaaaaagaggagtcatcgtcagaggaagaagaggaaaaggccgaggaacgtccccggagaccctcccaggagcagtctgctagcgcatcatctggccagccccaagccccattgaatcgggagcggcccgaatctcctatggtgccttcagagcaagtggttgaagaagccgtccccctcccaccacaggcactcactacatcccaagacgggcaccgcagaaagggggacagtgaagcagaagccctttcggagattaaagacggatccctaccccccgagctttcgtgcattccaagccaccgcgtgctgggccctccgacaagtatcccacccgagcccctcggaccagtgagtatggattccgagtgcgaagagtctctcgccgcgagccctatggccgcaaaaccagacaatccttctgggaaagtgtgtgttagagaggtcgctccggacggccctctccaggagtcaagtacccgactgtcactgacgagtgacccagaggagggagatcccctggcactaggccccgaatctccaggcgagccacagcctccgcaattaaaaaaggatgatgtgacatcttcgaccgggcctcacaaggagttgtcatccaccgaggccggtagcacggtggctggagctgccctgagacccagccaccatagtcagcgctcctcactgtccggggatgaggaggacgaactgtttaaaggcgccaccctgaaagccctgcggcccaaggctcagcctgaagaggaggacgaagatgaggtaagtatgaagggtcgccctcctccgacccctctgtttggggacgatgatgacgacgatgatatagattggttgggttag

SEQ ID NO: 185529 - DNA, 3660 bp, Artificial Sequence
  derived and/or modified sequence
atgttcggggctggagatgaggacgacaccgatttcctgtctcctagtgggggagcgagattagcgagtctgtttggcctggaccaggcggcagcgggacacggaaacgagtttttccaatataccgcaccaaaacagcccaagaagggccagggcacggcggcaacgggcaatcaggcaactcccaagacagcccctgccaccatgtcaaccccaaccatcctggtggcaaccgccgttcatgcttaccgctatactaacgggcagtatgtcaagcaaggaaaatttggcgctgcagtactcgggaaccatacagcacgggagtatagaatcttgctgtacatttcacaacagcaacccgtgacggtagctaggatccacgtcaatttcgagctgatggtcaggcccaataattattccaccttttacgatgaccagcgccaaaactggtcgataatgtttgaaagtgagaaggctgccgtggagtttaataagcaagtgtgcatcgctaagtgcaattcaacaagtagcctggatgccgtccttagccaggacctgattgttgccgacggcccagccgtggaagtgggagactccttagaagtggcttatacgggctggcttttccagaaccacgtgctggggcaggtctttgactccaccgcgaacaaggacaaactgctgcggctgaaattgggaagcggtaaggtaatcaaaggctgggaagatggcatgctaggaatgaagaagggcggaaaacgcctgctgattgtgccccctgcttgcgcggtaggttcagagggcgtcatcggatggacccaggctacagactcgattctcgtgtttgaagtagaagtccgcagggtaaaattcgctcgagacagtggtagcgatggacactctgtgagcagccgggacagtgccgctccctccccaatcccaggcgctgataatctctccgctgaccccgtcgtgtccccccctacaagtatcccattcaaatccggggagcctgccctgcgaaccaagagcaactcgctctctgagcagttggcgataaacacaagtcctgacgctgtcaaggcgaagctgatctctaggatggctaagatggggcagccgatgctgccaatcctgcctcctcagctcgatagtaatgactcagagattgaagatgttaacacactgcagggcggagggcagccggttgttaccccatccgtccaaccatcactgcatcctgcacaccccgcactgccgcagatgacatcccaggcaccacagccatccgtgacagggctccaggccccaagcgccgctttgatgcaagtgtcctcactggacagccatagtgccgtgtccggaaatgcccagtccttccagccctatgcaggcatgcaagcttacgcctatccacaggcctctgctgtaacctcccaactgcagcctgtgagaccactgtacccagctccattgtcccagccaccccacttccagggatccggggatatggcatctttcttgatgactgaagcacgccagcacaatactgagatacgcatggctgtgagcaaagttgccgacaagatggaccacttaatgactaaagttgaggagttgcagaagcactctgccggtaatagcatgctgatcccgagtatgtccgtcacgatggaaaccagcatgattatgagtaacattcagcggattatccaggaaaatgagaggctgaagcaggaaattctagaaaaatccaacaggattgaagaacaaaacgataaaatttcggagctcattgagcggaatcaacggtacgttgagcagtcaaatcttatgatggagaaacggaataacagtttacagactgccaccgagaatacccaagcaagagttcttcatgcagagcaggagaaagcaaaggtcacagaggagctggctgctgctacagcacaggtcagccacttacagctaaagatgacagctcatcaaaaaaaagaaactgaactgcagatgcagcttacagaatctcttaaggagaccgatctcttgcgcggacagctgacgaaggttcaagctaaactgagcgaattacaagaaacttcggagcaggcccagagtaagtttaagtctgaaaaacaaaatcgaaaacagctggagctgaaagtgacctctctcgaagaagagctgaccgacctccgggttgaaaaggagtcactagaaaagaatctctctgagcgaaagaaaaagagcgcccaggagcgctctcaggctgaggaagagattgacgagattaggaaaagctatcaggaggagttagacaaacttcgccagttgcttaagaaaactcgcgtctctacagaccaggccgctgcagagcagctctctctcgtgcaggccgaactgcagacccaatgggaagctaaatgtgagcatctgctagctagtgcaaaagatgagcacctccaacaataccaggaagtttgcgcccagagggatgcctaccagcagaaactagtccaactgcaggagaagtgcctggctctgcaggcccaaattacagccctgactaagcaaaatgaacagcatattaaagagttggagaaaaataagtctcagatgtcgggtgtagaagcggctgccagtgaccctagcgagaaagtgaagaaaatcatgaaccaagtgtttcagagcctcagaagagagtttgagctagaagagtcatataatggtaggaccatacttggaacgatcatgaataccataaagatggtcactctgcaacttctaaatcagcaagaacaggagaaggaagaatctagtagtgaggaagaggaggagaaagctgaagagcggccacgacgtccttctcaggagcagtcggctagtgcgagtagtggacaacctcaggccccactcaacagagaaagaccggagagccccatggttcccagcgagcaggtggtcgaggaggccgtccccttgccaccccaagccctaacaacctcacaagacggccatcggagaaaaggggattctgaggccgaagccctcagcgaaattaaggatggatcccttccaccggaactgagttgtattccttctcaccgtgtactaggccctccgaccagcatcccaccagaaccgctgggaccagtctcaatggactccgagtgcgaggaaagcttagcagcaagtcctatggcagcgaaaccagacaacccctctgggaaagtgtgcgtgcgagaggttgcacccgacggacccctacaggagtcctccacaagactgtccctgacatctgatccagaggagggtgatcctcttgcccttggtccagaaagccctggtgaaccgcaacctccgcagctaaaaaaagatgatgtgactagctctactggtcctcacaaggagctgtccagtaccgaagccggaagcacagttgcaggcgctgctttgcgcccttcccatcactcgcagcggtcctccctgagcggcgacgaggaagacgagctctttaaaggtgccacgctcaaggctctgagacccaaagctcagccagaggaagaggacgaggatgaggtctctatgaagggaaggcccccaccaactccactctttggagatgatgatgatgatgacgatatagattggcttggctag

SEQ ID NO: 185530 - DNA, 3735 bp, Artificial Sequence
  derived and/or modified sequence
gacgtgggcggagataggccttgggactcgggcaacacccagctgccacctcgaaaccccgtaaaggctaacgcgatgttcggcgctggcgacgaagatgataccgacttcctgtcccctagcggaggagctagactggctagcctcttcggtcttgaccaggctgcagctggccatggaaatgagttttttcaatacaccgcgcctaaacagcccaagaaaggacagggcaccgcggctactgggaatcaggcaactccgaagaccgcaccagccacaatgagcacccccactattttagtggcaaccgcggttcacgcctatcggtacactaatgggcagtacgtgaaacaggggaagtttggggctgccgtcctcggcaatcacacagctagggagtatcggattctactgtatatctcacagcaacaaccagtgaccgtggctagaatccatgtcaactttgaattaatggtgaggccaaataactactctactttctacgacgaccagcgtcagaattggagcattatgttcgaatctgagaaagcggctgtggaatttaacaagcaagtctgcatcgctaagtgtaattcaacctcatctctggatgcagtactatcacaggacctcattgttgctgatgggccagccgttgaggttggtgactcgctggaagtcgcatacacaggatggctttttcagaaccacgtgctggggcaagtgtttgacagcactgccaataaagacaaattgctgagactgaagctggggtctgggaaggtgataaagggttgggaagatggcatgctgggaatgaaaaagggaggtaagaggctactcatagtaccccctgcatgcgcagtgggcagcgaaggcgtgatcggatggactcaggccaccgacagtatcctcgtgttcgaagttgaggttaggagggtgaagtttgctagggatagcggctcagatggtcactcagtttcaagtcgggacagcgctgccccatccccaatccccggtgccgataacctctctgctgatccggttgtgtctcctccaacgtcgatccccttcaagagcggcgaacctgctctgcgcaccaaatctaactcactgtccgaacagttggctatcaacacttcaccagatgcagtcaaggcaaagctgatcagtcgtatggctaagatgggccagccgatgttacccatcctgccaccccagctggatagtaatgactcggagatcgaggacgtgaacacactccagggcggaggacagccggtggtgaccccctccgtgcagcccagcctgcatcccgcacaccccgctctgccacagatgacttctcaggccccacagccaagcgttactggacttcaggcacccagcgcggcattgatgcaggtgtcttctctggactcacacagtgctgtttcaggcaacgctcagagctttcagccatatgctggaatgcaagcttatgcctacccccaggcatcagctgtcacttcccaactccaaccggtgcgtcccctatacccagcaccacttagccagccgccacacttccagggctccggcgatatggcgtctttccttatgaccgaagcacgacagcacaacacggagattcgcatggccgtgagcaaggtcgccgacaaaatggatcacctgatgaccaaggtcgaagaactacagaaacacagcgccggtaatagcatgctgatcccaagcatgtcagttacaatggagacctcaatgatcatgtcaaacattcagcgtatcatccaggagaacgagcgattgaaacaggagatccttgagaagtccaacagaattgaggagcaaaacgacaagatttcagagctgatagagaggaaccagcggtatgtcgagcagtccaatttgatgatggaaaagcggaacaacagcctacagaccgctacagaaaatacacaagccagagtgcttcacgctgagcaggaaaaggcgaaggtcaccgaagaactagcagcagccactgctcaggtatcccacctccagcttaagatgactgcgcaccagaagaaagagactgagctccaaatgcagttgacagaaagtcttaaggaaacagacctgttgagaggacaattgaccaaggttcaggcaaagctgagcgaattgcaagaaaccagtgaacaggctcagtccaaatttaagagtgagaagcagaaccgtaaacaacttgaactcaaggtcacctctctcgaagaagaattgactgatttgcgggtcgaaaaagagagcttagagaagaacctgagtgagagaaaaaagaagtccgcccaagaaagaagtcaggctgaagaggagatcgatgaaatacggaaaagctaccaggaagagctagataagctgagacagctgctgaagaagacaagagtttccaccgatcaagcggctgctgaacagcttagtctggtccaggctgaactccagacccagtgggaagccaaatgtgagcatctgttggctagcgcaaaggatgaacatctgcagcaatatcaagaagtttgtgcccagcgggacgcctaccaacagaagctggtgcagttgcaggagaagtgccttgctctccaggcacagatcacagcgctaactaagcagaatgagcagcatattaaggagctggagaagaacaaaagccagatgagcggagttgaagcagcagcttcagaccccagcgagaaagtgaaaaaaattatgaaccaagtatttcagagcctccgtcgcgaatttgaactcgaagagagttacaacgggaggaccatcttggggacaatcatgaacacaattaagatggtcactctgcaactcctgaatcaacaggagcaagagaaggaagagtcaagttctgaagaggaggaggagaaagctgaagagcggccacgcaggcccagccaggagcagagcgcctccgcttcatcaggccagcctcaggcccctttaaatcgagaaagacctgagtctccaatggtgccctctgagcaggtggtcgaagaagccgttccactgcccccacaggccctgactacgtcgcaggacggccacagacgcaagggagactccgaggctgaagccctcagtgagataaaagatggctctctgcctcctgaattatcctgcataccgagtcacagggtgttggggcctccgaccagcattccccctgagccacttggacctgtaagcatggattcagaatgcgaggagtctctagctgcatcacctatggcggcaaaacctgacaatccttccggaaaagtttgcgtgagagaggtagctccagatggcccactccaagagtcatcaacacgtctctcccttacctccgacccagaggaaggagaccctctggccctggggcctgaatcccccggagagccacagccccctcagttgaagaaagacgacgtcactagctcaacaggtcctcacaaagagctgagtagcactgaagccggtagcaccgttgctggagccgcactacggccatctcaccatagtcagcgaagttctttgtcaggagacgaagaagatgaacttttcaagggtgctacacttaaggcactacggcctaaggcccagcctgaagaggaggatgaggacgaagtgtcgatgaaagggcgtcccccaccgacacctttattcggagatgacgacgatgatgatgatatagactggctcgggtag

SEQ ID NO: 185531 - DNA, 8807 bp, Artificial Sequence
  derived and/or modified sequence
gacgtcggcggtgacaggccctgggactctgggaatacccagcttcctccccgcaacccggtgaaagccaacgcaatgttcggtgcgggggacgaggacgacaccgatttcctctcgccgagcggcggtgccagattggcctcactttttggactggatcaggcagctgctggccatggaaatgaatttttccagtacacagccccaaaacagcctaagaaaggccagggaacggcagcaacaggaaatcaggcaacaccaaaaacagcaccagccaccatgagcactcccacaatactggtcgcaacagcagtccatgcatatcgatacacaaatggtcaatatgtaaagcagggcaaatttggtgctgcagttctggggaaccacacagccagagagtataggattcttctttatatcagtcaacaacagccagttacggttgctaggattcatgtgaactttgagctaatggttcggcccaataactatagcaccttttatgatgaccagagacagaactggtccatcatgtttgagtcggaaaaggctgctgtggagttcaataagcaggtgtgcattgctaagtgcaacagtacctcttccctggatgcagtgctctcccaggacctcattgtggcagacggccctgctgtagaagttggagattctttggaagtggcctataccggctggctctttcagaatcatgtgctgggccaggttttcgactccactgctaacaaagataagttgcttcgcttgaagttaggatcaggaaaagtcatcaagggctgggaggatggaatgctgggcatgaaaaaaggaggaaagcgattgcttattgtccctccagcctgtgctgttggctcagaaggggtaataggctggactcaagcaacggactcgatcctggtgttcgaggtggaggttaggcgggtgaagtttgccagagattctggctctgatggtcacagtgttagttcccgcgattctgcagctccgtctcccatccctggtgctgacaacctctctgctgatcctgttgtgtcaccacccacatcaatacctttcaaatcaggggagccagctcttcgtaccaaatctaactccctcagtgaacaacttgcaataaatacaagtcccgatgcagtcaaagccaagttgatctctcggatggctaaaatgggccagcccatgctgcccatccttccaccacagctggattccaatgattcagaaatcgaagatgtgaacactctgcaaggaggtgggcagcctgtggtgactccgtccgtccagccctctcttcatccggcccatccagcgttaccacagatgacctcacaggcacctcagccatctgttactgggctccaggcaccttctgctgccttaatgcaagtgtcatctctcgattcccactcagctgtatctggaaatgcccaatcctttcagccctatgcaggtatgcaagcctacgcttatccccaggcatctgccgtcacctcccagctgcagcccgttcggcctttgtacccagcaccgctctctcagcctccccatttccaaggatcaggtgatatggcttcatttctcatgactgaagcccggcaacataacactgaaattcgaatggcagtcagcaaagtggctgataaaatggatcatctcatgactaaggttgaagagttacagaaacatagtgctggcaattccatgcttattcctagcatgtcagttacaatggaaacaagcatgattatgagcaacatccagcgaatcattcaggaaaatgaaagattgaagcaagagatccttgaaaagagcaatcggatagaagaacagaatgacaagattagtgaactaattgaacgaaatcagaggtatgttgagcagagtaacctgatgatggagaagaggaacaactcacttcagacagccacagaaaacacacaggcaagagtattgcatgctgaacaagagaaggccaaggtgacagaggagttagcagcggccactgcacaggtctctcatctgcagctgaaaatgactgctcaccaaaaaaaggaaacagagctgcagatgcagctgacagaaagcctgaaggagacagatcttctcaggggccagctcaccaaagtgcaggcaaagctctcagagctccaagaaacctctgagcaagcacagtccaaattcaaaagtgaaaagcagaaccggaaacaactggaactcaaggtgacatccctggaggaggaactgactgaccttcgagttgagaaggagtccttggaaaagaacctctcagaaaggaaaaagaagtcagctcaagagcgttctcaggccgaggaggagatagatgaaattcgcaagtcataccaggaggaattggacaaacttcgacagctcttgaaaaagactcgagtgtccacagaccaagcagctgcagagcagctgtctttagtacaggctgagctacagacccagtgggaagcaaaatgtgaacatttgttggcctccgccaaggatgagcacctgcagcagtaccaggaggtgtgcgcacagagagatgcctaccagcagaagctggtacaacttcaggaaaagtgtttagccctccaggcccaaatcacagctctcaccaagcaaaatgaacagcacatcaaggaactagagaagaacaagtcccagatgtctggggttgaagctgctgcatctgacccctcagagaaggtcaagaagatcatgaaccaggtgttccagtccttacggagagagtttgagctggaggaatcttacaatggcaggaccattctgggaaccatcatgaatacgatcaagatggtgactcttcagctgttaaaccaacaggagcaagagaaggaagagagcagcagtgaagaagaagaagaaaaagcagaagagcggccacgaagaccttcccaggagcagtcagcctcagccagttctgggcagcctcaagcacccctgaatagggagaggccagagtcccccatggtgccctcagagcaggtggtcgaggaagctgtcccgttgcctcctcaggccctcaccacttcccaggatggacacagaaggaaaggggactcagaagctgaggcactctcagagataaaagatggttcccttccacccgaactgtcttgcatcccatcccacagagttctagggcccccgacttcaattccacctgagcccctaggccctgtatccatggactctgagtgtgaggagtcacttgctgccagcccaatggcagctaagcccgacaacccatcaggaaaggtctgtgtcagggaagtagcaccagatggcccactacaagaaagctccacaagactgtccctgacttcagaccccgaggagggggacccactggccttagggcctgaaagcccaggagagcctcagcctccacagctcaagaaagatgatgtcactagctccaccggtccccacaaggagctgtcaagcacagaggcaggttccacagttgcaggagcagccctcagacccagccatcattcccagcgttccagtctctctggggatgaagaggatgaactgtttaaaggggcaactctgaaagctctgaggcccaaagcacagcctgaggaggaggatgaagacgaggtgagcatgaagggacgcccgcccccaacgcccctttttggagatgatgatgatgacgatgacattgactggctgggatgaagacccaggaaactggtgcaaaggtttctctgcaacccttccctaagcatgattttgcacagccaaccctgggtctaggcgaaccacagggtgaggtcaaggtgagcattctgggaacaatatttgggctcagagggtgggttggccaccttctgagccccacccccgccagacctggtgaagaggatcataaccctgtcttcaagaacactgggatttcagcagcaagttggaagaaggactggtaggttcccctccaagccagtcacctgtaagagtcctgtcctctgccagactttttaatctcttcattaactctcagactgacctgggagccctcctctacctgaatccagtgctcaactgtgccccggcaacaagacctgggctgaggtctccctggtagaactaagggagattacaccatctaaatcccagtgcagtcaacagcctggcctatagtcctgggacatgtatcttcttctttgccttaaatctgatacaagaggtcaatgactttgaaaataaaactaaaataaatgtctataatgaaacttgacccaagcccttggagaaaaattgagtttggttccaagggctgtctgtgctcttttgggaatctaagggtaggagtcttacagatctgggtcagttaatgtgcacaaaacgttgtggcatatttactccctttgatacctaaccctggaacttttaggctttcaaagaaagtcaccactgtagtcctagctcatccctggggcatgatggttctgtgaggaccagtccagtcatcctcttgctcctgcaggcttagtcctgcagtctaggaagccatgcaaagaaggtgagagggtcccttctttccattgttcatggcacctgagggattcttcactttgagagcagcttccattcccttagaactcatgggaccaggacttatgcagagaacagtagtgagaaaatacttgtggtcattttcttgattccaggatcttccaaagattatgcaatcagtctttaaaaaaacagaataattaattttaataaaaaatgtttcttgattttaaatgttttaaaagataggacccaaaattccacttcatctggcctggcatcatccttgcaggctttggatatgtctcccgtgtgcggacctgggaggcagtgagaactaattatttctttgttgcttaacaaaaggcggtgctgtttggcactttcacagactggcttatctccagcaaccactgcagaagacagtgttatcaccattttatagaggagaaaactgagacttagagaggtaaagtaatttgcccaaagttacatatctaggaagcctcagcacaagaattcaaatcctggccatctgattccagagcctgggctcttggccagcacagcctgactgtcactggttgggggaaggggcggtgatgcttttagaaacaggcttcttgagacaccaggcagctttccagttccctgcaaacatgggggaatgccctgatcagtcctaaaggtgtgacatagtctactttctagggcagttatttcttattgtaaattaactagtggctattatatttgcttctgcccgcagggagagaagatgctgagtaattgtgccaacacaggtgcttaaagtccgtgtgacagttacttttcttatagcatgtactcaattaatacttgttacatgaatgaagaatgacttgacttgcctcagttggcattctggggtgtctacctgggtgcagcatttcagggctgggtttccctgagcagagttgtctttgtagcagatggatggactctgtcctcagacaggcttataaagagtactaccagttctattagccccactcagcccctgcagttgttacaagggttcatgtgctttctgttggaattaggagaacagaacagtcatagactatttaaaaatatatatttactaaaatgtatttgtttgtttttaattcccaaagcttacaaccatcttttcatctaatctgtgaggtatttagtatacagcagtgattttctctctttccttttttataaagtgaagaggttcaactatccagagagtcccatctaactcaaaaaatgtaatggctttggttggattgcatcttcagtcagtacctgcccatggcttaatcagtattttaagtgaatgaatcatgtttccccactagatcattacgagtaagcagtaagtaataaatagagaatattaagtattgaacattattagatgcagctttttgttctgcatagaagaaagatgaggataaaggagggcattgaggccacgaagagcttcccagacacccacggccatcagatcatcttcttcctgcaggcagtgccttctggtggaaggagctcagtctatcagagaataaaccaggagcctgaaagcagtcctgtgtctctgcctttaatcagctgtcacttattctctccccaagaaagggaaataggtctcagcagtttctgccatccatcatgaatcaatgaaatcatttcattaaaaatttttttgtatgaatgtgcaaaattgccaactaggagttcaatgggaaaaataaaaaaaacttagtttgtcaacatgatccatagacgagatgatcttcatgtgttccaaaggcagaaaggtgagaaaaaggatctagcttggtctctgtccctcaaagacagaagaggtcaggaagtccaatgggcgatgctcctgtagataaggcacaaagcaggagagctgagggtgtccaggttccatgccctgcatcaccaagaacccttctccctggcttgaaatctttggaaattcctggtttgagtcacagagaagcattgtcatgggctcagtaaccctgccacccctgttatctccattctccctttggtcacagcagctgtcttaagacacaagaccatgcctgggccctacgtaggctggctgagaaggaaggttgctgcaatggcttccgaactccagggagcaagtgctggcttcagctcaaagtttccaggggctgggaataaggtggaggaatagccatcagaagaaagggcagttggaagtatagtgtctggaagagggggctccatgtccctccagcctcagtgcctgcacgttcctcaccagctaagctgtgctgagaagtgggtaagctaggtagtagcccacagcagagcccaagaccacaccaaggaaaatccaggtgttgtaggacattacggccagcatgatgaagtagccgatgaccacctggatgacatggattagagactggccaaagtgacacaaataccacctagataaaaaggagaagcaagttaatcctggtaatgagctggtaatgaggaagctgggagtagatatcagggagtagaaagctgttgagttacgtgacccgattgatttataacttgtatgcttaacccaggagtgatttctttctgcccctcccacccccgcccccagaaaaaactcgagatttatttttaaagagacatatcttcactacatttggtttcaagcttcctggcatcctaggcaaaggggaaaatgagggtatctataatctgtctttctgataaggaataagagaaaatcatcagtaaggcatatttcccccctgaatctacttcgggaggcagtatgacaatggaaagaaaaagcatggtcttaggtgacattatcagttcctagacctgccactaactaaaagtggcctagacaaatgtcttaacctctctgaacgtaagattccttatcagtaaaacaggaatgagaatacttcccttgcagtgcagttgtgaagatctgagacacccatgtagggtggctagtgatggagcgggcaggcttattaagcacaggtgaggctggggctggacagagggcagaacagggaccctaaatggttgcctgattcgagtgggaagggaggagaggagagcttgtcatcctcctcccaccaagtgggatacattgcttcaggacagctgcagatcccctcctggatatgggagcctagtgacccatggaactggtgagatttgggggagggtgggtggccacctcatttgctagataggggcctgcacctgaagatcactgttccctaaagaaagccttctgagcctctcaagtggctggctgttcacagagtgctttggcctgggcatcaggagacatgagctctagttcacttggctatgtgtagccactttggcaagtcctggtccttccctgggcctcgctgtcctctctgtgaagtggggctaatgctgtctgggccagcctgtctctcagggtgaatgtgaggcttctgcccctttcccatacccactgcctgtacctgtggtgggttctgccaacagggaatgaatctgagcctgcagagtccccgtctgtctctgcgatggtctgctggctgatggaggttggcaggttcaccagtacctggttgagcagcttggctttgccaaccttgatgccttcatacagtacagccagaagcaggagcaccaacaccgaaagggccatgcctgtcaaaggaggcagagttgtggagacctggccaggccagcactgtttcccttccagcacctccacctgttcatggaatccactccatccacctctatcctgcaccttcttccccacccttgctgagttccgaacttcttcactgtcttcaccagacttttcttagctggagtgtggctttgagatcaggaagagaagccacctgaaaaatccaggggctgagggtgaagaagccacgtaccattaccccacccactcccccagcaggctgcacaaatctgtcgtgacttcttgttaagtgatgagtactgcaaggtcctatttatatgtaagtatgcaaaaaatgtctggaaggaaagataaatagcacaagagtaatagttatctcagcaaagtaggatacaggtggtttttatgttcttgcctaactttctaaggtttcttttatatatattacttttataataggggaaaaacccaataaattattttaccaaaacta

SEQ ID NO: 185532 - DNA, 3660 bp, Artificial Sequence
  derived and/or modified sequence
atgttcggcgccggcgacgaggacgacaccgacttcctgagccccagcggcggcgccagactggccagcctgttcggcctggaccaggccgccgccggccacggcaacgagttcttccagtacaccgcccccaagcagcccaagaagggccagggcaccgccgccaccggcaaccaggccacccccaagaccgcccccgccaccatgagcacccccaccatcctggtggccaccgccgtgcacgcctacagatacaccaacggccagtacgtgaagcagggcaagttcggcgccgccgtgctgggcaaccacaccgccagagagtacagaatcctgctgtacatcagccagcagcagcccgtgaccgtggccagaatccacgtgaacttcgagctgatggtgagacccaacaactacagcaccttctacgacgaccagagacagaactggagcatcatgttcgagagcgagaaggccgccgtggagttcaacaagcaggtgtgcatcgccaagtgcaacagcaccagcagcctggacgccgtgctgagccaggacctgatcgtggccgacggccccgccgtggaggtgggcgacagcctggaggtggcctacaccggctggctgttccagaaccacgtgctgggccaggtgttcgacagcaccgccaacaaggacaagctgctgagactgaagctgggcagcggcaaggtgatcaagggctgggaggacggcatgctgggcatgaagaagggcggcaagagactgctgatcgtgccccccgcctgcgccgtgggcagcgagggcgtgatcggctggacccaggccaccgacagcatcctggtgttcgaggtggaggtgagaagagtgaagttcgccagagacagcggcagcgacggccacagcgtgagcagcagagacagcgccgcccccagccccatccccggcgccgacaacctgagcgccgaccccgtggtgagcccccccaccagcatccccttcaagagcggcgagcccgccctgagaaccaagagcaacagcctgagcgagcagctggccatcaacaccagccccgacgccgtgaaggccaagctgatcagcagaatggccaagatgggccagcccatgctgcccatcctgcccccccagctggacagcaacgacagcgagatcgaggacgtgaacaccctgcagggcggcggccagcccgtggtgacccccagcgtgcagcccagcctgcaccccgcccaccccgccctgccccagatgaccagccaggccccccagcccagcgtgaccggcctgcaggcccccagcgccgccctgatgcaggtgagcagcctggacagccacagcgccgtgagcggcaacgcccagagcttccagccctacgccggcatgcaggcctacgcctacccccaggccagcgccgtgaccagccagctgcagcccgtgagacccctgtaccccgcccccctgagccagcccccccacttccagggcagcggcgacatggccagcttcctgatgaccgaggccagacagcacaacaccgagatcagaatggccgtgagcaaggtggccgacaagatggaccacctgatgaccaaggtggaggagctgcagaagcacagcgccggcaacagcatgctgatccccagcatgagcgtgaccatggagaccagcatgatcatgagcaacatccagagaatcatccaggagaacgagagactgaagcaggagatcctggagaagagcaacagaatcgaggagcagaacgacaagatcagcgagctgatcgagagaaaccagagatacgtggagcagagcaacctgatgatggagaagagaaacaacagcctgcagaccgccaccgagaacacccaggccagagtgctgcacgccgagcaggagaaggccaaggtgaccgaggagctggccgccgccaccgcccaggtgagccacctgcagctgaagatgaccgcccaccagaagaaggagaccgagctgcagatgcagctgaccgagagcctgaaggagaccgacctgctgagaggccagctgaccaaggtgcaggccaagctgagcgagctgcaggagaccagcgagcaggcccagagcaagttcaagagcgagaagcagaacagaaagcagctggagctgaaggtgaccagcctggaggaggagctgaccgacctgagagtggagaaggagagcctggagaagaacctgagcgagagaaagaagaagagcgcccaggagagaagccaggccgaggaggagatcgacgagatcagaaagagctaccaggaggagctggacaagctgagacagctgctgaagaagaccagagtgagcaccgaccaggccgccgccgagcagctgagcctggtgcaggccgagctgcagacccagtgggaggccaagtgcgagcacctgctggccagcgccaaggacgagcacctgcagcagtaccaggaggtgtgcgcccagagagacgcctaccagcagaagctggtgcagctgcaggagaagtgcctggccctgcaggcccagatcaccgccctgaccaagcagaacgagcagcacatcaaggagctggagaagaacaagagccagatgagcggcgtggaggccgccgccagcgaccccagcgagaaggtgaagaagatcatgaaccaggtgttccagagcctgagaagagagttcgagctggaggagagctacaacggcagaaccatcctgggcaccatcatgaacaccatcaagatggtgaccctgcagctgctgaaccagcaggagcaggagaaggaggagagcagcagcgaggaggaggaggagaaggccgaggagagacccagaagacccagccaggagcagagcgccagcgccagcagcggccagccccaggcccccctgaacagagagagacccgagagccccatggtgcccagcgagcaggtggtggaggaggccgtgcccctgcccccccaggccctgaccaccagccaggacggccacagaagaaagggcgacagcgaggccgaggccctgagcgagatcaaggacggcagcctgccccccgagctgagctgcatccccagccacagagtgctgggcccccccaccagcatcccccccgagcccctgggccccgtgagcatggacagcgagtgcgaggagagcctggccgccagccccatggccgccaagcccgacaaccccagcggcaaggtgtgcgtgagagaggtggcccccgacggccccctgcaggagagcagcaccagactgagcctgaccagcgaccccgaggagggcgaccccctggccctgggccccgagagccccggcgagccccagcccccccagctgaagaaggacgacgtgaccagcagcaccggcccccacaaggagctgagcagcaccgaggccggcagcaccgtggccggcgccgccctgagacccagccaccacagccagagaagcagcctgagcggcgacgaggaggacgagctgttcaagggcgccaccctgaaggccctgagacccaaggcccagcccgaggaggaggacgaggacgaggtgagcatgaagggcagacccccccccacccccctgttcggcgacgacgacgacgacgacgacatcgactggctgggctag

SEQ ID NO: 185533 - protein, 1162 aa, Artificial Sequence
  derived and/or modified sequence
MAHAGGGSGGSGAGGPAGRGLSGARWGRSGSAGHEKLPVHVEDALTYLDQVKIRFGSDPATYNGFLEIMKEFKSQSIDTPGVIRRVSQLFHEHPDLIVGFNAFLPLGYRIDIPKNGKLNIQSPLTSQENSHNHGDGAEDFKQQVPYKEDKPQVPLESDSVEFNNAISYVNKIKTRFLDHPEIYRSFLEILHTYQKEQLNTRGRPFRGMSEEEVFTEVANLFRGQEDLLSEFGQFLPEAKRSLFTGNGPCEMHSVQKNEHDKTPEHSRKRSRPSLLRPVSAPAKKKMKLRGTKDLSIAAVGKYGTLQEFSFFDKVRRVLKSQEVYENFLRCIALFNQELVSGSELLQLVSPFLGKFPELFAQFKSFLGVKELSFAPPMSDRSGDGISREIDYASCKRIGSSYRALPKTYQQPKCSGRTAICKELDHWTLLQGSWTDDYCMSKFKNTCWIPGYSAGVLNDTWVSFPSWSEDSTFVSSKKTPYEEQLHRCEDERFELDVVLETNLATIRVLESVQKKLSRMAPEDQEKFRLDDSLGGTSEVIQRRAIYRIYGDKAPEIIESLKKNPVTAVPVVLKRLKAKEEEWREAQQGFNKIWREQYEKAYLKSLDHQAVNFKQNDTKALRSKSLLNEIESVYDEHQEQHSEGRSAPSSEPHLIFVYEDRQILEDAAALISYYVKRQPAIQKEDQGTIHQLLHQFVPSLFFSQQLDLGASEESADEDRDSPQGQTTDPSERKKPAPGPHSSPPEEKGAFGDAPATEQPPLPPPAPHKPLDDVYSLFFANNNWYFFLRLHQTLCSRLLKIYRQAQKQLLEYRTEKEREKLLCEGRREKGSDPAMELRLKQPSEVELEEYYPAFLDMVRSLLEGSIDPTQYEDTLREMFTIHAYVGFTMDKLVQNIARQLHHLVSDDVCLKVVELYLNEKKRGAAGGNLSSRCVRAARETSYQWKAERCMADENCFKVMFLQRKGQVIMTIELLDTEEAQTEDPVEVQHLARYVEQYVGTEGASSSPTEGFLLKPVFLQRNLKKFRRRWQSEQARALRGEARSSWKRLVGVESACDVDCRFKLSTHKMVFIVNSEDYMYRRGTLCRAKQVQPLVLLRHHQHFEEWHSRWLEDNVTVEAASLVQDWLMGEEDEDMVPCKTLCETVHVHGLPVTRYRVQYSRRPASP

SEQ ID NO: 185534 - DNA, 3489 bp, Artificial Sequence
  derived and/or modified sequence
atggctcacgcaggaggcggctcaggggggtctggggccggagggccagctggtagaggattgagtggcgcccgatggggaagaagcggctctgccggccacgaaaagttacctgtgcacgttgaggatgcgcttacctatctcgatcaagtgaaaataagatttggctccgatcccgccacgtataacggtttccttgaaatcatgaaggaattcaaaagtcaatccattgacacacccggggtcattagaagggtgagccaactatttcacgagcacccggatctcattgtgggctttaatgcttttctgccccttggttatcgtatcgacattccaaaaaacggtaaactgaacatccagagccctctaacatctcaggagaattcccataatcatggcgatggagcggaagacttcaaacagcaagttccctacaaggaggacaaacctcaggttcccttagagtccgattcagttgagttcaataacgccatatcttacgttaataaaatcaaaacccggttcctagaccacccagagatctaccgcagctttcttgaaatcctgcacacctaccagaaggaacaactcaatacaagagggcgccctttccgagggatgtctgaggaagaagtgtttactgaggtggctaatctgtttagggggcaggaggatctgctaagcgagttcggccagttcctacctgaagccaagagatccctgttcaccgggaacggcccatgcgagatgcactccgtgcagaaaaacgagcacgataagaccccagagcacagtcgtaaacggagcaggccatccctgctccgcccggtgtccgcccctgccaagaaaaagatgaaactgcgggggaccaaagatctgtcgattgcagcggtgggtaaatacggcactctgcaagaattctccttcttcgacaaggtgcggcgcgtcctgaagagccaggaggtctacgaaaattttctgcggtgcattgccttattcaatcaagaactcgtcagcggtagcgagctcctccaattagttagtcctttcctggggaagttccctgagctgtttgctcaattcaaaagctttcttggggtaaaggagctgtcttttgcccccccaatgagtgatcggagtggagacggcatatctagagaaattgattacgcctcctgcaaacgtattgggtcgagctacagggccctgccaaagacctatcaacagccgaaatgttcggggcgaactgccatatgtaaagagcttgaccattggacgttactgcagggctcatggactgatgactactgcatgagtaagttcaaaaacacctgctggatccccggatattctgccggagtgcttaatgatacctgggtgagtttcccatcatggagcgaggacagcactttcgtctcgagtaaaaagaccccctatgaagagcagttacatcggtgcgaggacgagcgtttcgagctggatgtcgtcctcgagacaaacctggccactatccgtgtcctagagagcgtgcaaaaaaagctgtctcggatggctcctgaagaccaggaaaagttcagactggatgactctttggggggcacgtcagaggtgatccagcggagggcaatctaccgtatctatggagataaggctccagaaattattgaaagcctgaagaagaatcctgtgactgccgtccccgtcgtcctgaagagattgaaagctaaagaggaggagtggcgggaggcccagcagggcttcaacaagatttggcgagagcagtacgagaaagcctaccttaagtcccttgatcaccaggctgtgaactttaaacagaatgacacaaaagcccttcgctctaaatctctgttgaatgaaattgaaagtgtatatgacgaacatcaagagcaacactcagaaggccgaagcgctccctctagtgaacctcacttgatttttgtgtatgaagatcgccagatcctagaagatgcagcagctcttattagctactacgttaagaggcagcccgcaatccagaaagaggaccaaggcacaatacaccagcttctgcaccagttcgtgccatcactgttcttctcccagcagctggacctcggggcaagtgaagagtccgcggatgaggaccgggattctccccaggggcaaacaactgatccttccgagaggaaaaagcctgcaccgggccctcattcctcacctcctgaggaaaagggagcttttggagatgcccctgccaccgagcagcctccccttcccccacctgctccccataagcccctcgacgacgtttattctctgttttttgctaacaataactggtatttttttcttaggttgcaccagacgctgtgttctaggttactcaaaatctacaggcaggcccagaagcaattgctggaatacagaacagagaaggaacgcgaaaaactcctgtgcgagggtcgccgagaaaagggctcagatcctgctatggaattgcgacttaaacagccttcagaagtggaactggaagagtattatccagctttcctggacatggttagatctctgctggaaggctcaattgacccaactcagtatgaggataccctcagagagatgtttactattcacgcttatgttgggttcaccatggataagctggtgcagaatattgcaagacagttgcaccatcttgtgtctgacgacgtctgtctcaaggtagtcgagttatacctgaacgagaagaagcgaggggccgccggcggtaacctaagttcacgctgcgtgcgggcagcaagagagacttcataccaatggaaagctgagaggtgtatggccgatgagaattgtttcaaggttatgttcctgcagaggaagggacaggtgatcatgacgatcgagctgctggacacagaagaagcccagacggaagaccctgtggaagttcagcatctggccaggtacgtcgaacagtatgtagggactgagggagccagtagcagcccaacagaggggttcttgttaaagcctgtatttctacaaaggaacctgaaaaaatttagacggaggtggcaatccgaacaggccagagcactgaggggcgaggcacggtcttcctggaaacgcctggttggggtggagagtgcatgtgacgtggactgcagattcaagctttcaacacataagatggtgtttatagttaactctgaagactacatgtacagaagaggcactttgtgcagagccaaacaggtgcagccactggtgctgctcagacatcaccaacattttgaagagtggcatagtcggtggctcgaggacaacgtaacagttgaagctgctagtctggtgcaggactggctgatgggggaggaggacgaagacatggtgccatgtaaaacactgtgtgagacggttcatgttcacgggctccctgtcacccgctaccgtgtccagtattccagaaggcccgctagtccctag

SEQ ID NO: 185535 - DNA, 3489 bp, Artificial Sequence
  derived and/or modified sequence
atggcccacgccggcggcggcagcggcggcagcggggccggcggccctgctggccggggcctgagcggggcccgctggggccgcagcggcagcgctggccacgagaagctgcctgtgcacgtggaggatgccctgacctacctggaccaggtgaagatccgctttggaagtgaccctgccacctacaacggcttcctggagatcatgaaggagttcaagagccagagcattgacaccccaggagtcatccggcgggtgtcccagctgttccacgagcacccagacctgattgtgggcttcaatgccttcctgcccctgggctacagaattgacatccccaagaatggcaagctgaacatccagagccccctgaccagccaggagaacagccacaaccacggagatggagctgaggacttcaagcagcaggtgccctacaaggaggacaagccccaggtgcccctggagagtgacagcgtggagttcaacaatgccatctcctatgtgaacaagatcaagacccgcttcctggaccaccctgagatctaccgctccttcctggagatcctgcacacctaccagaaggagcagctgaacacccggggccggcccttccggggcatgtctgaggaggaggtgttcacagaggtggccaacctcttccggggccaggaggacctgctgtctgaatttggccagttcctgcctgaggccaagaggagcctcttcaccggaaatggcccctgtgagatgcacagcgtgcagaagaatgaacatgacaagaccccagagcacagcaggaagaggagccggcccagcctgctgcggcctgtgtctgccccagccaagaagaagatgaagctgcggggcaccaaggacctgagcattgctgctgtgggcaagtatggcaccctgcaggagttctccttctttgacaaggtgagaagagtgctgaagagccaggaggtgtatgagaacttcctgcgctgcatcgccctcttcaaccaggagctggtgtctggcagcgagctgctgcagctggtgagccccttcctgggcaagtttcctgagctgtttgcccagttcaagagcttcctgggcgtgaaggagctgagctttgccccacccatgtctgacagaagtggagatggcatcagccgggagattgattatgccagctgcaagagaattggcagcagctaccgggccctgcccaagacctaccagcagcccaagtgcagcggccgcacagccatctgcaaggagctggaccactggaccctgctgcagggctcctggacagatgactactgcatgagcaagttcaagaacacctgctggatccctggctacagcgctggggtgctgaatgacacctgggtgtccttccccagctggagcgaggacagcacctttgtgagcagcaagaagaccccctatgaggagcagctgcaccgctgtgaagatgaaagatttgagctggatgtggtgctggagaccaacctggccaccatccgggtgctggagagcgtgcagaagaagctgagcaggatggcccctgaggaccaggagaagttccggctggatgacagcctgggcggcaccagcgaggtgatccagaggcgggccatctaccgcatctacggggacaaggcccctgagatcatcgagagcctgaagaagaaccctgtgacagctgtgcctgtggtgctgaagaggctgaaggccaaggaggaggagtggagggaggcccagcagggcttcaacaagatctggagggagcagtatgagaaggcctacctgaagagcctggaccaccaggccgtgaacttcaagcagaatgacaccaaggccctgcggagcaagagcctgctgaatgaaattgagagcgtgtatgatgagcaccaggagcagcacagcgagggccgcagcgcccccagcagcgagccccacctgatctttgtgtatgaagatcggcagatcctggaggatgctgctgccctgatctcctactacgtgaagaggcagcctgccatccagaaggaggaccagggcaccatccaccagctgctgcaccagtttgtgcccagcctcttcttcagccagcagctggacctgggcgccagcgaggagagcgcagatgaagatcgggacagcccccagggccagaccacagaccccagcgagaggaagaagccagcccctggcccccacagcagccccccagaggagaagggggcctttggagatgccccagccacagagcagccccccctgcccccaccagccccccacaagcccctggatgatgtgtacagcctcttctttgccaacaacaactggtacttcttcctgcggctgcaccagaccctgtgcagccggctgctgaagatctaccggcaggcccagaagcagctgctggagtacagaacagagaaggagcgggagaagctgctgtgtgagggcagaagagagaagggcagtgaccctgccatggagctgcggctgaagcagcccagcgaggtggagctggaggagtactacccagccttcctggacatggtgcgcagcctgctggagggcagcattgaccccacccagtatgaggacaccctgcgggagatgttcaccatccacgcctacgtgggcttcaccatggacaagctggtgcagaacatcgcccggcagctgcaccacctggtgtctgatgatgtgtgcctgaaggtggtggagctgtacctgaatgagaagaagagaggagctgctgggggcaacctgagcagccgctgtgtgcgggccgcccgggagaccagctaccagtggaaggccgagcgctgcatggctgatgagaactgcttcaaggtgatgttcctgcagaggaagggccaggtgatcatgaccatcgagctgctggacacagaggaggcccagacagaagatcctgtggaggtgcagcacctggcccgctacgtggagcagtatgtgggcacagaaggagccagcagcagccccacagagggcttcctgctgaagcctgtgttcctgcagaggaacctgaagaagttcagaagacgctggcagagcgagcaggcccgggccctgcggggggaggcccggagctcctggaagaggctggtgggcgtggagagcgcctgtgatgtggactgccgcttcaagctgagcacccacaagatggtgttcatcgtgaacagcgaggactacatgtacagaagaggcaccctgtgccgggccaagcaggtgcagcccctggtgctgctgcggcaccaccagcactttgaggagtggcacagccgctggctggaggacaacgtgacagtggaggccgccagcctggtgcaggactggctgatgggagaagaagatgaggacatggtgccctgcaagaccctgtgtgagaccgtgcacgtgcacggcctgcctgtgacccgctacagagtgcagtacagcagaagacctgccagcccctag

SEQ ID NO: 185536 - DNA, 3489 bp, Artificial Sequence
  derived and/or modified sequence
atggcccacgccggcggcggcagcggcggcagcggcgccggcggcccagcagggaggggcctgtccggtgcccgctggggcaggtccggcagtgccgggcatgaaaaattgccagtgcatgtcgaagatgccctgacttacttggaccaggtgaaaattagattcggcagcgatccggctacatataatggtttcttagagatcatgaaggaatttaagagtcagagcatcgacactccaggagtgatcagacgcgtcagccaactgtttcatgaacacccagacctcattgtcggcttcaatgccttccttcccctcgggtaccgcatcgacatcccgaagaacggtaaactgaacatccaaagcccactcacaagtcaggaaaatagccataatcacggggacggggctgaggattttaagcaacaggtgccttacaaagaggataaaccccaggtgccattggagagcgactctgtagaatttaacaatgcaatctcctatgtcaataaaatcaaaacccggttcttggaccatcctgaaatctataggtcgtttctggaaatcttgcacacataccagaaagagcagctgaatacacgcgggcgcccgttcagaggcatgagcgaagaggaagtgtttactgaggttgctaacctctttagaggccaggaggatttactgtctgagttcggccagtttcttccagaggctaagcgctctcttttcacagggaacgggccctgcgagatgcattctgttcagaagaatgaacacgataaaacacctgagcacagtcgaaaacggagccgtccctccctcttacgacccgtcagcgctccagccaagaaaaaaatgaagctgaggggtactaaggatctgtccatcgccgcagtcggaaaatatgggactctgcaggaattctcatttttcgacaaggttcggcgcgtactcaagagtcaggaggtctatgaaaactttctgaggtgtatcgcgctattcaaccaggaactggttagcggcagtgaactcctgcagcttgtctcccctttcctaggtaagttccctgagctgttcgcccaattcaaatctttcctcggggtcaaagagttgagcttcgccccacccatgagcgatcgctctggcgatggtatcagccgcgagatcgactatgcatcatgtaaacgtataggatcatcctaccgtgctctgcctaagacgtatcaacagccaaaatgttcaggccgtacagccatttgtaaggagttggaccattggacactgctccaaggaagttggactgacgattactgtatgtccaaattcaaaaatacatgctggatccctggttattcagcgggggtccttaacgacacatgggtctcattcccgagctggtctgaggacagtactttcgtatcttccaagaagaccccgtatgaggagcagctgcaccgctgcgaggatgagcgctttgaacttgatgtggtcttggagacaaacctggctactattcgggtactggagtccgtgcagaagaagcttagtcgcatggcacccgaagaccaagagaagttcagactggacgactctctaggcggtacgtctgaggtgatccagaggcgcgctatttaccgtatttacggggacaaggctcctgaaattatcgagtctctgaagaaaaaccccgttactgccgttcccgtggtgctaaagcgcttaaaggctaaggaagaagagtggagagaggcacagcagggtttcaacaagatctggagagagcagtacgaaaaagcctacctcaaaagcctcgatcaccaggccgtgaatttcaagcagaacgacactaaagctctgcgctcaaaaagcctgttaaacgaaattgagtccgtctacgatgagcaccaggagcagcacagcgagggcaggtccgccccttcctcggaaccacaccttatcttcgtctacgaggatagacagattctggaagacgcagctgccctgatctcctactacgtgaaaaggcagcctgccatccagaaagaagaccagggtacaatacatcaactgctgcaccagttcgtgccaagcttgtttttcagccaacagctggacttgggagccagcgaggaaagtgcggacgaagatcgcgacagccctcagggccagaccacagacccgagtgaaagaaagaagcctgcccctggcccccacagcagcccccctgaggaaaagggggccttcggcgatgcgcctgcaactgaacaaccgcctctccctcctcctgccccacataagcctctggatgacgtgtactcccttttcttcgcaaataataactggtactttttcctaaggctccaccaaaccctgtgctcccggttgcttaagatctatcgacaggcacagaagcaactactggagtaccggacagagaaggagcgcgagaaattgttgtgtgagggtcgcagggaaaaaggtagcgatcccgccatggagctgcgcctgaagcagcctagcgaggttgaactggaagagtactatccggcctttcttgacatggttcggagcctcctagagggaagtattgaccccacccagtacgaagacacactgagggagatgttcactatacatgcatacgtagggttcacaatggacaaactggtccaaaacattgcacgtcaattgcatcacctcgtgtctgacgacgtttgccttaaggtggttgaactgtatctcaatgagaagaaacgaggagccgcaggtggtaatctatccagccggtgcgtgcgggccgctcgggaaacgtcttatcagtggaaggctgagcgctgtatggcggacgaaaactgcttcaaagtgatgtttctgcagcgtaagggtcaggtaatcatgaccattgaactgcttgataccgaggaggcgcagactgaggaccctgtagaagtgcagcatctggcccgatacgtagagcagtacgtcgggactgaaggggcgagtagcagcccgacagaggggtttctcctcaaacccgtgttcctgcagcgaaatctaaagaagtttcgccggcgatggcaaagtgaacaggctcgggcactaaggggggaggccaggtctagttggaagcggttagtgggtgtggaatccgcttgcgacgtggattgccggttcaaactcagcactcacaaaatggtattcattgtcaatagtgaggactatatgtaccgacgcggcaccctctgccgcgccaagcaggtccagcccctcgtgctgctgaggcatcaccagcacttcgaagaatggcatagtaggtggctcgaggataacgtgaccgtggaagctgcgagtctggtgcaagattggctgatgggggaagaggacgaagacatggtcccctgtaagactctatgtgaaaccgtccatgtccatggcctccctgtaactcgctatagggtgcagtacagcagaaggcccgctagcccatag

SEQ ID NO: 185537 - DNA, 3489 bp, Artificial Sequence
  derived and/or modified sequence
atggcacatgctgggggtgggtccgggggaagtggcgcaggagggccagccggacgcggattgtctggcgctaggtgggggaggagtggatctgccggacatgagaagctgccagttcacgttgaagacgcactgacctaccttgatcaggtgaaaattcgcttcggtagcgatccggctacttataatggattcctagaaataatgaaggagttcaagagtcagtcaatcgatacccctggcgtgatcaggcgggtaagccagctcttccacgaacatcctgatttaatcgtagggttcaacgcattcctacccctcggataccggatcgacattccaaaaaacgggaagctgaacattcagagccccttgacctcacaagagaatagtcacaaccatggcgatggagcagaagactttaagcagcaggtaccttacaaagaggacaagccgcaggttccactcgaatctgactccgtggagttcaataacgccatcagctatgtgaataaaattaagaccagattccttgaccaccctgagatctacaggagctttcttgagattctgcacacctaccagaaggaacagcttaatactcgcggtaggcccttccggggaatgagcgaagaggaagtttttaccgaagtggctaatctctttagagggcaagaagaccttctttcagaatttggccagtttctccccgaggccaagcggtcccttttcacaggaaacggaccttgcgagatgcactcggtccaaaaaaatgagcacgacaagacgccagagcacagccggaagcgcagccgcccttccttgctgagacccgtttcagcgccagccaaaaagaaaatgaaactgcggggtaccaaggatttgagtattgctgcagtcggtaagtacggaacactgcaagaattttctttctttgacaaagtgcgcagagtactaaagagccaggaagtgtatgaaaatttcctgcggtgcatcgctctattcaatcaggaactggtaagcggcagcgagctgctccagttagtgtctcccttcttagggaaatttccggaactgttcgcacagttcaagtcattcctgggggtgaaggaactgagcttcgcacctcccatgagcgacagaagcggagacgggatatcccgcgagatcgattacgcttcctgcaagaggattggaagcagttatcgtgctctgcccaagacctaccaacagcccaagtgcagcgggcgaactgcaatttgtaaagagctggaccactggaccctgctgcagggctcctggacagacgactattgtatgagcaaattcaagaacacttgctggatccccggttattccgcaggggttttgaacgatacctgggtgtcttttcccagttggtccgaagattcaaccttcgtgagttctaagaagaccccgtatgaggaacagctgcacagatgtgaagacgagcgatttgagcttgacgtggtcctggagaccaacttggccacaatccgggtgctcgaaagcgtccagaagaagctatcccgaatggctcctgaagaccaggaaaagttccggctcgatgactcactcggtgggacctcagaggtcattcagaggagagcgatatatagaatctacggtgataaggcaccagagattatcgaatcactgaagaagaaccctgttactgccgtgccagtggtgctgaaacgccttaaagccaaggaagaggagtggcgcgaagcccagcaaggcttcaataaaatatggagagaacagtacgagaaggcctacttgaagagcctggatcaccaggccgtgaattttaaacagaatgatactaaggcccttcggtctaagagtcttctaaatgaaattgagagcgtctacgatgaacaccaagagcagcatagcgaaggacgctcagcacctagtagcgaacctcacttgatctttgtctacgaggataggcagattctggaggacgcggctgccctgatctcatattacgtaaagagacagccagccatccagaaggaagatcaaggaacgatacatcagctactgcatcagtttgtcccatcactattcttctcgcagcagctcgaccttggggcttcagaagaaagcgcagatgaggaccgcgactcaccccagggacagaccaccgacccttccgagcggaagaagcctgctcccggtcctcacagctcaccccctgaagagaagggagccttcggggacgctcctgccaccgagcaaccacccctgccaccccctgctcctcataagccgctggacgacgtctactccctcttctttgctaacaacaattggtactttttccttagattgcaccagactctgtgttccaggctgctgaagatttacaggcaggcccagaaacagcttttagagtacaggacagaaaaagagagagaaaagctgttgtgcgagggacgtagggaaaaaggctccgaccctgcaatggaattgcgcctcaaacaaccatccgaggttgagctagaggaatactatcccgctttcctcgacatggtgaggagcctacttgagggaagcatcgaccccacacagtatgaggatacccttagagaaatgtttaccatacatgcttatgtcgggttcaccatggacaagctcgtgcaaaatatcgccagacagctccaccatctggtcagcgatgacgtctgccttaaggtcgtcgaactttatctcaatgaaaaaaagcgaggagccgctggtgggaatctgagttctaggtgtgtaagggctgctcgcgagacatcatatcagtggaaagcggaaaggtgcatggctgatgaaaactgcttcaaggtgatgttcctccaacggaaggggcaagtcataatgactatcgagcttctggacaccgaggaggctcaaactgaggacccagtagaagtccaacacctggctagatatgtggagcagtatgtggggaccgaaggcgcatcttcaagcccaacggaaggatttctactaaagcctgtgtttctgcagaggaatcttaaaaaattcagaaggagatggcaatcggaacaggccagagcgttgagaggggaggcaagaagctcatggaagcgtttagtcggcgtcgaatccgcctgtgacgtggattgtcgcttcaaactttctacccacaaaatggtgttcatcgtgaacagcgaggattatatgtatagacggggtaccctctgcagggcaaaacaggtgcagccactagtgctgctgcgtcaccaccagcatttcgaagaatggcactcgagatggctggaggacaacgtgactgtggaggccgctagtctcgtacaggactggctaatgggtgaggaggatgaggacatggtcccctgcaagacattgtgtgagacagtgcacgtgcacggactgcctgtgaccagatatcgggttcaatacagccggagacccgcatcaccatag

SEQ ID NO: 185538 - DNA, 5129 bp, Artificial Sequence
  derived and/or modified sequence
ctccgacttcggacatggcgcacgctggcggtggcagcggtggcagcggtgccggcggccccgcgggccgggggctgagcggcgcccgctggggtcgctcgggctccgcaggccacgagaagctgccggtgcacgtagaagacgccctcacctatctggaccaggtgaagatccgctttggcagcgaccctgccacctacaacggcttcctggagatcatgaaggagttcaaaagccagagcatcgatactcctggagtcatcagacgtgtctcgcagctcttccacgagcaccctgacctcattgttggattcaacgcttttcttcccctcggatatagaatagacattcccaagaatggcaagttaaacatacagtcgcctctgacaagccaggagaattcgcacaaccacggggacggtgcagaggacttcaagcagcaggtgccgtataaagaggacaaaccccaggtgcccctggagtccgattccgtggaattcaacaacgccatcagctatgtgaataagattaaaacccgcttcctagaccacccagaaatctacaggtcattcctggagatcctgcacacgtaccagaaggagcagctgaacacgaggggccggccattccgaggcatgtctgaagaggaggtgttcaccgaggtggccaacctcttccggggccaggaggacctgctctcagagtttggacagttcctgcccgaagccaagcggtctctgttcacaggaaacgggccgtgcgagatgcacagcgtgcagaagaacgagcacgacaagaccccggagcacagcaggaagcgctcccggccctcgctcctccgccccgtgtctgcacccgccaagaaaaaaatgaaacttcgtggtaccaaagacctgtccatcgctgcagtggggaagtacgggactctgcaggaattttctttctttgacaaggtccgccgggtgctgaagagccaggaggtgtatgaaaacttcctccgctgcatcgcactcttcaaccaggagctggtgtctggctctgagctcctgcagctcgtcagcccatttctggggaaatttccagaactctttgcacagttcaagtccttcctgggggtaaaagagctgtccttcgcgccacccatgagcgacagatccggggacgggataagccgggaaattgattatgcatcctgcaagcgcataggatccagctaccgggcactccccaaaacctaccagcagcccaagtgcagtgggaggacagccatctgcaaggagcttgaccattggacacttctccagggttcgtggacagacgattactgcatgtccaagttcaagaatacctgctggattccaggatatagtgcaggggtactgaacgacacctgggtctccttcccttcctggtctgaggactccacgttcgtcagctccaagaagacaccgtacgaggagcagcttcaccgctgtgaggacgagcgcttcgagttagacgttgtcctggagacgaacctggccacaatccgtgtgttggaaagtgtgcagaagaagctatctcggatggcgccggaagaccaggagaagttccggctggacgactccctgggaggcacgtcggaggtgatccagcgccgtgccatttatcgcatctatggcgacaaggccccggagatcatcgagagcctcaagaagaaccctgtcaccgctgtccccgttgtcctgaaaagactgaaggccaaggaagaggagtggcgggaggcccagcagggcttcaacaagatctggcgggagcagtatgagaaggcgtacctcaagtcccttgaccaccaggctgtgaacttcaagcagaacgacaccaaggccctgcgctccaagagcttgctcaacgagatcgagagcgtctacgacgagcaccaggagcagcactcggagggccgcagtgccccctctagcgagccgcacctcatctttgtgtacgaggaccggcagatcctggaggacgcagcagcgctcatcagctactacgtgaagcggcagccggccatccagaaggaggaccagggcaccatccaccagctgctgcaccagttcgtgcccagcctcttcttctctcagcagctggacctgggcgcctccgaggagtcagctgatgaggaccgggacagcccccaggggcagaccacagaccccagtgagcggaagaagccggcgccaggaccccacagtagccccccagaggagaagggggccttcggggatgccccggccactgagcagccacccctgccgcccccagccccgcacaagcccctggacgatgtctacagcctattttttgccaacaacaactggtacttcttcctgcgcctgcaccagaccctgtgctccaggctgctgaagatctaccgccaggcgcagaagcagcttctggagtatcggaccgagaaggagcgggagaagctgctgtgtgagggccgcagggagaagggcagcgaccccgccatggagctgcggctgaagcagcccagtgaagtggagctggaggagtactacccggccttcctggacatggtgcggagcctgctggagggcagcatcgaccccacgcagtacgaggacaccctacgcgagatgttcaccatccatgcctacgtgggcttcaccatggacaagctggtgcagaacattgcgcggcagctgcaccacctcgtgagcgatgacgtctgcctgaaggtggtggagctctacctgaacgagaagaagcggggtgccgctggtgggaacctgtcctcccgctgcgtccgcgctgctagggagaccagctaccagtggaaggctgagcgctgcatggccgacgagaactgcttcaaggtgatgttcctgcagcgcaaagggcaggtgatcatgaccatcgagctcctggacaccgaggaggcccagacggaggaccctgtggaggtccagcacctggctcggtacgtggagcagtatgtggggaccgagggcgcgtccagctcgcccactgagggcttcctcctgaaacctgtgttcctgcagaggaacctcaagaagttccgccgccggtggcagagcgagcaggcgcgggccctgcgcggtgaggccaggagctcctggaagcggctggtgggcgtggagagcgcctgcgacgtggactgccgcttcaagctcagcactcacaagatggtgttcatcgtgaactccgaggactacatgtaccgtcgcgggaccctctgccgggccaagcaggtgcagcccctggtcctgctccgccaccaccagcactttgaggagtggcacagccgctggctggaggacaatgtgacggtggaggcggctagcctggtgcaggactggctgatgggtgaggaggacgaggacatggtaccctgcaagacgctgtgtgagacagtgcacgtgcacggcctgcccgtgacccgctaccgcgtgcagtacagccgccgcccggcctcgccctgacccgccctcatgggcaccgggcaggcgcctcacagagcacagacgtgccctcggccttggtcgtgtcggggccgttttcttgaacgacgtgagaggcatctcccagcccctctgctgccggacagcgcactccagggcaggacgccgcccccgtggctcccggtctcctgtgggcctgctgtgtgccaaacctgagctacctgcacccgagccctggggctcagccccaccacaggggcgggtggacgtgctggccgaggaacaagcaatcatgtttgcgtccccgtccgtcacatgtgccaaatccctggcaggcagatggctcctgccccatattcttgccgtgtcttggaaaagtcacaggtgacagccctcctgaggcccacactttggagggggtccatgtccaagagaccctgacaaggaaggagttgagccctgggtaggcttgcttgaaaagtgagtccttccagaatattctcagagctgccagaaacatcatctgagggtttgggcatcagctctgcctggctggtgttcaggccctcagtcactttggaagtgagaagaacccttcagccaaacctttgggatcccattttgaagtccagagctggagcaggcgggcagtgccctgggagaccccgctctggataagacacccaaccccaactccagcagctggactctgggcccacaaggggagggaccccagccagtattccctcagagccggcacgaccctgctgtggggcggcgggcccagtcgtgttcctgcagtgggcaccctaggcgtatgtgtatacacgcacagatatttattcctttcgcttttagtggttgttatttctgtagcagccaagtcctgcggctccctggggctgagatctccctttgtggaactccgagagccgccctgacagtcccagccgccacccaaggagccccatccgcccacccaccctgggacccacgcggccactccagggatcattgttgtccttttgtgaggggctgaggcgactgtcccatggaggcatccaaggctttctgtgccaagaatcccaagtgactggggctggggaccacttctccaggcctctctccccgaccatgagagcccctggccctggcccctgcacaccagtaggcccagaataaccgccacccttgccatcctgcaacagctggactcaagtttccaggaagtggagatgtgtttctagaagtttcctgtggaacctggaggctcctgatgcctttgactccaggctgggcgattccgatgctgacccgtcctcctgggctccccacccccgctccccaagtgtcacacaggcactttgtacacatcctggttttctaagaagggaacttgccatcaagattcctgtaccaggcccacggccgtctcgggcagagccacctgggccccgggtgcagccggagaccccgccgagcccctcctcccagtattcccatccccgcatgcttctagggagcgcctcttttccgttcttgaggaatttctgttctggggcttgtccttcctttgcagctgttttgaatgtagttttccttttctatttatttgcacattaaagttaataattgaatattgacatc

SEQ ID NO: 185539 - DNA, 3489 bp, Artificial Sequence
  derived and/or modified sequence
atggcccacgccggcggcggcagcggcggcagcggcgccggcggccccgccggcagaggcctgagcggcgccagatggggcagaagcggcagcgccggccacgagaagctgcccgtgcacgtggaggacgccctgacctacctggaccaggtgaagatcagattcggcagcgaccccgccacctacaacggcttcctggagatcatgaaggagttcaagagccagagcatcgacacccccggcgtgatcagaagagtgagccagctgttccacgagcaccccgacctgatcgtgggcttcaacgccttcctgcccctgggctacagaatcgacatccccaagaacggcaagctgaacatccagagccccctgaccagccaggagaacagccacaaccacggcgacggcgccgaggacttcaagcagcaggtgccctacaaggaggacaagccccaggtgcccctggagagcgacagcgtggagttcaacaacgccatcagctacgtgaacaagatcaagaccagattcctggaccaccccgagatctacagaagcttcctggagatcctgcacacctaccagaaggagcagctgaacaccagaggcagacccttcagaggcatgagcgaggaggaggtgttcaccgaggtggccaacctgttcagaggccaggaggacctgctgagcgagttcggccagttcctgcccgaggccaagagaagcctgttcaccggcaacggcccctgcgagatgcacagcgtgcagaagaacgagcacgacaagacccccgagcacagcagaaagagaagcagacccagcctgctgagacccgtgagcgcccccgccaagaagaagatgaagctgagaggcaccaaggacctgagcatcgccgccgtgggcaagtacggcaccctgcaggagttcagcttcttcgacaaggtgagaagagtgctgaagagccaggaggtgtacgagaacttcctgagatgcatcgccctgttcaaccaggagctggtgagcggcagcgagctgctgcagctggtgagccccttcctgggcaagttccccgagctgttcgcccagttcaagagcttcctgggcgtgaaggagctgagcttcgccccccccatgagcgacagaagcggcgacggcatcagcagagagatcgactacgccagctgcaagagaatcggcagcagctacagagccctgcccaagacctaccagcagcccaagtgcagcggcagaaccgccatctgcaaggagctggaccactggaccctgctgcagggcagctggaccgacgactactgcatgagcaagttcaagaacacctgctggatccccggctacagcgccggcgtgctgaacgacacctgggtgagcttccccagctggagcgaggacagcaccttcgtgagcagcaagaagaccccctacgaggagcagctgcacagatgcgaggacgagagattcgagctggacgtggtgctggagaccaacctggccaccatcagagtgctggagagcgtgcagaagaagctgagcagaatggcccccgaggaccaggagaagttcagactggacgacagcctgggcggcaccagcgaggtgatccagagaagagccatctacagaatctacggcgacaaggcccccgagatcatcgagagcctgaagaagaaccccgtgaccgccgtgcccgtggtgctgaagagactgaaggccaaggaggaggagtggagagaggcccagcagggcttcaacaagatctggagagagcagtacgagaaggcctacctgaagagcctggaccaccaggccgtgaacttcaagcagaacgacaccaaggccctgagaagcaagagcctgctgaacgagatcgagagcgtgtacgacgagcaccaggagcagcacagcgagggcagaagcgcccccagcagcgagccccacctgatcttcgtgtacgaggacagacagatcctggaggacgccgccgccctgatcagctactacgtgaagagacagcccgccatccagaaggaggaccagggcaccatccaccagctgctgcaccagttcgtgcccagcctgttcttcagccagcagctggacctgggcgccagcgaggagagcgccgacgaggacagagacagcccccagggccagaccaccgaccccagcgagagaaagaagcccgcccccggcccccacagcagcccccccgaggagaagggcgccttcggcgacgcccccgccaccgagcagccccccctgcccccccccgccccccacaagcccctggacgacgtgtacagcctgttcttcgccaacaacaactggtacttcttcctgagactgcaccagaccctgtgcagcagactgctgaagatctacagacaggcccagaagcagctgctggagtacagaaccgagaaggagagagagaagctgctgtgcgagggcagaagagagaagggcagcgaccccgccatggagctgagactgaagcagcccagcgaggtggagctggaggagtactaccccgccttcctggacatggtgagaagcctgctggagggcagcatcgaccccacccagtacgaggacaccctgagagagatgttcaccatccacgcctacgtgggcttcaccatggacaagctggtgcagaacatcgccagacagctgcaccacctggtgagcgacgacgtgtgcctgaaggtggtggagctgtacctgaacgagaagaagagaggcgccgccggcggcaacctgagcagcagatgcgtgagagccgccagagagaccagctaccagtggaaggccgagagatgcatggccgacgagaactgcttcaaggtgatgttcctgcagagaaagggccaggtgatcatgaccatcgagctgctggacaccgaggaggcccagaccgaggaccccgtggaggtgcagcacctggccagatacgtggagcagtacgtgggcaccgagggcgccagcagcagccccaccgagggcttcctgctgaagcccgtgttcctgcagagaaacctgaagaagttcagaagaagatggcagagcgagcaggccagagccctgagaggcgaggccagaagcagctggaagagactggtgggcgtggagagcgcctgcgacgtggactgcagattcaagctgagcacccacaagatggtgttcatcgtgaacagcgaggactacatgtacagaagaggcaccctgtgcagagccaagcaggtgcagcccctggtgctgctgagacaccaccagcacttcgaggagtggcacagcagatggctggaggacaacgtgaccgtggaggccgccagcctggtgcaggactggctgatgggcgaggaggacgaggacatggtgccctgcaagaccctgtgcgagaccgtgcacgtgcacggcctgcccgtgaccagatacagagtgcagtacagcagaagacccgccagcccctag

SEQ ID NO: 185540 - protein, 74 aa, Artificial Sequence [sequence omitted]

SEQ ID NO: 185541 - protein, 35 aa, Artificial Sequence
  derived and/or modified sequence
MVALRGLGSGLQPWCPLDLRLEWVDTVWELDFTET

SEQ ID NO: 185542 - protein, 1498 aa, Artificial Sequence
  derived and/or modified sequence
MVALRGLGSGLQPWCPLDLRLEWVDTVWELDFTETEPLDPSIEAEIIETGLAAFTKLYESLLPFATGEHGSMESIWTFFIENNVSHSTLVALFYHFVQIVHKKNVSVQYREYGLHAAGLYFLLLEVPGSVANQVFHPVMFDKCIQTLKKSWPQESNLNRKRKKEQPKSSQANPGRHRKRGKPPRREDIEMDEIIEEQEDENICFSARDLSQIRNAIFHLLKNFLRLLPKFSLKEKPQCVQNCIEVFVSLTNFEPVLHECHVTQARALNQAKYIPELAYYGLYLLCSPIHGEGDKVISCVFHQMLSVILMLEVGEGSHRAPLAVTSQVINCRNQAVQFISALVDELKESIFPVVRILLQHICAKVVDKSEYRTFAAQSLVQLLSKLPCGEYAMFIAWLYKYSRSSKIPHRVFTLDVVLALLELPEREVDNTLSLEHQKFLKHKFLVQEIMFDRCLDKAPTVRSKALSSFAHCLELTVTSASESILELLINSPTFSVIESHPGTLLRNSSAFSYQRQTSNRSEPSGEINIDSSGETVGSGERCVMAMLRRRIRDEKTNVRKSALQVLVSILKHCDVSGMKEDLWILQDQCRDPAVSVRKQALQSLTELLMAQPRCVQIQKAWLRGVVPVVMDCESTVQEKALEFLDQLLLQNIRHHSHFHSGDDSQVLAWALLTLLTTESQELSRYLNKAFHIWSKKEKFSPTFINNVISHTGTEHSAPAWMLLSKIAGSSPRLDYSRIIQSWEKISSQQNPNSNTLGHILCVIGHIAKHLPKSTRDKVTDAVKCKLNGFQWSLEVISSAVDALQRLCRASAETPAEEQELLTQVCGDVLSTCEHRLSNIVLKENGTGNMDEDLLVKYIFTLGDIAQLCPARVEKRIFLLIQSVLASSADADHSPSSQGSSEAPASQPPPQVRGSVMPSVIRAHAIITLGKLCLQHEDLAKKSIPALVRELEVCEDVAVRNNVIIVMCDLCIRYTIMVDKYIPNISMCLKDSDPFIRKQTLILLTNLLQEEFVKWKGSLFFRFVSTLIDSHPDIASFGEFCLAHLLLKRNPVMFFQHFIECIFHFNNYEKHEKYNKFPQSEREKRLFSLKGKSNKERRMKIYKFLLEHFTDEQRFNITSKICLSILACFADGILPLDLDASELLSDTFEVLSSKEIKLLAMRSKPDKDLLMEEDDMALANVVMQEAQKKLISQVQKRNFIENIIPIIISLKTVLEKNKIPALRELMHYLREVMQDYRDELKDFFAVDKQLASELEYDMKKYQEQLVQEQELAKHADVAGTAGGAEVAPVAQVALCLETVPVPAGQENPAMSPAVSQPCTPRASAGHVAVSSPTPETGPLQRLLPKARPMSLSTIAILNSVKKAVESKSRHRSRSLGVLPFTLNSGSPEKTCSQVSSYSLEQESNGEIEHVTKRAISTPEKSISDVTFGAGVSYIGTPRTPSSAKEKIEGRSQGNDILCLSLPDKPPPQPQQWNVRSPARNKDTPACSRRSLRKTPLKTAN

SEQ ID NO: 185543 - DNA, 225 bp, Artificial Sequence
  derived and/or modified sequence
atggtcgcgctgcgggggctgggctctggactgcagccgtggtgccctctggatctgcggctcgagtgggtcgataccgtctgggaactcgacttcacggagacagagcctctggacccttccattgaggctgagattattgagaccggcctcgccgcatttaccaagctttatgagtccctactgccatttgctacgggcgaacatggaagtatggaagtgtag

SEQ ID NO: 185544 - DNA, 108 bp, Artificial Sequence
  derived and/or modified sequence
atggtggcactgaggggcctaggaagcgggttacagccctggtgcccactggacctgcgtctcgaatgggttgacacagtttgggaactggatttcacagaaacctag

SEQ ID NO: 185545 - DNA, 4497 bp, Artificial Sequence
  derived and/or modified sequence
atggtggccttacgcggactcggtagcgggctgcagccatggtgcccgcttgatctcaggctggagtgggttgataccgtctgggagctggactttacagaaacggagccgttagatccctctattgaggccgagattattgagacggggctggctgcatttacaaaattgtatgagtctctccttccattcgctacaggggagcacggcagcatggagagtatttggacctttttcattgaaaacaacgttagccactccacacttgttgctttgttttaccattttgtgcaaatcgtgcacaaaaaaaacgtatctgtgcaatacagagaatatggacttcacgcagcggggctgtacttcctgctcttagaggttccgggctccgttgccaaccaggtgttccatccggtaatgttcgacaagtgcatccagacgctcaagaagagctggcctcaggaaagtaacctgaatagaaaacggaagaaggaacagcctaaatcatcccaggccaacccaggtcggcacaggaagcgaggcaagccaccgcggcgggaggacatcgaaatggacgagattattgaggagcaagaagatgagaacatttgcttctctgctcgggacttgtcgcagatacgcaatgccattttccacctactgaaaaacttcctacggttgctgccaaagttctcccttaaggaaaagccccagtgtgttcagaattgtatcgaagttttcgtttcactgactaatttcgagcctgtattacacgaatgtcacgttactcaggccagggccctcaatcaggccaaatatattcccgaactggcctactatggtctgtatcttttatgcagtcctattcacggagaaggggacaaggtcatctcgtgcgtgtttcaccaaatgctctcagtgatccttatgcttgaagtcggcgagggttctcacagggcccccctcgccgtgacatcgcaagtgatcaactgtaggaatcaggccgtgcagttcatttctgccctcgtggatgaacttaaagagagcatcttccctgtggtacgcatcctcctgcagcacatttgtgctaaagtagtggacaaaagcgaatataggacgtttgctgcccagtccctagttcagttactttccaaactgccatgtggagaatatgccatgttcattgcctggctgtataagtactccaggtcttctaaaatcccacatagagtgtttactcttgacgtggttctggccctactggaactgcctgagagagaagtggacaatactttgtctctggaacatcaaaagttcctgaaacacaagttcctggtacaagagattatgttcgatcggtgtcttgacaaagcacccacagttcgcagcaaagccctgtctagcttcgcccactgtttggaactgaccgtgacatccgcgagcgagagcatcctggaactgctcattaactcaccgacctttagcgtgattgagtcccatcccgggaccttgctgcgcaactcttcagccttctcttaccagcgccagaccagcaacaggagcgagccctccggagagattaacatcgactcaagcggagaaactgtagggtctggcgagagatgtgtaatggctatgctgcgtcgccgtatacgggatgaaaaaacaaatgtaaggaaaagcgcgctgcaagtgctggtctccatactgaaacattgcgatgtgtccggcatgaaagaggatctttggattttacaggatcagtgccgagatccggcagttagcgtgcgaaaacaagcactacagtcattgaccgagcttctgatggctcaacctaggtgtgtgcaaatccagaaggcctggttgcggggtgtcgttccagtggttatggactgcgagagtactgtccaagaaaaggccctcgagttcctcgaccaattgcttttacagaacatcagacatcattctcatttccactcaggcgacgattctcaggttctggcctgggcactgttaactttgttgactaccgaatcccaggaactgtcaaggtacctgaataaagcttttcacatatggagtaagaaagagaaattctccccaacttttatcaacaatgtgatatcacacacaggcactgaacactccgctcccgcctggatgctgctgagcaagattgccgggagctcccctcgcctcgactactcgcgaattattcagtcttgggagaaaatttcatcacagcagaaccccaactccaatacactgggtcatatcctgtgcgtgattgggcacattgccaagcatcttcccaagtcaacccgcgacaaagtgacagacgcagtgaagtgcaaacttaatggttttcagtggtcccttgaggtgatcagctctgccgtggacgccctccagagactttgccgagcaagcgccgaaacgccagcagaagaacaggaactactcacgcaggtctgtggagacgtgctaagcacatgcgagcacaggctcagcaatatcgtgttaaaagagaatgggacgggcaacatggacgaggatttgctcgtgaaatatatcttcaccctgggagacatagcgcagctgtgtccagctcgggtggaaaagaggatatttctccttattcagagcgtgctcgcctcatccgccgacgccgatcattctccctcctcccaaggaagctcagaagctcccgcgtcgcagccacccccacaggtgaggggcagcgttatgccgtctgtgatacgcgcccatgccattatcaccctaggaaagctttgcctgcaacatgaggacctcgctaagaaaagcatccccgcgttagtccgcgaactggaggtgtgcgaggatgtcgccgtgcggaacaatgtcatcatcgtgatgtgcgacctctgtatccgttacactataatggtggacaagtatatcccaaacatctccatgtgccttaaggatagcgatccttttatccgcaagcaaaccctcattctgctcacgaacctgctgcaggaggagtttgttaaatggaaaggtagcctgtttttccggtttgtaagtacgctgatagattcacaccctgatatagccagctttggcgaattctgtctggcacatttgctgctgaagcgcaacccagtcatgttttttcagcactttattgagtgcattttccattttaacaattacgagaagcacgagaagtataataagttcccacaatcagagcgagagaagcgactgttcagtctgaagggaaagtccaacaaggaacggaggatgaagatttataagttcttgttggaacacttcacggacgagcagcggtttaacattacttctaagatatgcctttcaattctcgcctgcttcgccgatggaatactacctttggatctggatgcttctgagctgctgagtgacaccttcgaggttctttcgagtaaggaaatcaagctcttagcaatgcgatcaaagcccgacaaagacctgctcatggaggaagacgatatggccctggctaacgtcgtgatgcaagaggctcagaagaaactgattagccaggtgcagaagcgaaactttattgaaaatataattccaatcatcattagcttaaagaccgttctcgagaaaaataaaatccccgctctgcgcgagctcatgcactatcttcgagaggttatgcaggactatcgggacgaactgaaggatttctttgcggtggataaacagttggcgtccgaactcgagtacgacatgaagaagtatcaggagcagctggtccaggagcaggaattggccaagcacgccgatgtggctggtacagccggcggagctgaagtggcacctgtagcacaagtggctttatgtcttgagacagtccccgtcccagccgggcaggagaatcccgcgatgagcccagcggtatcacagccttgtacgccacgggcttctgcgggtcatgtggctgtgagtagccctactcctgaaaccggacccctccaaaggctgctacccaaggccaggccgatgtccctcagcactattgcgattctgaattcagtaaagaaggccgtggagagtaagtctcgacacaggtcccggagtctgggagttttacccttcaccctaaatagtggatccccagaaaagacctgctctcaggtttcttcatactcattagagcaggaatctaacggcgaaattgagcatgtgacaaagcgagctatcagtactcctgaaaaatcaatctccgacgtgacttttggagccggggtgtcctacattggaacccctcgtacgccgtcatccgctaaagaaaaaattgagggcagaagccagggcaatgacatcctttgtctgtctctgccggacaaaccgcccccccagccgcagcagtggaacgtacgctcaccagcccgaaataaggacacccctgcctgttcccgccggagtctgagaaagacacctttgaagactgccaattag

SEQ ID NO: 185546 - DNA, 555 bp, Artificial Sequence
  derived and/or modified sequence
gagcgcggccggcgctccagcggtcggcatggcagctgctacctcgctgggacaggctctgggcccacgcgtgccgcgcagtccctacagaactgcagttgtcttgtcttctcggagtgctttcggctacttttcccttattactttagctcgatacacgttgggctgcctttcacattcggatattacgctgttcgagtgctgacgggaaaggcagccctttgacacgcacgcgaaatgtcgcctgacgagggcaaaggaacgactcggcgcgcgcgcgggagcgagctttgaaagttgagcacggcggcggcgagccggtgccctgggatcatggtggcgttgcggggccttggtagcggcctgcagccctggtgtccgctggatcttagactcgaatgggttgacacagtgtgggaactggatttcacagagactgagcctttggatcccagcatagaagcagagatcatagagactggattggctgcattcacaaaactctatgaaagccttttaccctttgctactggagaacatggatctatggaggta

SEQ ID NO: 185547 - DNA, 5061 bp, Artificial Sequence
  derived and/or modified sequence
ggcgcgcgcgcgggagcgagctttgaaagttgagcacggcggcggcgagccggtgccctgggatcatggtggcgttgcggggccttggtagcggcctgcagccctggtgtccgctggatcttagactcgaatgggttgacacagtgtgggaactggatttcacagagactgagcctttggatcccagcatagaagcagagatcatagagactggattggctgcattcacaaaactctatgaaagccttttaccctttgctactggagaacatggatctatggagagtatctggaccttcttcattgagaacaatgtttcccatagtacactggtggcattgttctatcattttgttcaaatagttcataagaagaatgtcagtgtacagtatcgagaatatggccttcatgccgctgggctttactttttgctactagaagtaccaggcagtgtagccaatcaagtattccacccagtgatgtttgacaaatgcattcagactctaaagaagagctggccccaggaatctaacttgaatcggaaaagaaagaaagaacagcctaagagctctcaggctaaccccgggaggcatagaaaaaggggaaagccacccaggagagaagatattgagatggatgaaattatagaagaacaagaagatgagaatatttgtttttctgcccgggacctttctcaaattcgaaatgccatctttcaccttttaaagaattttttaaggcttctgccaaagttttccttgaaagaaaagccacaatgtgtacagaattgtatagaggtctttgtttcattaactaattttgagccagttcttcatgaatgtcatgttacacaagccagagctcttaaccaagcaaaatacataccagaactggcttattatggattgtatttgctgtgctctcccattcatggagaaggagataaggtcatcagttgtgttttccatcaaatgctcagtgtaatattaatgttagaagttggtgaaggatcccatcgtgccccccttgctgttacctcccaagtcatcaactgtagaaaccaggcggtccagtttatcagcgcccttgtggatgaattaaaggagagtatattcccagtcgtccgtatcttactgcagcacatctgtgccaaggtggtagataaatcagagtatcgtacttttgcagcccagtccctagtccagctgctcagtaaacttccttgtggggaatacgctatgttcattgcctggctttacaaatactcccgaagttccaagatcccacaccgggtttttactcttgatgttgtcttagctctgttagaactgcctgaaagagaggtggataacaccctctccttggagcatcagaagttcttaaagcataagttcctggtgcaggaaattatgtttgatcgttgcttagacaaggcgcctactgtccgcagcaaggcactgtccagctttgcacactgtctggagttgactgttaccagtgcgtcggagagtatcctggagctcctgattaacagtcctacgttttctgtaatagagagtcaccctggtaccttactgagaaattcatcagctttttcctaccaaaggcagacatctaaccgttccgaaccctcaggggagatcaacatagacagcagtggtgaaacagttggatctggagaaagatgtgtcatggcaatgctgagaaggaggatcagggatgagaagaccaacgttaggaagtctgcactgcaggtattagtgagtattttgaaacactgtgatgtctcaggcatgaaggaagacctgtggattctgcaggaccagtgtcgggaccctgcagtgtctgtccggaagcaggccctccagtctcttactgaactccttatggctcagcctagatgcgtgcagatccagaaagcctggttgcggggggtggtcccggtggtgatggactgcgagagcactgtgcaggagaaggccctggagttcctggaccagctgctgctgcagaacatccggcatcacagtcattttcactctggggacgacagccaggtcctcgcctgggcgcttcttactctcctcaccaccgaaagccaggaactgagccgatatttaaataaggcttttcatatctggtccaagaaagaaaaattctcacccacttttataaacaatgtaatatctcacactggcacggaacattcggcacctgcctggatgctgctctccaagattgctggctcctcacccaggctggactacagcagaataatacaatcttgggagaaaatcagcagtcagcagaatcccaattcaaacaccttaggacatattctctgtgtgattgggcatattgcaaagcatcttcctaagagcacccgggacaaagtgactgatgctgtcaagtgtaagctgaatggatttcagtggtctctagaggtgatcagttcagctgttgacgccttgcagaggctttgtagagcatctgcagagacaccagcagaggagcaggaattgctgacgcaggtgtgtggggatgtactctccacctgcgagcaccgcctctccaacatcgttctcaaggagaatggaacagggaatatggacgaagacctgttggtgaagtacatttttaccttaggggatatagcccagctgtgtccagccagggtggagaagcgcatcttccttctgattcagtccgtcctggcttcgtctgctgatgctgaccactcaccatcatctcaaggcagcagtgaggccccagcgtctcagccacccccccaggtcagaggttctgtcatgccctctgtgattagagcacatgccatcattaccttaggtaagctgtgcttacagcacgaggatctggcaaagaagagcatcccagccctggtgcgagagctcgaggtgtgtgaggacgtggctgtccgcaacaacgtcatcattgtaatgtgcgatctctgcattcgctacaccatcatggtggacaagtatattcccaacatctccatgtgtctgaaggattccgacccattcatccggaagcagacactcatcttgcttaccaatctcttgcaggaggaatttgtgaaatggaagggctccctgttcttccgatttgtcagcactctgatcgattcacacccagacattgccagcttcggggagttttgcctggctcacctgttactgaagaggaaccctgtcatgttcttccaacacttcattgaatgtatttttcactttaataactatgagaagcatgagaagtacaacaagttcccccagtcagagagagagaagcggctgttttcattgaagggaaagtcaaacaaagagagacgaatgaaaatctacaaatttcttctagagcacttcacagatgaacagcgattcaacatcacttccaaaatctgccttagtattttggcgtgctttgctgatggcatcctacccctggacctggacgccagtgagttactctcagacacgtttgaggtcctcagctcaaaggagatcaagcttttggcaatgagatctaaaccagacaaagacctccttatggaagaagatgacatggccttggcaaatgtagtcatgcaggaagctcagaagaagctcatctcacaagttcagaagaggaatttcatagaaaatattattccaattatcatctccctgaagactgtgctggagaaaaataagatcccagctttgcgggaactcatgcactatctcagggaggtgatgcaggattaccgagatgagctcaaggacttctttgcagttgacaaacagctggcatcagagcttgagtatgacatgaagaagtaccaggaacagctggtccaggagcaggagctagcaaaacatgcagatgtggccgggacggctggaggtgctgaggtggcacctgtggcacaggttgccctgtgtttagaaacagtgccagttcctgctggccaagaaaaccctgccatgtcacctgccgtgagccagccctgcacacccagggcaagtgctggccatgtagcagtatcatctcctacacctgaaacagggccattgcagaggttgctgcccaaagccaggcccatgtccctgagcaccattgcaatcctgaattctgtcaagaaagccgtggagtcaaagagcaggcatcggagtcggagcttaggagtgctgcctttcactttaaattctggaagcccagaaaaaacgtgcagtcaggtgtcttcatacagtttggagcaagagtcgaatggcgagattgagcacgtgaccaagcgggccatcagcacccccgagaagagcatcagtgatgtcacgtttggagcaggggtcagttacatcgggacaccacggactccgtcgtcagccaaagagaaaattgaaggccggagtcaaggaaatgacatcttatgtttatcactgcctgataaaccgcccccacagcctcagcagtggaatgtgcggtctcccgccaggaataaagacactccagcctgcagcaggaggtccctccgaaagacccctctgaaaacagccaactaaacagcgcctcccaccagtgtccaggcaggcaggagcccttgaggaagcagtctcgtgtcctccgtgtgaaggcagctggatcacttcccgcagtccttgggcagcgctttgctgtggaacacgagagctcctcctcaggggcctggcactcaccttctattctgtatgatgtatttggttaaacactgtcaaataatagagatgtgccagatttagattttcttaccctaatctgtttaatattgtaactttattccatttgaaagtgtcaagcccattcagataagctataatctggtctttaaggaacacaactttaaaactgcagctttcttttatataaatcaagcctctgttaacttgaattccttatagtacatattttcccatctgtaatgacgaaattttgattctaatattttttctattatttataagtgcaaattttttaaaaaagtgtacagctttctaaaagtaataaaggtttagcataaataca

SEQ ID NO: 185548 - DNA, 225 bp, Artificial Sequence
  derived and/or modified sequence
atggtggccctgcggggcctgggcagcggcctgcagccctggtgccccctggacctgcggctggagtgggtggacacagtgtgggagctggacttcacagaaacagagcccctggaccccagcattgaggccgagatcattgaaacaggcctggccgccttcaccaagctgtatgagagcctgctgccctttgccaccggggagcacggctccatggaggtgtag

SEQ ID NO: 185549 - DNA, 108 bp, Artificial Sequence
  derived and/or modified sequence
atggtggccctgcggggcctgggcagcggcctgcagccctggtgccccctggacctgcggctggagtgggtggacacagtgtgggagctggacttcacagagacctag

SEQ ID NO: 185550 - DNA, 4497 bp, Artificial Sequence
  derived and/or modified sequence
atggtggccctgcggggcctgggcagcggcctgcagccctggtgccccctggacctgcggctggagtgggtggacacagtgtgggagctggacttcacagaaacagagcccctggaccccagcattgaggccgagatcattgaaacaggcctggccgccttcaccaagctgtatgagagcctgctgccctttgccaccggggagcacggctccatggagagcatctggaccttcttcattgaaaataatgtgagccacagcaccctggtggccctcttctaccactttgtgcagatcgtgcacaagaagaatgtgtctgtgcagtaccgggagtatggcctgcacgccgccggcctgtacttcctgctgctggaggtgcccggctctgtggccaaccaggtgttccaccctgtgatgtttgacaagtgcatccagaccctgaagaagtcctggccccaggagagcaacctgaacaggaagaggaagaaggagcagcccaagagcagccaggccaaccctggccgccacaggaagaggggcaagccaccccggcgggaggacatcgagatggatgagatcatcgaggagcaggaggatgagaacatctgcttcagcgcccgggacctgagccagatcagaaatgccatcttccacctgctgaagaacttcctgcggctgctgcccaagttcagcctgaaggagaagccccagtgtgtgcagaactgcatcgaggtgtttgtgtccctgaccaactttgagcctgtgctgcacgagtgccacgtgacccaggcccgggccctgaaccaggccaagtacatccctgagctggcctactacggcctgtacctgctgtgcagccccatccatggagagggggacaaggtgatcagctgtgtgttccaccagatgctgagcgtcatcctgatgctggaggtgggggagggcagccaccgggcccccctggccgtgaccagccaggtgatcaactgcaggaaccaggccgtgcagttcatcagcgccctggtggatgagctgaaggagagcatcttccctgtggtgcgcatcctgctgcagcacatctgtgccaaggtggtggacaagtctgagtaccgcacctttgctgcccagagcctggtgcagctgctgagcaagctgccctgtggggagtatgccatgttcatcgcctggctgtacaagtacagccgcagcagcaagatcccccacagggtcttcaccctggatgtggtgctggccctgctggagctgcctgagcgggaggtggacaacaccctgagcctggagcaccagaagttcctgaagcacaagttcctggtgcaggagatcatgtttgaccgctgcctggacaaggcccccaccgtgcgcagcaaggccctgagcagctttgcccactgcctggagctgactgtgaccagcgccagcgagagcatcctggagctgctgatcaacagccccaccttcagcgtcatcgagagccaccctggcaccctgctgaggaacagcagcgccttctcctaccagaggcagaccagcaacagaagtgagcccagcggggagatcaacatcgacagcagtggagagaccgtgggcagcggggagcgctgtgtgatggccatgctgcggcggcgcatcagagatgagaagaccaacgtgaggaagagcgccctgcaggtgctggtgtccatcctgaagcactgtgatgtgtctggcatgaaggaggacctgtggatcctgcaggaccagtgccgggaccctgctgtgtctgtgaggaagcaggccctgcagagcctgacagagctgctgatggcccagccccgctgtgtgcagatccagaaggcctggctgcggggcgtggtgcctgtggtgatggactgtgagagcacagtgcaggagaaggccctggagttcctggaccagctgctgctgcagaacatccgccaccacagccacttccacagcggagatgacagccaggtgctggcctgggccctgctgaccctgctgaccacagagagccaggagctgagccgctacctgaacaaggccttccacatctggagcaagaaggagaagttcagccccaccttcatcaacaacgtcatcagccacactggaacagagcacagcgccccagcctggatgctgctgagcaagattgctggcagcagcccccggctggactacagccgcatcatccagagctgggagaagatcagcagccagcagaaccccaacagcaacaccctgggccacatcctgtgtgtgattggccacatcgccaagcacctgcccaagagcacccgggacaaggtgacagatgctgtgaagtgcaagctgaatggcttccagtggagcctggaggtgatcagcagcgctgtggatgccctgcagaggctgtgccgggccagcgctgagaccccagctgaggagcaggagctgctgacccaggtgtgtggagatgtgctgagcacctgtgagcaccggctgagcaacatcgtgctgaaggaaaatggaactggaaacatggatgaggacctgctggtgaagtacatcttcaccctgggggacatcgcccagctgtgcccagcccgggtggagaagaggatcttcctgctgatccagagcgtgctggccagcagcgcagatgctgaccacagccccagcagccagggcagcagcgaggccccagccagccagcccccaccccaggtgcggggctctgtgatgcccagcgtcatccgggcccacgccatcatcaccctgggcaagctgtgcctgcagcacgaggacctggccaagaagagcatcccagccctggtgcgggagctggaggtgtgtgaagatgtggccgtgaggaacaacgtcatcatcgtgatgtgtgacctgtgcatccgctacaccatcatggtggacaagtacatccccaacatctccatgtgcctgaaggacagcgaccccttcatcaggaagcagaccctcatcctgctgaccaacctgctgcaggaggagtttgtgaagtggaagggcagcctcttcttccgctttgtgtccaccctgattgacagccacccagacatcgccagctttggagagttctgcctggcccacctgctgctgaagagaaatcctgtgatgttcttccagcacttcatcgagtgcatcttccacttcaacaactatgagaagcatgagaagtacaacaagttcccccagagcgagcgggagaagaggctcttcagcctgaagggcaagagcaacaaggagaggaggatgaagatctacaagttcctgctggagcacttcacagatgagcagcgcttcaacatcaccagcaagatctgcctgagcatcctggcctgctttgctgatggcatcctgcccctggacctggatgccagcgagctgctgagtgacacctttgaggtgctgagcagcaaggagatcaagctgctggccatgaggagcaagccagacaaggacctgctgatggaggaggatgacatggccctggccaacgtggtgatgcaggaggcccagaagaagctgatcagccaggtgcagaagaggaacttcatcgagaacatcatccccatcatcatcagcctgaagacagtgctggagaagaacaagatcccagccctgcgggagctgatgcactacctgcgggaggtgatgcaggactacagagatgagctgaaggacttctttgctgtggacaagcagctggccagcgagctggagtatgacatgaagaagtaccaggagcagctggtgcaggagcaggagctggccaagcatgctgatgtggccggcacagctggaggagctgaggtggcccctgtggcccaggtggccctgtgcctggagaccgtgcctgtgcctgctggccaggagaacccagccatgagccctgctgtgtcccagccctgcaccccccgggccagcgctggccacgtggccgtgagcagccccaccccagagaccggccccctgcagaggctgctgcccaaggcccggcccatgagcctgagcaccatcgccatcctgaacagcgtgaagaaggctgtggagagcaagagccgccacaggagccgcagcctgggcgtgctgcccttcaccctgaacagcggcagccctgagaagacctgcagccaggtgagcagctacagcctggagcaggagagcaatggagaaattgaacatgtgaccaagagggccatcagcaccccagagaagagcatcagtgatgtgacctttggagctggggtgtcctacatcggcacccccaggacccccagcagcgccaaggagaagattgagggccgcagccagggcaatgacatcctgtgcctgagcctgcctgacaagcccccaccccagccccagcagtggaatgtgcgcagccctgccaggaacaaggacaccccagcctgcagccgccgcagcctgaggaagacccccctgaagacagccaactag

SEQ ID NO: 185551 - DNA, 225 bp, Artificial Sequence
  derived and/or modified sequence
atggtggccctgcggggcctgggcagcggcctgcagccctggtgccccttagacctgcgcttggaatgggtagacacagtctgggagctcgacttcaccgaaactgagcctctggacccatctattgaagccgaaattatagaaaccggcctcgctgccttcacaaaactatatgaaagcctgttgccatttgcaaccggagagcacgggtctatggaagtgtag

SEQ ID NO: 185552 - DNA, 108 bp, Artificial Sequence
  derived and/or modified sequence
atggtggccctgcggggcctgggcagcggcctgcagccctggtgccctctggatctccggctcgaatgggtggatacagtgtgggagctggattttactgaaacttag

SEQ ID NO: 185553 - DNA, 4497 bp, Artificial Sequence
  derived and/or modified sequence
atggtggccctgcggggcctgggcagcggcctgcagccctggtgccctctggatctccgtctggagtgggtcgacacagtgtgggagctggattttacggaaacggaaccattggacccttcaatcgaagccgaaataatcgaaactggactggctgctttcacgaaactgtatgaaagcctattgccctttgccacgggagaacatgggtcaatggaatccatttggacattcttcattgagaacaatgtgagtcattctactctggttgcccttttctatcactttgttcaaattgtgcacaagaagaacgtgtctgtccaataccgggagtatggactgcatgctgccggactttacttcctgctgctcgaggtgccagggtcagtggctaatcaagtcttccatcccgtaatgttcgacaaatgtattcagaccctcaagaaaagctggccacaagagtctaacttgaaccgtaaacgcaagaaggagcaaccgaagagcagccaggccaatccaggacgccacagaaaacgagggaaacctcctcgtagggaggacatagagatggatgaaattatcgaagaacaggaggacgagaatatctgctttagcgcacgggatcttagccagattcggaatgctatcttccatcttcttaaaaattttctgcgcttgttacctaagttttcacttaaggaaaagccacagtgtgtgcaaaattgcattgaggtgtttgtgagtctgacgaactttgagccagttctccatgaatgtcacgtcacacaggctcgcgctctgaaccaggccaagtacatcccggagctggcctactatgggctttatcttctgtgtagcccaatccatggagagggggataaggtcatttcatgtgtttttcaccagatgctgtctgtgattctcatgctagaggtgggggaaggtagtcacagggcacccctggccgtgacaagtcaggtcattaactgcagaaatcaggcagtgcagttcatctccgcacttgtagatgagttgaaagagagcattttccctgttgtgcggattctgcttcagcacatttgcgccaaagtggttgacaagagcgagtatcggactttcgccgcccagtcccttgtgcaacttctgtctaagctgccttgcggagaatatgccatgtttatcgcctggctctacaagtatagtcgaagctctaagatcccccaccgtgtatttactctggacgtcgttctagcactgttagaattgccagagcgggaggtcgacaacacactgtccctcgagcatcagaaatttctgaagcataagtttctcgtacaggaaattatgttcgaccgttgccttgacaaggctccaacagttaggtcgaaagcactgtcctctttcgcccactgcctggagctgacagtaacctctgcttctgagtcaatcttagagctgctaattaattcccctaccttcagcgttatcgaaagccaccccggaacgctcctgcgcaacagttccgccttcagctatcagaggcagacgtcgaatagatctgagcctagcggggagatcaatatagattccagcggcgaaaccgtcggatccggcgaaaggtgtgtgatggccatgttgagaaggcgaattagggacgagaagactaacgttaggaagtccgccctgcaggtgttggtcagtatactgaaacactgcgacgtatcaggaatgaaggaagacctttggatcctgcaggaccagtgccgggaccctgccgtgtccgtgcggaaacaagcactgcaatctctgacagaattgttgatggcccagccgcgatgtgtgcagatccagaaagcatggctccggggcgtggtgccagttgtgatggattgtgagagcaccgtccaggagaaggcactggagttcctcgaccagttattacttcagaacattagacaccattcacatttccactctggcgacgattcccaggtactggcatgggccctgcttacacttctgaccacggagtcacaagagctgtctcggtatctaaacaaagcctttcacatctggtcaaagaaggagaaattctctcccactttcataaataacgtaatatcccatacgggaaccgagcacagcgcccctgcctggatgctgctctccaagatcgcaggcagctctccaagacttgactatagccggataatacaatcgtgggaaaagatctcgtctcagcaaaacccgaactccaataccctggggcatatcttatgcgttattggtcacatcgcaaagcatctgcccaagtcaacacgggataaagtaacagatgctgtcaaatgtaaactcaacgggtttcagtggtctttggaggtaatcagttccgccgtcgacgcactacagagactgtgccgagcatcagcagaaacaccagcagaagagcaggagctccttacccaggtgtgtggagacgtgctgagcacgtgtgagcatcggctgtctaacatagtccttaaagagaacggaactggaaacatggacgaggatctgcttgtgaaatacatctttactctaggcgacattgctcagttgtgccccgcaagagtagagaaacgcattttcttgctcatacagtctgtcctggcttccagcgccgacgcagaccacagcccttctagccaagggtcgtcagaagccccggcctcacagccaccacctcaggttcggggttctgtgatgccaagcgtgatccgagcccatgcaatcatcactctgggcaagctgtgcctgcagcatgaagacttggccaaaaagagcattcctgccctcgtacgagaactggaggtctgtgaggacgtagcagttagaaacaacgtgattatcgttatgtgtgacctgtgtatcaggtataccattatggtcgataaatatattccaaatatttccatgtgcctgaaagacagtgatccttttatcagaaagcaaacacttatcctcctcacaaatctgctgcaggaggaattcgttaaatggaagggctcgctctttttccggtttgtgtccacactgattgattcacaccccgacatcgctagcttcggagagttctgcctcgcgcatctgctgctgaagcgcaatcccgtgatgttctttcaacacttcatcgaatgtatcttccatttcaataactacgagaagcacgaaaagtacaacaaattccctcaaagtgagagagagaaaagactgttcagtctcaagggcaaaagtaacaaggaaagacggatgaagatttataagtttctgctggaacactttaccgacgagcagaggtttaacatcacctcaaaaatttgtctgtccatactcgcatgctttgcagatgggatcctcccgctggatttggatgcatccgaattattgtctgatacgttcgaggtcctgtccagcaaggaaataaaattgctggcaatgaggtcgaaacccgacaaggatttattgatggaggaggacgatatggcccttgccaacgtcgttatgcaagaggcacaaaagaagctcatctctcaagtgcagaagaggaattttatcgaaaacataatccctattattattagcttaaaaaccgtcttagaaaaaaataagattcctgccctgcgtgagcttatgcactacctaagggaagtgatgcaggattatagggatgagctgaaagatttcttcgcggtagacaagcagcttgccagtgagctcgagtatgatatgaaaaaataccaggagcagctcgtgcaggaacaggagttagctaaacatgctgatgtggccgggaccgccggtggcgctgaagtcgctccagttgcccaggtggcactgtgcctggaaactgttccagttcccgccgggcaagagaatccagccatgagtccagccgtttcgcagccctgcactcctcgagccagcgccggccacgtggcagtctctagccctacacccgaaacgggtccattgcaacgcctgttaccaaaggctaggccaatgtccctctccaccatcgctatattaaactctgtgaagaaggcagtggagagcaagagtcgccaccgctccagaagtctgggcgtgttgcccttcaccctgaactcaggcagccctgagaagacttgttcacaggtgagtagctactccctcgagcaagagtctaatggagaaattgaacacgtgacaaagagggcaatcagtacccccgagaagtccatctccgacgttacgttcggggccggggtatcttatattggcactccaaggacccccagttctgccaaggaaaagattgaaggtagaagccagggcaacgacattctctgtctttccctgcccgacaaaccccctcctcagccccagcaatggaacgtgagatctcccgcccggaacaaggatactcctgcatgctcaaggaggtcgctccggaaaaccccgttgaagactgcaaactag

SEQ ID NO: 185554 - DNA, 225 bp, Artificial Sequence
  derived and/or modified sequence
atggtggcgctccgaggactgggctccggcctgcaaccctggtgtccacttgacttgagactggagtgggttgacactgtgtgggagttggactttacagagactgaaccgctagaccctagcatcgaggccgaaatcatagagaccggactcgcagcgtttaccaagctctacgaaagtctgttgccctttgctactggcgaacatggtagcatggaagtctag

SEQ ID NO: 185555 - DNA, 108 bp, Artificial Sequence
  derived and/or modified sequence
atggtcgcacttcggggactcgggtccggtttgcaaccgtggtgcccgctggacctgaggctcgaatgggttgacaccgtctgggaactggattttaccgaaacatag

SEQ ID NO: 185556 - DNA, 4497 bp, Artificial Sequence
  derived and/or modified sequence
atggtggcattaagggggcttggctccgggcttcagccttggtgtcctctggacctgcgattagagtgggtagataccgtctgggagcttgactttaccgaaacagaacctttggaccctagcatcgaggcagagatcatcgagaccgggctggccgctttcaccaaactgtacgagtccttgttgcctttcgccactggagagcacggcagtatggagagtatttggacctttttcatcgagaataacgtcagtcattcaaccttggtcgctttgttctaccatttcgtccagatcgtgcataaaaagaacgtgtccgttcagtaccgcgaatacggcttgcacgctgccggtctgtactttctcctgctcgaggtacccggaagtgtggccaaccaggtgttccacccagtcatgtttgacaagtgcatccagacacttaagaagtcgtggccacaggaaagtaatctgaacagaaagcgcaagaaggagcaaccaaaaagtagccaggctaacccgggtcgccacaggaaacggggtaaaccacctcggcgagaggacatcgagatggatgaaatcatcgaagagcaggaggacgagaatatatgcttcagcgctcgcgacctgtcacaaatacgcaacgcgatcttccacctattgaagaatttcttgcgattgctccccaaattttcactcaaagaaaagccccagtgtgtgcaaaactgcatagaggtctttgttagccttacaaacttcgaaccagtgctgcacgagtgtcatgtgacacaggcaagggcactgaaccaggcgaaatatataccagagctggcttattacgggttatatctgttatgctctcctatacatggagagggggataaagtgatctcctgcgtgttccatcagatgctgagcgtcattctcatgctggaggtgggggagggctcacatagggcccctcttgccgtcacttcccaggtcatcaactgtagaaatcaagctgtgcagtttattagtgcgctggtagatgagttgaaggagagcattttccctgtggtgaggatactgttacagcatatctgcgccaaggtcgtcgataaaagtgaatatagaacctttgctgcgcagtctctcgttcagttgttgtcaaagttgccttgcggcgaatacgcaatgttcatagcttggctttacaagtatagtcgctcatctaaaattccccatcgggttttcacgctagacgtggtcttagcccttttggaattacccgaacgggaggtggacaacactctgagtctcgagcatcagaaattcctgaaacacaaatttctggtgcaggaaatcatgttcgaccggtgtcttgataaggcccctaccgtgcgctctaaggccctctctagctttgcacactgccttgaactgactgtgacttctgcgagtgaatccatcctggaactgctgatcaacagcccgaccttctctgtcatcgagtctcatccaggaaccctgctaaggaattcaagcgccttcagctaccagaggcaaacctctaatagatccgagccaagcggcgaaataaatatagacagttcaggtgaaacagtggggagcggagagcgttgcgtcatggctatgctgaggagacggatccgggacgaaaaaactaacgtcagaaaatccgctctgcaggtgttggtgtcgatactgaagcattgtgatgtcagcggcatgaaagaagatctgtggattctacaggaccagtgtagagaccctgcagtgtccgtgaggaaacaagcactccaatccctaacagagttattgatggctcagccaaggtgcgtgcagatacaaaaagcctggcttcggggtgtggttccagttgtcatggattgcgaaagtaccgtgcaggaaaaggctcttgagtttctggaccagctcctgttacagaacattcggcaccactcccacttccattctggcgacgactctcaagtactagcctgggccctgctcaccctgctcactacggaatcgcaggaactcagccggtacctgaacaaggcgttccatatctggagtaagaaggaaaagttctcaccaaccttcataaataatgtgatatcccacaccgggacagaacacagtgcgcctgcctggatgctcctgtccaagatcgcgggaagctcacccagattggattactcccggattattcagtcctgggaaaagattagttctcagcagaacccaaactccaacaccctgggtcacatcctttgtgtgatcggccatatcgccaaacacctccctaagtccactcgagacaaagtgactgacgccgtgaaatgtaaattaaatggattccagtggagtctggaggtcatttcctcagcagtggacgccctccagcggctttgcagagctagtgcagaaacacccgctgaagagcaggagctgctgacacaggtctgcggggacgtgctcagcacctgtgagcatagattgagcaatatcgtgcttaaagagaacggaaccggaaatatggacgaggacctactagtgaaatacatcttcaccctaggggacatcgcgcagctgtgccccgctagagtggaaaaaaggatcttccttctcatccagtctgtgctggcctccagcgctgacgctgaccattccccgtcctctcagggctccagcgaggcacccgcttcccagccaccaccacaggtgcgcggatctgtgatgccttctgtgatcagagctcatgccatcatcacactgggcaagttgtgtcttcaacacgaggaccttgcaaaaaaatccatcccagccctcgtccgagagctggaagtgtgtgaagacgttgccgtacggaacaatgtaatcatcgtgatgtgcgacctgtgcatcaggtacacaatcatggtcgacaaatacattccgaatatcagcatgtgcttaaaagattcagatccctttatcagaaagcagactctgatcctgctgacaaatctcctgcaagaagagttcgtcaagtggaaaggaagcctgtttttccggtttgtctctaccctgattgactcgcatcccgacattgcgtcctttggggagttttgccttgcacacctcctcctgaagcgcaaccccgtgatgtttttccaacacttcattgagtgtatattccactttaacaactacgagaagcacgaaaagtacaataagttcccacagtccgaaagggagaagagactgttcagccttaagggcaaatccaataaagaacgccgaatgaagatctacaagtttctactggaacactttactgacgagcagcgtttcaacattacgtctaaaatctgtctcagcattctggcctgctttgcagacggtattctcccactcgacctggatgcctcggaactgctcagtgacacctttgaggttctgtcatcaaaggaaatcaaactgctagcaatgaggtccaaacctgataaggacctgctcatggaggaggatgacatggctctcgccaatgtggtcatgcaggaggcccagaagaagctgatctcccaggtgcagaaaagaaacttcatcgagaacataattcccataattatatcactgaagactgtcttagagaagaacaagatcccagcactccgagagctgatgcactaccttagagaagtcatgcaggactatcgggacgagctgaaagacttctttgccgtcgataaacagttggcgagcgaattggaatacgatatgaagaaatatcaggagcagttggttcaggagcaggagctggcaaagcacgccgacgtggctggaacagcagggggagctgaagtcgcgcctgtcgcccaagtggccctgtgtttggagacagtgcccgttcccgcaggacaggagaatccagctatgtctccggctgtgagtcaaccctgcaccccccgtgcctccgcagggcacgtggctgtttccagccctactcccgagacgggaccattgcagcggctcttgcctaaggctcgtcccatgtccctgtctaccatcgctatactgaactctgtgaaaaaagctgtggaatccaagagcaggcaccgttctaggtcactaggtgtactgccatttacactcaactctggttctcccgaaaaaacctgcagccaagtatccagttactcattagaacaggaaagcaatggagagatcgaacatgtcactaagcgcgcaataagcacaccagagaagtctatttctgatgtcactttcggcgctggcgtgtcctacatcggaaccccccgtaccccgtcctctgccaaagagaaaattgagggaaggagccagggaaacgatattctttgcctgagcctccccgataagcccccaccccagccacaacaatggaatgtgcgatcacctgcacgaaacaaggacacaccagcttgtagtcgcagaagcctgcggaagacgcccctgaaaactgctaactag

SEQ ID NO: 185557 - DNA, 225 bp, Artificial Sequence
  derived and/or modified sequence
atggtggccctgagaggcctgggcagcggcctgcagccctggtgccccctggacctgagactggagtgggtggacaccgtgtgggagctggacttcaccgagaccgagcccctggaccccagcatcgaggccgagatcatcgagaccggcctggccgccttcaccaagctgtacgagagcctgctgcccttcgccaccggcgagcacggcagcatggaggtgtag

SEQ ID NO: 185558 - DNA, 108 bp, Artificial Sequence
  derived and/or modified sequence
atggtggccctgagaggcctgggcagcggcctgcagccctggtgccccctggacctgagactggagtgggtggacaccgtgtgggagctggacttcaccgagacctag

SEQ ID NO: 185559 - DNA, 4497 bp, Artificial Sequence
  derived and/or modified sequence
atggtggccctgagaggcctgggcagcggcctgcagccctggtgccccctggacctgagactggagtgggtggacaccgtgtgggagctggacttcaccgagaccgagcccctggaccccagcatcgaggccgagatcatcgagaccggcctggccgccttcaccaagctgtacgagagcctgctgcccttcgccaccggcgagcacggcagcatggagagcatctggaccttcttcatcgagaacaacgtgagccacagcaccctggtggccctgttctaccacttcgtgcagatcgtgcacaagaagaacgtgagcgtgcagtacagagagtacggcctgcacgccgccggcctgtacttcctgctgctggaggtgcccggcagcgtggccaaccaggtgttccaccccgtgatgttcgacaagtgcatccagaccctgaagaagagctggccccaggagagcaacctgaacagaaagagaaagaaggagcagcccaagagcagccaggccaaccccggcagacacagaaagagaggcaagccccccagaagagaggacatcgagatggacgagatcatcgaggagcaggaggacgagaacatctgcttcagcgccagagacctgagccagatcagaaacgccatcttccacctgctgaagaacttcctgagactgctgcccaagttcagcctgaaggagaagccccagtgcgtgcagaactgcatcgaggtgttcgtgagcctgaccaacttcgagcccgtgctgcacgagtgccacgtgacccaggccagagccctgaaccaggccaagtacatccccgagctggcctactacggcctgtacctgctgtgcagccccatccacggcgagggcgacaaggtgatcagctgcgtgttccaccagatgctgagcgtgatcctgatgctggaggtgggcgagggcagccacagagcccccctggccgtgaccagccaggtgatcaactgcagaaaccaggccgtgcagttcatcagcgccctggtggacgagctgaaggagagcatcttccccgtggtgagaatcctgctgcagcacatctgcgccaaggtggtggacaagagcgagtacagaaccttcgccgcccagagcctggtgcagctgctgagcaagctgccctgcggcgagtacgccatgttcatcgcctggctgtacaagtacagcagaagcagcaagatcccccacagagtgttcaccctggacgtggtgctggccctgctggagctgcccgagagagaggtggacaacaccctgagcctggagcaccagaagttcctgaagcacaagttcctggtgcaggagatcatgttcgacagatgcctggacaaggcccccaccgtgagaagcaaggccctgagcagcttcgcccactgcctggagctgaccgtgaccagcgccagcgagagcatcctggagctgctgatcaacagccccaccttcagcgtgatcgagagccaccccggcaccctgctgagaaacagcagcgccttcagctaccagagacagaccagcaacagaagcgagcccagcggcgagatcaacatcgacagcagcggcgagaccgtgggcagcggcgagagatgcgtgatggccatgctgagaagaagaatcagagacgagaagaccaacgtgagaaagagcgccctgcaggtgctggtgagcatcctgaagcactgcgacgtgagcggcatgaaggaggacctgtggatcctgcaggaccagtgcagagaccccgccgtgagcgtgagaaagcaggccctgcagagcctgaccgagctgctgatggcccagcccagatgcgtgcagatccagaaggcctggctgagaggcgtggtgcccgtggtgatggactgcgagagcaccgtgcaggagaaggccctggagttcctggaccagctgctgctgcagaacatcagacaccacagccacttccacagcggcgacgacagccaggtgctggcctgggccctgctgaccctgctgaccaccgagagccaggagctgagcagatacctgaacaaggccttccacatctggagcaagaaggagaagttcagccccaccttcatcaacaacgtgatcagccacaccggcaccgagcacagcgcccccgcctggatgctgctgagcaagatcgccggcagcagccccagactggactacagcagaatcatccagagctgggagaagatcagcagccagcagaaccccaacagcaacaccctgggccacatcctgtgcgtgatcggccacatcgccaagcacctgcccaagagcaccagagacaaggtgaccgacgccgtgaagtgcaagctgaacggcttccagtggagcctggaggtgatcagcagcgccgtggacgccctgcagagactgtgcagagccagcgccgagacccccgccgaggagcaggagctgctgacccaggtgtgcggcgacgtgctgagcacctgcgagcacagactgagcaacatcgtgctgaaggagaacggcaccggcaacatggacgaggacctgctggtgaagtacatcttcaccctgggcgacatcgcccagctgtgccccgccagagtggagaagagaatcttcctgctgatccagagcgtgctggccagcagcgccgacgccgaccacagccccagcagccagggcagcagcgaggcccccgccagccagccccccccccaggtgagaggcagcgtgatgcccagcgtgatcagagcccacgccatcatcaccctgggcaagctgtgcctgcagcacgaggacctggccaagaagagcatccccgccctggtgagagagctggaggtgtgcgaggacgtggccgtgagaaacaacgtgatcatcgtgatgtgcgacctgtgcatcagatacaccatcatggtggacaagtacatccccaacatcagcatgtgcctgaaggacagcgaccccttcatcagaaagcagaccctgatcctgctgaccaacctgctgcaggaggagttcgtgaagtggaagggcagcctgttcttcagattcgtgagcaccctgatcgacagccaccccgacatcgccagcttcggcgagttctgcctggcccacctgctgctgaagagaaaccccgtgatgttcttccagcacttcatcgagtgcatcttccacttcaacaactacgagaagcacgagaagtacaacaagttcccccagagcgagagagagaagagactgttcagcctgaagggcaagagcaacaaggagagaagaatgaagatctacaagttcctgctggagcacttcaccgacgagcagagattcaacatcaccagcaagatctgcctgagcatcctggcctgcttcgccgacggcatcctgcccctggacctggacgccagcgagctgctgagcgacaccttcgaggtgctgagcagcaaggagatcaagctgctggccatgagaagcaagcccgacaaggacctgctgatggaggaggacgacatggccctggccaacgtggtgatgcaggaggcccagaagaagctgatcagccaggtgcagaagagaaacttcatcgagaacatcatccccatcatcatcagcctgaagaccgtgctggagaagaacaagatccccgccctgagagagctgatgcactacctgagagaggtgatgcaggactacagagacgagctgaaggacttcttcgccgtggacaagcagctggccagcgagctggagtacgacatgaagaagtaccaggagcagctggtgcaggagcaggagctggccaagcacgccgacgtggccggcaccgccggcggcgccgaggtggcccccgtggcccaggtggccctgtgcctggagaccgtgcccgtgcccgccggccaggagaaccccgccatgagccccgccgtgagccagccctgcacccccagagccagcgccggccacgtggccgtgagcagccccacccccgagaccggccccctgcagagactgctgcccaaggccagacccatgagcctgagcaccatcgccatcctgaacagcgtgaagaaggccgtggagagcaagagcagacacagaagcagaagcctgggcgtgctgcccttcaccctgaacagcggcagccccgagaagacctgcagccaggtgagcagctacagcctggagcaggagagcaacggcgagatcgagcacgtgaccaagagagccatcagcacccccgagaagagcatcagcgacgtgaccttcggcgccggcgtgagctacatcggcacccccagaacccccagcagcgccaaggagaagatcgagggcagaagccagggcaacgacatcctgtgcctgagcctgcccgacaagccccccccccagccccagcagtggaacgtgagaagccccgccagaaacaaggacacccccgcctgcagcagaagaagcctgagaaagacccccctgaagaccgccaactag

SEQ ID NO: 185560 - protein, 3036 aa, Artificial Sequence
  derived and/or modified sequence
MHLHQVLTGAVNPGDNCYSVGSVGDVPFTAYGSGCDIVILANDFECVQIIPGAKHGNIQVSCVECSNQQGRIAASYGNAVCIFEPLGINSHKRNCQLKCQWLKTGQFFLSSVTYNLAWDPQDNRLLTATDSIQLWAPPGDDILEEEEEIDNTVPPVLNDWKCVWQCKTSVSVHLMEWSPDGEYFATAGKDDCLLKVWYPMTGWKSSIIPQDHHEVKRRQSSTQFSFVYLAHPRAVTGFSWRKTSKYMPRGSVCNVLLTSCHDGVCRLWAETLLPEDCLLGEQICETTTSSIASSLSHAGRHKDRIQHALETIHHLKNLRKGQRRSSVLVTHAELMPDQTAMHEVQRHISHHANALCHFHIAASINPATDIPNVLVGTAFNVDDGNGGFVVHWLNNKEFHFTSSTEVFMHQLRKLSDKQVDHENDDADREDEEHSQEDRERGLHMKLDHDLSLDRESEAGTGSSEHEDGEREGSPRTYSRLSVPMPLPTVLLDRKIETLLTEWNKNPDMLFTIHPVDGTFLVWHVKYLDEYNPGIFRQVQVSFSSRIPVAFPSGDASSLSKNIMMYACINATKDSHHTLLHQEGMSVGSPHGSQPHSRSHSTHMNILAPTVMMISKHIDGSLNQWAVTFADKSAFTTVLTVSHKFRYCGHRFHLNDLACHSVLPLLLTSSHHNALLTPELDCQWDSDNKLSRLMDPVKHIKGSSKQPLRNAATRTFHDPNAIYSELILWRVDPIGPLSYTGGVSELARINSLHTSAFSNVAWLPTLIPSYCLGTYCNSASACFVASDGKNLRLYQAVVDARKLLDELSDPESSKLIGEVFNIVSQQSTARPGCIIELDAITNQCGSNTQLLHVFQEDFIIGYKPHKEDMEKKETEIFFQPSQGYRPPPFSEKFFLVVIEKDSNNNSILHMWHLHLKSVQACLAKASEGASSESLLSVPGQKNVDSSPETSPSVSPMPHSSSIANLQTASKLILSSRLVYSQPLDLPESVEVIRATPSAGHLSSSSIYPVCLAPYLVVTTCSDNKVRFWKCCMEANPECNKSDEKEIYHWKRWPLMNDEGEDNSSTVSIVGRPVAVSCSYTGRLAVAYKQPIHHNGFVSKEFSMHVCIFECESTGGSEWVLEQTIHLDDLVKVGSVLDSRVSVDSNLFVYSKSDALLSKDRYLIPNIKHLVHLDWVSKEDGSHILTVGVGANIFMYGRLSGIVTEQTNSKDGVAVITLPLGGSIKQGVKSRWVLLRSIDLVSSVDGTPSLPVSLSWVRDGILVVGMDCEMHVYAQWKHAVKFGDTEADSSNAEEAAMQDHSTFKSNMLARKSVVEGTAISDDVFCSPTVIQDGGLFEAAHVLSPTLPQYHPTQLLELMDLGKVRRAKAILSHLVKCIAGEVAIVRDPDAGEGTKRHLSRTISVSGSTAKETVTVGKDGTRDYTEIDSIPPLPLYALLAADQDTSYRISEESTKIPQSYEDQTVSQPEDQYSELFQIQDIPTDDIDLEPEKRENKSKVINLSQYGPAYFGQEHARVLSSHLMHSSLPGLTRLEQMFLVALADTVATTSTELDESRDKSCSGRDTLDECGLRYLLAMRLHTCLLTSLPPLYRVQLLHQGVSTCHFAWAFHSEAEEELINMIPAIQRGDPQWSELRAMGIGWWVRNINTLRRCIEKVAKASFQRNNDALDAALFYLSMKKKAVVWGLFRSQHDEKMTTFFSHNFNEDRWRKAALKNAFSLLGKQRFEQSAAFFLLAGSLKDAIEVCLEKMEDIQLAMVIARLYESEFETSSTYISILNQKILGCQKDGSGFSCKRLHPDPFLRSLAYWVMKDYTRALDTLLEQTPKEDDEHQVIIKSCNPVAFSFYNYLRTHPLLIRRNLASPEGTLATLGLKTEKNFVDKINLIERKLFFTTANAHFKVGCPVLALEVLSKIPKVTKTSALSAKKDQPDFISHRMDDVPSHSKALSDGNGSSGIEWSNVTSSQYDWSQPIVKVDEEPLNLDWGEDHDSALDEEEDDAVGLVMKSTDAREKDKQSDQKASDPNMLLTPQEEDDPEGDTEVDVIAEQLKFRACLKILMTELRTLATGYEVDGGKLRFQLYNWLEKEIAALHEICNHESVIKEYSSKTYSKVESDLLDQEEMVDKPDIGSYERHQIERRRLQAKREHAERRKSWLQKNQDLLRVFLSYCSLHGAQGGGLASVRMELKFLLQESQQETTVKQLQSPLPLPTTLPLLSASIASTKTVIANPVLYLNNHIHDILYTIVQMKTPPHPSIEDVKVHTLHSLAASLSASIYQALCDSHSYSQTEGNQFTGMAYQGLLLSDRRRLRTESIEEHATPNSSPAQWPGVSSLINLLSSAQDEDQPKLNILLCEAVVAVYLSLLIHALATNSSSELFRLAAHPLNNRMWAAVFGGGVKLVVKPRRQSENISAPPVLSEDIDKHRRRFNMRMLVPGRPVKDATPPPVPAERPSYKEKFIPPELSMWDYFVAKPFLPLSDSGVIYDSDESIHSDEEDDAFFSDTQIQEHQDPNSYSWALLHLTMVKLALHNVKNFFPIAGLEFSELPVTSPLGIAVIKNLENWEQILQEKMDQFEGPPPNYINTYPTDLSVGAGPAILRNKAMLEPENTPFKSRDSSAFPVKRLWHFLVKQEVLQETFIRYIFTKKRKQSEVEADLGYPGGKAKVIHKESDMIMAFSVNKANCNEIVLASTHDVQELDVTSLLACQSYIWIGEEYDRESKSSDDVDYRGSTTTLYQPSATSYSASQVHPPSSLPWLGTGQTSTGASVLMKRNLHNVKRMTSHPVHQYYLTGAQDGSVRMFEWTRPQQLVCFRQAGNARVTRLYFNSQGNKCGVADGEGFLSIWQVNQTASNPKPYMSWQCHSKATSDFAFITSSSLVATSGHSNDNRNVCLWDTLISPGNSLIHGFTCHDHGATVLQYAPKQQLLISGGRKGHVCIFDIRQRQLIHTFQAHDSAIKALALDPYEEYFTTGSAEGNIKVWRLTGHGLIHSFKSEHAKQSIFRNIGAGVMQIDIIQGNRLFSCGADGTLKTRVLPNAFNIPNRILDIL

SEQ ID NO: 185561 - DNA, 9111 bp, Artificial Sequence
  derived and/or modified sequence
atgcatctccatcaggttcttaccggggctgttaatcctggcgataattgttactccgtcggaagcgtgggtgatgtgccttttaccgcatatggttccggatgtgacatcgttatccttgcgaatgatttcgagtgcgttcagatcatccctggcgctaagcatggaaatatccaagtgagctgtgtggagtgttccaatcagcaaggccggattgccgcgtcatatgggaacgctgtgtgtatcttcgaaccgctcggtattaattcccataagagaaactgccagctgaaatgccaatggttgaaaacaggacaattctttctgtccagcgtcacttacaatttagcatgggacccacaggataaccggctgctgaccgctactgatagtatccaactatgggctcctcccggtgacgatattctggaagaggaggaggaaattgataacactgtcccacccgttctgaatgactggaagtgtgtttggcagtgcaagacaagcgtgagcgtccacctgatggagtggtcccctgatggagaatactttgctaccgccggcaaggacgattgtctcctcaaggtatggtaccccatgacgggctggaagtcttctattatcccacaggatcatcacgaggtgaagcgacgccaatcctcaactcagttctcattcgtgtatcttgcacatccccgcgccgtgaccggatttagctggaggaaaacatcaaaatatatgccgaggggaagcgtctgtaacgtgcttctcactagctgtcatgacggagtctgtagactatgggcggagactctgttgccagaagactgcctgttgggagagcaaatttgcgagactactacctcttccattgctagtagcttgagtcacgcaggccggcataaagacagaatccagcatgccttggaaactatccatcacctgaaaaatcttcgcaagggacagaggcggagcagcgtgctcgtcacccacgctgagcttatgcctgatcagacggccatgcacgaggtacagagacatatcagccaccacgccaacgccttgtgtcacttccatattgcggcctcaataaacccagccaccgatatcccaaacgttcttgtcggaactgcttttaacgtggacgacggtaacggtggtttcgtggttcattggctgaataacaaggaattccatttcacaagttctacagaggtgttcatgcatcagctccgcaagctatctgataagcaggtggaccatgagaatgatgacgctgacagagaggacgaagaacactcccaggaggaccgagaacgaggcctgcacatgaagcttgatcacgatctgagcttggaccgggaatctgaagcaggcaccggctcttccgaacacgaagacggtgagcgcgagggcagcccgaggacatactctcggctgtccgtgcccatgccactgccaacagtgctgcttgatagaaaaatcgagactctgcttacagagtggaacaaaaaccctgacatgctttttacaatacacccggttgatggtactttcctagtgtggcatgtgaagtacctggacgagtacaacccgggcatttttcgccaggtgcaggtgtcattttcgtcgcgtatcccagtcgcttttcccagtggggacgcctctagcctgtcaaagaacattatgatgtacgcctgcattaatgcaaccaaggacagccatcataccctgttacatcaggagggcatgtccgtgggcagtccccatgggagccagccacattctcggtcacatagtacacacatgaatattttagcccctacagtgatgatgataagcaaacacattgacggtagtctaaaccaatgggcagtgacattcgcggacaagtccgcttttaccacggtattaaccgtgtcccacaagttccgctattgtggtcacagatttcatctgaacgaccttgcttgccactccgtgctccctttgttgctgacttccagtcaccacaatgccctgttgacccccgagctggactgtcagtgggacagcgataataagctctcaagactgatggaccccgtaaagcacataaagggctccagcaagcagccattgaggaacgcagccacccgcacctttcacgacccaaatgccatctactccgagctcatactttggagggttgaccccattggcccactgtcctacacggggggtgtgtctgaactggctcgcattaactccttgcacacatcggcattttctaatgtggcttggctgcccacactcatcccaagctattgtctcgggacatattgcaactctgcttccgcgtgctttgtcgcatcagatggaaagaatctccggctctaccaggcggtggtggacgcccgcaagctgctggacgagctgtctgatcccgagagctcaaagttaattggggaggtgttcaacatcgtgtcccagcagtctactgctagacccggctgcatcatcgaactggacgcaattactaatcagtgcggcagcaatactcaactgctgcacgtgttccaggaggatttcataataggctataaacctcacaaagaggatatggagaagaaagaaactgagattttttttcagcctagtcagggctaccgtccacctcctttttccgagaaattttttctggttgtgatcgaaaaggactcaaataataattctatcttgcatatgtggcatctgcacttgaagagcgtgcaagcctgtttggcgaaggctagcgagggggctagtagcgaatccttgctctccgtccctgggcagaaaaacgtcgattcatccccagagaccagtccatcggtcagtccaatgcctcatagcagctctattgcgaatctccagacagcttcaaagctgatcctttcttcgcgccttgtctattctcagcccctagatttgccggaatccgtggaggtcatcagagctactccatccgccggtcatctgagctcaagctctatctatcccgtatgcctcgctccctatttagtcgtcacgacctgctccgataacaaggtgcgattttggaaatgttgcatggaagccaatcccgagtgtaacaaaagcgacgagaaagagatctatcattggaagagatggccactgatgaatgatgagggggaggacaatagcagtaccgtgagcatcgttggacgaccagtggccgtgtcttgctcatacacaggacggctcgcggtggcttacaagcagccaattcatcacaatggattcgtaagcaaagaatttagtatgcacgtgtgcattttcgaatgtgagtccactggtggaagcgagtgggtcctagagcagaccatacacctggacgacctggtcaaggtggggagtgtgctggactcacgggtctccgtggacagcaacttgtttgtgtattctaagagcgatgccctgctctctaaagataggtacttgatccccaacatcaagcatcttgtgcacctcgactgggtgtctaaggaggacggttcccacatattaacagttggggtgggggccaatatcttcatgtatgggcggctttcgggtatcgtcaccgagcagaccaatagcaaggacggtgtggccgttatcactttgcctctcgggggatcaattaagcagggggtaaagtcaagatgggttctgctgagatctattgatctggtgtcctcagtagacggtaccccctcattgcccgtgagtctctcttgggtgcgagacggcattcttgtggtgggcatggattgtgaaatgcacgtctacgcacagtggaaacatgccgtgaaatttggggacactgaggcagatagcagcaatgcagaggaagcagcaatgcaggatcacagcaccttcaagagtaacatgctggcgcgtaagtccgtggtggagggcaccgctatatccgatgacgttttttgtagtcccacagtgatacaggacggagggctgtttgaagctgcacacgtgctgagcccaacgctccctcagtatcatcctacccagcttcttgaactgatggatctgggcaaggtgcgtcgcgcaaaagcaatactatctcatttagtaaaatgcattgctggcgaggtggcaatcgtccgcgacccagacgctggtgaggggaccaagcgccacctgtctagaacaattagtgtctcaggtagcaccgccaaggaaacagtcacagtgggcaaagatggaacccgagactacactgaaatcgattcaattcctcctctacccttgtatgctctgcttgctgccgatcaggacacgtcgtataggatttcagaggaaagcaccaaaataccacagtcctatgaggaccagaccgtgagtcagcccgaggatcagtactccgaactgtttcagatccaagatattcccacggatgacattgatctggagccagagaagcgcgagaacaagtctaaggtcattaacttgagtcagtacggccctgcgtacttcggacaggagcatgccagagttctgtcatctcacttgatgcactcttccctgcctggcctgactagattagaacagatgttcttggttgctctggccgatacagtggccacaaccagcaccgaactggatgagagtcgtgataaatcctgtagcggtagggatacactagacgagtgtgggttgcggtatctcctcgcaatgagactccacacctgcctgctcacatccctgccaccactttaccgggtacagttgctgcaccagggcgtcagcacatgtcacttcgcttgggcattccactcagaagccgaagaagagctgatcaacatgattcccgctatccagcgcggagaccctcaatggagtgaacttcgagccatgggaatcgggtggtgggtgcggaacataaacactctgcgtaggtgcattgagaaagtggccaaagcttcatttcagaggaacaatgatgcactcgatgctgcccttttctatctgtcgatgaagaagaaggcagtagtgtggggactgtttagatcccagcacgacgaaaaaatgacgaccttctttagccataatttcaatgaggaccgttggcgtaaagcagcactgaagaatgctttctccttgctgggtaaacaacgatttgagcagtccgcagccttcttcctcctcgccggctcgctgaaagacgctatagaagtgtgccttgagaagatggaggacatacagttggccatggttatcgcaagactttacgagtcggagttcgagactagtagcacttatataagtatattaaatcagaagatccttgggtgccagaaagatggaagtggattttcttgtaaacggttacatcctgacccattcctgaggtcactggcctattgggtaatgaaagattacacaagggccctggatacactgttggagcagactccgaaggaagatgacgagcaccaagtaattatcaaatcatgcaaccccgtcgctttctcgttctataattatctccgaacccaccccctgctgatacgccgtaacctcgcttccccggaagggaccctggcgactctcggactcaagaccgagaaaaatttcgtcgataaaatcaacctcatcgaaagaaagttgttttttaccaccgccaacgcccatttcaaggtcggctgccctgtacttgccctggaggttctgagcaaaatccctaaggtcactaagacgtcagctctcagtgccaaaaaagaccagcctgatttcatcagccatagaatggacgatgtacctagtcattcaaaggccctgtcagatggtaatggctctagcggcattgagtggtcaaacgttaccagcagccagtatgactggtctcagccgatagtcaaggtcgatgaggaacccctgaatctggactggggggaagaccacgactcagcactggatgaggaggaagatgacgcggtcggactggtgatgaagagcactgacgcgcgcgagaaggataaacagtctgatcaaaaggcatctgatccaaatatgcttctcaccccacaggaggaggacgaccccgaaggagacacagaagtcgatgtgatcgccgaacagctgaaatttagagcatgtttgaagattctgatgaccgagttacgtaccctcgctacgggctatgaggtggatggtggcaaactgagattccagctttataattggttggagaaagagatcgccgcgctgcacgaaatctgcaaccatgagagcgtgatcaaggaatactcgagtaagacgtactccaaagtggaatctgacttgctcgaccaggaggagatggtagacaagccggacattggcagctacgaacgccaccagattgagaggcgtagattacaggcaaaacgagagcacgcggagcgacgcaaatcctggttacagaagaaccaagacctgttgagggtgttcctgtcttattgctccttgcatggggcacaggggggaggcttggcctcagtgcggatggaactgaaattcttactccaggagtcccagcaggaaactaccgtgaagcagctgcaaagtccactgccattaccgaccactctcccactgctcagtgccagcatcgctagtaccaaaaccgtgatcgcgaaccccgtgctgtacctgaacaaccacatccatgatatcctgtacaccattgtgcagatgaagacccctccacaccctagcattgaagatgtgaaggtgcataccttacacagcctggctgccagtctgagcgcgagcatctaccaagcgctgtgcgatagtcacagctactcacagacggaaggtaaccagtttacaggtatggcttaccagggcttactgctgtcagaccggcgccgactgagaacagaatccatcgaagagcacgcaactcctaacagctctcctgcccagtggccaggagtgtcctcactcataaacctgttgagtagcgctcaggacgaggatcagcccaagctgaatatcctgctctgcgaggctgtggtagccgtctacttatctttactgatccacgccctggctactaactcgagttctgaactattcagactggccgcccatcctctcaacaatcggatgtgggccgccgtgtttggtggaggtgtcaagctggttgtcaagcctcgccgtcaatcagagaatatcagcgccccgcccgtgctgagcgaggacattgataagcatcggaggcgctttaatatgcgcatgttagtgccaggacgccctgtgaaagatgcaacacctccacctgtgccggcagagcgtccaagctataaggagaaattcatccctccggaactgtcaatgtgggactatttcgtggcaaaaccctttttacccctatctgacagtggggtgatctacgactccgatgaatcaattcacagtgatgaggaagacgacgcctttttctctgatacccaaatccaggaacatcaagatcctaactcttattcttgggcactactacacctcaccatggtcaagctggcacttcataacgtgaaaaatttcttcccaattgctggcctcgagttcagtgaactccccgtcactagccccctgggtattgctgtgataaagaacctggaaaactgggagcagatcttgcaggaaaaaatggaccagttcgaaggaccccccccaaactatataaacacatatccgacggacctgagcgtcggggctggccctgcgatcctgcgcaacaaagccatgctcgaaccagagaatactcccttcaaaagtcgggactctagtgcctttccggtgaaacggctttggcacttcctggtcaaacaggaggttctgcaggagaccttcattcgatacatttttaccaaaaagcggaagcagtctgaggtggaggcagatttggggtacccaggaggcaaagccaaggtgatccacaaagagagcgacatgatcatggcctttagtgtgaataaagccaactgtaatgagatcgtgctggctagcactcatgacgtgcaagaactggacgtgacatcactgctggcttgccagtcatatatctggattggcgaggagtacgacagagaaagtaagagcagcgacgatgtggattaccggggttccacaaccactctgtaccagccctctgctacctcatactctgcttcccaagtccatccgccaagttcgctaccctggctcggaaccgggcagacctcaactggcgcttcagtgttaatgaagcgcaacctccataatgtaaagcgcatgacgagccacccagttcatcagtactaccttacaggcgcgcaggacggatcagtccgtatgtttgagtggactcggccccaacaacttgtgtgttttagacaggctggcaatgctcgcgtaacccggctgtacttcaattcgcagggtaacaagtgcggcgtggcagatggcgagggttttttgagtatatggcaggtgaaccaaacagccagcaacccaaagccatatatgagctggcaatgtcacagtaaggcgacttccgacttcgcatttatcacgagctcgagtctagtggccaccagtggccattctaacgataacaggaatgtgtgcctgtgggatacactaataagcccaggcaattctcttatccatggatttacctgtcacgatcatggagccaccgtgctccaatacgctccgaaacagcagctgctaatcagcggcgggaggaagggtcacgtgtgtattttcgacattagacaacgacagctgattcacacctttcaagcccatgattctgccatcaaagccctggcacttgatccttatgaggagtactttactaccgggtctgccgaaggaaatataaaggtgtggagactgacaggtcatggcctgattcattcgtttaaatctgaacatgccaagcagtctatattcagaaacatcggcgcgggggtgatgcaaatcgacatcattcagggcaacagactatttagctgtggagctgatggaacactgaaaacgcgcgtgctgcccaacgctttcaacatcccgaaccgcatattggacattctttag

SEQ ID NO: 185562 - DNA, 9111 bp, Artificial Sequence
  derived and/or modified sequence
atgcacctgcaccaggtgctgaccggggctgtgaaccctggggacaactgctacagcgtgggctctgtgggagatgtgcccttcaccgcctacggcagcggctgtgacatcgtcatcctggccaatgactttgaatgtgtgcagatcatccctggggccaagcacggcaacatccaggtgtcctgtgtggagtgcagcaaccagcagggcagaattgctgccagctatggaaatgctgtgtgcatctttgagcccctgggcatcaacagccacaagaggaactgccagctgaagtgccagtggctgaagacaggccagttcttcctgagctctgtgacctacaacctggcctgggacccccaggacaaccggctgctgacagccacagacagcatccagctgtgggcccctcctggagatgacatcctggaggaggaggaggagattgacaacacagtgccccctgtgctgaatgactggaagtgtgtgtggcagtgcaagacctctgtgtctgtgcacctgatggagtggagcccagatggagagtactttgccacagctgggaaggatgactgcctgctgaaggtgtggtaccccatgacaggctggaagagcagcatcatcccccaggaccaccacgaggtgaagaggcggcagagcagcacccagttctcctttgtgtacctggcccaccccagggctgtgacaggcttctcctggaggaagaccagcaagtacatgccccggggctctgtgtgcaatgtgctgctgaccagctgccatgatggagtgtgccgcctgtgggccgagaccctgctgcctgaggactgcctgctgggggagcagatctgtgagaccaccaccagcagcatcgccagcagcctgagccacgccggccgccacaaggaccgcatccagcacgccctggagaccatccaccacctgaagaacctgaggaagggccagaggaggagctctgtgctggtgacccacgccgagctgatgccagaccagacagccatgcatgaggtgcagaggcacatcagccaccacgccaatgccctgtgccacttccacatcgccgccagcatcaacccagccacagacatccccaacgtgctggtgggcacagccttcaacgtggatgatggaaatggaggctttgtggtgcactggctgaacaacaaggagttccacttcaccagcagcacagaggtgttcatgcaccagctgaggaagctgagtgacaagcaggtggaccatgaaaatgatgatgctgacagagaagatgaggagcacagccaggaggaccgggagcggggcctgcacatgaagctggaccatgacctgagcctggaccgggagagcgaggccggcaccggcagcagcgagcatgaagatggagagcgggagggcagccccaggacctacagccggctgtctgtgcccatgcccctgcccaccgtgctgctggacaggaagattgagaccctgctgacagagtggaacaagaacccagacatgctgttcaccatccaccctgtggatggcaccttcctggtgtggcacgtgaagtacctggatgagtacaaccctggcatcttccggcaggtgcaggtgtccttcagcagccgcatccctgtggccttccccagcggagatgccagcagcctgagcaagaacatcatgatgtatgcctgcatcaatgccaccaaggacagccaccacaccctgctgcaccaggagggcatgtctgtgggcagcccccacggcagccagccccacagccgcagccacagcacccacatgaacatcctggcccccaccgtgatgatgatcagcaagcacattgatggcagcctgaaccagtgggccgtgacctttgctgacaagagcgccttcaccaccgtgctgactgtgagccacaagttccgctactgcggccaccgcttccacctgaatgacctggcctgccacagcgtgctgcccctgctgctgaccagcagccaccacaatgccctgctgaccccagagctggactgccagtgggacagcgacaacaagctgagccggctgatggaccctgtgaagcacatcaagggcagcagcaagcagcccctgagaaatgctgccaccaggaccttccatgaccccaatgccatctacagcgagctgatcctgtggagggtggaccccatcggccccctgagctacacaggaggagtgtctgagctggcccgcatcaacagcctgcacaccagcgccttcagcaatgtggcctggctgcccaccctcatccccagctactgcctgggcacctactgcaacagcgccagcgcctgctttgtggccagtgatggcaagaacctgcggctgtaccaggccgtggtggatgccaggaagctgctggatgagctgagtgaccctgagagcagcaagctgattggagaggtgttcaacatcgtgtcccagcagagcacagcccggcccggctgcatcatcgagctggatgccatcaccaaccagtgtggcagcaacacccagctgctgcacgtgttccaggaggacttcatcatcggctacaagccccacaaggaggacatggagaagaaggagacagagatcttcttccagcccagccagggctacagacctccacccttcagcgagaagttcttcctggtggtgattgagaaggacagcaacaacaacagcatcctgcacatgtggcacctgcacctgaagtctgtgcaggcctgcctggccaaggccagcgagggcgccagcagcgagagcctgctgtctgtgcccggccagaagaatgtggacagcagccctgagaccagccccagcgtgagccccatgccccacagcagcagcatcgccaacctgcagacagccagcaagctgatcctgagcagccggctggtgtacagccagcccctggacctgcctgagagcgtggaggtgatccgggccacccccagcgctggccacctgagcagcagcagcatctaccctgtgtgcctggccccctacctggtggtgaccacctgcagcgacaacaaggtgcgcttctggaagtgctgcatggaggccaaccctgagtgcaacaagagtgatgagaaggagatctaccactggaagcgctggcccctgatgaatgatgaaggagaggacaacagcagcacagtgtccatcgtgggccggcctgtggccgtgtcctgcagctacacaggccgcctggccgtggcctacaagcagcccatccaccacaatggatttgtgtccaaggagttctccatgcacgtgtgcatctttgaatgtgagagcactggaggcagcgagtgggtgctggagcagaccatccacctggatgacctggtgaaggtgggctctgtgctggacagccgggtgtctgtggacagcaacctgtttgtgtacagcaagagtgatgccctgctgagcaaggaccgctacctgatccccaacatcaagcacctggtgcacctggactgggtgtccaaagaagatggcagccacatcctgactgtgggcgtgggcgccaacatcttcatgtatggccgcctgagcggcatcgtgacagagcagaccaacagcaaggatggagtggccgtcatcaccctgcccctgggcggcagcatcaagcagggcgtgaagagccgctgggtgctgctgcggagcattgacctggtgtcctctgtggatggcacccccagcctgcctgtgtccctgtcctgggtgagagatggcatcctggtggtgggcatggactgtgagatgcacgtgtatgcccagtggaagcatgctgtgaagtttggagacacagaagctgacagcagcaatgctgaggaggccgccatgcaggaccacagcaccttcaagagcaacatgctggccaggaagtctgtggtggagggcacagccatcagtgatgatgtgttctgcagccccaccgtcatccaggacggcggcctgtttgaggccgcccacgtgctgagccccaccctgccccagtaccaccccacccagctgctggagctgatggacctgggcaaggtgcggcgggccaaggccatcctgagccacctggtgaagtgcatcgccggggaggtggccatcgtgcgggaccctgatgctggggagggcaccaagaggcacctgagcaggaccatctctgtgtctggcagcacagccaaggagaccgtgacagtgggcaaggatggcacccgggactacacagaaattgacagcatcccccccctgcccctgtatgccctgctggccgctgaccaggacaccagctaccgcatcagcgaggagagcaccaagatcccccagagctatgaggaccagacagtgtcccagcctgaggaccagtacagcgagctgttccagatccaggacatccccacagatgacatcgacctggagcctgagaagcgggagaacaagagcaaggtgatcaacctgagccagtatggccctgcctacttcggccaggagcacgcccgggtgctgagcagccacctgatgcacagcagcctgcccggcctgacccggctggagcagatgttcctggtggccctggccgacacagtggccaccaccagcacagagctggatgagagccgggacaagagctgcagcggccgggacaccctggatgaatgtggcctgcgctacctgctggccatgaggctgcacacctgcctgctgaccagcctgccccccctgtacagagtgcagctgctgcaccagggcgtgtccacctgccactttgcctgggccttccacagcgaggccgaggaggagctgatcaacatgatcccagccatccagagaggagacccccagtggagcgagctgcgggccatgggcatcggctggtgggtgaggaacatcaacaccctgcggcgctgcatcgagaaggtggccaaggccagcttccagagaaataatgatgccctggatgctgccctcttctacctgtccatgaagaagaaggctgtggtgtggggcctcttccgcagccagcatgatgagaagatgaccaccttcttcagccacaacttcaatgaagatcgctggaggaaggccgccctgaagaatgccttcagcctgctgggcaagcagagatttgagcagagcgctgccttcttcctgctggccggcagcctgaaggatgccatcgaggtgtgcctggagaagatggaggacatccagctggccatggtgattgcccggctgtatgagagcgagtttgagaccagcagcacctacatcagcatcctgaaccagaagatcctgggctgccagaaggatggcagcggcttcagctgcaagaggctgcacccagaccccttcctgcggagcctggcctactgggtgatgaaggactacacccgggccctggacaccctgctggagcagacccccaaggaggatgatgagcaccaggtgatcatcaagagctgcaaccctgtggccttctccttctacaactacctgcggacccaccccctgctgatcagaagaaacctggccagccctgagggcaccctggccaccctgggcctgaagacagagaagaactttgtggacaagatcaacctgattgaaaggaagctgttcttcaccacagccaatgcccacttcaaggtgggctgccctgtgctggccctggaggtgctgagcaagatccccaaggtgaccaagaccagcgccctgagcgccaagaaggaccagcctgacttcatcagccacaggatggatgatgtgcccagccacagcaaggccctgagtgatggaaatggcagcagcggcatcgagtggagcaatgtgaccagcagccagtatgactggagccagcccatcgtgaaggtggatgaggagcccctgaacctggactggggcgaggaccatgacagcgccctggatgaggaggaggatgatgctgtgggcctggtgatgaagagcacagatgcccgggagaaggacaagcagagcgaccagaaggccagtgaccccaacatgctgctgaccccccaggaggaggatgatcctgagggggacacagaggtggatgtgattgctgagcagctgaagttccgggcctgcctgaagatcctgatgacagagctgcggaccctggccaccggctatgaggtggatggcggcaagctgcgcttccagctgtacaactggctggagaaggagattgctgccctgcacgagatctgcaaccacgagagcgtcatcaaggagtacagcagcaagacctacagcaaggtggagagtgacctgctggaccaggaggagatggtggacaagccagacatcggcagctatgaaagacaccagattgaaagaagaaggctgcaggccaagcgggagcacgccgagaggaggaagtcctggctgcagaagaaccaggacctgctgcgggtcttcctgagctactgcagcctgcatggagcccagggcggcggcctggcctctgtgaggatggagctgaagttcctgctgcaggagagccagcaggagaccaccgtgaagcagctgcagagccccctgcccctgcccaccaccctgcccctgctgagcgccagcatcgccagcaccaagacagtgattgccaaccctgtgctgtacctgaacaaccacatccatgacatcctgtacaccatcgtgcagatgaagaccccaccccaccccagcattgaagatgtgaaggtgcacaccctgcacagcctggccgccagcctgagcgccagcatctaccaggccctgtgtgacagccacagctacagccagacagagggcaaccagttcaccggcatggcctaccagggcctgctgctgagtgacagaagaaggctgaggacagagagcattgaggagcacgccacccccaacagcagccctgcccagtggccaggagtgagcagcctcatcaacctgctgagcagcgcccaggatgaggaccagcccaagctgaacatcctgctgtgtgaggccgtggtggccgtgtacctgagcctgctgatccacgccctggccaccaacagcagcagcgagctgttccggctggccgcccaccccctgaacaacaggatgtgggccgctgtgtttggaggcggcgtgaagctggtggtgaagccccggcggcagagcgagaacatcagcgcccctcctgtgctgtctgaggacatcgacaagcacagaagacgcttcaacatgaggatgctggtgcccggccggcctgtgaaggatgccaccccacctcctgtgcctgctgagcggcccagctacaaggagaagttcatccccccagagctgtccatgtgggactactttgtggccaagcccttcctgcccctgagtgacagcggggtcatctatgacagtgatgagagcatccacagtgatgaggaggatgatgccttcttcagtgacacccagatccaggagcaccaggaccccaacagctacagctgggccctgctgcacctgaccatggtgaagctggccctgcacaacgtgaagaacttcttccccatcgccggcctggagttcagcgagctgcctgtgaccagccccctgggcattgctgtgatcaagaacctggagaactgggagcagatcctgcaggagaagatggaccagtttgagggccccccacccaactacatcaacacctaccccacagacctgtctgtgggcgccggccctgccatcctgaggaacaaggccatgctggagcctgagaacacccccttcaagagccgggacagcagcgccttccctgtgaagaggctgtggcacttcctggtgaagcaggaggtgctgcaggagaccttcatccgctacatcttcaccaagaagaggaagcagagcgaggtggaggccgacctgggctacccaggcggcaaggccaaggtgatccacaaggagagtgacatgatcatggccttctctgtgaacaaggccaactgcaatgagatcgtgctggccagcacccatgatgtgcaggagctggatgtgaccagcctgctggcctgccagagctacatctggattggagaggagtatgaccgggagagcaagagcagtgatgatgtggactaccggggcagcaccaccaccctgtaccagcccagcgccaccagctacagcgccagccaggtgcacccccccagcagcctgccctggctgggcaccggccagaccagcactggagcctctgtgctgatgaagaggaacctgcacaacgtgaagaggatgaccagccaccctgtgcaccagtactacctgaccggggcccaggacggctctgtgaggatgtttgagtggacccggccccagcagctggtgtgcttccggcaggccggaaatgcccgggtgacccggctgtacttcaacagccagggcaacaagtgtggggtggctgatggagagggcttcctgagcatctggcaggtgaaccagacagccagcaaccccaagccctacatgtcctggcagtgccacagcaaggccaccagtgactttgccttcatcaccagcagcagcctggtggccaccagcggccacagcaatgacaacagaaatgtgtgcctgtgggacaccctcatcagccctggcaacagcctcatccacggcttcacctgccacgaccatggagccaccgtgctgcagtatgcccccaagcagcagctgctgatcagcggcggcaggaaaggacatgtgtgcatctttgacatccggcagaggcagctgatccacaccttccaggcccatgattctgccatcaaggccctggccctggacccctatgaggagtacttcaccactggatctgctgagggcaacatcaaggtgtggaggctgaccggccacggcctcatccacagcttcaagtctgagcacgccaagcagagcatcttcagaaatattggagctggggtgatgcagattgacatcatccagggcaacagactcttcagctgtggggctgatggcaccctgaagaccagggtgctgcccaatgccttcaacatccccaaccgcatcctggacatcctgtag

SEQ ID NO: 185563 - DNA, 9111 bp, Artificial Sequence
  derived and/or modified sequence
atgcacctgcaccaggtgctgaccggcgccgtgaaccccggcgacaattgttactccgtagggtcagtgggggacgtccctttcaccgcctatggttccggctgcgatatcgtcattttagccaatgatttcgaatgtgtgcaaatcattcccggcgctaaacacggtaatatccaggtgagttgcgtggagtgttccaaccagcagggccgtatcgcagctagttacggcaacgccgtctgcatctttgagcccctgggcatcaacagccataagcgcaactgccagctgaagtgtcaatggctgaagacgggacagttcttcctatctagcgtcacttacaacttggcctgggacccccaagataaccgtctgctgacagctacagactccattcagctgtgggcccccccgggggatgatattctggaggaagaagaagaaatcgataatactgtcccccctgtgcttaacgactggaagtgcgtgtggcagtgtaagacaagcgtatccgtgcacctgatggaatggtcacccgatggtgagtactttgctacagccggcaaagacgattgcctgctaaaggtctggtatcccatgactggatggaagtctagcataatcccccaagaccaccacgaggtcaagcgacgtcagtcatcaacccaattcagcttcgtatatttagctcatccccgggccgtgaccggattctcatggcgaaagacatccaagtacatgccaaggggctccgtgtgtaacgttctgctgacatcatgtcacgacggagtttgtagattgtgggccgagaccctgctgcctgaggattgtctccttggggaacaaatctgcgagacaacgacctcctctattgcgtcttcactgtctcatgcaggccgacataaagatcgaatccagcacgcccttgaaaccatccaccatttaaagaatctcagaaaggggcaaaggcgttctagtgtcttggtgacacacgcagaactgatgccagatcagaccgccatgcacgaagtgcagcggcatatctcacaccacgcgaacgcattgtgtcactttcatatcgctgctagtatcaaccccgcgaccgatatccctaatgtgctggttggaaccgctttcaacgtagacgatggaaacggaggatttgtggtgcactggcttaataacaaggaattccacttcacctccagtacagaggtcttcatgcaccagctgaggaagctaagcgacaagcaggtcgaccacgaaaatgatgatgccgatcgagaggacgaagagcattcccaggaagatagagagagagggttacacatgaagctggaccacgacttgtccctggatcgggaatctgaggctggcacaggctcttctgaacacgaggatggggagagagaaggcagcccacggacctactccagactatcagtccccatgccactgccaactgtcttgcttgatcgaaaaattgaaaccctccttacagagtggaacaaaaaccctgatatgctctttaccatccaccctgtcgacgggacctttctggtgtggcacgttaaatacctggacgagtacaatccgggtatcttcaggcaggttcaggtgtctttcagctcccgaattccagtcgcttttccctccggcgatgcctcctcactatctaagaacatcatgatgtatgcctgcattaacgcgaccaaagattcgcatcacacccttctgcaccaggaggggatgagcgtggggagccctcacggaagtcagcctcattcacgcagtcactctactcacatgaatatcctggctcctacggttatgatgatttcaaagcatatcgacggctcattaaaccagtgggcagtcacatttgccgataaaagcgccttcacaacagtgttaacagtgtcccacaagttccgatactgtggacaccgctttcacctcaacgatttggcctgtcatagcgttctgcctcttctgctgactagctcccaccacaacgctctgctgacccccgaattggattgtcagtgggatagtgataataaactttctcgactgatggacccagttaagcacattaaaggcagctccaagcaaccactgaggaacgccgctacgcgcacattccatgaccccaatgcgatttactctgaactgatcctctggcgcgtggatccaattggccccctgtcatacaccggcggcgtgtcggaactggctaggatcaactcattgcacaccagcgcttttagcaacgttgcatggcttccgacattgatacccagttactgcctgggtacctattgcaattctgcgtccgcctgtttcgtcgcctcagatgggaagaacctccgactctaccaggcagtagttgatgcccggaagcttctcgacgagctttccgatcctgagtccagcaagttaataggtgaagtattcaacatcgtgagtcagcagagtactgccaggcccggatgcatcattgagctggatgccattaccaaccaatgtggaagtaatacacagctcctgcacgtgttccaggaggatttcattattgggtacaagcctcataaggaggacatggaaaagaaagaaacagagatcttttttcagccctcacagggctacagacctccgcccttttccgagaaattcttcctggttgtcatcgaaaaggatagcaataacaattcgatcctgcatatgtggcacttgcatttaaaatcagttcaggcttgccttgccaaagcttctgaaggtgcctcatcggaaagccttctctccgtgccaggccagaaaaacgttgatagcagtccggagactagcccatcggtcagccccatgccccacagttcatccattgctaatctccagacagcttcaaagctgatcctgtcatcacgcctagtgtacagccagccactcgatctaccagaaagtgttgaggtgattcgcgccactccaagcgctggccacttatctagctcatcgatctaccctgtgtgtctggccccctacctggtggtgacaacttgttccgacaataaggtcaggttttggaagtgctgcatggaggccaatcctgagtgtaacaagagtgacgagaaagaaatttatcattggaagcggtggcctctgatgaatgatgagggcgaggataatagcagcacagtttcaatcgtggggaggcctgtggcagtcagctgttcatacacgggcaggttggccgtcgcttataagcagccaatccaccataacggcttcgtgtccaaggagttcagcatgcacgtgtgcatctttgagtgtgaatccacggggggctccgaatgggtactggagcaaaccatccacttagacgatctggtcaaggtcggcagcgttctggactcaagagtttccgtcgattcgaatttatttgtctatagtaagtcggacgcattgctctcgaaagatcggtacttaatcccaaacataaaacaccttgttcatttggactgggtatccaaggaagacgggtcccacattctcacagtgggcgttggcgcaaacatctttatgtacgggcggctgtctggcatcgtgacagagcagacaaactctaaggatggagttgcagtcattacccttcccttggggggcagcatcaagcagggagtgaagagccggtgggttttacttagatcaatcgatcttgttagcagtgtggatggaacaccgagcctgcctgtatcactctcctgggtcagggacggtattctggttgtaggtatggattgcgagatgcatgtctatgcccagtggaagcacgcagtgaaattcggtgatacagaggcagattcctctaacgccgaagaagcagccatgcaggaccattccacctttaagtcaaacatgctggcccgcaagtcggtggtagagggcaccgcgatttccgacgacgtcttttgcagtccaaccgtgattcaggatgggggactgttcgaggccgcccatgtcctgtcgccgacattacctcagtatcatcccacgcagcttttggaactgatggacttagggaaagtccggagggctaaagccatcctttctcatcttgtcaaatgcatcgctggggaggtagccatagtacgagatcccgatgccggagaaggtactaagcgccacctctctagaacaatttcagtgtcaggaagtaccgccaaggagaccgtcacagtcggtaaggacggaacgagggattataccgagatcgattctatccctccattacctttgtacgcgcttctcgccgcagatcaagacaccagttatagaatcagcgaagagagtaccaaaatcccgcagtcctacgaggatcagaccgtgagtcagcccgaggatcagtactcagagttattccagatacaggatattcctactgacgacatcgatttagaacccgaaaaacgcgaaaataaaagcaaggttatcaacctatcgcagtatgggcccgcatacttcggtcaagaacacgcgcgggttctatccagccatctgatgcacagctcgctccctggcctgaccagactggagcaaatgttcctcgtagctcttgctgacactgtagctaccacaagcaccgagctagacgaatcaagagacaaatcctgcagcgggagggatacccttgacgagtgcgggctgagatacttgctggccatgagactgcacacctgcctcctgaccagccttcctcccttgtatcgagtacagttgctgcatcagggcgtttccacttgtcactttgcctgggcgtttcactcggaagcggaggaggaactgattaacatgatcccagcgatccagagaggtgatcctcagtggtccgagttgcgcgccatgggcatcggctggtgggtgcgtaacatcaataccctccggcgctgtattgagaaagtcgctaaggcgagctttcagcgcaataacgacgctctggatgctgcattattttacctatccatgaaaaaaaaagccgtcgtgtgggggctctttaggagccagcacgacgagaaaatgaccactttcttttcacataatttcaacgaagatcgttggcggaaggcagcgctgaagaacgcattctccctgctgggcaaacaacgcttcgagcaatccgccgcatttttcctcctggctgggtcactgaaggacgcgattgaggtatgccttgaaaaaatggaggacatccagctggccatggtgatcgccagactctatgagagcgaattcgaaacaagctctacgtatatcagtattctcaaccagaagatcttggggtgtcaaaaggacggttccgggttctcctgtaagagactccaccctgatccttttctccgaagtcttgcctattgggtgatgaaagattacactcgtgctctcgacactctgcttgaacagacaccaaaggaggacgacgagcaccaggtgataataaagagctgtaatccagtcgcattctcgttttataactacctgcggactcacccactcctgatacgaaggaatctggccagcccagagggaacactggcaacactggggttaaagactgaaaagaacttcgttgacaaaatcaacctgattgagaggaagcttttctttacaaccgcaaatgcgcacttcaaggtgggctgcccagtcttggcactggaggtactttctaagatccccaaggtgactaaaactagtgcgctaagtgccaagaaggatcagcctgacttcattagtcacagaatggacgatgtgcccagtcactcaaaagcactttcggacggcaatggatctagtgggatcgagtggtccaacgttacatcctcccaatatgactggtctcagccaatcgtgaaggtagatgaagaaccactcaacctggattggggggaggaccacgacagtgccctggatgaggaggaagacgacgccgttgggttggtgatgaaaagcactgacgcccgagaaaaggacaagcaatctgaccagaaggcctccgaccctaacatgttattgactccacaggaagaagacgacccggagggggacacagaagtcgacgtcatcgcagaacagctgaagtttcgcgcgtgcctcaagatactgatgaccgagctcaggaccctggcgacggggtacgaagtagatggtgggaaactccggttccagctgtataattggctggagaaggagatcgccgcccttcacgagatttgcaaccatgaaagtgtcattaaggagtattccagcaaaacctactccaaggttgagagtgacctactggaccaggaagagatggtcgataagcctgatattggtagttacgagagacaccaaattgagcggcgtcgactgcaggctaaaagagagcacgccgaacggcgcaagtcctggttgcaaaagaatcaggatttgctgagggtgtttcttagttattgctcccttcatggtgctcagggcgggggcctggcaagcgtacgcatggaactgaaattcctgttgcaggagagccaacaggagaccactgtgaaacagttgcaatctcctctaccccttcccacaacccttccactgctgtctgcatccatcgccagtaccaaaacagtgatcgcgaatcccgtattgtatttgaacaatcatattcatgacatcctgtataccatcgtccaaatgaagacacccccccacccaagtatcgaggacgtgaaagtgcacaccctacactcccttgccgcaagcctgtccgcgtccatttatcaagctctgtgtgatagccactcatacagccaaacagagggaaaccagttcaccggcatggcctaccaaggactgttgctgtctgacaggcgccgactccgcacagagtctattgaggaacacgctactcccaattccagtccagcccagtggccaggtgttagttcgttgataaacttgttgtcatccgcacaagacgaagaccagccgaagcttaacattctgctgtgcgaggcagtggttgccgtgtatctctccctgttgattcacgccctggcgaccaattcctcctccgagcttttccgcttggcagctcatccattgaacaacaggatgtgggccgctgtctttggtggaggagtgaagctagtcgtgaagccgcgcagacagtccgaaaacatcagcgcgccaccagttctttcagaggatattgataaacaccgtagacgttttaacatgcgcatgctggtgccaggtaggcctgttaaagacgcaacacccccaccggtcccagctgaacgcccctcctacaaggagaagtttataccccccgaactgagtatgtgggattatttcgtggcgaaaccttttctgccactctccgactccggagttatatatgacagcgacgaatcaatacactccgacgaggaggacgacgctttcttcagcgacacccaaatccaggaacatcaggaccccaattcttactcctgggccctgctgcacctcaccatggtcaagctggccctgcacaatgtgaagaatttcttcccaatcgccgggctggagttcagcgaacttccagtgacttccccgttggggattgcagtgatcaagaatctcgagaactgggaacagattttacaagagaaaatggatcaatttgaaggtccccccccaaattacattaacacctacccaacagacttatcagtcggcgcaggcccagctatcctgagaaacaaggccatgctcgaaccagagaatacccctttcaagtcacgagactctagtgcttttcccgtgaaacgactgtggcactttctggtcaaacaggaggtcttacaggagacctttatccgctatattttcactaagaaacgcaaacagagtgaggtggaagccgacttaggatatcctgggggtaaggcgaaagttattcataaagaatctgatatgataatggccttctccgttaataaggctaactgcaatgagatagtcttggcctccacccacgatgttcaggaactggatgtcacgtcactgcttgcctgccagagctacatttggatcggagaagagtatgatagagagtcgaagtcaagcgatgatgtcgattaccgcgggtctacgactacactataccagccaagtgctacctcttacagcgcctcccaggtacaccctccgagttccctgccctggctcgggacaggccagacatccacaggcgctagtgtgcttatgaagcgcaatcttcataacgtgaaacgaatgacttctcaccccgtacaccagtattatctcacaggtgcccaggatggatccgttcggatgtttgaatggacccgccctcaacagctcgtgtgtttccgccaggctggcaacgcgcgcgtgacccgactgtactttaattctcagggcaacaagtgcggtgtcgcagatggagagggattcttatcaatctggcaagtgaatcaaacagccagtaaccccaagccatacatgagctggcaatgtcactcgaaggccacctccgacttcgccttcataaccagtagtagcctggtcgcaacttctggccactccaacgataacagaaatgtgtgtctgtgggacactctgatatctcccggaaacagcctgattcacggattcacatgtcacgatcacggtgcgaccgtcttgcagtatgcccccaaacagcagttactgatttctggcggcaggaagggccacgtttgcatcttcgacatcaggcagcggcaactgattcacacatttcaagcgcacgactccgccatcaaggctctcgcactagacccctatgaggagtactttacaaccgggagcgccgaaggaaacattaaggtatggaggttgacaggtcacggactaatacatagcttcaaaagtgaacacgccaagcagtccatctttcgcaatattggtgcaggagtgatgcagattgatatcattcagggaaaccggctcttctcatgcggggctgatggtacactgaagacgcgcgtgctgcccaacgcattcaacattcctaatcgaatactggacattttgtag

SEQ ID NO: 185564 - DNA, 9111 bp, Artificial Sequence
  derived and/or modified sequence
atgcatctccatcaggtcctgacaggtgccgtaaacccaggggataactgctactctgttggatccgtgggcgatgtccctttcacagcctatggatccgggtgcgatatagtcattctcgcgaacgattttgagtgtgtacagattattcctggcgctaaacatgggaacatccaagtttcatgcgtggaatgtagcaaccagcagggacgcattgccgctagttatggcaatgccgtgtgcatcttcgagcccctgggcattaatagccataagcgcaattgccagctgaaatgtcagtggctgaagacaggacagttttttctcagttcagtgacctacaatttggcctgggacccgcaagataacaggttactgaccgccactgactcaatccagctttgggcacctcctggggatgacatccttgaggaggaagaggaaatcgataacaccgtcccacccgtgcttaatgactggaagtgtgtttggcaatgcaaaacctccgtgtctgtccatcttatggaatggagcccagacggggaatactttgcaacagccggtaaggatgattgcctacttaaggtgtggtaccccatgaccggctggaaaagtagcattatcccccaagaccaccacgaggtaaagaggcgacagtcctcgacccaattctccttcgtgtatctcgctcaccccagggcagtgactgggttttcatggaggaaaacctctaagtatatgcctagggggtctgtttgtaacgtattactgacaagctgccatgacggagtttgcaggctttgggccgagactctcttgcccgaagattgcctcttgggtgagcagatctgcgaaactactaccagttctattgcatcctccctcagccatgctgggaggcacaaagaccggatacagcacgcgctcgagacaattcaccacctgaagaacctgcggaagggtcaaaggaggagctcggtattggtaacgcacgccgagctcatgcccgaccagacggcaatgcatgaggtacagaggcacatatcacatcatgcaaacgcactctgccatttccacatcgctgccagtatcaatcctgccactgatataccgaatgttttggttggcaccgcatttaacgtggacgatgggaacgggggtttcgtggtgcactggttgaataacaaggagttccactttaccagctcgaccgaagtctttatgcatcagttaaggaagctctccgacaaacaggttgatcatgaaaatgacgacgcggatagggaagacgaggaacatagccaggaggacagagaaagggggctgcacatgaagctcgaccacgatctatctctggatcgtgaatcggaagccggtacaggctccagcgaacacgaagatggagagcgtgagggtagccctcgcacttactctcgtctgagcgtaccaatgccgctgcccaccgtcttgttggatcgaaaaattgagaccctgctgacagaatggaataaaaacccagatatgctcttcactatccaccctgtcgacggcacattcctggtgtggcacgtcaagtatctggacgaatacaaccctgggatttttcgccaagtacaggtgagtttctccagcagaatacctgtagcattcccatctggcgatgcctccagtcttagcaaaaacattatgatgtacgcatgcatcaatgcgaccaaagattcacaccatacacttctgcatcaggagggcatgagcgtgggaagcccacacggttcccagccccattcaaggtcccactcaacacacatgaatatccttgcaccaacggtgatgatgatatctaaacacatcgacggaagcctgaaccagtgggctgtcaccttcgctgacaagtcagcatttactacggtactcacagttagccacaagttcaggtactgcggtcataggttccatctcaatgatttggcctgccactcggtgctcccattgctgctgacaagcagccatcacaatgccctattaacgccagagctggattgccagtgggattcagataataagcttagccggctgatggaccctgttaagcacatcaaaggatcttccaaacagccgctacgcaacgctgcaacccgtacttttcatgaccctaacgcaatttatagtgaacttatcctgtggcgtgtggatcccataggacctctgagctacactggcggagtttccgaacttgcccgtatcaactctctgcatacgagtgccttctcgaacgttgcttggctgccaaccctgatcccaagctactgcctgggcacctactgcaattctgcatccgcctgttttgtggcaagcgacggaaagaatctccggctgtaccaggcagtggtggatgcacgcaagctgctggatgagttatcagatcccgaatccagcaaattgatcggagaggtgttcaatattgtgtcccagcagtctaccgctagacccggatgtattatcgaactcgatgccattactaaccagtgcgggtctaacactcagctgctgcacgtgtttcaggaggatttcattataggatacaagccccataaagaagacatggagaagaaggagaccgagatctttttccagccatctcagggttataggccgccacctttcagtgagaaattcttcttagttgtcatcgagaaagacagtaataacaatagcatactacatatgtggcacttgcatctaaagtctgtgcaggcatgcttagctaaggccagtgagggagcttcttccgaaagcctgttgtccgtccctggacagaagaacgttgactcaagtcccgaaacctccccttccgtttctccaatgccacactcatctagcatcgctaatctacaaaccgcatctaaactgattttgtcctccaggcttgtatattcccagcctcttgacctgcctgagtccgttgaagtaatacgggctactcccagtgcgggacatctgagtagtagtagtatatacccggtctgtttagcgccttatcttgtggtgacgacttgtagcgacaacaaggtaaggttctggaaatgttgcatggaagcgaatcctgaatgtaataagagtgacgagaaagagatctatcattggaagagatggccgctgatgaatgatgagggagaggacaatagcagcactgtaagcatcgtcgggagacctgtggcagtctcatgttcctacacgggtaggttagcagtggcatacaagcaaccaatccaccataatggcttcgtgtccaaagagttttcaatgcacgtgtgcatctttgagtgcgagtccacggggggaagcgagtgggttttggaacaaaccatccacctcgacgacctggtgaaggtgggatctgtgttagattcacgtgtgtcagtagactctaatctgtttgtttattccaaaagtgacgccttattgtcaaaagacagatatcttatccccaatattaagcacctcgtgcaccttgactgggtgagtaaggaagacggctctcacatcttgaccgtgggcgtcggcgcaaatatctttatgtatggccgtttgagtgggattgtgacagaacagacaaactctaaagacggtgtggccgtgattacactgcctttggggggatctatcaaacagggagtcaagtctcgctgggttctgctacgcagcatagacctcgtcagtagcgtggatggaactcccagcctgcctgtaagtctttcatgggtgcgggacggtatactcgtcgtggggatggactgtgagatgcatgtgtacgcacagtggaagcatgccgttaaattcggggatactgaggcggacagcagcaacgcagaagaagccgctatgcaggaccattcaacttttaagtcaaacatgctggccaggaagagtgtcgttgagggcacagccatctccgatgatgtgttttgtagccctacagttatccaggacgggggactctttgaggccgcacatgtgctgtctccaacgctgccacagtatcatcccacccaactcctggagctgatggatctgggcaaagttaggcgggcaaaggctattctgtctcacctcgtcaagtgtatagccggagaagtggccatagtgcgagaccctgatgccggtgagggcaccaagcgtcatctctcccggacaattagcgtttcagggtctactgccaaagaaaccgtgacagtggggaaggacggtacgcgcgactacaccgagattgattccatcccacccttgcctttatacgcgctgctggccgctgatcaggacacctcctatcggattagcgaagaatcaaccaagatcccccaatcatacgaagaccaaacagtctcacagccggaggaccagtacagtgaactctttcagatccaggatatccctacggatgacatcgaccttgaacccgagaaaagagaaaataagtcgaaggtaatcaacctcagtcagtacggcccagcatactttggccaagagcatgcaagagttctctcaagccatctgatgcatagctcattgcctggtctgacccggctggaacagatgttcctggtcgccctcgccgacactgtggctacaacaagtacagaactggacgagtcacgggacaaaagctgctccggccgagacacccttgacgagtgtgggttgcggtatcttctcgcgatgagactgcacacctgcctcctcacgtccctgcccccactgtatcgagtgcagctacttcatcagggtgtatccacctgccacttcgcgtgggcctttcacagtgaggcggaagaggaactgattaatatgatccccgcaatccagagaggagacccacagtggagcgaactccgggcaatgggaattggctggtgggtgaggaatatcaacactctgcggcgatgtatagagaaggttgcaaaagcaagtttccagagaaacaacgatgcgctggacgctgctcttttttatttgtccatgaaaaaaaaggctgtggtgtggggcctgttccggagtcagcacgatgaaaagatgacgaccttttttagccacaattttaacgaagaccgctggcggaaggccgcactgaagaacgcttttagtctcctgggcaagcagagatttgagcagagtgcggcattctttctgcttgcagggagcttgaaggacgccattgaagtgtgcctcgaaaagatggaggacattcaactagcaatggtcatagccaggctttacgaatcagagtttgaaacgtcctccacctatattagcatcctgaaccagaagattctgggttgccagaaggacggttcaggatttagctgtaagaggttgcacccagaccctttcctccgcagccttgcctactgggtgatgaaggattacacacgggctctggatacgctattagagcagacccctaaggaagatgacgagcatcaagtgatcatcaagtcatgtaatcccgttgcgttctcattttataattatctgaggacccatcctctattaattcgacgtaatctggctagccctgaagggaccctggcgaccttaggccttaagacggaaaagaatttcgtggacaagattaatctgatcgagaggaaactgttctttaccacagccaacgcccatttcaaggtgggttgtccagttttagcactggaggtcctgtccaagatacccaaggtgaccaaaacctcggccttatctgccaagaaggaccaaccggattttattagccatcggatggatgacgtgccttcccactccaaggccctgtccgatgggaatggatccagcggtattgagtggtcgaacgttacatcctctcagtatgattggtcgcaaccgatcgttaaagtggacgaggagccactcaacctggattggggtgaggatcatgacagcgcccttgacgaggaggaagatgacgccgtgggcttggttatgaaatcaaccgacgccagggagaaagacaagcagtccgatcagaaagcctccgatcctaacatgctcctgacgcctcaggaagaagacgatccagagggagatactgaggtggacgtgatagcagaacagttaaaatttcgcgcttgcttgaaaatattgatgacggaactaaggacactggccactggatacgaagtcgatggaggaaaactccgcttccagctgtacaactggctggagaaggagatcgcagccctgcatgagatctgcaatcatgagtctgtgatcaaagagtactccagcaaaacttactccaaggtggaatcagatttgttagatcaggaagagatggtggacaagcccgatattggttcctacgaacgtcatcagatcgaaagaagaaggctgcaagctaagcgggaacatgccgagcgtaggaagtcatggctgcagaagaatcaagatctgttgcgtgtttttctaagttactgttccctgcacggcgcacagggaggcggtctggcctccgttagaatggagctgaaatttctcctccaggaaagtcaacaagagacgacagtgaaacagctgcagagccccctccctctgccaactaccttgcccctcctgtcagcaagcatcgcttccacaaagacagtgatagccaaccctgtgctctacctcaataatcacattcacgacatcctgtacacgatagtgcagatgaaaacgccaccgcatccttctattgaggacgttaaggtgcacactctccactctctggcagccagtctgtccgcctctatctaccaggccctttgtgactctcattcatattctcagaccgagggaaatcagttcaccggcatggcctatcaggggctcctgctgtctgatcggagacggctgaggaccgaatctattgaggaacacgcaacacctaatagcagccctgcccaatggcccggtgtgagttccctaatcaatctgctgagctcagcacaagacgaagatcagccaaagctcaatatcctgctgtgcgaggcagtggtcgccgtgtatctgtcactgcttattcacgccttggcaacaaattcttcttcggaacttttcaggcttgcggctcacccactcaacaatagaatgtgggccgctgtcttcgggggtggcgtgaagctcgtcgttaaaccaaggagacaaagtgagaatatctctgcacctccggtgctttcagaggacattgacaagcaccggaggagattcaatatgcggatgctggttccaggtaggcccgtcaaagacgccactccaccaccagtacccgctgagaggccttcctacaaggagaaatttattccaccagagctcagtatgtgggactactttgtggctaaaccctttctgcccttgagtgactcaggcgtgatctatgatagcgacgagtcaatccactccgatgaggaggacgacgctttcttctctgatacccaaattcaggagcatcaggaccccaattcatatagctgggcacttctccacctgactatggtgaaactcgcgctccacaatgtaaagaattttttcccaatagccggactagagttctctgagctccctgttacctccccactgggtatcgccgtaatcaaaaatctagagaactgggaacagattctccaagagaaaatggatcagtttgagggccctccaccaaactacatcaacacatacccaactgatctgtcggtcggcgctggccctgcgatcctccgcaataaggctatgctggaacctgagaacaccccatttaagagtcgggattccagcgcttttccagtgaagcggctatggcatttcctcgtcaagcaagaagtgcttcaagagacattcattagatatatatttactaagaaacgcaagcagtcagaagtggaggctgatctcggctacccgggtgggaaggctaaggtcattcacaaggagtccgatatgattatggcgtttagtgttaataaagccaactgtaatgagatcgtcctcgccagcactcacgatgttcaagagctagacgtgacgagcttgctggcgtgccagagttacatttggattggcgaagagtacgatcgcgaaagtaagtcttccgacgacgtggattaccgaggaagtactacgacgctttatcaacctagtgccaccagttactcagcctcccaggtccatcctccttctagtcttccctggcttggcacagggcagactagcaccggagcgtcagttctgatgaaacgtaacctacataacgtgaaacggatgacttcacatcctgttcaccaatactatctgaccggagcacaggacgggtcagttcgcatgtttgaatggacccggcctcagcagctggtctgttttaggcaggcaggtaatgctcgagttacacgactatatttcaactctcagggaaataagtgcggcgtagctgatggtgagggctttctcagcatttggcaggtgaatcagacagcttcaaacccaaaaccttatatgagctggcaatgtcactcaaaagccacctccgatttcgccttcatcacaagttcttccttggtggctacttccgggcatagcaatgacaaccgcaacgtctgtctgtgggatacacttatctcaccaggaaattccctcattcacggtttcacttgccatgaccacggtgctacagttctgcagtacgccccaaaacagcagctcctcatctccggaggcagaaaggggcacgtctgtattttcgacattcgtcagcgtcagctcatccataccttccaggcacacgactctgcaatcaaggctctggccctggacccatacgaggaatatttcaccaccggttcagcggaggggaacatcaaagtgtggaggctgacaggacacgggcttatccactcattcaaaagcgaacatgcgaaacaatccatctttagaaacataggagcaggcgtcatgcagatcgatatcattcaggggaacaggttattcagttgtggcgcagacggtaccctgaaaacccgggtcctgcctaacgcctttaacattccaaatcgcatccttgacatcctgtac

SEQ ID NO: 185565 - DNA, 9111 bp, Artificial Sequence
  derived and/or modified sequence
atgcacctgcaccaggtgctgaccggcgccgtgaaccccggcgacaactgctacagcgtgggcagcgtgggcgacgtgcccttcaccgcctacggcagcggctgcgacatcgtgatcctggccaacgacttcgagtgcgtgcagatcatccccggcgccaagcacggcaacatccaggtgagctgcgtggagtgcagcaaccagcagggcagaatcgccgccagctacggcaacgccgtgtgcatcttcgagcccctgggcatcaacagccacaagagaaactgccagctgaagtgccagtggctgaagaccggccagttcttcctgagcagcgtgacctacaacctggcctgggacccccaggacaacagactgctgaccgccaccgacagcatccagctgtgggccccccccggcgacgacatcctggaggaggaggaggagatcgacaacaccgtgccccccgtgctgaacgactggaagtgcgtgtggcagtgcaagaccagcgtgagcgtgcacctgatggagtggagccccgacggcgagtacttcgccaccgccggcaaggacgactgcctgctgaaggtgtggtaccccatgaccggctggaagagcagcatcatcccccaggaccaccacgaggtgaagagaagacagagcagcacccagttcagcttcgtgtacctggcccaccccagagccgtgaccggcttcagctggagaaagaccagcaagtacatgcccagaggcagcgtgtgcaacgtgctgctgaccagctgccacgacggcgtgtgcagactgtgggccgagaccctgctgcccgaggactgcctgctgggcgagcagatctgcgagaccaccaccagcagcatcgccagcagcctgagccacgccggcagacacaaggacagaatccagcacgccctggagaccatccaccacctgaagaacctgagaaagggccagagaagaagcagcgtgctggtgacccacgccgagctgatgcccgaccagaccgccatgcacgaggtgcagagacacatcagccaccacgccaacgccctgtgccacttccacatcgccgccagcatcaaccccgccaccgacatccccaacgtgctggtgggcaccgccttcaacgtggacgacggcaacggcggcttcgtggtgcactggctgaacaacaaggagttccacttcaccagcagcaccgaggtgttcatgcaccagctgagaaagctgagcgacaagcaggtggaccacgagaacgacgacgccgacagagaggacgaggagcacagccaggaggacagagagagaggcctgcacatgaagctggaccacgacctgagcctggacagagagagcgaggccggcaccggcagcagcgagcacgaggacggcgagagagagggcagccccagaacctacagcagactgagcgtgcccatgcccctgcccaccgtgctgctggacagaaagatcgagaccctgctgaccgagtggaacaagaaccccgacatgctgttcaccatccaccccgtggacggcaccttcctggtgtggcacgtgaagtacctggacgagtacaaccccggcatcttcagacaggtgcaggtgagcttcagcagcagaatccccgtggccttccccagcggcgacgccagcagcctgagcaagaacatcatgatgtacgcctgcatcaacgccaccaaggacagccaccacaccctgctgcaccaggagggcatgagcgtgggcagcccccacggcagccagccccacagcagaagccacagcacccacatgaacatcctggcccccaccgtgatgatgatcagcaagcacatcgacggcagcctgaaccagtgggccgtgaccttcgccgacaagagcgccttcaccaccgtgctgaccgtgagccacaagttcagatactgcggccacagattccacctgaacgacctggcctgccacagcgtgctgcccctgctgctgaccagcagccaccacaacgccctgctgacccccgagctggactgccagtgggacagcgacaacaagctgagcagactgatggaccccgtgaagcacatcaagggcagcagcaagcagcccctgagaaacgccgccaccagaaccttccacgaccccaacgccatctacagcgagctgatcctgtggagagtggaccccatcggccccctgagctacaccggcggcgtgagcgagctggccagaatcaacagcctgcacaccagcgccttcagcaacgtggcctggctgcccaccctgatccccagctactgcctgggcacctactgcaacagcgccagcgcctgcttcgtggccagcgacggcaagaacctgagactgtaccaggccgtggtggacgccagaaagctgctggacgagctgagcgaccccgagagcagcaagctgatcggcgaggtgttcaacatcgtgagccagcagagcaccgccagacccggctgcatcatcgagctggacgccatcaccaaccagtgcggcagcaacacccagctgctgcacgtgttccaggaggacttcatcatcggctacaagccccacaaggaggacatggagaagaaggagaccgagatcttcttccagcccagccagggctacagacccccccccttcagcgagaagttcttcctggtggtgatcgagaaggacagcaacaacaacagcatcctgcacatgtggcacctgcacctgaagagcgtgcaggcctgcctggccaaggccagcgagggcgccagcagcgagagcctgctgagcgtgcccggccagaagaacgtggacagcagccccgagaccagccccagcgtgagccccatgccccacagcagcagcatcgccaacctgcagaccgccagcaagctgatcctgagcagcagactggtgtacagccagcccctggacctgcccgagagcgtggaggtgatcagagccacccccagcgccggccacctgagcagcagcagcatctaccccgtgtgcctggccccctacctggtggtgaccacctgcagcgacaacaaggtgagattctggaagtgctgcatggaggccaaccccgagtgcaacaagagcgacgagaaggagatctaccactggaagagatggcccctgatgaacgacgagggcgaggacaacagcagcaccgtgagcatcgtgggcagacccgtggccgtgagctgcagctacaccggcagactggccgtggcctacaagcagcccatccaccacaacggcttcgtgagcaaggagttcagcatgcacgtgtgcatcttcgagtgcgagagcaccggcggcagcgagtgggtgctggagcagaccatccacctggacgacctggtgaaggtgggcagcgtgctggacagcagagtgagcgtggacagcaacctgttcgtgtacagcaagagcgacgccctgctgagcaaggacagatacctgatccccaacatcaagcacctggtgcacctggactgggtgagcaaggaggacggcagccacatcctgaccgtgggcgtgggcgccaacatcttcatgtacggcagactgagcggcatcgtgaccgagcagaccaacagcaaggacggcgtggccgtgatcaccctgcccctgggcggcagcatcaagcagggcgtgaagagcagatgggtgctgctgagaagcatcgacctggtgagcagcgtggacggcacccccagcctgcccgtgagcctgagctgggtgagagacggcatcctggtggtgggcatggactgcgagatgcacgtgtacgcccagtggaagcacgccgtgaagttcggcgacaccgaggccgacagcagcaacgccgaggaggccgccatgcaggaccacagcaccttcaagagcaacatgctggccagaaagagcgtggtggagggcaccgccatcagcgacgacgtgttctgcagccccaccgtgatccaggacggcggcctgttcgaggccgcccacgtgctgagccccaccctgccccagtaccaccccacccagctgctggagctgatggacctgggcaaggtgagaagagccaaggccatcctgagccacctggtgaagtgcatcgccggcgaggtggccatcgtgagagaccccgacgccggcgagggcaccaagagacacctgagcagaaccatcagcgtgagcggcagcaccgccaaggagaccgtgaccgtgggcaaggacggcaccagagactacaccgagatcgacagcatcccccccctgcccctgtacgccctgctggccgccgaccaggacaccagctacagaatcagcgaggagagcaccaagatcccccagagctacgaggaccagaccgtgagccagcccgaggaccagtacagcgagctgttccagatccaggacatccccaccgacgacatcgacctggagcccgagaagagagagaacaagagcaaggtgatcaacctgagccagtacggccccgcctacttcggccaggagcacgccagagtgctgagcagccacctgatgcacagcagcctgcccggcctgaccagactggagcagatgttcctggtggccctggccgacaccgtggccaccaccagcaccgagctggacgagagcagagacaagagctgcagcggcagagacaccctggacgagtgcggcctgagatacctgctggccatgagactgcacacctgcctgctgaccagcctgccccccctgtacagagtgcagctgctgcaccagggcgtgagcacctgccacttcgcctgggccttccacagcgaggccgaggaggagctgatcaacatgatccccgccatccagagaggcgacccccagtggagcgagctgagagccatgggcatcggctggtgggtgagaaacatcaacaccctgagaagatgcatcgagaaggtggccaaggccagcttccagagaaacaacgacgccctggacgccgccctgttctacctgagcatgaagaagaaggccgtggtgtggggcctgttcagaagccagcacgacgagaagatgaccaccttcttcagccacaacttcaacgaggacagatggagaaaggccgccctgaagaacgccttcagcctgctgggcaagcagagattcgagcagagcgccgccttcttcctgctggccggcagcctgaaggacgccatcgaggtgtgcctggagaagatggaggacatccagctggccatggtgatcgccagactgtacgagagcgagttcgagaccagcagcacctacatcagcatcctgaaccagaagatcctgggctgccagaaggacggcagcggcttcagctgcaagagactgcaccccgaccccttcctgagaagcctggcctactgggtgatgaaggactacaccagagccctggacaccctgctggagcagacccccaaggaggacgacgagcaccaggtgatcatcaagagctgcaaccccgtggccttcagcttctacaactacctgagaacccaccccctgctgatcagaagaaacctggccagccccgagggcaccctggccaccctgggcctgaagaccgagaagaacttcgtggacaagatcaacctgatcgagagaaagctgttcttcaccaccgccaacgcccacttcaaggtgggctgccccgtgctggccctggaggtgctgagcaagatccccaaggtgaccaagaccagcgccctgagcgccaagaaggaccagcccgacttcatcagccacagaatggacgacgtgcccagccacagcaaggccctgagcgacggcaacggcagcagcggcatcgagtggagcaacgtgaccagcagccagtacgactggagccagcccatcgtgaaggtggacgaggagcccctgaacctggactggggcgaggaccacgacagcgccctggacgaggaggaggacgacgccgtgggcctggtgatgaagagcaccgacgccagagagaaggacaagcagagcgaccagaaggccagcgaccccaacatgctgctgaccccccaggaggaggacgaccccgagggcgacaccgaggtggacgtgatcgccgagcagctgaagttcagagcctgcctgaagatcctgatgaccgagctgagaaccctggccaccggctacgaggtggacggcggcaagctgagattccagctgtacaactggctggagaaggagatcgccgccctgcacgagatctgcaaccacgagagcgtgatcaaggagtacagcagcaagacctacagcaaggtggagagcgacctgctggaccaggaggagatggtggacaagcccgacatcggcagctacgagagacaccagatcgagagaagaagactgcaggccaagagagagcacgccgagagaagaaagagctggctgcagaagaaccaggacctgctgagagtgttcctgagctactgcagcctgcacggcgcccagggcggcggcctggccagcgtgagaatggagctgaagttcctgctgcaggagagccagcaggagaccaccgtgaagcagctgcagagccccctgcccctgcccaccaccctgcccctgctgagcgccagcatcgccagcaccaagaccgtgatcgccaaccccgtgctgtacctgaacaaccacatccacgacatcctgtacaccatcgtgcagatgaagacccccccccaccccagcatcgaggacgtgaaggtgcacaccctgcacagcctggccgccagcctgagcgccagcatctaccaggccctgtgcgacagccacagctacagccagaccgagggcaaccagttcaccggcatggcctaccagggcctgctgctgagcgacagaagaagactgagaaccgagagcatcgaggagcacgccacccccaacagcagccccgcccagtggcccggcgtgagcagcctgatcaacctgctgagcagcgcccaggacgaggaccagcccaagctgaacatcctgctgtgcgaggccgtggtggccgtgtacctgagcctgctgatccacgccctggccaccaacagcagcagcgagctgttcagactggccgcccaccccctgaacaacagaatgtgggccgccgtgttcggcggcggcgtgaagctggtggtgaagcccagaagacagagcgagaacatcagcgccccccccgtgctgagcgaggacatcgacaagcacagaagaagattcaacatgagaatgctggtgcccggcagacccgtgaaggacgccacccccccccccgtgcccgccgagagacccagctacaaggagaagttcatcccccccgagctgagcatgtgggactacttcgtggccaagcccttcctgcccctgagcgacagcggcgtgatctacgacagcgacgagagcatccacagcgacgaggaggacgacgccttcttcagcgacacccagatccaggagcaccaggaccccaacagctacagctgggccctgctgcacctgaccatggtgaagctggccctgcacaacgtgaagaacttcttccccatcgccggcctggagttcagcgagctgcccgtgaccagccccctgggcatcgccgtgatcaagaacctggagaactgggagcagatcctgcaggagaagatggaccagttcgagggccccccccccaactacatcaacacctaccccaccgacctgagcgtgggcgccggccccgccatcctgagaaacaaggccatgctggagcccgagaacacccccttcaagagcagagacagcagcgccttccccgtgaagagactgtggcacttcctggtgaagcaggaggtgctgcaggagaccttcatcagatacatcttcaccaagaagagaaagcagagcgaggtggaggccgacctgggctaccccggcggcaaggccaaggtgatccacaaggagagcgacatgatcatggccttcagcgtgaacaaggccaactgcaacgagatcgtgctggccagcacccacgacgtgcaggagctggacgtgaccagcctgctggcctgccagagctacatctggatcggcgaggagtacgacagagagagcaagagcagcgacgacgtggactacagaggcagcaccaccaccctgtaccagcccagcgccaccagctacagcgccagccaggtgcacccccccagcagcctgccctggctgggcaccggccagaccagcaccggcgccagcgtgctgatgaagagaaacctgcacaacgtgaagagaatgaccagccaccccgtgcaccagtactacctgaccggcgcccaggacggcagcgtgagaatgttcgagtggaccagaccccagcagctggtgtgcttcagacaggccggcaacgccagagtgaccagactgtacttcaacagccagggcaacaagtgcggcgtggccgacggcgagggcttcctgagcatctggcaggtgaaccagaccgccagcaaccccaagccctacatgagctggcagtgccacagcaaggccaccagcgacttcgccttcatcaccagcagcagcctggtggccaccagcggccacagcaacgacaacagaaacgtgtgcctgtgggacaccctgatcagccccggcaacagcctgatccacggcttcacctgccacgaccacggcgccaccgtgctgcagtacgcccccaagcagcagctgctgatcagcggcggcagaaagggccacgtgtgcatcttcgacatcagacagagacagctgatccacaccttccaggcccacgacagcgccatcaaggccctggccctggacccctacgaggagtacttcaccaccggcagcgccgagggcaacatcaaggtgtggagactgaccggccacggcctgatccacagcttcaagagcgagcacgccaagcagagcatcttcagaaacatcggcgccggcgtgatgcagatcgacatcatccagggcaacagactgttcagctgcggcgccgacggcaccctgaagaccagagtgctgcccaacgccttcaacatccccaacagaatcctggacatcctgtag

SEQ ID NO: 185566 - DNA, 10672 bp, Artificial Sequence
  derived and/or modified sequence
acaagcacccttgccctcccgcatttgtgcgccggtgcagcaggcagtgggaacatccgggcatttccgcagctgagcggcgacccgggcggcggcggcggtcgaggagctcccatggcagggacgaggcggagggaaggcgaaaggggggcgaggagttaagccagagcctccgcggggcgggtttccgagggaggcacagagggaaacggctctcgcagcccgaggagggtcaggcgcggagcttgtcgcacctcccgcgcattctgtccagcccgggctccggagatgcatctgcatcaggtcctcaccggagctgtcaaccctggagacaactgctactccgtgggcagcgtcggggatgtccccttcacggcatatggatcaggctgtgatattgttattttggcaaatgactttgaatgtgtacagatcattcctggtgctaagcatggaaacatccaagtcagctgtgtggagtgttctaaccaacaaggaagaattgcagcttcatatggtaatgctgtttgtatatttgagcccttgggcataaattctcataaaagaaattgtcaactcaagtgccagtggcttaaaactgggcagttttttttgagttctgtgacatacaacttagcatgggatcctcaagataatagattgttgacagcaactgattctattcagttgtgggctcctccaggagatgatattctggaagaggaggaagaaattgataatacagttcctcctgttttaaatgattggaagtgtgtctggcagtgcaaaacctcagtatctgtacatttgatggaatggtctcctgatggtgaatattttgctactgctggaaaggatgattgtcttttgaaagtgtggtatcctatgactggttggaagtcttcaattatacctcaggatcatcatgaagtaaaaaggagacagtcctctactcaattttcttttgtttacttggcacatccccgagctgtgacaggtttttcgtggcgcaaaactagcaagtatatgcccaggggttctgtctgtaatgtgttgttaacttcatgtcatgatggtgtgtgccggctctgggcagaaactttattaccagaagactgtcttttgggtgagcagatttgtgagactaccacttccagcattgccagcagcctttctcatgctggaagacacaaagacagaatacagcatgctcttgagacaatacaccatttgaaaaatttaaggaaaggacagaggaggtcatctgttcttgtaactcatgctgaattaatgcccgaccagacagcaatgcatgaagttcaaagacacatttcccaccatgcaaatgcactctgtcattttcatattgcagcaagcatcaaccctgccacagatattccaaatgtcttggttggcactgcatttaatgttgatgatggaaatgggggctttgtagttcattggttaaacaacaaggaatttcattttacatcatctacagaagtatttatgcatcaattacgaaaactttctgataagcaggtagatcatgaaaatgatgatgcagatagagaagatgaggaacattcacaggaggatagagaacggggtttacatatgaaattagaccatgatttatccctggatagagaatctgaggcaggtacaggatcatcagaacatgaagatggagaaagagaaggaagtcctagaacttactcacgacttagtgtaccaatgccactgcctacggttctgcttgatcggaagattgaaacgctgctaactgaatggaataagaatcctgatatgctttttacaatacaccctgtagatggtacctttctagtgtggcatgtgaagtatttggatgaatataatcctggaatatttagacaagttcaggtttctttttcttctcggattcctgttgcatttccctctggtgatgcaagctctcttagtaaaaatatcatgatgtatgcctgtataaatgcgacaaaagattctcaccacacgctgttacaccaggaggggatgtctgtaggcagtcctcacggatcacagccacactctagatcccacagtacacatatgaacatcttagctcccacagtaatgatgatctctaaacacatagatggttctttaaatcagtgggcagtcacttttgctgataagtctgcctttaccactgttctaactgtatctcacaaatttagatattgcggtcatcgatttcacctcaatgacctggcatgtcattcagttttaccactgttattgacatcctctcatcataatgctctattgactcctgaattagattgtcagtgggactcagacaataaattaagtagattaatggaccctgtaaaacatataaaaggttcctcgaaacaacctcttagaaatgcagcaactcgtacatttcatgacccaaatgcaatctacagtgaacttattctgtggcgtgtagacccaataggacctttgtcatacactggaggagtatcagaattggctcgaattaactctttacatacctcagcgttctctaatgtggcttggcttccaactctcattcccagttactgtctaggcacatactgcaattctgcaagtgcttgctttgttgcttctgatggcaaaaatctgagactctatcaagctgtagtggatgcaaggaaattattagatgaattgtcagacccagaatcttcaaaacttattggagaagtgtttaatattgtgagccaacagtctactgctcgacctggctgcattattgaactcgacgcaataaccaaccaatgtggctcaaatacacagttgcttcatgtgtttcaagaagacttcattataggatataaaccacataaggaagatatggagaaaaaggaaacagaaatattttttcagccatcacaaggataccgcccaccaccattttcagaaaagttctttctagtagtaattgagaaggacagcaataataactctattctgcatatgtggcaccttcatcttaaatctgtacaagcatgtttagctaaagcttcagaaggggcttcctctgagagtctactttcagtccctggacagaagaacgtagattcttctccagaaacctctcctagtgtgagccccatgccacattcttcatcaattgccaatcttcaaactgccagtaaacttattctgagttctagactggtgtatagccaaccccttgatctcccagaatcagttgaagtaataagagcaacgccttcagcaggccatctgagttcttcttcaatttatccagtgtgccttgcaccttatttagtggttacaacttgttctgacaataaagtacgcttctggaaatgttgtatggaagccaacccagagtgtaataaaagtgatgagaaagaaatttatcattggaagagatggcctttgatgaatgatgaaggagaagataatagcagtacagtgagcattgtgggaagaccagttgctgttagctgttcatacacaggtcgccttgcagtggcttataagcagcctatccaccataatggttttgtttctaaagaattttccatgcatgtttgtatatttgaatgtgaatctacaggaggatcagagtgggttttagaacaaacaattcatcttgatgatttggttaaggttgggagtgtacttgattcaagggtcagcgtcgacagtaatctgtttgtgtatagcaagtcagatgcactcttgagcaaggatagatatcttattccgaatatcaaacatttagtacatttggactgggtatcaaaagaagatggctcccacattcttacagtgggagtcggtgcgaatatcttcatgtatggaaggctttcaggaattgtgactgagcaaaccaacagtaaggatggagtagctgtcatcactttaccactaggtggtagtatcaagcaaggagttaagtcaagatgggttcttcttagatctatagacttggtatcttctgttgatggtactccttcactgcctgtttctctctcttgggtaagagatgggatattggtggtaggaatggattgtgaaatgcatgtatatgcacagtggaagcatgctgtcaaatttggagacactgaagctgatagttctaatgcagaagaggcagcaatgcaagatcattcgacctttaaatctaatatgctggcaagaaaaagtgttgttgaaggaacagctatttctgatgatgttttttgttcaccaactgtaattcaagatggtggcttatttgaggctgcacatgtactttcccctactcttccacaatatcatccaactcagctgttagaattgatggatttagggaaagtgcgaagggctaaagccattctctctcatttagtaaaatgtattgcaggtgaagtagcaatagttagagatcctgatgctggagaaggaactaagcgacatctctctcgaactattagtgtaagtggcagtacagcaaaggaaacagtcaccgtaggaaaagatggtactcgagattatactgagatagattctatccctccactaccactatatgcattacttgctgcagatcaagatacatcctacagaatttcagaagaaagtacaaagataccacagagctatgaagatcagacagtaagtcaaccagaggatcagtattcagagctgtttcaaatccaggatataccaacggatgatattgatttagagcctgaaaagagagaaaacaaatcaaaagtaataaatctttctcaatatggaccagcttactttggccaagaacatgcaagggtactttcaagtcatcttatgcactcaagtctaccaggccttacccgtttggagcagatgttccttgtagctttggctgatacagtggctactactagtactgagcttgatgaaagcagagataagagttgctcaggaagagatacattagatgagtgtggtttgagatacttgttagctatgcgcctacacacatgccttttgacatcgctgcctcctttataccgagtgcagctacttcatcaaggtgtctctacatgccattttgcctgggcttttcattctgaggctgaagaagaactgattaatatgattccagcaattcagagaggggacccccagtggtctgaattaagagctatgggcataggatggtgggtgaggaacattaacacgcttcgaagatgcattgaaaaggttgccaaagcttcttttcaaaggaacaatgatgccttagatgctgcactattctacctttcaatgaagaagaaagcagtagtgtggggtctgtttaggtcacagcatgatgaaaaaatgacaacatttttcagccacaactttaatgaagatagatggcgaaaagctgctttgaaaaatgctttttccttacttggaaaacaacgctttgaacaatcggctgcttttttcttgctagctggttcattgaaagatgccatagaggtatgtcttgaaaaaatggaagatattcagctagccatggttattgcccgtttatatgaatctgaatttgagacttcatccacttatatatccatcctaaatcagaagattttgggttgccaaaaggatggctcaggattcagttgcaaaagattacatcctgatcctttcctgcgtagtcttgcctattgggtaatgaaagattacacccgagccttggacacattactggaacaaacaccaaaggaggatgatgaacatcaagttatcatcaagtcttgtaacccggtggcatttagtttttataactaccttcgaactcatcctttgctcattcgaagaaatcttgcctcccctgaaggaactttggcaaccttaggtctcaaaactgagaagaactttgttgataaaattaacctcatagaaagaaaattattctttaccactgcaaatgctcattttaaagttggatgccctgttttagccttggaggtactctccaaaattccaaaagtaaccaaaacatctgccttatctgcaaaaaaagatcagcctgacttcatttctcacaggatggatgatgtaccttcacattcaaaagctctgagtgatggcaatggaagttctggcattgaatggtcaaatgtaacttcatcacagtatgactggagtcagccaatagtaaaagttgatgaggaacctcttaatcttgattggggtgaagatcacgacagtgccttagatgaagaggaagacgatgctgttggtttagtgatgaaaagtacagatgccagggaaaaagataaacaatcagatcagaaggcctcagaccctaacatgttattaacacctcaggaagaggatgatcctgaaggtgatactgaagttgatgtgattgctgaacaactaaaattcagagcttgtttaaagatccttatgactgaattaagaacattggctacaggttatgaagtagatggaggaaaactcagatttcaactctataactggcttgaaaaggaaattgctgccttgcatgagatatgtaatcatgaatcagttattaaagagtattccagtaagacatattccaaagtagagagtgatctgctggatcaggaagaaatggtagacaaaccagatattggttcctatgagcgccatcaaatagaaagaagaagattgcaggccaaacgagagcatgcagaaagacgaaagtcgtggttgcagaaaaaccaagatctcctgagagtatttctcagctactgtagccttcatggggcccaaggtggtggtttggcttcagtaaggatggaactcaaatttttgctacaagaatcacaacaggaaactacagtaaagcagctccagtctccactaccactgcctaccaccctacctctgctttcagcaagtattgcgtcaacaaaaacagtcatagctaatcctgtattgtacttaaataatcacatccatgatatactttatactattgttcagatgaaaacaccacctcatcccagtattgaagatgtgaaggtgcacacacttcattcactagcagcatcactttctgcatcaatttaccaagcattatgtgacagtcatagctacagtcaaacagaaggaaatcagtttacaggaatggcttatcaaggacttcttttaagtgatcgtagaagactaaggacagaaagcattgaagaacacgcaacaccaaattcatctcctgctcaatggcctggtgtgagctcacttattaatcttttgagttcagcccaagatgaagaccagccaaaactgaacattttgctatgtgaagctgttgttgctgtttacttaagtttattgatacatgctcttgccacaaattcctccagtgaattatttcggcttgcagcccacccattaaataatcgaatgtgggctgctgtttttggaggcggtgtaaaacttgttgtgaaacctcgaagacaatcagaaaatatttcagcacctcctgtcctttctgaagacatagataaacaccgtaggagatttaacatgagaatgctcgtccctggaaggcctgtaaaagatgctaccccaccaccggtgcctgcagaaagaccatcttacaaagaaaaatttattcctcccgaacttagtatgtgggattattttgttgcaaagccatttcttcctttgtctgatagtggtgttatatatgattctgatgaaagcattcatagtgatgaagaagatgatgcctttttttcagatacacaaatacaggagcaccaagatccaaattcctatagctgggctcttctacatttgacaatggttaaactagcacttcacaatgtcaagaatttctttcctattgctggactggaattctctgagctgcctgtaacatcaccattaggtattgctgtgattaaaaacttggagaactgggaacagatcttgcaagagaaaatggatcagtttgaaggtccaccccctaactatatcaacacatatccaactgacctttcagtgggagctggaccagctattcttcgaaataaagcaatgctagaacctgaaaataccccattcaagtcccgggattcttctgcatttccagtcaaacgactttggcatttccttgttaaacaagaggtccttcaagagacatttattagatatattttcactaagaaaagaaagcagagtgaggttgaagctgatctgggctatccaggtggaaaggcgaaagtcatccataaggaatctgatatgatcatggcattttctgttaataaggcaaattgtaatgaaattgttttggcttcaacacatgatgttcaagaacttgatgttacttctctactggcctgtcagtcatacatatggatcggagaagaatatgacagagaatccaaaagttcagatgatgttgattatcgtggttccactacaactctttatcaacccagtgcaacatcctattcagcaagtcaggtgcatccaccttcatctctgccatggctgggcactggacagactagcactggagctagtgtgcttatgaaaaggaatctacataatgttaagagaatgacttcacacccagtccatcaatactatcttacaggtgctcaggacggcagtgtacgaatgtttgaatggacgcggcctcagcaacttgtctgctttcgtcaagctggcaatgcaagagttactagattatattttaattcacaaggcaacaagtgtggtgttgcggatggagagggttttctgagtatctggcaagttaaccaaactgcatcaaatcctaaaccttatatgagttggcagtgccacagtaaagccacaagtgactttgcatttattacctcttcaagtctagttgccacatctggacactccaatgacaatagaaatgtttgcctctgggacacattaatatcacccggaaacagcctcattcatggtttcacgtgccacgatcatggtgccacggtactgcagtatgcacccaaacagcaactcctaatctcggggggtaggaaaggacacgtctgcatttttgacatcaggcaaaggcagctcattcacacgttccaggcccatgactcagctattaaggctctggccttggatccctatgaggaatattttaccacaggttcagcagaaggtaacataaaggtttggagattgacaggccatggcctaattcattcatttaaaagtgaacatgctaagcagtccatatttcgaaacattggggctggagtcatgcagattgacatcatccagggcaatcggctcttctcctgtggtgcagatggcacgctgaaaaccagggttttgcccaatgcttttaacatccctaacagaattcttgacattctataaagattggggttttatttttatatacatttcagttaaaaggcacactacagtcatcactaggcaattctgctttctaagcagttgtattgaaaacagagaatctctgtgtagaatttgaatatgacccaagctgagtattatctaaacaggttggtggaatgaatgcgcatgtaccttattatgctgacatactaaaaaaaataaaacctagtattgtatgaaggatagctattctttacagcatttagcaaacctgattcagaaaacatttgagattagcaaattagtaacttgaaataatgaaaaggacgtttataccaaattaaggaagaaaatgttgctgatttgggtttttcttcctgttcttaccactgactgaagcatgcctgcagtctcctcctctgttgaatgaaggataatcataaggtgtttgttaggagcgctagaccacctggaaaactttcttagctgtggagcagtgcgcagtgaccagttctctgctgtgagaggccgtttccattctttcctgctgaatatttttcctgttagtgtttatactgagctagtactgtaacttgcaaatgagtgcaaatttaaatgcaatgttttactcacaatttgcacattcacattttttggactgctagtttttctatttaaatatttgccttcatgttaggaatgtactatgtgaacatgacatatttgtagttaaccaaacacaccttcttagtccagtttagtactttttcttttcgtgtattcaaggttaaacacccaaacatttaaggatatgttgaaactacaccaatagagcatttcatatcataattaaaatgaatgttaggcttcttgtggccagttaatagttgatgagattggtgacattatttattgccacagcctattgtataaactatgcagagttaaatatttgcttgtaaaatattagccaatgttgtcattattttgatgtatttccttggttatgaccaaaaatatgttgagatactgaaactaatgtctgtgtgtttaaatgtttaccagcaaattgtcttatcatgttaatgagaatgttcaatgcctgtgtggtaaatagtaaatacaatggcataaaagtaactttctctgaagatgtgatgttcaggctgtgaaatatatatgtaaaagaaaaataaatgttatttgttagagtttttagtttgatactgtttttgaccattgagatttttaatttgataaaatgtttaactgttagagaatttgcaagcta

SEQ ID NO: 185567 - protein, 581 aa, Artificial Sequence
  derived and/or modified sequence
MGEKMAEEERFPNTTHEGFNVTLHTTLVVTTKLVLPTPGKPILPVQTGEQAQQEEQSSGMTIFFSLLVLAICIILVHLLIRYRLHFLPESVAVVSLGILMGAVIKIIEFKKLANWKEEEMFRPNMFFLLLLPPIIFESGYSLHKGNFFQNIGSITLFAVFGTAISAFVVGGGIYFLGQADVISKLNMTDSFAFGSLISAVDPVATIAIFNALHVDPVLNMLVFGESILNDAVSIVLTNTAEGLTRKNMSDVSGWQTFLQALDYFLKMFFGSAALGTLTGLISALVLKHIDLRKTPSLEFGMMIIFAYLPYGLAEGISLSGIMAILFSGIVMSHYTHHNLSPVTQILMQQTLRTVAFLCETCVFAFLGLSIFSFPHKFEISFVIWCIVLVLFGRAVNIFPLSYLLNFFRDHKITPKMMFIMWFSGLRGAIPYALSLHLDLEPMEKRQLIGTTTIVIVLFTILLLGGSTMPLIRLMDIEDAKAHRRNKKDVNLSKTEKMGNTVESEHLSELTEEEYEAHYIRRQDLKGFVWLDAKYLNPFFTRRLTQEDLHHGRIQMKTLTNKWYEEVRQGPSGSEDDEQELL

SEQ ID NO: 185568 - protein, 362 aa, Artificial Sequence
  derived and/or modified sequence
MLVFGESILNDAVSIVLTNTAEGLTRKNMSDVSGWQTFLQALDYFLKMFFGSAALGTLTGLISALVLKHIDLRKTPSLEFGMMIIFAYLPYGLAEGISLSGIMAILFSGIVMSHYTHHNLSPVTQILMQQTLRTVAFLCETCVFAFLGLSIFSFPHKFEISFVIWCIVLVLFGRAVNIFPLSYLLNFFRDHKITPKMMFIMWFSGLRGAIPYALSLHLDLEPMEKRQLIGTTTIVIVLFTILLLGGSTMPLIRLMDIEDAKAHRRNKKDVNLSKTEKMGNTVESEHLSELTEEEYEAHYIRRQDLKGFVWLDAKYLNPFFTRRLTQEDLHHGRIQMKTLTNKWYEEVRQGPSGSEDDEQELL

SEQ ID NO: 185569 - protein, 281 aa, Artificial Sequence
  derived and/or modified sequence
MMIIFAYLPYGLAEGISLSGIMAILFSGIVMSHYTHHNLSPVTQILMQQTLRTVAFLCETCVFAFLGLSIFSFPHKFEISFVIWCIVLVLFGRAVNIFPLSYLLNFFRDHKITPKMMFIMWFSGLRGAIPYALSLHLDLEPMEKRQLIGTTTIVIVLFTILLLGGSTMPLIRLMDIEDAKAHRRNKKDVNLSKTEKMGNTVESEHLSELTEEEYEAHYIRRQDLKGFVWLDAKYLNPFFTRRLTQEDLHHGRIQMKTLTNKWYEEVRQGPSGSEDDEQELL

SEQ ID NO: 185570 - DNA, 1746 bp, Artificial Sequence
  derived and/or modified sequence
atgggcgagaagatggccgaggaggagagattccccaacaccacccacgagggcttcaacgtgaccctgcacaccaccctggtggtgaccaccaagctggtgctgcccacccccggcaagcccatcctgcccgtgcagaccggcgagcaggcccagcaggaggagcagagcagcggcatgaccatcttcttcagcctgctggtgctggccatctgcatcatcctggtgcacctgctgatcagatacagactgcacttcctgcccgagagcgtggccgtggtgagcctgggcatcctgatgggcgccgtgatcaagatcatcgagttcaagaagctggccaactggaaggaggaggagatgttcagacccaacatgttcttcctgctgctgctgccccccatcatcttcgagagcggctacagcctgcacaagggcaacttcttccagaacatcggcagcatcaccctgttcgccgtgttcggcaccgccatcagcgccttcgtggtgggcggcggcatctacttcctgggccaggccgacgtgatcagcaagctgaacatgaccgacagcttcgccttcggcagcctgatcagcgccgtggaccccgtggccaccatcgccatcttcaacgccctgcacgtggaccccgtgctgaacatgctggtgttcggcgagagcatcctgaacgacgccgtgagcatcgtgctgaccaacaccgccgagggcctgaccagaaagaacatgagcgacgtgagcggctggcagaccttcctgcaggccctggactacttcctgaagatgttcttcggcagcgccgccctgggcaccctgaccggcctgatcagcgccctggtgctgaagcacatcgacctgagaaagacccccagcctggagttcggcatgatgatcatcttcgcctacctgccctacggcctggccgagggcatcagcctgagcggcatcatggccatcctgttcagcggcatcgtgatgagccactacacccaccacaacctgagccccgtgacccagatcctgatgcagcagaccctgagaaccgtggccttcctgtgcgagacctgcgtgttcgccttcctgggcctgagcatcttcagcttcccccacaagttcgagatcagcttcgtgatctggtgcatcgtgctggtgctgttcggcagagccgtgaacatcttccccctgagctacctgctgaacttcttcagagaccacaagatcacccccaagatgatgttcatcatgtggttcagcggcctgagaggcgccatcccctacgccctgagcctgcacctggacctggagcccatggagaagagacagctgatcggcaccaccaccatcgtgatcgtgctgttcaccatcctgctgctgggcggcagcaccatgcccctgatcagactgatggacatcgaggacgccaaggcccacagaagaaacaagaaggacgtgaacctgagcaagaccgagaagatgggcaacaccgtggagagcgagcacctgagcgagctgaccgaggaggagtacgaggcccactacatcagaagacaggacctgaagggcttcgtgtggctggacgccaagtacctgaaccccttcttcaccagaagactgacccaggaggacctgcaccacggcagaatccagatgaagaccctgaccaacaagtggtacgaggaggtgagacagggccccagcggcagcgaggacgacgagcaggagctgctgtag

SEQ ID NO: 185571 - DNA, 1089 bp, Artificial Sequence
  derived and/or modified sequence
atgctggtgttcggcgagagcatcctgaacgacgccgtgagcatcgtgctgaccaacaccgccgagggcctgaccagaaagaacatgagcgacgtgagcggctggcagaccttcctgcaggccctggactacttcctgaagatgttcttcggcagcgccgccctgggcaccctgaccggcctgatcagcgccctggtgctgaagcacatcgacctgagaaagacccccagcctggagttcggcatgatgatcatcttcgcctacctgccctacggcctggccgagggcatcagcctgagcggcatcatggccatcctgttcagcggcatcgtgatgagccactacacccaccacaacctgagccccgtgacccagatcctgatgcagcagaccctgagaaccgtggccttcctgtgcgagacctgcgtgttcgccttcctgggcctgagcatcttcagcttcccccacaagttcgagatcagcttcgtgatctggtgcatcgtgctggtgctgttcggcagagccgtgaacatcttccccctgagctacctgctgaacttcttcagagaccacaagatcacccccaagatgatgttcatcatgtggttcagcggcctgagaggcgccatcccctacgccctgagcctgcacctggacctggagcccatggagaagagacagctgatcggcaccaccaccatcgtgatcgtgctgttcaccatcctgctgctgggcggcagcaccatgcccctgatcagactgatggacatcgaggacgccaaggcccacagaagaaacaagaaggacgtgaacctgagcaagaccgagaagatgggcaacaccgtggagagcgagcacctgagcgagctgaccgaggaggagtacgaggcccactacatcagaagacaggacctgaagggcttcgtgtggctggacgccaagtacctgaaccccttcttcaccagaagactgacccaggaggacctgcaccacggcagaatccagatgaagaccctgaccaacaagtggtacgaggaggtgagacagggccccagcggcagcgaggacgacgagcaggagctgctgtag

SEQ ID NO: 185572 - DNA, 1746 bp, Artificial Sequence
  derived and/or modified sequence
atgggcgagaaaatggccgaggaagagagattccctaatacaacacacgagggattcaatgtgaccctgcatactacactggtggtgacaactaagctggtccttccgacccccggcaagcctatccttccagtgcagacaggtgagcaggctcagcaggaagaacagtcaagtggcatgactatcttttttagcctgctggtactggcaatttgtatcatcctggtccacctgctgatacggtataggctgcacttcctcccggagtccgtggccgtggtgtctctgggaattctgatgggggcagtaatcaaaattatcgaattcaagaagctggccaattggaaagaggaggagatgttcaggccgaacatgttctttttgctgctcctacccccgatcattttcgagagcggttattccctccataagggcaattttttccagaatatcggaagcattacattgtttgctgtgtttggtacagctatttcagccttcgtcgtggggggcgggatatacttcttgggacaagccgatgtgatatcaaagcttaacatgaccgactctttcgccttcggcagcttgattagcgccgtggacccagtggctacgattgctatttttaatgctctgcatgtggaccctgtgttaaacatgctggtgttcggcgaatccattctgaatgatgctgtgtccatcgtactcacaaacacggccgagggattgaccagaaaaaacatgtctgacgtcagcggctggcaaacgttcttgcaggccctagactactttcttaagatgtttttcggttcggcagctcttgggaccctcacgggactgatcagcgcattggtgttaaagcacatagatttgcgtaagacgcctagcctggaatttgggatgatgattattttcgcctacctgccatatggactggctgagggtatctccctgtctgggataatggccattctcttctcaggtatcgtgatgagccactatactcatcacaacctatcccccgttacacagatcctcatgcagcagaccttacgtacggtcgccttcttatgcgaaacatgtgttttcgcctttctgggcttatccatcttcagctttccacataaatttgaaatcagtttcgtgatctggtgcattgtgctagtcttgtttggcagggccgtgaatatatttcctctctcctatctgctcaatttttttcgagatcacaagatcacccctaaaatgatgttcattatgtggtttagcggtctacgcggggccataccctacgcactcagtctgcatctggatctggagcccatggaaaaacgccagctgatcggaacaaccactattgtgatcgtgctgttcaccatcttgctgctgggaggatctaccatgccactcatcaggttgatggatattgaagacgccaaggctcacagacggaataagaaggacgttaacctgagcaagacagagaagatgggaaacacagtggaaagcgagcatttgtctgagctcactgaggaggaatacgaggcacactatattcggagacaggacctgaaggggtttgtgtggttggatgctaagtacctgaatccatttttcacccggagactgactcaggaggacctacaccatggcaggatccaaatgaagacactgactaataaatggtatgaagaggtaaggcaggggccctctggatccgaggacgacgaacaggaactgctgtag

SEQ ID NO: 185573 - DNA, 1089 bp, Artificial Sequence
  derived and/or modified sequence
atgcttgttttcggcgaatctatcctaaatgacgccgtgagcatcgtgcttactaacacggctgagggcctgacccgaaaaaatatgagcgacgtgagtgggtggcagactttcctgcaagcgctagactactttctgaaaatgtttttcggcagtgctgcactggggacgctgactggattgatttctgccttagtcctgaagcatatcgaccttcggaagaccccgagcctggaattcggaatgatgattattttcgcatacctcccctacgggctggctgaaggaatctccctgagtggcatcatggccattctgttctctggcatagtcatgtctcattatacacaccataacttgtcaccggttacgcaaattttaatgcagcaaaccctgcggaccgtcgcatttctctgcgagacatgcgtcttcgcctttcttgggctgtccattttctcatttccccataagtttgagattagtttcgttatctggtgtattgtcctggttctcttcggcagagccgttaatattttccctctgagctaccttcttaacttcttcagagaccataaaattacaccaaagatgatgtttattatgtggttttcaggtttacgcggcgccatcccttacgcgctgagcttgcatctcgaccttgaacccatggagaagcggcagctcatcggcacaaccactatcgtcatagtgctattcaccatcttactgctaggcgggtctactatgcctttaatccggctcatggacatcgaggatgccaaagctcaccgcaggaacaagaaggacgttaacctcagcaagacagaaaagatgggtaacactgtggaatcagaacacttaagtgagctcacagaagaagagtacgaagcacattacattagaaggcaagacttaaagggctttgtctggctggatgctaagtatctcaatcctttcttcacccggcggctcacgcaggaagatctccatcacgggaggattcagatgaagactctcaccaacaagtggtatgaggaggtgcgccaaggccccagtgggagcgaggacgatgagcaggaattgctgtag

SEQ ID NO: 185574 - DNA, 1746 bp, Artificial Sequence
  derived and/or modified sequence
atgggagagaagatggccgaggaggagcgcttccccaacaccacccatgagggcttcaacgtgaccctgcacaccaccctggtggtgaccaccaagctggtgctgcccacccctgggaagcccatcctgcctgtgcagacaggagagcaggcccagcaggaggagcagagcagcggcatgaccatcttcttcagcctgctggtgctggccatctgcatcatcctggtgcacctgctgatccgctaccgcctgcacttcctgcctgagagcgtggccgtggtgtccctgggcatcctgatgggcgccgtcatcaagatcatcgagttcaagaagctggccaactggaaggaggaggagatgttccggcccaacatgttcttcctgctgctgctgccccccatcatctttgagagcggctacagcctgcacaagggcaacttcttccagaacatcggcagcatcaccctgtttgctgtgtttggaacagccatcagcgcctttgtggtgggcggcggcatctacttcctgggccaggctgatgtgatcagcaagctgaacatgacagacagctttgccttcggcagcctcatctctgctgtggaccctgtggccaccatcgccatcttcaatgccctgcacgtggaccctgtgctgaacatgctggtgtttggagagagcatcctgaatgatgctgtgtccatcgtgctgaccaacacagctgagggcctgaccaggaagaacatgtctgatgtgtctggctggcagaccttcctgcaggccctggactacttcctgaagatgttctttggatctgctgccctgggcaccctgaccggcctcatcagcgccctggtgctgaagcacatcgacctgaggaagacccccagcctggagtttggcatgatgatcatctttgcctacctgccctacggcctggccgagggcatcagcctgagcggcatcatggccatcctcttctctggaattgtgatgagccactacacccaccacaacctgagccctgtgacccagatcctgatgcagcagaccctgaggacagtggccttcctgtgtgagacctgtgtgtttgccttcctgggcctgagcatcttctccttcccccacaagtttgagatcagctttgtgatctggtgcatcgtgctggtgctgtttggccgggctgtgaacatcttccccctgagctacctgctgaacttcttccgggaccacaagatcacccccaagatgatgttcatcatgtggttcagcggcctgcggggggccatcccctatgccctgagcctgcacctggacctggagcccatggagaagaggcagctgattggcaccaccaccatcgtgattgtgctcttcaccatcctgctgctgggcggcagcaccatgcccctcatccggctgatggacattgaagatgccaaggcccacagaagaaacaagaaggatgtgaacctgagcaagacagagaagatgggcaacacagtggagagcgagcacctgtctgagctgacagaggaggagtatgaggcccactacatccggcggcaggacctgaagggctttgtgtggctggatgccaagtacctgaaccccttcttcacccggcggctgacccaggaggacctgcaccacggccgcatccagatgaagaccctgaccaacaagtggtatgaggaggtgcggcagggccccagcggctctgaagatgatgagcaggagctgctgtag

SEQ ID NO: 185575 - DNA, 1089 bp, Artificial Sequence
  derived and/or modified sequence
atgctggtgtttggagagagcatcctgaatgatgctgtgtccatcgtgctgaccaacacagctgagggcctgaccaggaagaacatgtctgatgtgtctggctggcagaccttcctgcaggccctggactacttcctgaagatgttcttcggcagcgctgccctgggcaccctgaccggcctcatcagcgccctggtgctgaagcacatcgacctgaggaagacccccagcctggagtttggcatgatgatcatctttgcctacctgccctacggcctggccgagggcatcagcctgagcggcatcatggccatcctcttcagcggcatcgtgatgagccactacacccaccacaacctgagccctgtgacccagatcctgatgcagcagaccctgaggacagtggccttcctgtgtgagacctgtgtgtttgccttcctgggcctgagcatcttctccttcccccacaagtttgagatcagctttgtgatctggtgcatcgtgctggtgctgtttggccgggctgtgaacatcttccccctgagctacctgctgaacttcttccgggaccacaagatcacccccaagatgatgttcatcatgtggttcagcggcctgcggggggccatcccctatgccctgagcctgcacctggacctggagcccatggagaagaggcagctgattggcaccaccaccatcgtcatcgtgctcttcaccatcctgctgctgggcggcagcaccatgcccctcatccggctgatggacattgaagatgccaaggcccacagaagaaacaagaaggatgtgaacctgagcaagacagagaagatgggcaacacagtggagagcgagcacctgtctgagctgacagaggaggagtatgaggcccactacatccggcggcaggacctgaagggctttgtgtggctggatgccaagtacctgaaccccttcttcacccggcggctgacccaggaggacctgcaccacggccgcatccagatgaagaccctgaccaacaagtggtatgaggaggtgcggcagggccccagcggctctgaagatgatgagcaggagctgctgtag

SEQ ID NO: 185576 - DNA, 1746 bp, Artificial Sequence
  derived and/or modified sequence
atgggcgagaagatggccgaggaggagcggttccccaacaccacccatgagggattcaatgtgactctgcacactactctggtcgtgacaactaagctggtgctccccaccccaggcaagccaatcctgcctgtgcagactggcgaacaggctcaacaggaggagcagtctagcggcatgaccatcttcttctccctactagtgctggccatctgcatcatccttgtccatctgttaattcggtaccgactgcactttcttcctgagtccgtcgctgtggtgagtctgggaattctcatgggcgcggtgatcaagatcattgaattcaaaaagctggctaattggaaagaggaggagatgttccgcccaaatatgttctttctactgctgctgcccccgatcattttcgaatccggttactcattacataagggcaatttcttccagaatatcgggtctataacactttttgcagtcttcggtacagcaataagcgcttttgttgtcggcgggggaatttattttttaggacaggctgacgtcatttctaagctcaacatgacggattcgtttgcatttggcagcctgatctccgctgtcgatcctgtcgccacgatagccattttcaacgccttacatgtagaccccgtgctgaatatgttggtgttcggtgagtccatcctgaatgacgctgtgagcatcgtactgaccaacaccgccgagggcttgacaagaaagaatatgtcagatgtgtctggatggcagacctttctgcaagccttagattattttttaaagatgttcttcggctctgctgctctgggcaccctcacaggacttatatctgcactggtgctcaaacatatcgatctgcggaaaacccctagcctcgagtttgggatgatgattatcttcgcgtacctcccctacggcctggcagaggggattagtctgagcggaattatggcaatcctgttttccggaattgtgatgagccactatactcaccacaacctgtcacctgttacccaaatattgatgcagcaaaccctacggaccgtcgcctttctctgtgaaacgtgtgtattcgcatttctcggcctatccatcttttctttcccccacaagttcgaaattagctttgtgatctggtgtattgttctggtactcttcggccgcgctgtaaatattttccccttgagctacctgcttaatttcttcagggatcacaaaatcacccctaaaatgatgtttattatgtggttctcaggcctgaggggagccattccctatgccctgtccctccatctcgacttagagccgatggagaagcgacagttgataggtaccacaaccatcgtgatcgtgctgttcacaatcctcttgctgggcggatctaccatgcctctgattcgcctgatggacattgaggacgcgaaggctcacagacggaataagaaggacgtgaatctgtcaaagaccgagaagatgggaaacaccgtggagagcgaacacctctccgagctgacagaagaagaatacgaagcacactacatcaggcggcaggatctaaaaggattcgtgtggcttgacgccaagtatctgaatccttttttcacccgacggttgacccaggaggacctgcaccatgggagaatccagatgaaaacacttactaataaatggtacgaggaagtgcggcagggtccatccggtagtgaggacgacgagcaggaactcctgtag

SEQ ID NO: 185577 - DNA, 1089 bp, Artificial Sequence
  derived and/or modified sequence
atgctggtgttcggcgagagcatcctgaacgacgccgtgagcatcgtcctcacaaatactgcagagggcctgacacgtaaaaatatgagcgatgttagtggctggcaaacctttttgcaggccctggactatttcctgaagatgttctttgggagcgctgccctgggaacgctaacggggctgattagcgcccttgtactaaagcatattgatctgaggaagacccccagtctggagttcggcatgatgatcatcttcgcataccttccctacggtctggccgaagggatcagtctttcaggaatcatggcgatcctcttttccggtatcgtgatgagccattacacgcatcataatctttctcctgtgacccagatcctgatgcagcagacactgcggacagtggcctttctgtgcgagacctgtgtgttcgccttccttgggctgtcaattttcagctttccccacaagttcgaaatttctttcgttatttggtgcattgttctggtcctatttggacgcgcggtgaatatctttcctctgagttacttgctgaatttcttccgagaccataaaatcacacccaagatgatgttcatcatgtggtttagcggccttcggggagcgattccatatgctctttccctccacctggacctggaaccaatggagaaaagacaactgatcgggacaacaactattgttattgtgttatttacgattcttcttctcggcggctctaccatgcctctcatccggttaatggatatcgaggacgcaaaggcacacagaagaaataagaaagacgttaatctgtcaaaaacagaaaaaatgggaaacacggtcgagagtgaacacttatctgagctgaccgaggaggagtatgaagcccattatatacggagacaggatctcaaaggcttcgtatggctggatgcaaagtatcttaatccgttcttcactagaagactcacccaggaagatttgcaccacggacgcatccagatgaagaccttaacaaataagtggtatgaggaggtgcggcagggtcctagcggctccgaggacgatgagcaggagttactgtag

SEQ ID NO: 185578 - DNA, 1746 bp, Artificial Sequence
  derived and/or modified sequence
atgggggagaagatggccgaagaggagaggtttcccaatacaacacacgagggcttcaacgtgacactacacactacacttgttgttacaacaaagcttgtactgccaactccgggtaagcccatcctgcccgtgcagaccggggaacaggctcagcaggaagaacagtcaagcgggatgaccatctttttttcccttctggttctggcgatctgcattatcctggtgcacctgctaatcaggtatagactgcacttcctgcctgaatcggtcgccgtcgtcagtctgggaatcctgatgggcgctgttatcaaaataatcgaattcaagaaactggctaattggaaagaggaagagatgtttcggcctaacatgtttttcctcctattgctgccacccataatcttcgagagtgggtactctctgcacaagggtaacttcttccaaaacattggcagcatcacactgtttgccgtgttcggaaccgctatcagcgcattcgtagttggcggtggcatatacttcctgggacaggctgacgtcataagcaaactgaacatgactgacagctttgcattcggcagtctgatctctgcggtcgatcctgtggctactatagctatcttcaacgcgttacacgtcgaccccgtacttaacatgctggtctttggagaatctatactgaacgacgcagtgtccattgtgctgacaaataccgccgagggcctgactaggaagaacatgtctgatgtgtcaggatggcagacattcctgcaggcacttgattattttctgaaaatgttttttggctccgccgctctgggaactctgaccggactaatcagtgccctcgtgcttaaacatatcgacctgagaaagacaccctccctcgaatttggtatgatgattatttttgcatacctgccgtacggtctcgctgaaggcatctcactgtcaggaattatggccattcttttctcaggaattgtgatgtcacattacacgcaccacaatctcagtccagttacacagatcttaatgcagcagaccttgcgcacagtggcattcttgtgcgagacatgtgtgttcgctttcctcggcctgagcattttctcctttccccataagtttgaaatatcgttcgtgatctggtgcattgtactggtgttgtttggaagggccgtgaatatctttcccttgtcatatcttctcaatttctttcgggaccataagattacccctaaaatgatgttcattatgtggttcagcggcctacgtggagcaattccttatgccctcagccttcacctggatctggaacctatggagaagcgccaattgataggtaccactacaatcgttatcgtcctgtttacaattctgctgctggggggatctacgatgccacttattcgtctaatggacatcgaggatgcgaaagcacaccgaaggaacaagaaggacgtgaacctatcgaagacagaaaagatgggcaacacagtggagtctgagcacctctccgagctaacagaggaagagtatgaagctcactacatcaggcgtcaagacctgaaaggatttgtgtggctggatgcaaagtatctaaaccccttcttcactcgcagattgacccaggaagatctgcaccacgggagaatacagatgaaaaccctgacaaataagtggtacgaagaggttcggcagggcccaagtggatcagaagacgacgagcaggaactgctatag

SEQ ID NO: 185579 - DNA, 1089 bp, Artificial Sequence
  derived and/or modified sequence
atgctggtgtttggtgaaagcatcctcaatgacgcagtttctatcgtcctgacaaacaccgccgaaggtctgacacgcaaaaatatgtcagacgttagcggctggcagacctttctgcaggccttagattacttccttaaaatgtttttcggcagcgctgctttggggacactgacgggtctgatttccgcgctggtccttaaacacatagatttgcggaagacgccgagcctggagtttggaatgatgatcatcttcgcctaccttccatacggactggctgaggggatttcactttctggtataatggctatcctgtttagcggcatcgtcatgtcccattacactcatcacaatctgagtcccgtcacccaaattcttatgcagcagacactgagaacagtggccttcctgtgtgaaacctgcgtctttgctttcctcggactcagcatcttttcgttcccccataaattcgaaatttctttcgtgatttggtgcattgtgttggtcctcttcggcagggccgttaatatcttccctctgagctatctgttgaacttcttcagggaccataagatcacccccaaaatgatgttcatcatgtggttttctggcttgagaggcgctataccgtatgccttatccctgcatctcgacctggagccaatggagaagagacagctcatcggaactaccactatcgttattgttctcttcaccatcctccttctgggaggatccaccatgccactgataagactgatggatatcgaggatgcaaaggctcaccggcgtaataaaaaagacgtgaacttatctaagacagaaaagatgggcaacacagtcgagagtgagcacctatctgaattgaccgaggaggaatatgaggcccactatattaggcggcaggaccttaagggattcgtctggctggatgctaaatacctgaatccctttttcacaagacggctgacccaggaggacctgcaccacggaaggatacagatgaaaaccctgactaacaaatggtacgaggaagtgcgacagggcccatccggatcagaggacgacgaacaggaactgttgtag

SEQ ID NO: 185580 - DNA, 6094 bp, Artificial Sequence
  derived and/or modified sequence
gccccgcggctccgaactcggtggtcctggaagctccgcaggatgggggagaagatggcggaagaggagaggttccccaatacaactcatgagggtttcaatgtcaccctccacaccaccctggttgtcacgacgaaactggtgctcccgacccctggcaagcccatcctccccgtgcagacaggggagcaggcccagcaagaggagcagtccagcggcatgaccattttcttcagcctccttgtcctagctatctgcatcatattggtgcatttactgatccgatacagattacatttcttgccagagagtgttgctgttgtttctttaggtattctcatgggagcagttataaaaattatagagtttaaaaaactggcgaattggaaggaagaagaaatgtttcgtccaaacatgtttttcctcctcctgcttccccctattatctttgagtctggatattcattacacaagggtaacttctttcaaaatattggttccatcaccctgtttgctgtttttgggacggcaatctccgcttttgtagtaggtggaggaatttattttctgggtcaggctgatgtaatctctaaactcaacatgacagacagttttgcgtttggctccctaatatctgctgtcgatccagtggccactattgccattttcaatgcacttcatgtggaccccgtgctcaacatgctggtctttggagaaagtattctcaacgatgcagtctccattgttctgaccaacacagctgaaggtttaacaagaaaaaatatgtcagatgtcagtgggtggcaaacatttttacaagcccttgactacttcctcaaaatgttctttggctctgcagcgctcggcactctcactggcttaatttctgcattagtgctgaagcatattgacttgaggaaaacgccttccttggagtttggcatgatgatcatttttgcttatctgccttatgggcttgcagaaggaatctcactctcaggcatcatggccatccttttctcaggcatcgtgatgtcccactacacgcaccataacctctccccagtcacccagatcctcatgcagcagaccctccgcaccgtggccttcttatgtgaaacatgtgtgtttgcatttcttggcctgtccatttttagttttcctcacaagtttgaaatttcctttgtcatctggtgcatagtgcttgtactatttggcagagcggtaaacattttccctctttcctacctcctgaatttcttccgggatcataaaatcacaccgaagatgatgttcatcatgtggtttagtggcctgcggggagccatcccctatgccctgagcctacacctggacctggagcccatggagaagcggcagctcatcggcaccaccaccatcgtcatcgtgctcttcaccatcctgctgctgggcggcagcaccatgcccctcattcgcctcatggacatcgaggacgccaaggcacaccgcaggaacaagaaggacgtcaacctcagcaagactgagaagatgggcaacactgtggagtcggagcacctgtcggagctcacggaggaggagtacgaggcccactacatcaggcggcaggaccttaagggcttcgtgtggctggacgccaagtacctgaaccccttcttcactcggaggctgacgcaggaggacctgcaccacgggcgcatccagatgaaaactctcaccaacaagtggtacgaggaggtacgccagggcccctccggctccgaggacgacgagcaggagctgctctgacgccaggtgccaaggcttcaggcaggcaggcccaggatgggcgtttgctgcgcacagacactcagcaggggcctcgcagagatgcgtgcatccagcagccccttcaagacataagagggcggggcgaggtactggctgcagagtcgccttagtccagaacctgacaggcctctggagccaggcgacttcttgggaaactgtcatctcccgactcctccctgagccagcctccgctcagtgtggctcctcagcccacagaggggagggagcatggggccaggtgccagtcatctgtgaagctagggcgcctacccccccacccggaggacccctgcggccccctgcctagaggagcaccatctacagttgtgccattccccagccactgccttcatgctgcccccgccggactggcagagccaggggtcagccacctgcctttgagtcatcaagatgcctctgcagccacaattctgacctaagtggcagggcccagaaatcctgaaaacctcccgctgccttttgtgatacttcctgtgctccctcagagagaaacggagtgaccttttgtcctttacctgattggcacttcgcagtctatctccctgggtagcagacggctgctgcccttctctgggcatgttctgaatgtttacactggtaccttctggtatcttctttagagccccctgcaagctgcaactctaggcttttatcttgcggggtcagagcgccctctagagggaaaagctagaggcacagggtttctgccggcccacaactgctgtcttgatttgcattttacagcaaagtgctgagagcctctagtcgcctcctgccatctgatctccctccccaccattcccgtactcagttgttcttttgtctaatcggaggccactgtgctgaggccctgcagtgtctgctcactgctgccatcttcgctgctagtcagggttccatcctctttcccctctcccagttccctaccacgttggatcccattcgtcacccatgctagggtccccaaagcactggggcaggggccagagcagcagcacccagtgctccctcctctactctgacctggggccccagcatcctggagcacacgctccacgcacacacaccccagccctgtcccaggggcctggccccctcagccatctcagggtgaggagctgccagtcatgtccagatggaatgactcccatcctctcctcatctcccctttgacgagcctcaaactgctcagctcatcaaagagccattgccaacttccgtatgtggttctgggtcccagggagccttggaacctggcaccctggggtggtttaattcatcattaagaagcattcctgcttctcaagggacacagtggcctgcatgggccagcatggaccctgggctgatcatgtgcattcctgcttctctggggacacagtgggcccacatgggccagcatggaccctgggctagagcaagcacatctccatctcttccacctcaggcagtgtggctccagatgtcaggagggactgacctcaggaccttccaggttcctctgtgccaggaatgagaggccaggcccgatcctaccacctcgccttgaccctgaagtcagagcaggccagccaagcaggaagcacactgtttactttttgcatgaaaagtaaatgtgtacttgatagagctaaaatatgatcttttttaatttctcaaccccataatttgagccattgccttgcttaattttggtttccaccatttccttttagtggagaagagaggaagtcagagggtagggacctttgcctgcccctgggcgagtgcgggcagggatctgagaccagattgttctcgcacccctgccagaactcactctcccctgaagtttagggtcccatctcccagatgtaagttgttttgcaaactcagtttgccaggatttctttctttcctaatcttaaattcacagataaagcaatgaaaagagtcagatcccatttccgtctgccccctcgtcaccaggtgtgatagccccagccaggtcacacctggcctcacactttgagctgagacttgaaaacgatgctgtggcggaagagcatgtggggcttggtggaggggccccaggatttgttgggggcaaagggggtggcgggaccgttcccaggaggtaccagcacctgcctcgatctcctctgagcctcttctgccccctgtcggccaggtgaggtcagcagcctgggagagtgcccccaagagatgagggcaccccgtgttccttggcaatcttggctcaccttggtaacaaaaggccatagaagtctgtttttctgggtcagttttttttgcctgagaataacaaattgctgctgtctacctttagcacacccaataattctatttggggcagtgaatgcatagaagatataaaaatacgcagcttaactatatcttcctgcgtgtgtatttattttcttctgggtctaggccatggtacaggagaactgtggcgtgtaggaggaatacttcaggatgagtgaaggctggagccagggagcgctggaggaaaccagccctttagccagcagcccctccaccacaggcactgctgtgtggaacgagttcttggaatgaatcccatgctttctgcagcctgtagttgttatgacccctcggaacaaccaccccgtggcttgtgtggggtctcgcagggaaaagggctggcttctaggtccccgagataagtgtgcagggggatgggccagggccaggctaagggtggctcagttccatcatctggaggtcagacacactgtccagaggcagaactgaagccctctcggcccctaccctaagccagccacccctcttcacagtgggtgagctgggctgggctggctggcatgaggccaaggggtaggcctgagcgccagagtcgcccaggttagcccacaggattcctttgtgtgccatggaatgctgaaagatgggtgactggggacccttcttaaaacctttggcaaaggtgccatcggcagggcttggcctcatgaagtctcaggtccgtgttcccgcagggcgcacatgcttggagagtcctcagcagggtagccgaggccaggccacttctgctgaggatggggcaggctggggtgtgggtgtggcctggggtggctcagggctggaactgctgcctgattcctgtgtggggagaagctcagtggccgtttgctgccactgacaaggatttcacatgcagaagagaaaaggcccccctccaccccccgcattccctgccgagtgagagccagtgtttgctgcccttgctgggggcgggtaggaaaccctgagcttcctgatgcggagtcatgaagcagagtcctcgggaaggcatctccacagccccgggtcctctgtctaacgccctccatttcacgccctccatctcacagtcaagataaaggcctcgagaataaagagccagcccccttccatttagtctcctgccgtttcccaaacagttgtccaacagttagacattgaggggcttcactgttaccaggcatgtaacagaaggaggaagactaacacacaccccctgccccatcccatccccctctcccgagctattttcttgctgtggcctctggtgcccttgagttggtctccccggctgctctgcgggggcttcactggcttcggagtgagcgcgaagtgctggtgagcagtgggcctgtgattggatgggaagatgtgcatccgtggtcaaaagtcagctgccagccctgcggaaccagagcctcaggctgggatggggaggcctccctgcttccacctgcatggtgggcatggcctggcttacaccaaaggctttgacggtttctccaagtaaggatctgcaaatcttgaatcgtcctcaaaatgacgaagcttgaattgtcctcaagatggatgtgaatcttacattccttttcatcatttcctttgtaaaaatgacgagtgctgggtttttgttttaagaagcattatgaaggccagacttactcatttttctcccccaagtgagctgcaagaggcccctgttaggcccctgtttcctgagcagtgatgtgctgctcttcttggtggggctttgggctgggaggggaaggcgggtcagagatgggggacctgtggctgccatgcaggagcccctgcgtcatctcgttggactctttaagggagtcaggaatagatgtatgaacagtcgtgtcactggatgcctatttagaaataaagtgtatgctgctgaattgga

SEQ ID NO: 185581 - protein, 1486 aa, Artificial Sequence
  derived and/or modified sequence
MAANVGSMFQYWKRFDLRRLQKELNSVASELSARQEESEHSHKHLIELRREFKKNVPEEIREMVAPVLKSFQAEVVALSKRSQEAEAAFLSVYKQLIEAPDPVPVFEAARSLDDRLQPPSFDPSGQPRRDLHTSWKRNPELLSPKEQREGTSPAGPTLTEGSRLPGIPGKALLTETLLQRNEAEKQKGLQEVQITLAARLGEAEEKIKVLHSALKATQAELLELRRKYDEEAASKADEVGLIMTNLEKANQRAEAAQREVESLREQLASVNSSIRLACCSPQGPSGDKVNFTLCSGPRLEAALASKDREILRLLKDVQHLQSSLQELEEASANQIADLERQLTAKSEAIEKLEEKLQAQSDYEEIKTELSILKAMKLASSTCSLPQGMAKPEDSLLIAKEAFFPTQKFLLEKPSLLASPEEDPSEDDSIKDSLGTEQSYPSPQQLPPPPGPEDPLSPSPGQPLLGPSLGPDGTRTFSLSPFPSLASGERLMMPPAAFKGEAGGLLVFPPAFYGAKPPTAPATPAPGPEPLGGPEPADGGGGGAAGPGAEEEQLDTAEIAFQVKEQLLKHNIGQRVFGHYVLGLSQGSVSEILARPKPWRKLTVKGKEPFIKMKQFLSDEQNVLALRTIQVRQRGSITPRIRTPETGSDDAIKSILEQAKKEIESQKGGEPKTSVAPLSIANGTTPASTSEDAIKSILEQARREMQAQQQALLEMEVAPRGRSVPPSPPERPSLATASQNGAPALVKQEEGSGGPAQAPLPVLSPAAFVQSIIRKVKSEIGDAGYFDHHWASDRGLLSRPYASVSPSLSSSSSSGYSGQPNGRAWPRGDEAPVPPEDEAAAGAEDEPPRTGELKAEGATAEAGARLPYYPAYVPRTLKPTVPPLTPEQYELYMYREVDTLELTRQVKEKLAKNGICQRIFGEKVLGLSQGSVSDMLSRPKPWSKLTQKGREPFIRMQLWLSDQLGQAVGQQPGASQASPTEPRSSPSPPPSPTEPEKSSQEPLSLSLESSKENQQPEGRSSSSLSGKMYSGSQAPGGIQEIVAMSPELDTYSITKRVKEVLTDNNLGQRLFGESILGLTQGSVSDLLSRPKPWHKLSLKGREPFVRMQLWLNDPHNVEKLRDMKKLEKKAYLKRRYGLISTGSDSESPATRSECPSPCLQPQDLSLLQIKKPRVVLAPEEKEALRKAYQLEPYPSQQTIELLSFQLNLKTNTVINWFHNYRSRMRREMLVEGTQDEPDLDPSGGPGILPPGHSHPDPTPQSPDSETEDQKPTVKELELQEGPEENSTPLTTQDKAQVRIKQEQMEEDAEEEAGSQPQDSGELDKGQGPPKEEHPDPPGNDGLPKVAPGPLLPGGSTPDCPSLHPQQESEAGERLHPDPLSFKSASESSRCSLEVSLNSPSAASSPGLMMSVSPVPSSSAPISPSPPGAPPAKVPSASPTADMAGALHPSAKVNPNLQRRHEKMANLNNIIYRVERAANREEALEWEF

SEQ ID NO: 185582 - DNA, 6841 bp, Artificial Sequence
  derived and/or modified sequence
gccggagggcgcccgaggggccccgggccgcggcgctcagggcccgggcggccggcggcggccccggggctggggggagtccagcccggatattgagtgcagccattgagaaaagccaaactcttgtgtgtgcgcgtctcgatagcccccaagatggccgccaatgtgggatcgatgtttcaatattggaagcgatttgatctacggcgactccagaaggagcttaattccgtcgcttctgagctgtctgcacggcaggaggagagtgaacattctcataaacatttaattgaactccgccgggaatttaagaaaaatgtacctgaggaaatcagagagatggtggctcctgtattaaaaagcttccaagccgaggtggtggcccttagtaagagaagtcaggaggcggaggctgcttttctgagtgtttacaagcaattaattgaagcaccagaccccgtgcctgtgtttgaggcggcacgcagcctagacgacagactgcagccccccagctttgaccccagtgggcagccccggcgagacctccacacttcgtggaagaggaaccccgagctcctcagccccaaagagcagagagaggggacgtcgcctgccgggcccacgctgaccgagggaagccgcctcccaggcattcccgggaaagccctcctgacagaaaccttgctgcagagaaatgaggcggaaaaacaaaagggccttcaagaagtacagatcactttggcggccagactgggggaggcagaggagaaaatcaaagtcctacattcagcgctaaaggctacgcaggcagagctgctagagctgcggcggaagtacgacgaggaggcagcatccaaggcagatgaagtcggcctgatcatgaccaacctggagaaagctaatcagcgagctgaggctgcccagcgggaggtggaaagtctccgggaacagctggcctctgtcaacagctccatccgcctggcttgctgctctccccaggggcccagtggggataaggtgaacttcactctgtgctcgggccctcggctggaggccgcgctggcctccaaggacagggagatcctgcggctgctgaaggacgtgcagcacctccagagctcactgcaggagctggaggaggcatccgccaaccagatcgccgacctggagcggcagctcacggccaagtccgaggccatagaaaagctggaagagaagctccaggcccagtctgactatgaggaaattaaaacggagctgagcatcctgaaagccatgaagctggcctccagcacctgcagcctcccccagggcatggccaagcctgaagactcactgcttattgcaaaggaggccttcttccccacgcagaaattccttctggagaagcccagcctcctggccagccctgaggaagacccatcagaggacgattccatcaaggattcactgggcacggagcagtcctacccctcccctcagcagctcccacctccaccagggccagaagaccccctgtctcccagccccgggcagcccctgctgggccccagcttggggcctgacggcactcggactttctcgctgtcccccttccccagcctggcatcaggggagagactgatgatgcccccagccgccttcaagggagaggcgggcggcctgctggtgttccccccagccttctatggcgccaagccccccacagcccctgccaccccggcccctggccctgagccactgggcggtcctgagcccgcggatggtggtgggggcggagcggcggggcccggggcagaggaggagcagctggacacggcagagatcgccttccaggtgaaggagcagctgctgaaacacaacatcgggcagcgggtgtttgggcattacgtgctggggctgtcgcagggctcggtcagcgagatcctagcccggcccaagccctggcgcaagctcacggtgaagggcaaggagcccttcatcaagatgaagcagttcctgtcggatgagcagaatgtactggcgctcaggaccatccaagtgcggcagcgaggcagcatcaccccgagaatccgcacgcctgagacaggctcagacgacgccatcaagagcattctagagcaggccaagaaggagatcgagtcgcagaagggcggcgagcccaagacctcggtggccccgctgagcatcgccaacggcacgacccccgccagcacctcggaggacgccatcaagagcatcctggagcaggcacgccgtgagatgcaggcgcaacagcaggcgctgctggagatggaggtggcgcccaggggccgctcggtgcccccctcgcccccggagcggccatcactggccaccgcgagccagaacggggccccggccttggtgaagcaggaggagggcagcgggggccccgcgcaggcgccgctcccggtcctgtcccccgccgccttcgtgcagagcatcatccgcaaggtcaagtccgagatcggcgacgccggctacttcgaccaccactgggcctccgaccgcggcctgctcagccgcccctacgcctccgtgtcgccctcgctgtcctcctcctcctcctctggctactctggccagcccaacggccgcgcctggccccgcggggacgaggcccctgtgccccccgaggacgaggcggcggcaggggcggaggacgaaccccccaggacgggcgagctcaaggctgagggcgcgacggccgaggcgggcgcgcggctgccctactacccggcctacgtgccgcgcaccctgaagcccaccgtgccgccgctgacccccgagcagtacgagctgtacatgtaccgtgaggtagacacgctggagctcacccgccaggtcaaggagaagctggccaagaacggcatctgccagaggatcttcggggagaaggtgctgggcctgtcacagggcagcgtgagcgacatgctgtcccggccgaagccatggagcaagctgacgcagaaggggcgggagcccttcatccgcatgcagctgtggctctctgaccagctcggccaggcagtgggccagcagcctggtgcctcccaggccagtcccacagaaccaaggtcctcaccatccccaccccccagccccacagagcctgagaagagctcccaggagccgttgagcctgtccctggagagcagcaaggagaaccagcagccagagggccgctccagctcctcgttgagcgggaagatgtactcaggcagccaggccccagggggcatccaggagatcgtggccatgtcccccgagctggacacgtactccatcaccaagagggtgaaggaggtcctcacagacaacaatctagggcagcggctgtttggggaaagcatcctgggtctgacacagggctccgtgtctgacctgctgtcccggcccaaaccctggcacaagctgagcctgaaggggcgggagccttttgtccgcatgcagctgtggctcaatgacccccataacgtggagaagctgagggatatgaagaagctggagaagaaagcctacctgaaacgtcgctatggcctcatcagcaccggctcagacagtgagtccccggccacccgctcagagtgccccagcccctgcctgcagccccaggacctgagcctcctgcagatcaagaagccccgggtggtgctggcacccgaggagaaggaggcactgcggaaggcctatcagctggaaccctacccctcgcagcagaccatcgagctcctctccttccagctcaacctcaagaccaacaccgtcatcaactggttccacaactacaggtcccggatgcgccgggagatgttggtggaggggacccaggatgagccagaccttgatccaagcgggggtcctggaatcctaccgccaggccactcccacccagaccccaccccgcagagccctgactctgagactgaggaccagaagccaaccgtgaaggaactggagcttcaggagggccctgaggagaacagcacacccctgaccacccaggacaaggcccaagtgaggatcaagcaggaacagatggaggaggatgctgaggaagaggcaggcagccagccccaggactcaggggagctggacaaaggccaaggtccccccaaagaggagcatcccgaccctccgggtaatgatggactcccaaaagtggctcccgggcccctccttccaggtggatccaccccagactgtccctcacttcatccccaacaggagagtgaggccggggagcgacttcacccggaccctttaagttttaagtcagcctcagagtcctcacgctgcagcctggaggtgtcactgaactcgccctcggccgcctcctcaccaggcctcatgatgtctgtgtcacctgtcccctcctcctcagctcccatctccccatccccacctggcgccccccctgccaaagtgccgagtgccagccccactgctgacatggctggagccttgcaccccagtgccaaggtgaaccccaacttgcagcggcggcatgagaagatggccaatctgaacaacatcatttaccgactagagcgggctgccaatcgggaggaggccctggagtgggagttctgaaggcagggtgagggggcaagggacataccctggtaactaccttccttctcgcacttactctcctcaacaggatggggtaagggagggaggaactcaaccatcaaaatgtggacagcaatgttatgccgtttacgttttttgttgtaatcctagttctatgaagctgtgtgagcaggtgggtcaaatgccattgcctccacttttctgcacccccctgctcctcttcaccctgacccctctgcaggaggcagaagcaaaatggcaccacatattcacctgaaaactccaaactcttttagaaaaataaataaatatttatagacctcttttagatattttaataaaggatcctttggaatttatcccagctgatgctgttttgatattacagagagttataaaatcaggatgctgtcacaactgttgcgaagtatacactgaagttgtgtcgtttttgccactagatgagattaaaagaagacaattattcaaagccatcacaaaacactataagactgaccaaaatttagataacctttgaaccacgatttttttccacatctgtctgtgagacacagcgcaatgctactgcccttccagaaactgtgctaaaaagagaaagtccaaaagactctaaacaaaaacctcgacgccgttgaggatgtgtttcattctggtggtctgttttgcaagcttgataacagaatgtccgtgccattgtaaatgttgtagagatgtgggccgtggcccaaccgtcctatatgagatgtagcatggtacagaacaaactgcttacacaggtctcactagttagaaacctgtgggccatggaggtcagacatccatcttgtccatctataggcaagaagtgtttccagatcctttggaaaggtgggcatggggcaggtgcttggagagtggcgtttgagccagagcgaccccatttcccgtgtgaaccataggcacaacccaggaagtttccccacttgtaggagtgtgggtattccagagcaagactgtggccaccatcttcccctcttggtgttttccgaaagtgacagtgttggtcatcccatgaccactgaagcttagtaaccagcgccaaaaagtagattcatcaaactagagaccccagctccccttctcgccatcttctttctcaagttgaccgtggtgctgtttctggaaggcatctgcaactccaagtccatgcagaactctggaaggccaagttcatcgcagcatgttcaccatatcccagcctccaaatctatcctcctaccttccaacgcatgacctgttggggagcagagacttaacccccaactcagaggaacccttcctccagcgtctttggcatggtttctagggtgagagttcccaatttggatagaacggccaccatattggttactgaatctctctcccttgtttttattacgtttcctttttcaaactgtccatgggaaggctgaattgagtgactccccagaatgaagatgagaaggtgaatataatcaatgccaatgtaatgccagcgggtgagatggccgatggaggtttcaaagatgtagctagcattttgaaaccatatgggcaaaacccggcaaccagaaggggacagataaggaccgttccagaaatcccaactctcacacccagcccaggctgcagtctccacaccaaacagtcaacaaaacacaaaccctgaaggaaaaccttttccatacacccaggctatgcattgaagagttttccactgtatacatttttatccagatgaaggtatttttatattttgacaataggaaacagtgaccattttcagagtaatcaaatctggaacaaatgaaacatcttttagccaccaccaccctgttgcaattaagacaaccgtgggggaacacaccactttttactgttgaaaccaacacaacgttgaaatccaggcttatacgcagactccgattcctagagaactaaatttggctttagtgtgacgggatttgattaagcacttagtatagtcttttgaacacggaaatcctgttgtacttaaagctagcggacccgtgaacaactttgtcaggttcacgtcctataacggttaaaaaacacacacacacatacacaaaccgtttctatgagagattgatgaactttgtttaaaattttaaaaaaaggaacacgttctgtaaacgagtcgctaaatacagaattgtataat

SEQ ID NO: 185583 - DNA, 4461 bp, Artificial Sequence
  derived and/or modified sequence
atggccgccaatgttggctcgatgtttcaatattggaaaagatttgatctcaggaggctacagaaagagctgaacagtgtagcctccgaactatcagccaggcaggaagaatcagagcattcccacaagcatctgatcgaactgaggagagagttcaagaagaacgttcccgaagaaatacgggaaatggtggccccagtgctgaagtctttccaagcagaggtcgtagctttgtcaaaacgtagtcaggaggcagaggcagccttcttatccgtatacaagcaactgattgaggcccccgacccggtgcccgtatttgaggccgcaagaagcctagatgaccgtcttcagccgccatctttcgatcccagtggccagcctcgtcgtgacctgcacaccagttggaaaagaaaccctgaattgctgtcccccaaagaacagcgcgaaggaacatctcctgctggacctaccctgactgaaggcagcaggttacccggaatcccagggaaggctttactcacagaaaccctattgcagcggaacgaagccgagaagcagaagggcctgcaggaagtgcagatcacattagcggccaggctgggcgaggcggaggagaagatcaaagtgctgcacagcgcactcaaagcaacgcaagctgaactgctggagctgagacgaaagtacgacgaggaagcagcttcaaaagcagacgaggtagggttgattatgacaaaccttgaaaaggcgaatcagagagcagaggctgcacagagggaagtcgagtctctacgggagcagctcgccagtgttaacagctctattaggctggcatgctgttcaccacagggccctagtggggacaaagtcaacttcacgttgtgcagtgggccaaggctcgaagcagcgcttgcatccaaggaccgggaaattctcagattgctgaaagatgtacagcacctgcagtcttcccttcaagaactggaagaggcttccgccaaccagatcgccgacctcgagagacagctaactgccaagtcagaggccatcgaaaagctagaggagaagcttcaagcccagagtgattacgaagaaattaaaactgagctttcaatcctgaaagctatgaagttggcatctagtacctgctccctgcctcaaggaatggccaaacccgaagactccctgctcatcgctaaagaagccttctttcccactcagaaattccttttagagaagccttcactgctggcatctcccgaggaggaccctagcgaggatgatagcattaaggacagcctcggcactgagcagtcctaccccagcccacagcaacttccaccgccccccggcccggaggatccccttagtccatcgccaggtcaacccttactcggaccctcattaggacccgatggaacccgtactttttcactttccccttttccctccctcgccagcggggaacgcctaatgatgccaccagcagcttttaaaggtgaagctggagggctcctggtgtttccgcctgcgttctacggagcgaagcctccgacagcacctgctacgccagcccctggccctgagccacttggcggacccgagcctgcagacgggggcggcggaggtgcagccggtccaggggccgaggaggagcagctggacaccgccgagatcgctttccaggttaaagaacaactgttaaagcacaatataggacaaagggtcttcgggcattacgtgctgggattgtcccagggttcagttagcgagatcctcgccagacctaagccgtggaggaagctcacagtgaagggtaaggaaccttttataaagatgaagcagttcctgagcgatgaacaaaatgtgcttgccctaagaactatccaggttagacagcgcggttccatcacccctcgcatcagaaccccagagaccggttccgacgacgctatcaagtcaatcctggagcaggctaaaaaggagattgagtcccagaagggcggggagcctaaaacatctgtggcacctctgtcaatcgccaacggaacaacgccagccagcacttctgaagatgccattaaatctattctagaacaggcacggagagaaatgcaagcgcagcagcaagcgttgttagagatggaggttgctcctcgtggcagatcagttccgccatcaccccctgagcggccttctctagccaccgctagtcagaatggggcccccgcactggtcaaacaagaggaaggcagcggaggccccgcacaggcacccctccccgttctctcacctgccgctttcgtccagtccattataaggaaagtgaagtctgagattggggacgccggctacttcgaccaccattgggcctccgatcgtggactcctgagtaggccttacgcctccgtaagccccagtttgagttcctcctcctcaagtggctactcaggccaacccaatggccgcgcctggccccgtggtgatgaagctcctgtccctcccgaggacgaggctgctgccggggctgaagacgagccccctcgcacgggcgagttaaaagccgagggcgccaccgcagaagccggggcacgccttccttattaccccgcatatgtcccccggactctcaaacctactgtgcccccactgacccccgaacaatacgagctttatatgtatagagaggtagatactctggagctaacgcgacaggtcaaagagaagctggcgaagaacggcatttgtcagaggattttcggggagaaggtcctaggactgtctcaggggtctgtttcggacatgttgagtagacccaaaccctggtccaaactgacccaaaaggggagggaaccctttatccgcatgcagctctggctaagtgaccaactaggccaggctgtgggacagcaacctggcgcatcacaggctagtccaactgagcctcgttcatctccgagccccccccctagtccaacggagccagagaagtcatcccaggagcctttgagcctatccctggaaagttccaaggaaaatcagcagccggagggcaggtcctcctccagcctgtccggtaagatgtactccggatcacaggcacccgggggtatacaggagatcgtggccatgtctcccgaactggatacttattcgattaccaagagggtcaaggaggtactcacagacaacaacctgggacagaggctttttggggagtccatcctcggactgacccagggttccgtgagtgatctgttatcccgacctaaaccctggcataagctgtcattgaaaggacgggaacccttcgtcagaatgcagctctggttaaatgatcctcataatgtggaaaagctccgtgacatgaagaagcttgaaaaaaaagcatacttgaagagaaggtacggtctcattagtactggtagtgattccgaaagtccagccacacgcagcgagtgcccaagtccctgcctccagccccaagacttgtcgctgctgcaaattaaaaaaccccgcgtggtgctagcacccgaagagaaggaagccttgaggaaagcctatcagctagagccatacccatcacagcagactattgagctgctgagcttccagctgaacctgaagacgaatactgtaattaactggttccacaactacagaagccggatgcgcagggagatgctggtcgaggggacacaagacgagccggatctggacccttccgggggccccggaatcttacccccaggtcatagccatccagaccccacaccccagtcacccgacagtgaaacggaagatcaaaagccgacagtgaaggagttggaactccaagaaggacctgaggagaattcaacgcccttgacgactcaggataaggcccaggtacgtattaagcaagagcagatggaggaagatgccgaggaggaggccggttcccaacctcaagactccggtgagttggataagggccagggcccaccgaaggaggaacacccagatccgcccggcaacgacgggcttccaaaggtggcgcctggccccttactgcccggaggctcaacccccgactgcccgagcctccatcctcaacaggaaagcgaggcaggcgaacgactgcatccagaccccctgtctttcaagtctgcttctgagtccagccgctgttcattggaagtgtcactcaattccccgagcgccgcttcatccccaggcctcatgatgagcgtttcccccgtcccatcaagcagtgcccccatttccccatccccccccggtgccccacctgccaaggtgccatccgccagtcccaccgctgacatggccggtgccctccaccctagcgcgaaagtaaaccccaacctgcagcggcggcacgagaaaatggcaaacctaaacaatatcatctaccgtgtcgaaagggctgcgaatcgcgaagaagccctggaatgggaattctag

SEQ ID NO: 185584 - DNA, 4461 bp, Artificial Sequence
  derived and/or modified sequence
atggccgccaacgtgggctccatgttccagtactggaagagatttgacctgcggcggctgcagaaggagctgaacagcgtggccagcgagctgagcgcccggcaggaggagagcgagcacagccacaagcacctgattgagctgcggcgggagttcaagaagaatgtgcctgaggagatccgggagatggtggcccctgtgctgaagagcttccaggccgaggtggtggccctgagcaagaggagccaggaggccgaggccgccttcctgtctgtgtacaagcagctgattgaggccccagaccctgtgcctgtgtttgaggccgcccggagcctggatgaccggctgcagccccccagctttgaccccagcggccagccccggcgggacctgcacacctcctggaagagaaatcctgagctgctgagccccaaggagcagcgggagggcaccagccctgctggccccaccctgacagagggcagccggctgcccggcatccctgggaaggccctgctgacagagaccctgctgcagagaaatgaagctgagaagcagaagggcctgcaggaggtgcagatcaccctggccgcccggctgggggaggccgaggagaagatcaaggtgctgcacagcgccctgaaggccacccaggccgagctgctggagctgcggaggaaatatgatgaggaggccgccagcaaggcagatgaggtgggcctcatcatgaccaacctggagaaggccaaccagagagctgaggccgcccagcgggaggtggagagcctgcgggagcagctggcctctgtgaacagcagcatccggctggcctgctgcagcccccagggccccagcggggacaaggtgaacttcaccctgtgcagcggcccccggctggaggccgccctggccagcaaggaccgggagatcctgcggctgctgaaggatgtgcagcacctgcagagcagcctgcaggagctggaggaggccagcgccaaccagattgctgacctggagcggcagctgacagccaagtctgaggccatcgagaagctggaggagaagctgcaggcccagagcgactatgaggagatcaagacagagctgagcatcctgaaggccatgaagctggccagcagcacctgcagcctgccccagggcatggccaagccagaggacagcctgctgattgccaaggaggccttcttccccacccagaagttcctgctggagaagcccagcctgctggccagccctgaggaggaccccagtgaagatgacagcatcaaggacagcctgggcacagagcagagctaccccagcccccagcagctgcccccacctcctggccctgaggaccccctgagccccagccctggccagcccctgctgggccccagcctgggcccagatggcaccaggaccttcagcctgagccccttccccagcctggccagcggggagcggctgatgatgcctcctgctgccttcaagggggaggccggcggcctgctggtgttccccccagccttctacggggccaagccacccacagccccagccaccccagcccctggccctgagcccctgggcggccctgagccagcagatggcggcggcggcggggccgccggccctggagctgaggaggagcagctggacacagctgagatcgccttccaggtgaaggagcagctgctgaagcacaacatcggccagagggtgtttggccactacgtgctgggcctgagccagggctctgtgtctgagatcctggcccggcccaagccctggaggaagctgactgtgaagggcaaggagcccttcatcaagatgaagcagttcctgagtgatgagcagaatgtgctggccctgcggaccatccaggtgcggcagaggggcagcatcaccccccgcatccgcaccccagagactggaagtgatgatgccatcaagagcatcctggagcaggccaagaaggagattgagagccagaagggcggggagcccaagacctctgtggcccccctgagcatcgccaacggcaccaccccagccagcaccagtgaagatgccatcaagagcatcctggagcaggcccggcgggagatgcaggcccagcagcaggccctgctggagatggaggtggccccccggggccgctctgtgccccccagccccccagagcggcccagcctggccacagccagccagaatggagccccagccctggtgaagcaggaggagggcagcggcggccctgcccaggcccccctgcctgtgctgagccctgctgcctttgtgcagagcatcatcaggaaggtgaagtcagaaattggagatgctggctactttgaccaccactgggccagtgaccggggcctgctgagccggccctatgcctctgtgagccccagcctgagcagcagcagcagcagcggctacagcggccagcccaacggccgggcctggcccagaggagatgaggcccctgtgcccccagaagatgaggccgccgccggggctgaagatgagccccccaggactggagagctgaaggccgagggcgccacagctgaggccggggcccggctgccctactacccagcctacgtgcccaggaccctgaagcccaccgtgccccccctgaccccagagcagtatgagctgtacatgtaccgggaggtggacaccctggagctgacccggcaggtgaaggagaagctggccaagaatggcatctgccagaggatctttggagagaaggtgctgggcctgagccagggctctgtgtctgacatgctgagccggcccaagccctggagcaagctgacccagaagggccgggagcccttcatccgcatgcagctgtggctgagtgaccagctgggccaggccgtgggccagcagcccggggccagccaggccagccccacagagcccaggagcagccccagccccccacccagccccacagagcctgagaagagcagccaggagcccctgagcctgagcctggagagcagcaaagaaaaccagcagcctgagggccgcagcagcagcagcctgagcggcaagatgtacagcggcagccaggcccctgggggcatccaggagatcgtggccatgagccctgagctggacacctacagcatcaccaagagggtgaaggaggtgctgacagacaacaacctgggccagaggctgtttggagagagcatcctgggcctgacccagggctctgtgtctgacctgctgagccggcccaagccctggcacaagctgagcctgaagggccgggagccctttgtgaggatgcagctgtggctgaatgacccccacaacgtggagaagctgcgggacatgaagaagctggagaagaaggcctacctgaagagaagatatggcctcatcagcacaggcagtgacagcgagagccctgccaccaggtctgagtgccccagcccctgcctgcagccccaggacctgagcctgctgcagatcaagaagccccgggtggtgctggcccctgaggagaaggaggccctgaggaaggcctaccagctggagccctaccccagccagcagaccatcgagctgctgtccttccagctgaacctgaagaccaacacagtcatcaactggttccacaactaccgcagcaggatgaggcgggagatgctggtggagggcacccaggatgagccagacctggaccccagcggcggccctggcatcctgcccccaggccacagccacccagaccccaccccccagagcccagattctgaaacagaggaccagaagcccaccgtgaaggagctggagctgcaggagggccctgaggagaacagcacccccctgaccacccaggacaaggcccaggtgcgcatcaagcaggagcagatggaggaggatgctgaggaggaggccggcagccagccccaggacagcggggagctggacaagggccagggcccccccaaggaggagcacccagaccccccaggaaatgatggcctgcccaaggtggcccctggccccctgctgcccggcggcagcaccccagactgccccagcctgcacccccagcaggagagcgaggccggggagcggctgcacccagaccccctgtccttcaagagcgccagcgagagcagccgctgcagcctggaggtgtccctgaacagccccagcgctgccagcagccctggcctgatgatgtctgtgtcccctgtgcccagcagcagcgcccccatcagccccagccccccaggggcccccccagccaaggtgcccagcgccagccccacagctgacatggccggggccctgcaccccagcgccaaggtgaaccccaacctgcagaggagacatgagaagatggccaacctgaacaacatcatctacagagtggagagagctgccaaccgggaggaggccctggagtgggagttctag

SEQ ID NO: 185585 - DNA, 4461 bp, Artificial Sequence
  derived and/or modified sequence
atggccgccaacgtgggcagcatgttccagtactggaagcggttcgatctgagaaggcttcagaaagaactgaactcagttgcgtcggagctgtcagctcgccaagaagagagcgaacattcccataagcacctgattgagctccggagagagtttaaaaagaacgtccccgaagagattagggaaatggttgcccccgtcctgaagagtttccaggcggaggtggtggccctgtcgaagcgctcccaagaggccgaagccgcttttctgtccgtctataagcagctgatcgaggcccccgaccccgtcccggtgttcgaggctgcccgatccctggacgatcggctgcagccaccctcgttcgatccgagtggacaaccgcggagagatctccacacgagctggaaaaggaatcccgagcttcttagtcccaaggaacagcgcgagggcacgtcacctgctgggcctaccctgaccgaagggtctcgactcccaggaattcctggtaaagccctgctgacagaaaccctgttgcagcggaacgaagctgaaaagcagaaaggactccaggaggttcagattacactggctgctaggctaggcgaggcggaggaaaagattaaagtgttgcatagcgccttgaaagcgacccaggccgaactgcttgaactcaggaggaagtatgacgaagaagctgcatcaaaggcagacgaagttggactgattatgacgaatttagagaaggcaaatcagagggctgaagcagcccaacgtgaagttgaatctctccgggagcagcttgcatccgtgaatagcagcatcaggctcgcctgctgttctcctcagggtcctagcggggacaaagttaatttcacactgtgttctggaccgaggctggaagcggcactcgccagtaaggaccgagagattctgcgacttttaaaggacgtgcaacacctgcagagctccctgcaagaattagaagaagcatctgctaaccagattgctgaccttgagaggcaactgactgcaaaatccgaagcgatcgagaagctcgaagagaagctgcaggcccaatctgactacgaagaaattaagacggagctttccattctgaaggctatgaagctcgccagctcaacatgctcgctcccccaggggatggcaaagcccgaggattccctcctgatcgcaaaggaggcattctttcctacccagaaatttctcctggaaaagccatctcttcttgcaagccctgaggaggacccctctgaagatgactcaatcaaggattccctgggtacagagcaaagttatccctcgcctcaacaactcccccctccaccaggtccggaagacccactgagcccgagccctggacaaccattgctgggaccttctttggggcctgacggaacccgtacctttagtctctctcctttcccaagcctcgcctctggggaacgtctgatgatgcctccagctgccttcaaaggagaggcagggggtctactcgtattcccacccgctttttatggagccaaaccgcccacagcccccgccacccctgctccgggtcctgaaccgctggggggacctgagcccgctgatggtgggggaggaggggctgccggcccaggggccgaagaggaacaattggacaccgccgagattgccttccaggtcaaagagcagctcctcaagcacaatatcggacagcgcgtgtttggtcactacgttttgggactgtcccaagggtcagtgagtgaaatattagctcgcccgaagccttggagaaagcttaccgtcaagggcaaagagcccttcatcaaaatgaagcagtttttgagcgacgaacagaacgtattagcgctacggactatccaggttaggcagagggggtcgatcacaccccgcattagaacacccgaaactggttctgacgatgccatcaagtccatactggagcaggctaaaaaagaaattgagtctcagaagggcggggaacctaagactagcgtcgcaccattgtccatcgcgaacgggacaacccccgccagtacctccgaagatgccatcaaatctatcctggagcaggctaggcgcgagatgcaggcacagcaacaggccttactggagatggaagtggcccctcggggtcgatctgtaccacccagtccgccggagcgtccctctctggctacagcctcgcagaacggcgctcccgccctggtgaaacaggaggagggctctggcggcccggctcaagcaccgttgcccgtcctctctcccgctgcattcgtgcaatcaatcattcgcaaagttaaaagtgagattggagacgccggatactttgaccatcactgggcatccgatagaggactactgtcccggccttacgcaagcgtttcgccaagcctctcttcaagtagtagctcgggctactcgggccagcccaatggaagagcctggccccgcggggacgaggcccccgtgcctcctgaagacgaagcagccgcaggggccgaggatgaaccccctagaacaggggagctgaaggctgaaggggctacagctgaagccggggcgcgcctcccctactatcccgcctacgtgccacgcactctgaaaccgacagtgcctccactgacaccagaacaatacgaactctacatgtaccgcgaggtggatacccttgagctgacacggcaagttaaggaaaagctggcaaagaatgggatctgtcaaaggatctttggcgagaaagtgctagggttaagtcagggctctgtttctgacatgctctccagacctaaaccatggtctaagcttacacagaagggtagggagcctttcattcgcatgcaactctggctcagcgatcagttgggtcaggctgtagggcagcagccgggcgcatcccaggcctctcccaccgagccaaggagcagcccctcaccaccccctagtcctactgagccagaaaaaagcagccaggaacctctgtctctgtccctagaaagctcaaaggaaaaccagcaaccagaaggcaggtccagctcatctctgtcaggcaaaatgtattccggatcgcaggctcctggggggattcaggaaatcgtcgcgatgtctcccgagcttgacacatactccataaccaaacgggtgaaagaggtgctgaccgacaataacctcggacagcggttattcggggaatctatcctcgggttgactcagggatccgtgtcggatctcctgtcacgccctaagccttggcataagttgagtttgaaaggtcgcgagccttttgtccgcatgcagctatggctgaatgacccccataatgtggagaagttgcgcgatatgaagaagcttgaaaagaaggcctatttgaagaggcgttatggccttatcagcacagggtccgactccgagagccccgctacaagaagtgaatgccctagcccttgcctgcagccacaagatttgtctctgttgcagatcaagaagccacgcgttgtcctggccccagaggagaaggaagccttacgaaaggcataccaattggaaccatacccctctcagcagaccattgagctgctgtcgtttcagctgaatctgaaaaccaataccgttattaattggtttcataattatcgatcaagaatgcggcgtgagatgctcgtggaaggcacacaagatgaacccgacttagatccatctggcggacccgggattcttcctccaggccactctcaccccgacccaaccccacaatcccccgattctgagacggaggaccagaagcctactgtcaaggaattggaacttcaggagggaccagaagaaaactcaactccgctgacgactcaggataaggcgcaggtgcgaatcaaacaggaacaaatggaggaagacgctgaggaagaggccggctctcagccacaggacagtggggagctggacaagggccaaggcccacccaaagaggagcatccagaccctcctggtaacgatgggctccccaaagtagcccctgggccactcctccccgggggctcaacccccgactgccccagccttcacccacaacaagaaagcgaggccggagaacgacttcaccctgacccactcagttttaaaagtgccagcgagtcttcccgctgttcgctggaggtgtcactgaactcccctagtgcggctagtagccctggcctcatgatgagcgtgtcgcctgtaccatccagcagtgcgcccattagcccaagcccacccggcgcccctcctgccaaagtgccttccgcgagccccactgcggacatggccggcgccctacacccatcagcaaaggtcaacccgaacctacaacggaggcatgagaaaatggccaacctgaataatatcatttatcgagtcgagcgcgcagcaaaccgagaggaagcactagaatgggaattctag

SEQ ID NO: 185586 - DNA, 4461 bp, Artificial Sequence
  derived and/or modified sequence
atggccgcaaacgtgggcagtatgttccaatattggaaacggtttgatctgcggagattgcagaaagaactaaatagcgtggcctctgaactctccgccagacaggaggagtccgagcacagtcacaaacatttgatcgaactccgaagggagtttaaaaagaacgtgccagaggagatcagggagatggtggcccctgtcctgaagagtttccaggctgaggtggtggccctgtctaagcgatcacaggaggccgaggctgccttcttaagtgtgtacaaacagctgatcgaagctccagaccctgtgccagtgtttgaggctgccagaagcctagatgacagactgcagccgccttccttcgatccctccggccaaccccgacgggacctgcacacatcttggaaaaggaatcccgagctcctgagcccaaaagaacaaagagaagggacaagtccagctggacctacgttgacagagggctctagacttcctggcattcccggaaaggcactgctgacagaaactttgctccaacggaacgaagccgaaaagcagaaggggctgcaagaggttcaaatcacgctggcagctagattgggcgaggccgaggaaaaaatcaaggtcttacattctgcattaaaggcgacacaagcagagctgctcgaactcaggcggaagtatgacgaggaggcggctagtaaggccgacgaggtgggtctcatcatgacgaacctcgagaaggccaatcagcgcgcagaagccgcacagcgggaggtggagagtctgagggaacagctggcctcagtgaactcctccatccgccttgcttgttgctctccacaaggcccttctggagacaaggttaattttacactgtgctctggaccacgactcgaggctgcccttgcctccaaagatcgcgagatccttaggctgttgaaggacgtgcagcacttacaaagcagcctccaggagcttgaggaggctagcgctaaccagattgccgacctggagcgtcagttgacggccaaatctgaggctattgagaagcttgaggagaagctgcaggcccaaagcgattacgaggaaatcaaaacggagctaagcattctaaaagccatgaaattggcatcttcgacatgctctctcccacagggcatggcaaagcccgaggactccttgctcatcgcaaaggaagctttttttccaacacaaaaatttctccttgaaaagcctagcctactggctagtcccgaggaggaccccagcgaagatgactccattaaagactctctgggcacagagcagtcctatccttcgccacagcagcttcctcctcctccaggaccggaggaccccctctccccgagccccggacaaccactcctcggacctagtctggggccagacggcactcggaccttcagtctgagtccattcccatcactcgcttcaggggagcggctgatgatgccacctgccgcattcaagggagaggccggtggattgctggtcttccccccagccttttatggagctaagccccctactgctcctgctaccccagccccaggccctgaacctctgggtggtcccgagccggcagacggaggaggaggtggcgctgctggacctggtgccgaggaagaacagcttgatactgctgagatcgcattccaagttaaggaacagttattgaaacacaacatcgggcagcgggtcttcggacactatgtcttaggactttctcaaggatccgtcagcgaaatcctggcacgtccaaaaccctggagaaaactaaccgtgaagggtaaggaaccctttataaaaatgaagcagttccttagcgacgagcaaaacgttctggccctgcgcaccattcaagttcgacagcggggtagcataactcctcggattcgcacaccagagaccggctctgacgatgccatcaaaagtattctcgagcaagcaaagaaagagattgagagccagaagggcggagaacccaagacaagcgtcgctccgctcagtattgctaacggaactacgccggcatccacatctgaggatgctattaaaagcatcttagaacaggcccgtcgcgagatgcaggcacagcagcaggcactactggaaatggaagtcgcccctagaggcaggagtgtgccaccctcaccacccgagagaccctccttggccacggcttcccagaatggagcacccgcattagtaaaacaggaggaagggagcggtggccctgcacaggcccctctgcccgtcttgagccccgctgcatttgtccagagcatcatccgcaaagtgaagagcgagattggggacgcaggatattttgatcaccactgggccagtgaccgcggactgctttctcggccatacgcaagtgtgagccccagcttaagttcaagttccagttcaggatatagcggccagcccaacggccgtgcatggccacgaggcgatgaggccccagtaccccctgaggacgaagcagcggctggggctgaggacgaaccaccaagaacaggcgaactgaaggccgagggcgcaacggcagaagccggagctaggttgccatactacccagcatacgtacccaggaccctcaagcctaccgtaccaccactaactcctgagcagtatgaactgtacatgtatcgggaggttgacaccctcgaactcactcgccaggtgaaagaaaaactggccaaaaacggaatctgccagaggatctttggagagaaagttctcggactctcgcaaggaagtgtgagtgatatgttatcacgaccgaagccatggagtaaactcactcagaagggacgcgagccctttattaggatgcagctctggttgagtgaccagttggggcaggccgttggccagcagcctggcgcaagccaggcgtctcctacagaaccaagaagctcccccagtcccccaccttctccaactgagcctgagaagtcttcccaggaacctctatctttgtccctggaatcgtcaaaagagaatcagcaaccagagggcaggtcaagcagttctctgagcggcaagatgtactccggttctcaggctcccggtggcattcaggaaatagtagcaatgagccctgagctggatacatactccattaccaaaagggtcaaggaagtactgacggacaataacctcggccaacggctgtttggagaaagcattctggggttgactcaaggctcagtctccgacctactctctcgcccaaaaccctggcacaagctcagtctaaagggcagggaacccttcgtacgaatgcagctgtggctgaacgatccacacaatgttgagaagctcagggacatgaaaaagcttgaaaagaaggcctacttaaaaaggagatacggcttgattagcaccggtagtgactccgaatcaccggcaactaggtcagaatgtcccagtccttgtttgcagccccaggacctcagccttctacaaatcaaaaaaccgagagtggtgctcgctcctgaagagaaggaagccctgcgcaaggcctatcagcttgagccatacccctcgcagcaaaccatagagctactgagttttcagctgaatctcaagactaatacggtcatcaattggttccacaactatagatctcgtatgcggcgagagatgctggtcgaaggaactcaggatgaacccgacctggacccttcaggcggacctggaatcctgccacctggacacagccatcccgatccaacccctcagagtcctgactctgagaccgaggatcagaagccaacagtaaaggaattggagctgcaggaggggcctgaggagaattcaacacccctgactacccaggataaggcccaggtgcgtatcaagcaggaacaaatggaggaggatgccgaagaggaggcagggtcacagccccaagatagtggcgaactcgacaaaggccaaggtcctcctaaggaggagcaccccgatcccccaggaaacgatggtctccccaaggtggctccagggccactgctgcccggaggtagcaccccggactgcccatctctgcaccctcagcaagagtcagaggctggggaacgattgcatcctgatcccctatccttcaaatctgcttcggagtctagccggtgtagccttgaagtgtccctgaattctccaagtgctgcctccagccccggactcatgatgtccgtctccccagtaccaagctcttcagccccaatcagtccctccccaccgggagcccctcctgcgaaggtgccgtcagccagccctacagccgatatggcaggggctctgcaccccagcgccaaggtgaaccctaatcttcagaggcgacatgaaaagatggccaatttgaacaacattatctaccgagtcgagcgtgccgcaaatagggaagaggcgctggaatgggaattctag

SEQ ID NO: 185587 - DNA, 6844 bp, Artificial Sequence
  derived and/or modified sequence
ggccggagggcgcccgaggggccccgggccgcggcgctcagggcccgggcggccggcggcggccccggggctggggggagtccagcccggatattgagtgcagccattgagaaaagccaaactcttgtgtgtgcgcgtctcgatagcccccaagatggccgccaatgtgggatcgatgtttcaatattggaagcgatttgatctacggcgactccagaaggagcttaattccgtcgcttctgagctgtctgcacggcaggaggagagtgaacattctcataaacatttaattgaactccgccgggaatttaagaaaaatgtacctgaggaaatcagagagatggtggctcctgtattaaaaagcttccaagccgaggtggtggcccttagtaagagaagtcaggaggcggaggctgcttttctgagtgtttacaagcaattaattgaagcaccagaccccgtgcctgtgtttgaggcggcacgcagcctagacgacagactgcagccccccagctttgaccccagtgggcagccccggcgagacctccacacttcgtggaagaggaaccccgagctcctcagccccaaagagcagagagaggggacgtcgcctgccgggcccacgctgaccgagggaagccgcctcccaggcattcccgggaaagccctcctgacagaaaccttgctgcagagaaatgaggcggaaaaacaaaagggccttcaagaagtacagatcactttggcggccagactgggggaggcagaggagaaaatcaaagtcctacattcagcgctaaaggctacgcaggcagagctgctagagctgcggcggaagtacgacgaggaggcagcatccaaggcagatgaagtcggcctgatcatgaccaacctggagaaagctaatcagcgagctgaggctgcccagcgggaggtggaaagtctccgggaacagctggcctctgtcaacagctccatccgcctggcttgctgctctccccaggggcccagtggggataaggtgaacttcactctgtgctcgggccctcggctggaggccgcgctggcctccaaggacagggagatcctgcggctgctgaaggacgtgcagcacctccagagctcactgcaggagctggaggaggcatccgccaaccagatcgccgacctggagcggcagctcacggccaagtccgaggccatagaaaagctggaagagaagctccaggcccagtctgactatgaggaaattaaaacggagctgagcatcctgaaagccatgaagctggcctccagcacctgcagcctcccccagggcatggccaagcctgaagactcactgcttattgcaaaggaggccttcttccccacgcagaaattccttctggagaagcccagcctcctggccagccctgaggaagacccatcagaggacgattccatcaaggattcactgggcacggagcagtcctacccctcccctcagcagctcccacctccaccagggccagaagaccccctgtctcccagccccgggcagcccctgctgggccccagcttggggcctgacggcactcggactttctcgctgtcccccttccccagcctggcatcaggggagagactgatgatgcccccagccgccttcaagggagaggcgggcggcctgctggtgttccccccagccttctatggcgccaagccccccacagcccctgccaccccggcccctggccctgagccactgggcggtcctgagcccgcggatggtggtgggggcggagcggcggggcccggggcagaggaggagcagctggacacggcagagatcgccttccaggtgaaggagcagctgctgaaacacaacatcgggcagcgggtgtttgggcattacgtgctggggctgtcgcagggctcggtcagcgagatcctagcccggcccaagccctggcgcaagctcacggtgaagggcaaggagcccttcatcaagatgaagcagttcctgtcggatgagcagaatgtactggcgctcaggaccatccaagtgcggcagcgaggcagcatcaccccgagaatccgcacgcctgagacaggctcagacgacgccatcaagagcattctagagcaggccaagaaggagatcgagtcgcagaagggcggcgagcccaagacctcggtggccccgctgagcatcgccaacggcacgacccccgccagcacctcggaggacgccatcaagagcatcctggagcaggcacgccgtgagatgcaggcgcaacagcaggcgctgctggagatggaggtggcgcccaggggccgctcggtgcccccctcgcccccggagcggccatcactggccaccgcgagccagaacggggccccggccttggtgaagcaggaggagggcagcgggggccccgcgcaggcgccgctcccggtcctgtcccccgccgccttcgtgcagagcatcatccgcaaggtcaagtccgagatcggcgacgccggctacttcgaccaccactgggcctccgaccgcggcctgctcagccgcccctacgcctccgtgtcgccctcgctgtcctcctcctcctcctctggctactctggccagcccaacggccgcgcctggccccgcggggacgaggcccctgtgccccccgaggacgaggcggcggcaggggcggaggacgaaccccccaggacgggcgagctcaaggctgagggcgcgacggccgaggcgggcgcgcggctgccctactacccggcctacgtgccgcgcaccctgaagcccaccgtgccgccgctgacccccgagcagtacgagctgtacatgtaccgtgaggtagacacgctggagctcacccgccaggtcaaggagaagctggccaagaacggcatctgccagaggatcttcggggagaaggtgctgggcctgtcacagggcagcgtgagcgacatgctgtcccggccgaagccatggagcaagctgacgcagaaggggcgggagcccttcatccgcatgcagctgtggctctctgaccagctcggccaggcagtgggccagcagcctggtgcctcccaggccagtcccacagaaccaaggtcctcaccatccccaccccccagccccacagagcctgagaagagctcccaggagccgttgagcctgtccctggagagcagcaaggagaaccagcagccagagggccgctccagctcctcgttgagcgggaagatgtactcaggcagccaggccccagggggcatccaggagatcgtggccatgtcccccgagctggacacgtactccatcaccaagagggtgaaggaggtcctcacagacaacaatctagggcagcggctgtttggggaaagcatcctgggtctgacacagggctccgtgtctgacctgctgtcccggcccaaaccctggcacaagctgagcctgaaggggcgggagccttttgtccgcatgcagctgtggctcaatgacccccataacgtggagaagctgagggatatgaagaagctggagaagaaagcctacctgaaacgtcgctatggcctcatcagcaccggctcagacagtgagtccccggccacccgctcagagtgccccagcccctgcctgcagccccaggacctgagcctcctgcagatcaagaagccccgggtggtgctggcacccgaggagaaggaggcactgcggaaggcctatcagctggaaccctacccctcgcagcagaccatcgagctcctctccttccagctcaacctcaagaccaacaccgtcatcaactggttccacaactacaggtcccggatgcgccgggagatgttggtggaggggacccaggatgagccagaccttgatccaagcgggggtcctggaatcctaccgccaggccactcccacccagaccccaccccgcagagccctgactctgagactgaggaccagaagccaaccgtgaaggaactggagcttcaggagggccctgaggagaacagcacacccctgaccacccaggacaaggcccaagtgaggatcaagcaggaacagatggaggaggatgctgaggaagaggcaggcagccagccccaggactcaggggagctggacaaaggccaaggtccccccaaagaggagcatcccgaccctccgggtaatgatggactcccaaaagtggctcccgggcccctccttccaggtggatccaccccagactgtccctcacttcatccccaacaggagagtgaggccggggagcgacttcacccggaccctttaagttttaagtcagcctcagagtcctcacgctgcagcctggaggtgtcactgaactcgccctcggccgcctcctcaccaggcctcatgatgtctgtgtcacctgtcccctcctcctcagctcccatctccccatccccacctggcgccccccctgccaaagtgccgagtgccagccccactgctgacatggctggagccttgcaccccagtgccaaggtgaaccccaacttgcagcggcggcatgagaagatggccaatctgaacaacatcatttaccgagtagagcgggctgccaatcgggaggaggccctggagtgggagttctgaaggcagggtgagggggcaagggacataccctggtaactaccttccttctcgcacttactctcctcaacaggatggggtaagggagggaggaactcaaccatcaaaatgtggacagcaatgttatgccgtttacgttttttgttgtaatcctagttctatgaagctgtgtgagcaggtgggtcaaatgccattgcctccacttttctgcacccccctgctcctcttcaccctgacccctctgcaggaggcagaagcaaaatggcaccacatattcacctgaaaactccaaactcttttagaaaaataaataaatatttatagacctcttttagatattttaataaaggatcctttggaatttatcccagctgatgctgttttgatattacagagagttataaaatcaggatgctgtcacaactgttgcgaagtatacactgaagttgtgtcgtttttgccactagatgagattaaaagaagacaattattcaaagccatcacaaaacactataagactgaccaaaatttagataacctttgaaccacgatttttttccacatctgtctgtgagacacagcgcaatgctactgcccttccagaaactgtgctaaaaagagaaagtccaaaagactctaaacaaaaacctcgacgccgttgaggatgtgtttcattctggtggtctgttttgcaagcttgataacagaatgtccgtgccattgtaaatgttgtagagatgtgggccgtggcccaaccgtcctatatgagatgtagcatggtacagaacaaactgcttacacaggtctcactagttagaaacctgtgggccatggaggtcagacatccatcttgtccatctataggcaagaagtgtttccagatcctttggaaaggtgggcatggggcaggtgcttggagagtggcgtttgagccagagcgaccccatttcccgtgtgaaccataggcacaacccaggaagtttccccacttgtaggagtgtgggtattccagagcaagactgtggccaccatcttcccctcttggtgttttccgaaagtgacagtgttggtcatcccatgaccactgaagcttagtaaccagcgccaaaaagtagattcatcaaactagagaccccagctccccttctcgccatcttctttctcaagttgaccgtggtgctgtttctggaaggcatctgcaactccaagtccatgcagaactctggaaggccaagttcatcgcagcatgttcaccatatcccagcctccaaatctatcctcctaccttccaacgcatgacctgttggggagcagagacttaacccccaactcagaggaacccttcctccagcgtctttggcatggtttctagggtgagagttcccaatttggatagaacggccaccatattggttactgaatctctctcccttgtttttattacgtttcctttttcaaactgtccatgggaaggctgaattgagtgactccccagaatgaagatgagaaggtgaatataatcaatgccaatgtaatgccagcgggtgagatggccgatggaggtttcaaagatgtagctagcattttgaaaccatatgggcaaaacccggcaaccagaaggggacagataaggaccgttccagaaatcccaactctcacacccagcccaggctgcagtctccacaccaaacagtcaacaaaacacaaaccctgaaggaaaaccttttccatacacccaggctatgcattgaagagttttccactgtatacatttttatccagatgaaggtatttttatattttgacaataggaaacagtgaccattttcagagtaatcaaatctggaacaaatgaaacatcttttagccaccaccaccctgttgcaattaagacaaccgtgggggaacacaccactttttactgttgaaaccaacacaacgttgaaatccaggcttatacgcagactccgattcctagagaactaaatttggctttagtgtgacgggatttgattaagcacttagtatagtcttttgaacacggaaatcctgttgtacttaaagctagcggacccgtgaacaactttgtcaggttcacgtcctataacggttaaaaaacacacacacacatacacaaaccgtttctatgagagattgatgaactttgtttaaaattttaaaaaaaggaacacgttctgtaaacgagtcgctaaatacagaattgtataataa

SEQ ID NO: 185588 - DNA, 4461 bp, Artificial Sequence
  derived and/or modified sequence
atggccgccaacgtgggcagcatgttccagtactggaagagattcgacctgagaagactgcagaaggagctgaacagcgtggccagcgagctgagcgccagacaggaggagagcgagcacagccacaagcacctgatcgagctgagaagagagttcaagaagaacgtgcccgaggagatcagagagatggtggcccccgtgctgaagagcttccaggccgaggtggtggccctgagcaagagaagccaggaggccgaggccgccttcctgagcgtgtacaagcagctgatcgaggcccccgaccccgtgcccgtgttcgaggccgccagaagcctggacgacagactgcagccccccagcttcgaccccagcggccagcccagaagagacctgcacaccagctggaagagaaaccccgagctgctgagccccaaggagcagagagagggcaccagccccgccggccccaccctgaccgagggcagcagactgcccggcatccccggcaaggccctgctgaccgagaccctgctgcagagaaacgaggccgagaagcagaagggcctgcaggaggtgcagatcaccctggccgccagactgggcgaggccgaggagaagatcaaggtgctgcacagcgccctgaaggccacccaggccgagctgctggagctgagaagaaagtacgacgaggaggccgccagcaaggccgacgaggtgggcctgatcatgaccaacctggagaaggccaaccagagagccgaggccgcccagagagaggtggagagcctgagagagcagctggccagcgtgaacagcagcatcagactggcctgctgcagcccccagggccccagcggcgacaaggtgaacttcaccctgtgcagcggccccagactggaggccgccctggccagcaaggacagagagatcctgagactgctgaaggacgtgcagcacctgcagagcagcctgcaggagctggaggaggccagcgccaaccagatcgccgacctggagagacagctgaccgccaagagcgaggccatcgagaagctggaggagaagctgcaggcccagagcgactacgaggagatcaagaccgagctgagcatcctgaaggccatgaagctggccagcagcacctgcagcctgccccagggcatggccaagcccgaggacagcctgctgatcgccaaggaggccttcttccccacccagaagttcctgctggagaagcccagcctgctggccagccccgaggaggaccccagcgaggacgacagcatcaaggacagcctgggcaccgagcagagctaccccagcccccagcagctgccccccccccccggccccgaggaccccctgagccccagccccggccagcccctgctgggccccagcctgggccccgacggcaccagaaccttcagcctgagccccttccccagcctggccagcggcgagagactgatgatgccccccgccgccttcaagggcgaggccggcggcctgctggtgttcccccccgccttctacggcgccaagccccccaccgcccccgccacccccgcccccggccccgagcccctgggcggccccgagcccgccgacggcggcggcggcggcgccgccggccccggcgccgaggaggagcagctggacaccgccgagatcgccttccaggtgaaggagcagctgctgaagcacaacatcggccagagagtgttcggccactacgtgctgggcctgagccagggcagcgtgagcgagatcctggccagacccaagccctggagaaagctgaccgtgaagggcaaggagcccttcatcaagatgaagcagttcctgagcgacgagcagaacgtgctggccctgagaaccatccaggtgagacagagaggcagcatcacccccagaatcagaacccccgagaccggcagcgacgacgccatcaagagcatcctggagcaggccaagaaggagatcgagagccagaagggcggcgagcccaagaccagcgtggcccccctgagcatcgccaacggcaccacccccgccagcaccagcgaggacgccatcaagagcatcctggagcaggccagaagagagatgcaggcccagcagcaggccctgctggagatggaggtggcccccagaggcagaagcgtgccccccagcccccccgagagacccagcctggccaccgccagccagaacggcgcccccgccctggtgaagcaggaggagggcagcggcggccccgcccaggcccccctgcccgtgctgagccccgccgccttcgtgcagagcatcatcagaaaggtgaagagcgagatcggcgacgccggctacttcgaccaccactgggccagcgacagaggcctgctgagcagaccctacgccagcgtgagccccagcctgagcagcagcagcagcagcggctacagcggccagcccaacggcagagcctggcccagaggcgacgaggcccccgtgccccccgaggacgaggccgccgccggcgccgaggacgagccccccagaaccggcgagctgaaggccgagggcgccaccgccgaggccggcgccagactgccctactaccccgcctacgtgcccagaaccctgaagcccaccgtgccccccctgacccccgagcagtacgagctgtacatgtacagagaggtggacaccctggagctgaccagacaggtgaaggagaagctggccaagaacggcatctgccagagaatcttcggcgagaaggtgctgggcctgagccagggcagcgtgagcgacatgctgagcagacccaagccctggagcaagctgacccagaagggcagagagcccttcatcagaatgcagctgtggctgagcgaccagctgggccaggccgtgggccagcagcccggcgccagccaggccagccccaccgagcccagaagcagccccagccccccccccagccccaccgagcccgagaagagcagccaggagcccctgagcctgagcctggagagcagcaaggagaaccagcagcccgagggcagaagcagcagcagcctgagcggcaagatgtacagcggcagccaggcccccggcggcatccaggagatcgtggccatgagccccgagctggacacctacagcatcaccaagagagtgaaggaggtgctgaccgacaacaacctgggccagagactgttcggcgagagcatcctgggcctgacccagggcagcgtgagcgacctgctgagcagacccaagccctggcacaagctgagcctgaagggcagagagcccttcgtgagaatgcagctgtggctgaacgacccccacaacgtggagaagctgagagacatgaagaagctggagaagaaggcctacctgaagagaagatacggcctgatcagcaccggcagcgacagcgagagccccgccaccagaagcgagtgccccagcccctgcctgcagccccaggacctgagcctgctgcagatcaagaagcccagagtggtgctggcccccgaggagaaggaggccctgagaaaggcctaccagctggagccctaccccagccagcagaccatcgagctgctgagcttccagctgaacctgaagaccaacaccgtgatcaactggttccacaactacagaagcagaatgagaagagagatgctggtggagggcacccaggacgagcccgacctggaccccagcggcggccccggcatcctgccccccggccacagccaccccgaccccaccccccagagccccgacagcgagaccgaggaccagaagcccaccgtgaaggagctggagctgcaggagggccccgaggagaacagcacccccctgaccacccaggacaaggcccaggtgagaatcaagcaggagcagatggaggaggacgccgaggaggaggccggcagccagccccaggacagcggcgagctggacaagggccagggcccccccaaggaggagcaccccgacccccccggcaacgacggcctgcccaaggtggcccccggccccctgctgcccggcggcagcacccccgactgccccagcctgcacccccagcaggagagcgaggccggcgagagactgcaccccgaccccctgagcttcaagagcgccagcgagagcagcagatgcagcctggaggtgagcctgaacagccccagcgccgccagcagccccggcctgatgatgagcgtgagccccgtgcccagcagcagcgcccccatcagccccagcccccccggcgccccccccgccaaggtgcccagcgccagccccaccgccgacatggccggcgccctgcaccccagcgccaaggtgaaccccaacctgcagagaagacacgagaagatggccaacctgaacaacatcatctacagagtggagagagccgccaacagagaggaggccctggagtgggagttctag

SEQ ID NO: 185589 - protein, 2243 aa, Artificial Sequence
  derived and/or modified sequence
MNIIRENKDLACFYTTKHSWRGKYKRVFSVGTHAITTYNPNTLEVTNQWPYGDICSISPVGKGQGTEFNLTFRKGSGKKSETLKFSTEHRTELLTEALRFRTDFSEGKITGRRYNCYKHHWSDSRKPVILEVTPGGFDQINPATNRVLCSYDYRNIEGFVDLSDYQGGFCILYGGFSRLHLFASEQREEIIKSAIDHAGNYIGISLRIRKEPLEFEQYLNLRFGKYSTDESITSLAEFVVQKISPRHSEPVKRVLALTETCLVERDPATYNIATLKPLGEVFALVCDSENPQLFTIEFIKGQVRKYSSTERDSLLASLLDGVRASGNRDVCVKMTPTHKGQRWGLLSMPVDEEVESLHLRFLATPPNGNFADAVFRFNANISYSGVLHAVTQDGLFSENKEKLINNAITALLSQEGDVVASNAELESQFQAVRRLVASKAGFLAFTQLPKFRERLGVKVVKALKRSNNGIIHAAVDMLCALMCPMHDDYDLRQEQLNKASLLSSKKFLENLLEKFNSHVDHGTGALVISSLLDFLTFALCAPYSETTEGQQFDMLLEMVASNGRTLFKLFQHPSMAIIKGAGLVMKAIIEEGDKEIATKMQELALSEGALPRHLHTAMFTISSDQRMLTNRQLSRHLVGLWTADNATATNLLKRILPPGLLAYLESSDLVPEKDADRMHVRDNVKIAMDQYGKFNKVPEWQRLAGKAAKEVEKFAKEKVDLVLMHWRDRMGIAQKENINQKPVVLRKRRQRIKIEANWDLFYYRFGQDHARSNLIWNFKTREELKDTLESEMRAFNIDRELGSANVISWNHHEFEVKYECLAEEIKIGDYYLRLLLEEDENEESGSIKRSYEFFNELYHRFLLTPKVNMKCLCLQALAIVYGRCHEEIGPFTDTRYIIGMLERCTDKLERDRLILFLNKLILNKKNVKDLMDSNGIRILVDLLTLAHLHVSRATVPLQSNVIEAAPDMKRESEKEWYFGNADKERSGPYGFHEMQELWTKGMLNAKTRCWAQGMDGWRPLQSIPQLKWCLLASGQAVLNETDLATLILNMLITMCGYFPSRDQDNAIIRPLPKVKRLLSDSTCLPHIIQLLLTFDPILVEKVAILLYHIMQDNPQLPRLYLSGVFFFIMMYTGSNVLPVARFLKYTHTKQAFKSEETKGQDIFQRSILGHILPEAMVCYLENYEPEKFSEIFLGEFDTPEAIWSSEMRRLMIEKIAAHLADFTPRLQSNTRALYQYCPIPIINYPQLENELFCNIYYLKQLCDTLRFPDWPIKDPVKLLKDTLDAWKKEVEKKPPMMSIDDAYEVLNLPQGQGPHDESKIRKAYFRLAQKYHPDKNPEGRDMFEKVNKAYEFLCTKSAKIVDGPDPENIILILKTQSILFNRHKEDLQPYKYAGYPMLIRTITMETSDDLLFSKESPLLPAATELAFHTVNCSALNAEELRRENGLEVLQEAFSRCVAVLTRASKPSDMSVQVCGYISKCYSVAAQFEECREKITEMPSIIKDLCRVLYFGKSIPRVAALGVECVSSFAVDFWLQTHLFQAGILWYLLGFLFNYDYTLEESGIQKSEETNQQEVANSLAKLSVHALSRLGGYLAEEQATPENPTIRKSLAGMLTPYVARKLAVASVTEILKMLNSNTESPYLIWNNSTRAELLEFLESQQENMIKKGDCDKTYGSEFVYSDHAKELIVGEIFVRVYNEVPTFQLEVPKAFAASLLDYIGSQAQYLHTFMAITHAAKVESEQHGDRLPRVEMALEALRNVIKYNPGSESECIGHFKLIFSLLRVHGAGQVQQLALEVVNIVTSNQDCVNNIAESMVLSSLLALLHSLPSSRQLVLETLYALTSSTKIIKEAMAKGALIYLLDMFCNSTHPQVRAQTAELFAKMTADKLIGPKVRITLMKFLPSVFMDAMRDNPEAAVHIFEGTHENPELIWNDNSRDKVSTTVREMMLEHFKNQQDNPEANWKLPEDFAVVFGEAEGELAVGGVFLRIFIAQPAWVLRKPREFLIALLEKLTELLEKNNPHGETLETLTMATVCLFSAQPQLADQVPPLGHLPKVIQAMNHRNNAIPKSAIRVIHALSENELCVRAMASLETIGPLMNGMKKRADTVGLACEAINRMFQKEQSELVAQALKADLVPYLLKLLEGIGLENLDSPAATKAQIVKALKAMTRSLQYGEQVNEILCRSSVWSAFKDQKHDLFISESQTAGYLTGPGVAGYLTAGTSTSVMSNLPPPVDHEAGDLGYQT

SEQ ID NO: 185590 - DNA, 102 bp, Artificial Sequence
  derived and/or modified sequence
gtcgaaatgaatagaatgcaatcatcatcaaatggaatccaatggaatcatcatcaaatagaatcgaatggaatcatcaaatggaatcgaatggagtcattg

SEQ ID NO: 185591 - DNA, 6732 bp, Artificial Sequence
  derived and/or modified sequence
atgaatatcattcgggagaacaaagatcttgcctgcttctatacaaccaagcactcctggagaggcaaatacaaaagggttttctccgttggcacacacgctattaccacctacaatccaaatactcttgaagtcaccaaccagtggccctatggggatatttgttccatatcacccgtgggcaaggggcaagggactgagttcaatttgacttttagaaagggatcaggcaaaaaatctgagacattaaaattttccaccgaacaccggactgagttacttactgaagcattgcgttttcggactgacttctcggaggggaaaataacaggcagaaggtacaactgctataaacaccattggtcagacagtagaaaaccagtcattctcgaggtcacccccggaggcttcgatcagattaaccccgctacgaatagagtactgtgttcatacgactaccggaacattgaagggtttgtggatctgtctgattatcagggaggtttctgtattctatatggaggattttcccggctgcacctttttgccagcgagcagcgagaagaaattatcaagtcagcaatagaccacgctggcaattatatcggcatttctctccgtattcggaaggagccgctggagttcgagcagtatcttaatctccgcttcggaaagtacagcacggacgaaagtattactagcctggcggagtttgttgtgcaaaaaatcagccctaggcattcagaacctgtcaagcgggttctagccctaaccgaaacgtgtctggtcgaacgcgatcctgctacgtacaatattgccaccctgaagcccctcggggaggtcttcgccctggtgtgtgactccgagaacccgcagctgttcactattgaattcataaagggccaggtccggaagtattcatctaccgagcgggattcactcctcgcttctctcctcgacggagtgagagcctcagggaaccgggacgtctgtgtgaagatgacccctactcacaagggtcagagatggggacttttgagtatgcccgtggatgaagaggtcgagagccttcacctacgatttctcgccacgcccccaaacggcaatttcgctgacgccgtgttcagatttaacgccaacatatcttattctggagtgctgcacgctgtaacacaggacggcctgttctctgagaacaaggagaaattgataaataacgctataacagctctgctgtcccaagagggtgacgtagtcgcctccaatgcagaactagagagccagtttcaggctgtgaggaggctggtggcctccaaagccgggtttctggccttcactcagctcccgaagtttagggaacggctgggcgtgaaggtggtgaaggcgttaaagagatctaataatggcatcatacatgctgcggttgacatgctgtgcgccctgatgtgcccgatgcacgacgattacgacctgcggcaggagcagcttaacaaggcttcactgctgtcaagcaagaagttcctagaaaatctgcttgagaagtttaactcacatgttgatcacggtactggcgctctggtcataagcagcctgctcgattttctgaccttcgctctgtgcgctccatactctgaaaccactgagggccaacagttcgatatgttactcgaaatggtggccagcaatggccgcaccctctttaaactgtttcagcatccctccatggctattataaagggtgctggcctcgtcatgaaggctataatcgaagagggagacaaagagatagcaaccaagatgcaggaactcgcacttagcgagggagcgctaccccgccatttacacacagcaatgtttacaatttcatcagaccagcgcatgctaaccaaccggcaattgtctcgccacctggtcggactctggacagccgacaatgccactgctacaaacctgctgaagaggattcttccccctggactgcttgcgtacctcgagtcgtccgatttggtcccagagaaagatgcagatcggatgcacgtgcgtgacaacgtgaaaatcgctatggaccagtacgggaagttcaacaaggtgccagagtggcagcgactcgcaggcaaggctgccaaagaggttgaaaaattcgcaaaagaaaaggtcgatcttgtgttgatgcactggcgggacagaatgggcattgcccagaaggaaaatataaaccagaaaccagtggttttacgaaagcgaagacagaggattaagatcgaggctaattgggacctcttctactatcggttcggacaagatcatgcccgaagcaacctcatctggaatttcaaaactagggaagagctgaaggacacacttgagtctgagatgagagctttcaacattgatagggagctcgggtctgcaaatgtaatctcctggaatcaccacgagtttgaggtcaagtacgaatgcttagcagaggaaattaaaatcggtgattactatctgcgtctcttgctagaggaggacgagaatgaagagagtgggtcgattaagcgctcatacgagttcttcaatgagctgtatcacaggtttctgttgacccccaaggtgaacatgaagtgcttgtgcttacaggctcttgctatagtgtacggcagatgccatgaggagatcggcccttttactgacacgcggtatatcattggaatgctggagaggtgtaccgataaactcgaacgcgaccgcctgatcctgtttctaaacaagcttattctgaacaagaagaatgtgaaggatcttatggattcaaatggaatccgcatcctggtcgatctgctgaccctggcgcacctgcacgtaagcagggccacagtaccgctgcagtcaaatgtaattgaggctgcaccagacatgaaacgcgaatccgagaaggagtggtatttcgggaatgcagacaaagagaggtcgggtccctatggtttccacgaaatgcaagaactgtggaccaaaggaatgctcaacgccaaaaccaggtgttgggcgcagggcatggacggatggaggccattacagagcatccctcagctgaagtggtgtcttcttgcctctggacaggccgtcttgaatgaaaccgacttagctactttgatcctcaatatgcttatcacaatgtgtggttatttcccaagccgggaccaagataatgcaatcatccgccctctgcccaaggtaaaaaggctcctgagtgacagcacctgtttgcctcacattattcagctgctcctgacctttgatccgatcctggttgaaaaagtcgccatcctgctgtatcacatcatgcaggacaaccctcagctgcctcgcctgtatttaagcggcgtatttttttttataatgatgtataccggctctaatgtcctgcctgtcgcaaggtttctgaagtatactcataccaagcaggcattcaagagcgaggaaacaaaaggtcaagacatattccaacgttccatactggggcatatactgcctgaggccatggtttgttacctggagaattacgagcccgaaaaatttagtgagatctttctcggggaatttgacacaccagaagccatctggtctagtgagatgcgtcgcctcatgatcgagaagatcgctgctcatcttgccgactttaccccccggctgcagtcaaatacccgggctctgtaccagtattgcccaattcccatcatcaattatccacagttggagaatgaattattttgcaatatctattacctgaaacagctctgcgatactctaaggttccctgattggccaatcaaagaccccgtaaaactgttgaaggacaccctggacgcatggaagaaggaggtcgagaagaaaccccctatgatgtccatcgacgacgcatacgaagtgctgaatttgccacaaggacaagggcctcacgacgagtccaaaatccgaaaagcatattttcgattagctcagaagtaccatcccgataaaaacccagaagggcgtgacatgtttgaaaaggtcaacaaagcatacgagtttctgtgcacgaaaagtgcaaagatagtggatggccctgaccctgagaacatcatcctgattcttaagacacagtctattttgttcaataggcataaggaagatctgcaaccatacaaatatgctggctaccccatgctaatcagaacaatcacaatggaaacgtctgatgatcttctgttcagcaaagagtctcctttgctccccgcagcgacagagctcgcctttcacacagtcaactgtagtgctctcaatgccgaggaactccggcgtgagaacggcctggaggtgctgcaggaggctttctctcggtgcgtcgctgttctgacaagagcctccaagccttctgatatgtcagtccaagtgtgcggttacatttctaaatgctactccgtagccgcacaatttgaggagtgtcgggagaagattacagagatgccgtctatcataaaggacctgtgtcgtgttctctatttcggcaagagcatacctagggtggccgctttgggcgtcgagtgcgtatcaagcttcgccgtcgatttctggttacagactcatctcttccaagccgggatcctatggtatctgctcgggttcctgtttaactacgactacacgctcgaagaaagcggcatccagaagtctgaggagacaaatcagcaggaagtggcgaattcgctggcaaagctttctgtacacgccctatccagactcgggggatacctggcagaagagcaggccacacctgaaaacccgaccatcagaaagagtctagcggggatgctgaccccctatgttgcgcgtaagctggccgttgcatcagttaccgagattctcaaaatgctgaatagcaatactgagtccccatatcttatctggaataactccacacgtgctgagctattggaattcttggagagccaacaagagaacatgatcaagaagggcgattgtgataagacttacggatccgagtttgtttacagcgaccatgcaaaggagctcattgtcggggagatcttcgtccgcgtgtataatgaggtgcccaccttccagctcgaggtgccgaaggcatttgcggcctctctcctcgactatataggctctcaagcccagtacttacacacgttcatggcaataacgcacgccgccaaggttgagtctgagcaacacggcgacagactgccacgggtagagatggcactagaggcgttacgcaacgtgatcaaatataatcctgggagtgagtcggaatgcattggtcatttcaaactgatatttagcctcctgagagttcacggcgccggtcaggtccagcagctggccttagaagttgtcaatatagtaacctcaaaccaggactgcgttaacaacatcgcggagtccatggtgctgtcaagcctccttgccctacttcattcactgccaagtagccgccagttagtgcttgagactctctacgcactgactagcagcacaaaaattattaaggaggccatggccaaaggagctctcatctatctactcgacatgttctgtaattccactcatccccaggtccgagctcagacagccgagctgtttgcgaagatgactgccgacaagctaatcggacccaaagtgcgcattacgctcatgaaattcctcccctctgtgttcatggatgcgatgagggacaatcccgaggcagccgttcatatcttcgagggtacccatgagaacccagagctgatttggaacgacaactccagggataaagtgtctactaccgtccgagagatgatgctggaacatttcaaaaatcagcaagataatcctgaagcaaattggaaactgcccgaggactttgcggtggtttttggggaggccgaaggagagctcgcggttgggggcgtttttttacgtatattcatcgcacagcccgcttgggtcttaaggaagccacgcgaattcctgatagcactgctggagaagttgacagagttactggagaaaaacaatccacacggtgagactctcgaaacactcacaatggcaaccgtgtgcttattcagtgctcagccacaactcgctgaccaagttcctcccctgggccacctcccaaaggtaattcaagccatgaatcatcgcaacaatgcgattccaaagagtgctattagggtgattcacgcactctctgagaacgagttgtgcgtgcgagctatggcctcccttgagaccatcggcccgctcatgaacggcatgaaaaaacgagccgacacagtaggcttagcctgcgaggctattaatcggatgtttcaaaaggagcaatcagagctggttgcacaggcactcaaagcggatctagtaccatatctgttaaagctcctggagggcatcggtctggagaacctggatagccccgctgcaacaaaagcccagattgttaaggctctgaaagccatgactcggtcgctacagtacggcgaacaggtcaacgaaattctctgtaggtcctccgtgtggtctgccttcaaggaccaaaagcatgacctctttatttctgagtctcagaccgcaggctacctgaccggtcctggcgtcgcagggtatctgacggctgggacaagtacctcagtgatgtcgaacttaccaccaccagtagaccatgaggctggcgacctcggataccagacttag

SEQ ID NO: 185592 - DNA, 2673 bp, Artificial Sequence
  derived and/or modified sequence
atgtatcagatatcaaagaactccgggtgggcaaggagcagagaatataacttcaatctgaagacgcaatccatactgtttaaccgacataaggaggatctacagccttataagtatgccggatatccgatgttgatccgcaccattacaatggaaaccagcgatgaccttctattttcaaaggaatctcctttactgccagcggctacggagctggcattccatacagtgaattgttctgcattgaacgcagaggagctgcggcgtgaaaatggcctcgaggtgcttcaggaggcctttagtagatgcgtagctgtgctcacacgggcaagtaagccatcggacatgagtgtgcaagtatgcgggtatatctccaaatgctactccgtcgcagctcaattcgaagagtgccgggaaaagattactgagatgcctagcataattaaggatctgtgcagagttctctatttcggcaagtcaatcccccgcgtagcggcacttggagttgaatgcgtgtcatcctttgccgtcgatttttggctccagactcatctattccaggcgggcatcctttggtatctgctcggctttctgtttaactatgattacacccttgaagagtcaggcattcaaaagagtgaggagacaaatcagcaggaagtggccaactccctcgctaagctcagcgttcatgcccttagtagactgggcgggtatctcgctgaagagcaggcgactccagagaaccctactattaggaagagtctggccggcatgttgaccccctacgtcgccaggaagttggccgtcgcatctgtaaccgagatcctcaaaatgctcaattcaaacacagagtctccttacctcatctggaataatagcaccagagctgagctcctggaatttctggaatctcagcaagagaatatgatcaaaaagggagactgtgacaaaacatacgggagcgaatttgtatacagcgaccacgcgaaggaattgatcgtgggagagattttcgtgagagtctacaatgaagtcccaacctttcagctggaagtaccaaaagctttcgccgcctctctgcttgactacattgggagccaggcccagtatctgcacacttttatggccatcacacacgcagccaaagtggagagtgagcagcatggggatagactccctagggtggagatggctctggaagccctccggaatgtgataaagtacaaccccggctctgagtccgaatgtattggccatttcaaactaattttcagtctcctgcgggtgcatggagctggtcaggtgcaacagctggccttagaggtcgtgaatatcgtcacaagcaatcaggattgtgtcaataacattgccgaatccatggtcctgtctagtcttctcgccctgctgcactcacttccaagctctcgccaattagtgctagagacactgtatgcgctaacctcctccactaagatcattaaagaggcgatggcaaaaggggccttaatctacctcctcgatatgttttgcaacagcacccaccctcaggtacgtgcccagacggccgaactatttgccaagatgacggccgataaactgatcggccctaaggtgcgcattactcttatgaagtttctgccatccgtgttcatggatgcaatgcgggataatcccgaagcagctgtccacatttttgagggcactcatgagaatccggaactgatctggaatgataactcgagagacaaggttagcacaaccgtgcgagagatgatgctggagcatttcaagaatcaacaggacaatcccgaagccaactggaaacttcctgaagatttcgcagtcgtatttggggaggctgagggcgagctcgccgtgggcggagtcttcctgaggatcttcatcgcccaaccagcctgggtgctgcggaagccccgggagtttttaatcgccctgctggaaaagctgacagagcttctcgagaaaaataatccacatggggagactctggaaaccctcaccatggctactgtgtgcctcttctcggcccaaccacagctggctgaccaggtaccccctctgggtcacctgcctaaggtcattcaggccatgaaccacaggaataacgccatccccaaaagtgcgattagggtcatccatgcactcagtgagaatgagctatgcgtgcgcgctatggcttcccttgagacaatcggaccactgatgaatgggatgaaaaagcgagccgatactgtggggctagcctgcgaggccataaatcggatgttccagaaagagcagtctgagctcgtcgcgcaagccctcaaggccgaccttgtaccctacctgctgaagttgcttgagggcattggactcgaaaacttggattcccccgcagccacaaaagcccaaattgtgaaagctctgaaggccatgacccggagtttgcaatacggggagcaggtgaacgaaatcttgtgcagatcaagcgtgtggagtgcgtttaaggatcagaagcacgacctgttcatatctgaaagccaaacggctggctacctcacagggcccggcgtcgccggctatctcacggcgggaacttcaacctcagtaatgtctaatctgccaccacctgtggaccatgaggcgggagacctcggctaccagacatag

SEQ ID NO: 185593 - DNA, 6732 bp, Artificial Sequence
  derived and/or modified sequence
atgaacatcatccgggagaacaaggacctggcctgcttctacaccaccaagcacagctggaggggcaagtacaagagggtcttctctgtgggcacccacgccatcaccacctacaaccccaacaccctggaggtgaccaaccagtggccctatggagacatctgcagcatcagccctgtgggcaagggccagggcacagagttcaacctgaccttcaggaagggcagcggcaagaagtctgagaccctgaagttcagcacagagcacaggacagagctgctgacagaggccctgcgcttcagaacagacttcagcgagggcaagatcaccggccgccgctacaactgctacaagcaccactggagcgacagcaggaagcctgtgatcctggaggtgacccctgggggctttgaccagatcaacccagccaccaacagagtgctgtgcagctatgactacagaaacatcgagggctttgtggacctgagtgactaccagggcggcttctgcatcctgtatggaggcttcagccggctgcacctgtttgccagcgagcagcgggaggagatcatcaagagcgccatcgaccacgccggcaactacatcggcatcagcctgcgcatcaggaaggagcccctggagtttgagcagtacctgaacctgcgctttgggaagtacagcacagatgagagcatcaccagcctggccgagtttgtggtgcagaagatcagccccaggcacagcgagcctgtgaagagggtgctggccctgacagagacctgcctggtggagcgggaccctgccacctacaacatcgccaccctgaagcccctgggggaggtgtttgccctggtgtgtgacagcgagaacccccagctgttcaccatcgagttcatcaagggccaggtgaggaagtacagcagcacagagcgggacagcctgctggccagcctgctggatggagtgcgggccagcggcaacagagatgtgtgtgtgaagatgacccccacccacaagggccagcgctggggcctgctgtccatgcctgtggatgaggaggtggagagcctgcacctgcgcttcctggccaccccaccaaatggaaactttgctgatgctgtgttccgcttcaatgccaacatctcctacagcggcgtgctgcatgctgtgacccaggacggcctcttcagcgagaacaaggagaagctgatcaacaatgccatcacagccctgctgagccaggagggagatgtggtggccagcaatgctgagctggagagccagttccaggccgtgcggcggctggtggccagcaaggccggcttcctggccttcacccagctgcccaagttccgggagcggctgggcgtgaaggtggtgaaggccctgaagaggagcaacaacggcatcatccatgctgctgtggacatgctgtgtgccctgatgtgccccatgcatgatgattatgacctgcggcaggagcagctgaacaaggccagcctgctgagcagcaagaagttcctggagaacctgctggagaagttcaacagccacgtggaccatggaactggagccctggtgatcagcagcctgctggacttcctgacctttgccctgtgtgccccctacagcgagaccacagagggccagcagtttgacatgctgctggagatggtggccagcaatggccgcaccctcttcaagctgttccagcaccccagcatggccatcatcaagggagctggcctggtgatgaaggccatcatcgaggagggggacaaggagatcgccaccaagatgcaggagctggccctgtctgagggcgccctgcccaggcacctgcacacagccatgttcaccatcagcagtgaccagaggatgctgaccaaccggcagctgagccgccacctggtgggcctgtggacagctgacaatgccacagccaccaacctgctgaagaggatcctgcccccaggcctgctggcctacctggagagcagtgacctggtgcctgagaaggatgctgacaggatgcacgtgcgggacaacgtgaagatcgccatggaccagtatggcaagttcaacaaggtgcctgagtggcagaggctggccggcaaggccgccaaggaggtggagaagtttgccaaggagaaggtggacctggtgctgatgcactggagggacaggatgggcatcgcccagaaggagaacatcaaccagaagcctgtggtgctgaggaagaggcggcagaggatcaagattgaggccaactgggacctcttctactacagatttggccaggaccacgcccggagcaacctgatctggaacttcaagacccgggaggagctgaaggacaccctggagagcgagatgagggccttcaacatcgaccgggagctgggcagcgccaacgtcatctcctggaaccaccacgagtttgaggtgaagtatgaatgtctggccgaggagatcaagattggagactactacctgcggctgctgctggaggaggatgaaaatgaggagagcggcagcatcaagaggagctatgagttcttcaatgagctgtaccaccgcttcctgctgacccccaaggtgaacatgaagtgcctgtgcctgcaggccctggccatcgtgtatggccgctgccacgaggagatcggccccttcacagacacccgctacatcatcggcatgctggagcgctgcacagacaagctggagcgggacaggctcatcctcttcctgaacaagctgatcctgaacaagaagaatgtgaaggacctgatggacagcaatggcatccgcatcctggtggacctgctgaccctggcccacctgcacgtgtcccgggccaccgtgcccctgcagagcaatgtcatcgaggccgccccagacatgaagcgggagagcgagaaggagtggtactttggaaatgctgacaaggagaggagcggcccctacggcttccacgagatgcaggagctgtggaccaagggcatgctgaatgccaagacccgctgctgggcccagggcatggatggctggaggcccctgcagagcatcccccagctgaagtggtgcctgctggccagcggccaggccgtgctgaatgaaacagacctggccaccctcatcctgaacatgctgatcaccatgtgtggctacttccccagccgggaccaggacaatgccatcatccggcccctgcccaaggtgaagaggctgctgagtgacagcacctgcctgccccacatcatccagctgctgctgacctttgaccccatcctggtggagaaggtggccatcctgctgtaccacatcatgcaggacaacccccagctgccccggctgtacctgagcggggtcttcttcttcatcatgatgtacacaggcagcaatgtgctgcctgtggcccgcttcctgaagtacacccacaccaagcaggccttcaagtctgaggagaccaagggccaggacatcttccagaggagcatcctgggccacatcctgcctgaggccatggtgtgctacctggagaactatgagcctgagaagttcagcgagatcttcctgggggagtttgacaccccagaggccatctggagcagcgagatgaggcggctgatgattgagaagattgctgcccacctggccgacttcaccccccggctgcagagcaacacccgggccctgtaccagtactgccccatccccatcatcaactacccccagctggagaatgaactcttctgcaacatctactacctgaagcagctgtgtgacaccctgcgcttcccagactggcccatcaaggaccctgtgaagctgctgaaggacaccctggatgcctggaagaaggaggtggagaagaagccacccatgatgagcattgatgatgcctatgaggtgctgaacctgccccagggccagggcccccatgatgagagcaagatcaggaaggcctacttccggctggcccagaagtaccacccagacaagaaccctgagggccgggacatgtttgagaaggtgaacaaggcctatgagttcctgtgcaccaagagcgccaagatcgtggatggccctgaccctgagaacatcatcctgatcctgaagacccagagcatcctcttcaacagacacaaggaggacctgcagccctacaagtatgccggctaccccatgctgatccgcaccatcaccatggagaccagtgatgacctgctcttcagcaaggagagccccctgctgcctgctgccacagagctggccttccacacagtgaactgcagcgccctgaatgctgaggagctgcggagagaaaatggcctggaggtgctgcaggaggccttcagccgctgtgtggccgtgctgacccgggccagcaagcccagcgacatgtctgtgcaggtgtgtggctacatcagcaagtgctacagcgtggccgcccagtttgaagaatgtcgggagaagatcacagagatgcccagcatcatcaaggacctgtgccgggtgctgtactttgggaagagcatcccccgggtggccgccctgggcgtggagtgtgtgtcctcctttgctgtggacttctggctgcagacccacctgttccaggccggcatcctgtggtacctgctgggcttcctgttcaactatgactacaccctggaggagagcggcatccagaagtctgaggagaccaaccagcaggaggtggccaacagcctggccaagctgtctgtgcacgccctgagccggctgggcggctacctggccgaggagcaggccaccccagagaaccccaccatcaggaagagcctggccggcatgctgaccccctacgtggccaggaagctggccgtggcctctgtgacagagatcctgaagatgctgaacagcaacacagagagcccctacctgatctggaacaacagcaccagggctgagctgctggagttcctggagagccagcaggagaacatgatcaagaagggggactgtgacaagacctacggcagcgagtttgtgtacagcgaccacgccaaggagctgattgtgggggagatctttgtgcgggtgtacaatgaggtgcccaccttccagctggaggtgcccaaggcctttgctgccagcctgctggactacatcggcagccaggcccagtacctgcacaccttcatggccatcacccacgccgccaaggtggagagcgagcagcacggggaccggctgccccgggtggagatggccctggaggccctgagaaatgtcatcaagtacaaccctggcagcgagagtgaatgtattggccacttcaagctgatcttcagcctgctgcgggtgcacggggccggccaggtgcagcagctggccctggaggtggtgaacatcgtgaccagcaaccaggactgtgtgaacaacattgctgagagcatggtgctgagcagcctgctggccctgctgcacagcctgcccagcagccggcagctggtgctggagaccctgtatgccctgaccagcagcaccaagatcatcaaggaggccatggccaagggggccctgatctacctgctggacatgttctgcaacagcacccacccccaggtgcgggcccagacagctgagctgtttgccaagatgacagctgacaagctgattggccccaaggtgcgcatcaccctgatgaagttcctgcccagcgtcttcatggatgccatgagggacaaccctgaggccgctgtgcacatctttgagggcacccatgagaaccctgagctgatctggaatgacaacagccgggacaaggtgtccaccaccgtgcgggagatgatgctggagcacttcaagaaccagcaggacaaccctgaggccaactggaagctgcctgaagattttgctgtggtgtttggagaggccgagggggagctggccgtgggcggcgtcttcctgcgcatcttcatcgcccagcctgcctgggtgctgaggaagccccgggagttcctgattgccctgctggagaagctgacagagctgctggagaagaacaacccccacggggagaccctggagaccctgaccatggccaccgtgtgcctcttcagcgcccagccccagctggccgaccaggtgccccccctgggccacctgcccaaggtgatccaggccatgaaccacagaaataatgccatccccaagagcgccatccgggtcatccacgccctgtctgaaaatgagctgtgtgtgcgggccatggccagcctggagaccatcggccccctgatgaatggcatgaagaagagagctgacacagtgggcctggcctgtgaggccatcaacaggatgttccagaaggagcagagcgagctggtggcccaggccctgaaggctgacctggtgccctacctgctgaagctgctggagggcatcggcctggagaacctggacagccctgctgccaccaaggcccagatcgtgaaggccctgaaggccatgaccaggagcctgcagtacggggagcaggtgaatgagatcctgtgccgcagctctgtgtggagcgccttcaaggaccagaagcatgacctcttcatcagcgagagccagacagctggctacctgaccggccctggggtggccggctacctgacagctggcaccagcacctctgtgatgagcaacctgcccccacctgtggaccacgaggccggggacctgggctaccagacctag

SEQ ID NO: 185594 - DNA, 2673 bp, Artificial Sequence
  derived and/or modified sequence
atgtaccagatcagcaagaacagcggctgggcccggagccgggagtacaacttcaacctgaagacccagagcatcctcttcaacagacacaaggaggacctgcagccctacaagtatgccggctaccccatgctgatccgcaccatcaccatggagaccagtgatgacctgctcttcagcaaggagagccccctgctgcctgctgccacagagctggccttccacacagtgaactgcagcgccctgaatgctgaggagctgcggcgggagaatggcctggaggtgctgcaggaggccttcagccgctgtgtggccgtgctgacccgggccagcaagcccagcgacatgtctgtgcaggtgtgtggctacatcagcaagtgctacagcgtggccgcccagtttgaggagtgccgggagaagatcacagagatgcccagcatcatcaaggacctgtgccgggtgctgtactttgggaagagcatcccccgggtggccgccctgggcgtggagtgtgtgagcagctttgctgtggacttctggctgcagacccacctgttccaggccggcatcctgtggtacctgctgggcttcctgttcaactatgactacaccctggaggagagcggcatccagaagtctgaggagaccaaccagcaggaggtggccaacagcctggccaagctgtctgtgcacgccctgagccggctgggcggctacctggccgaggagcaggccaccccagagaaccccaccatcaggaagagcctggccggcatgctgaccccctacgtggccaggaagctggccgtggcctctgtgacagagatcctgaagatgctgaacagcaacacagagagcccctacctgatctggaacaacagcaccagggctgagctgctggagttcctggagagccagcaggagaacatgatcaagaagggggactgtgacaagacctacggcagcgagtttgtgtacagcgaccacgccaaggagctgattgtgggggagatctttgtgcgggtgtacaatgaggtgcccaccttccagctggaggtgcccaaggcctttgctgccagcctgctggactacatcggcagccaggcccagtacctgcacaccttcatggccatcacccatgctgccaaggtggagagcgagcagcacggggaccggctgccccgggtggagatggccctggaggccctgagaaatgtcatcaagtacaaccctggcagcgagagcgagtgcatcggccacttcaagctgatcttcagcctgctgcgggtgcatggagctggccaggtgcagcagctggccctggaggtggtgaacatcgtgaccagcaaccaggactgtgtgaacaacattgctgagagcatggtgctgagcagcctgctggccctgctgcacagcctgcccagcagccggcagctggtgctggagaccctgtatgccctgaccagcagcaccaagatcatcaaggaggccatggccaagggggccctgatctacctgctggacatgttctgcaacagcacccacccccaggtgcgggcccagacagctgagctgtttgccaagatgacagctgacaagctgattggccccaaggtgcgcatcaccctgatgaagttcctgcccagcgtcttcatggatgccatgagggacaaccctgaggccgctgtgcacatctttgagggcacccatgaaaatcctgagctgatctggaatgacaacagccgggacaaggtgtccaccaccgtgcgggagatgatgctggagcacttcaagaaccagcaggacaaccctgaggccaactggaagctgcctgaggactttgctgtggtgtttggagaggccgagggggagctggccgtgggcggcgtcttcctgcgcatcttcatcgcccagcctgcctgggtgctgaggaagccccgggagttcctgattgccctgctggagaagctgacagagctgctggagaagaacaacccccatggagagaccctggagaccctgaccatggccaccgtgtgcctcttcagcgcccagccccagctggccgaccaggtgccccccctgggccacctgcccaaggtgatccaggccatgaaccacaggaacaatgccatccccaagagcgccatccgggtcatccacgccctgtctgaaaatgagctgtgtgtgcgggccatggccagcctggagaccatcggccccctgatgaatggcatgaagaagagagctgacacagtgggcctggcctgtgaggccatcaacaggatgttccagaaggagcagagcgagctggtggcccaggccctgaaggctgacctggtgccctacctgctgaagctgctggagggcatcggcctggagaacctggacagccctgctgccaccaaggcccagatcgtgaaggccctgaaggccatgaccaggagcctgcagtatggagagcaggtgaatgagatcctgtgccgcagctctgtgtggagcgccttcaaggaccagaagcatgacctcttcatcagcgagagccagacagctggctacctgactggacctggggtggccggctacctgacagctggcaccagcacctctgtgatgagcaacctgcccccacctgtggaccatgaagctggggacctgggctaccagacctag

SEQ ID NO: 185595 - DNA, 6732 bp, Artificial Sequence
  derived and/or modified sequence
atgaacatcatccgggagaacaaggacctggcctgcttctacaccacgaagcatagttggagaggaaagtataaacgggttttctccgtaggcacacatgccattacaacttacaacccaaatactctggaggtgaccaaccagtggccctatggcgacatctgttccataagtccggtaggaaaaggccagggtacagagttcaatctcacatttaggaaagggtccggaaaaaaatcagaaactcttaaatttagcactgagcacagaacagaactgctgactgaggccctgcgtttccgtaccgacttttccgaggggaaaataactgggcggcgatacaattgttataagcaccattggtccgactcccgaaagcctgttatactcgaggtcacgccggggggtttcgatcagataaacccagctactaacagagtcctgtgctcgtatgattaccgcaacatcgagggcttcgtagatttgagtgactatcagggaggcttctgtatcttatacggtggtttcagcaggctgcacctatttgcctccgagcaacgcgaagagattatcaagtcagccatcgatcacgctggtaactacatcggaatcagcctgcgaatacgcaaggagcctctcgagttcgagcagtatctcaatcttcgctttggaaagtatagcaccgatgagagcataacatccctcgcagagtttgtggtgcagaagatctcaccccgacactcagagcctgttaaaagggttttggctctgactgaaacctgcctcgtggagagggaccctgccacctacaacatcgcaacgctgaagcccctcggcgaagtcttcgctctggtgtgcgactccgagaacccccagctgtttactatcgaatttatcaaaggtcaggttagaaagtattcctccactgaacgggattctctgctggcaagcttgctggacggcgtgagggctagcggcaacagagatgtgtgtgtcaagatgacccccactcataagggccagagatgggggctgctgtctatgcctgtggatgaggaggttgagagtctccaccttcgatttctggccacccctccaaacggcaactttgctgacgcagtttttaggtttaacgccaacattagctacagcggcgttctgcatgccgtaacacaggacggactgttctcagagaacaaagagaagttaatcaataatgccatcacagccctgctgtcacaggaaggcgacgtcgtcgccagcaacgcggagcttgagagccagttccaggctgtgagaaggttagtcgccagtaaggctggcttccttgcttttactcagctgccgaagttccgggagcgtttaggcgtgaaagtggtgaaagcgctcaaaaggagcaacaacggtataattcatgccgcggtcgatatgctctgtgctctaatgtgtcctatgcatgacgactacgatctgcgacaagagcaacttaacaaggcatctctactcagttccaaaaagtttttggagaacctgctggaaaagttcaattctcacgtcgatcacgggaccggagccctcgtgatctccagcctcctggactttctgacatttgcattgtgcgccccttatagcgaaaccactgaggggcagcagttcgacatgttgctcgaaatggtggcctctaacggacgtactctctttaaactgttccagcatcctagtatggctataattaagggtgccggcctggtgatgaaggccattatagaggagggcgacaaagagatcgctactaagatgcaggagctggctctgagtgagggggccctgcctcgccacctccacactgccatgttcaccatcagttcggatcagcgtatgctgacaaataggcagttgagcagacacctggtgggtctttggactgcagataacgcgactgccactaacttgctgaagcggatcctccctcctggacttcttgcttatctggaatcttctgatctggtgcctgaaaaggatgccgacagaatgcatgtgcgcgataacgttaaaattgccatggaccagtacggcaaattcaacaaagtgcctgagtggcagcggctggctggcaaagccgccaaagaggttgagaagttcgccaaagagaaggtggacctggttttgatgcactggcgcgacaggatgggtatcgcgcagaaggaaaatattaatcagaaaccagttgttctgcggaagcgcaggcagagaatcaaaattgaggccaactgggacctgttttattaccggtttggacaggaccacgctcgttctaatctcatatggaatttcaagacccgcgaggaactgaaggataccttggagtcagaaatgcgggctttcaacatagaccgcgagttgggctccgccaatgtgatttcttggaaccatcacgaatttgaagtaaagtatgaatgcctggcagaagagataaagattggcgactattatctgaggttattattggaagaagatgagaatgaagaatcaggtagtatcaagcgatcctatgagttttttaacgagctctaccacagattcctgctgacacccaaggtgaatatgaagtgtctgtgtctgcaggctctcgctattgtgtacggtcgctgccatgaagaaattgggccgtttaccgatactcgatacatcataggaatgctcgagcgatgcaccgacaagcttgagcgggatcgcttaattctgtttctaaataaactcatcttgaacaagaagaacgtcaaagacctgatggacagtaacggaatcaggattttggtggacctgcttactctagctcacctgcacgtgagccgggcaacagtcccactccagtccaacgtcatcgaggctgcgccagacatgaaaagggaatcagaaaaggaatggtacttcggtaacgctgacaaggagcggtcgggtccgtacgggttccatgagatgcaggagctgtggactaagggcatgctgaatgctaaaactcgatgctgggctcagggcatggacggttggcgccctctgcagtccataccacagcttaagtggtgtctgctggcctccgggcaggcagtgctgaatgagacagatcttgccactctcatcctgaacatgctgattactatgtgcggctattttccgagtcgtgatcaggataacgccataatcagacccctgcccaaagtcaagaggctgttgtccgacagtacgtgcctgcctcacattatccagctgcttctcaccttcgacccaattctggtggagaaagtggcgatcttgctgtatcatatcatgcaggacaacccccaactgccccggctgtatctttccggcgttttcttctttataatgatgtacacaggctccaacgtgcttccagttgcaaggttcctgaaatatacccacacaaaacaggccttcaaatcagaagagacaaaagggcaggacatttttcagaggagcattctggggcatatcctccccgaggccatggtatgctaccttgaaaattacgaacctgaaaagttttcagagattttcttgggggagttcgacacccctgaggccatatggtcaagcgagatgcggaggctcatgattgaaaagatcgccgcccacttggccgatttcactccccgtttgcagagcaacacacgcgctctgtaccagtactgcccaattccaattattaattaccctcagctggagaacgaactgttctgcaatatttactacctgaaacaactgtgcgatacactaagatttcccgattggcctatcaaggatccggtcaagctgcttaaggataccttggacgcctggaagaaggaggtggaaaaaaagccacccatgatgtctattgacgacgcttatgaggttctgaatctgcctcagggacaggggccacacgatgagtccaagatccggaaggcatacttccgactcgcacagaaatatcaccccgataaaaacccggagggcagagatatgttcgaaaaagtaaataaggcctacgagtttctttgtacaaagtccgctaagatcgtggatgggccggatccggagaacatcatcctcattttgaagacccagtcaattctgttcaatagacacaaggaggatttacagccttacaagtatgccggttaccccatgctgattcggaccattaccatggagacgtccgatgatctcctgttttcgaaagagtctcctctgttgcccgccgcaacagaactagcctttcatacagtgaactgctcggctctcaatgcagaggagctgcggcgcgaaaatggcctggaagtcctgcaggaagcgttcagcaggtgcgtagccgtcttgacacgtgcctctaagccatccgacatgtcggttcaagtgtgcggctatatttctaaatgctactctgtggccgcccaattcgaagaatgtagagagaaaataaccgaaatgccatcaatcatcaaagacctgtgtcgcgtgctgtactttggtaagtccatccctagggtcgcagcactcggtgtcgagtgcgtcagctctttcgcagtcgacttttggctgcagacccacctctttcaggccggaatactctggtatctgctagggtttctatttaattatgactacaccctagaagaaagcggaatccagaagtcggaagaaacaaatcagcaagaggtagcaaatagtttagccaagctgtctgtacacgcactctcacgtcttgggggatacttagcagaagagcaggccacacccgaaaaccctaccatccggaagagtctggctggaatgttgacaccatatgtagcccgaaagttggccgtagccagcgtcaccgaaattctgaaaatgctgaactcaaacacggagagcccctatctgatttggaataacagcactcgggcagaactgttagaatttctggaatcacagcaggaaaatatgattaaaaagggcgactgtgataagacctatggcagtgaattcgtctattcagatcacgcgaaggagctgatcgtgggtgaaattttcgtgcgggtgtacaacgaggtccccacattccaattggaagtgcctaaagcttttgccgcaagtctgttggattacatcggtagtcaagcccaatatcttcacacattcatggccattacacatgcagcgaaagtcgagtccgaacagcacggagataggcttcctagggttgagatggctttagaagcccttcgaaacgttattaagtataatccaggcagcgagagcgaatgtatagggcatttcaagctgatctttagtttactacgcgtgcacggcgcgggacaggtccaacagctcgcgctggaagtggtgaatatcgtcaccagtaaccaggactgcgtgaataacatcgctgagagcatggtcctcagttcactgctggcactgcttcattcactgccgtcctcccgccagctcgtgttagagacattatatgcattgacctcttccacgaaaattatcaaagaggccatggcaaagggtgccctcatttatctcctggatatgttttgcaattccactcaccctcaggtgcgcgctcagactgcggaactgtttgccaagatgacggcagataaattaatcggacccaaggttagaattacccttatgaaattcctcccatcagtcttcatggatgctatgagggacaacccggaggccgctgtgcacatcttcgaaggcacacacgaaaacccagagctgatatggaacgataacagcagggacaaggtgtctacaaccgtacgggagatgatgctcgaacactttaagaaccagcaggataaccctgaggcaaactggaaactccctgaggatttcgctgtcgtcttcggcgaggccgaaggtgaactagctgttggcggagtgttcctgagaattttcatagctcagcctgcttgggttctgcgtaagccccgcgaatttctgatagcccttctggaaaagctgacggaattgctggagaaaaacaaccctcacggtgagacgctggaaaccctcaccatggctaccgtctgcctcttctctgcacagcctcagctggcagaccaggtccctccgctgggccacctccctaaggtgattcaggcaatgaaccaccgaaataatgccatccctaaatctgccataagagtgattcacgctctgagtgaaaacgaattgtgcgtccgggccatggctagtctggaaacaattgggccactgatgaatggcatgaaaaagagggctgataccgttggcttggcatgcgaagccattaatcgaatgttccagaaggaacaaagcgagctggtggcccaggccctgaaagctgacctagttccatacctactgaaattacttgaaggcatagggttggagaacctagacagtccagcagctacgaaggcccagatcgtaaaggcactgaaggccatgacacgctctctgcagtatggcgagcaggttaacgaaattttgtgtaggtcgtcagtgtggtcagcttttaaagaccagaagcatgatttattcatcagtgagagtcagacagctgggtatctgacaggtccaggcgtcgccggttatctcacagccgggacgtccacatcggtgatgtccaacctgccaccacccgtggaccacgaggccggggatctaggatatcagacgtag

SEQ ID NO: 185596 - DNA, 2673 bp, Artificial Sequence
  derived and/or modified sequence
atgtaccagatcagcaagaacagcggctgggcccggagccgggagtacaacttcaatctcaaaactcagtctatcctatttaatagacacaaagaagacctgcagccctacaagtatgcagggtatcccatgttgatccgcacaatcaccatggagacttccgatgacctcttattcagtaaggaaagccctctgctgccagcagccacagagttagcattccacaccgtgaattgctcagctctgaacgccgaggagttgagaagagagaatggcctcgaggtactgcaagaagctttcagcagatgtgtggctgtgttaacccgcgcctccaaacctagtgatatgtccgtccaagtctgcggttatattagtaaatgctattcagtggccgcacagtttgaggagtgtagagagaagatcactgagatgccctcaataatcaaagacctctgtagagtcctctattttggcaaaagtattcctagggtcgccgccttgggcgtggaatgcgtaagttcttttgctgtcgacttttggctccaaacccatttgttccaggcaggaatcttatggtacctgctgggttttcttttcaattatgactacacactggaggaatcaggcatacagaagagtgaggaaactaaccagcaggaggttgcaaatagcctggcgaagctgtccgtccatgcattgtccagactgggaggatacctcgctgaggaacaagccacccctgagaacccaactatcagaaaaagtcttgccggaatgttgaccccctatgtagcaaggaagctggcggtggctagcgtgacggaaatcctcaaaatgcttaattccaataccgagagcccctatctgatttggaacaattccacccgagctgaactgttagaattcctggaaagtcagcaggaaaacatgatcaagaaaggcgattgcgataagacctatggatctgaatttgtctattcagatcatgcaaaggaactgattgtgggggagatattcgtgcgagtgtacaatgaagtccccactttccagcttgaggtgcccaaagcttttgcagcctcactgctggactatatcggtagtcaggcgcagtacctgcacactttcatggctatcacacacgctgccaaggtggagagtgaacagcacggcgaccgcctccctcgcgtagaaatggcattagaggcactgagaaatgtcattaaatacaacccagggtctgagagcgagtgcatcgggcatttcaagctgattttctctttgctgcgggttcatggcgcagggcaggtgcagcagttggctctggaggtagtcaatatcgtaactagcaatcaagactgtgtaaacaacatcgccgaatcaatggtgctgtcctcactcttggctcttctgcactcacttccaagcagtcgtcaattggttctggagactctgtacgctctcaccagctccactaaaattatcaaagaagcaatggctaaaggcgccctcatatatctgcttgacatgttttgcaatagtactcatcctcaggtgcgggcccagacagcagagctgttcgctaagatgacagctgacaaactcattggtccgaaagttcgaataacacttatgaaattcctcccctccgtgtttatggacgcaatgcgcgacaatccagaggcagccgtccacatattcgagggcacccatgaaaacccagaactgatttggaacgataacagtcgagacaaggtgtctactaccgtccgcgaaatgatgctcgagcattttaagaatcagcaggacaaccccgaagcaaactggaaattacccgaggactttgccgtagtgttcggcgaagcagagggcgagctcgcagtgggcggcgtttttctcagaatcttcattgcacagcctgcctgggtcctgaggaaaccgcgcgaatttttgatcgccctactggagaaactgaccgaactgctggagaagaataacccccacggtgaaacactcgaaacactgacaatggcgactgtctgtctgttttccgcccagccacagctggccgatcaggtgccacccctgggccatttgcccaaagtcatccaggctatgaatcaccggaataatgccatccccaaatctgccatccgagtgattcacgccctgtccgagaacgagttgtgcgtacgggcaatggcgtcacttgaaacaattggacctctaatgaacggcatgaaaaagagggctgacactgtcggcctagcctgcgaagcaatcaatagaatgtttcaaaaagaacagtctgaactcgtagctcaggccctgaaagcggacctggttccttatctcttaaaactgttggaagggatcggccttgaaaacctggacagccctgcagctacaaaggcgcagatagtcaaggccctcaaggctatgacaagatctctgcagtatggtgagcaggtgaacgagattctctgtaggtccagcgtctggagcgctttcaaagatcaaaagcacgacttgttcatcagcgaatctcagaccgcggggtacctgacagggcccggggtggctggttacctgaccgctggcactagtaccagcgtcatgtctaacctgcccccccctgttgatcatgaggccggcgaccttggataccagacctag

SEQ ID NO: 185597 - DNA, 6732 bp, Artificial Sequence
  derived and/or modified sequence
atgaatatcatacgagagaacaaagacttggcgtgtttttacacaaccaagcatagctggcggggaaagtataaaagagtgttctctgttggaacgcacgcgatcactacctataatccaaacacattggaggtgacgaatcagtggccatatggagatatctgttcgatcagtccagtcgggaaggggcagggaaccgagttcaacctcacctttaggaaggggagcgggaagaaatccgaaacactgaagttctccaccgaacaccgaaccgagctgcttactgaggctctgcgtttcaggactgattttagtgagggcaagattacaggacgacggtacaattgttacaagcatcactggtccgactcacgcaaaccagtcatcttagaagtcacacccggaggatttgatcagatcaatcctgctaccaacagggtcctctgctcatatgactaccgcaatattgaaggctttgtagacttatccgattaccaggggggtttttgcattctgtacggagggtttagcaggttgcatttgtttgcctccgaacaaagggaggagatcatcaagtctgccatcgatcatgctgggaattacattggcatcagcctgcggattcggaaggaaccactagagttcgagcagtacttaaatctgcgtttcgggaaatacagcacagacgagagcataacatctttagccgagtttgtggtgcagaaaatcagccctagacattccgagccagtcaaacgcgtcctggcactaacagaaacatgtctagttgagcgcgatccggctacatacaatatagcaacactgaagcctttaggcgaggtgtttgctctggtgtgtgacagcgaaaacccccagctctttacaatcgagttcatcaagggccaggttcgtaaatactctagtacagagagagacagtctgcttgcatcattgttggacggtgtgcgtgcatctggaaacagggacgtatgcgtgaaaatgacaccgactcacaaaggtcaaagatgggggcttctctccatgcctgttgacgaggaggttgagtccctacacctgagatttctggcgacacctcccaatggaaacttcgccgacgcagtgttccgctttaatgctaacattagctattccggagtcttgcacgccgtgacccaggatgggcttttctctgaaaataaggaaaaactcattaacaatgctataacagccctcctgagtcaggagggtgacgtcgttgcgtctaacgccgaactggaaagtcaatttcaggccgtgcgcagacttgttgcctccaaggcaggctttctcgcattcacacagctgcccaagttcagagagcgcttgggcgttaaggtcgtgaaggccctaaagcgaagcaataacggcatcatccacgccgctgtggatatgctgtgcgcccttatgtgtccaatgcatgacgactatgatctgcgtcaggaacaactgaataaagcctccctgctctcgagcaaaaagtttctggagaacctgctggagaagtttaactcccacgtggatcatggcactggagctctggtgatcagctcactccttgattttctgacattcgcattgtgcgccccttactccgaaacgacagagggccaacaattcgatatgctcctggagatggtggcatctaacggcagaactctgtttaagctgttccagcatcccagtatggcaataattaaaggggctggcttggtgatgaaagccattatcgaagagggtgacaaagagatcgcgacaaagatgcaagaacttgccctcagcgaaggcgcactgccgaggcatttgcataccgccatgtttacaatcagttcagatcagcgaatgcttaccaaccggcagctgtcccggcatttagtgggcctgtggaccgcagataacgctacagcaactaatcttctgaagcggatcctgcctccaggtttactcgcgtacctggagtcgagcgatctcgttccagaaaaggacgcggatcgtatgcacgtgcgggataatgttaaaatcgctatggaccagtacggcaagtttaataaggtgccagagtggcagcgcctggctgggaaagccgcaaaggaggtggagaagtttgcgaaggagaaggtcgatcttgtgcttatgcactggcgggatcgaatggggatcgcccagaaggagaatatcaaccagaagccagtggttttacgtaagagacgacagcgaattaagattgaggctaactgggacctgttctattatcggtttggacaggatcacgcccgaagcaatctgatctggaatttcaagacccgtgaggaacttaaggacacactggaaagcgagatgcgcgctttcaatattgaccgggaactaggcagcgctaacgtcatctcttggaatcaccacgaatttgaggtcaaatatgaatgcctggctgaggaaattaagatcggcgattactacctgagactccttttggaggaggacgagaacgaggaatctggctctatcaagaggtcctacgagttctttaatgagttataccatagattcctcctgacaccaaaagtgaacatgaaatgtctgtgcctgcaggcgttggccatcgtatacgggaggtgccacgaagagatcggtccatttaccgacacacggtatatcattgggatgctggaacgctgtaccgataaacttgaaagagataggctgatacttttcctgaacaaattgatcctgaataagaagaatgtgaaggacctgatggatagcaatggtatcaggattctggtggatctgctcacgcttgcccatttacatgtctctagggccacagtcccgctccagagcaacgtaattgaggctgctcctgatatgaaacgagagtctgagaaagagtggtattttggcaacgccgataaagaaaggtctgggccttacggcttccacgagatgcaggaactctggacaaagggcatgctcaatgccaaaacacgttgttgggcacagggaatggacggctggcgcccactgcagtctatccctcagctgaaatggtgcttgctggctagcggacaagccgtcctgaatgagacagatctggccacgttgatcctgaatatgcttatcacgatgtgcggctactttccaagcagggaccaggataacgctatcatccgacccttacctaaggtcaaacggctgcttagcgactccacctgtctcccgcatatcatacaactgctgttgactttcgatcctatcctggtcgaaaaagtggcaatcctcctgtatcacatcatgcaagacaacccacagttgcctcgactctatctgagtggggtgttcttcttcatcatgatgtataccggaagtaatgtcctgccagttgctagatttttgaagtacacacacaccaaacaagcattcaagagcgaggaaactaaaggccaggacatattccaacgcagcattttaggtcatatcctaccagaggccatggtgtgctacctggaaaattatgaacctgagaaattttcggagatttttctcggcgagttcgatacccccgaggcgatttggagttctgaaatgcgtagactgatgatcgaaaagattgcagcacatttggccgatttcacacctaggctgcagtctaacacaagagcgctttatcagtactgtcccatccccatcatcaattacccccagctcgagaacgagctattttgcaatatttactacctgaagcaactttgcgacaccctgagatttcccgattggccgattaaagaccccgtgaaattgctgaaggacactctggatgcttggaaaaaagaagtggagaagaaaccaccaatgatgagcattgacgacgcttacgaggtattaaatcttccacagggccagggacctcacgacgagagcaaaatcaggaaggcctattttaggctcgcacaaaagtaccatcctgataagaatcctgagggcagagatatgttcgagaaggtcaataaagcctatgagttcctttgtacaaagagcgcaaaaatcgtcgacggccctgatccggagaacatcatcttaatcttgaagacccagtcaatccttttcaacagacataaggaggacttgcaaccatacaaatacgccggataccctatgctgatccgcaccatcacgatggaaaccagtgacgacctgctcttctcaaaagagagccctctcctgcctgctgctacggaacttgcattccatacagtgaattgctcggccctcaatgcagaagagttgcgtagagagaatggcttggaggtgctccaggaagcattcagccgctgtgtcgccgtacttacaagagcaagtaaacccagcgacatgtcggttcaggtttgcggatatatctcaaagtgctattccgttgccgctcagtttgaagagtgccgagaaaaaattaccgaaatgccctccatcatcaaagacctctgtagggttttgtatttcgggaagtccattccacgagtggcggcattgggagtcgaatgtgtgtcgagtttcgctgtggatttctggctccagacccacctgtttcaagcgggaatcctgtggtatttattaggattcctttttaactacgactataccctggaagagagcgggatccagaagagcgaggaaacgaatcagcaggaggtggcaaattccctggcaaaattgtctgtccacgctctgagccgcctgggtggttacctggccgaagaacaggccacccccgagaatccaacaatcaggaaatcccttgctggcatgcttactccctacgtggcccgaaagctcgccgtggcctcagtgaccgagattcttaagatgctgaattcaaacaccgaaagtccatacctcatctggaacaattctactagggccgagctgctcgagttcttggagtctcagcaggaaaatatgatcaagaagggcgactgtgataaaacttacggcagtgaattcgtttacagcgatcacgccaaggaactaatcgttggcgagattttcgtccgtgtgtataacgaggtgcccacttttcagcttgaggtgcccaaggctttcgcagccagcttgttagactatattgggagccaggcccaataccttcacacctttatggccattacacacgctgcaaaggttgaatcagagcagcatggcgaccgtcttcctagggtggaaatggcactggaggccttgagaaacgtcatcaagtacaatccgggatctgaatctgaatgcatcggccattttaaactgatattcagcctactgcgtgttcacggagcaggccaggtacagcagctcgcgctggaggtggtgaacattgtgacctcaaaccaggactgcgtaaataacatcgcagagtctatggtcctgtccagcctgctcgcactgcttcactcgctgccaagctccaggcaactcgtactcgaaacgctgtatgccctgaccagctctaccaaaatcatcaaagaagccatggctaaaggggctttaatctatctactcgatatgttttgtaacagcactcatccgcaagtgcgggctcaaaccgccgagctgttcgccaagatgacggcggacaaacttatcgggcctaaagtgagaataaccctaatgaaattcctgcccagtgtattcatggacgccatgcgtgataatcccgaggctgcagtccatatcttcgaaggaactcatgaaaaccccgagctgatatggaacgataattctagagataaagtttctaccactgtgagagaaatgatgctggagcactttaaaaaccagcaggataatcctgaggctaactggaagctccccgaagattttgctgtggtgttcggggaggcagaaggagagctggctgtcggtggcgtgttcttgcgcatttttatagctcagcccgcttgggtccttcggaaaccccgagaattccttattgccctgctcgagaagttgaccgaactgctcgagaagaacaatccacacggcgagaccctggagaccctgaccatggcgactgtatgtctcttcagcgctcagccacagctcgctgatcaggtacctcctcttggccatctgcctaaggtgatccaggctatgaatcaccggaacaatgcaatacctaagagcgcaattcgagtgatacatgcactcagtgagaacgaattgtgcgtgcgggcaatggccagcctcgagaccatcggccctcttatgaacggcatgaagaagcgggctgatactgtgggcctggcctgcgaggccatcaaccgcatgtttcagaaagaacagtccgagctggttgctcaagcactcaaggcggatctggtcccttatctgttgaaacttttagagggtatcggactcgaaaatttggactcccccgctgctaccaaggctcagatagtaaaagcattgaaggcaatgacgcggagcctccaatatggcgaacaggtcaacgaaattctttgtaggagcagcgtgtggagtgccttcaaggatcagaagcacgatctgttcatttccgaaagtcaaacggctggctatctgactggccctggggtggccggatacctcacagcaggaactagcacctccgtcatgagtaatctgcctcctccagtggatcatgaggctggtgacttggggtatcaaacatat

SEQ ID NO: 185598 - DNA, 2673 bp, Artificial Sequence
  derived and/or modified sequence
atgtaccagatttcaaagaattcaggctgggccaggagtcgggagtataattttaacctgaagacccaatctatactctttaacagacataaagaggacctccaaccctataaatacgcaggctatccaatgctgattaggacgatcacaatggagacaagcgatgacctgctcttttctaaggaatcacctttactaccggctgctaccgagctcgcgttccacaccgttaattgctcagccctgaatgctgaggaactgcggagggagaacggcttagaagtgctgcaggaagctttttcgcgctgcgtcgcggtgctcaccagagcctccaagccatcagatatgtccgtccaagtatgtggctacatttctaagtgctatagcgtggctgcccagttcgaggagtgccgcgaaaaaatcacagagatgcccagcatcattaaagatctatgcagggtgctgtatttcgggaaatcgatccctcgagtggccgctctgggagttgaatgcgtcagctctttcgccgttgacttctggctgcaaactcatctctttcaggccggaattttgtggtacttgctaggcttcctattcaactacgattacactctggaggaatcaggtattcagaaatctgaagaaaccaaccagcaggaggttgccaacagtctggccaaactctccgttcatgctttatcccggctagggggatacctggccgaggagcaggcaacaccagagaaccccaccattcggaagtcgctggctggaatgttgactccatacgtcgcgaggaaacttgcagtggcctcagtgaccgaaatacttaagatgctcaactcaaacaccgaatctccctacctgatctggaacaactcaacacgcgctgaactgctggagttcctagagagtcagcaagagaatatgatcaagaagggagactgcgacaaaacatacggtagcgagttcgtttactctgatcacgcaaaagagttgattgttggcgaaatcttcgtgcgcgtctacaacgaagtgcctactttccagctggaggtaccaaaggctttcgccgcttcactactcgactatatcggcagccaggcccagtatctccatacctttatggctattacacatgctgcgaaggttgagtctgagcagcacggggatcggctgccgagagtcgaaatggctctggaggctctccggaatgtgattaaatacaaccccggtagcgaatccgagtgcatcgggcatttcaaactcattttctccttgcttcgcgtacacggcgcaggtcaggtccagcaactagccttggaggttgtgaacatcgtcacatctaaccaggactgtgtgaacaatatcgccgagtctatggtgctgtctagcctgttagcgctgctgcattctcttccatcatcacgtcagttagtcctggaaactctttacgccctgacaagttccacgaaaattatcaaagaggccatggctaaaggagcactcatctacctgctggacatgttctgcaactctacgcatccccaggtccgagctcaaaccgctgagctgttcgcaaagatgacggcagataagcttattggccctaaagttcggatcacattgatgaagtttctgccctccgtgtttatggacgctatgagggacaatccagaggccgcagtgcatatatttgagggtacgcatgaaaatcctgaactgatctggaacgataattctagggacaaagtcagtacgactgtgcgtgagatgatgctggagcactttaaaaatcagcaagataatccggaagcaaactggaaattgccagaggactttgccgttgtgtttggggaagctgaaggggagctggccgttggcggagtgttcctgcgaatcttcatagcccaacccgcttgggtgctgcgcaagccgagagagtttctaatcgcccttctggagaagctcactgaactgcttgagaagaataaccctcatggagaaacactggaaaccctcaccatggctacagtgtgtctttttagcgctcagccacaactggcagatcaggtcccacctctgggccatctaccgaaagttatccaggcaatgaatcaccgaaacaatgccattcctaagtccgccatccgcgtcatccatgcactgtccgagaatgagctgtgtgttagggccatggcatcgctcgaaacgattggacccctgatgaatgggatgaaaaagcgcgcagacaccgttggcctggcctgcgaggccatcaacagaatgttccagaaggagcagtcagaactggtggcccaggccctgaaggcagacttagtgccttacttgttgaagctgctggagggcattgggctggagaaccttgacagccctgcggcaacaaaggcacagattgtcaaggcgttaaaggctatgacaaggtcattgcaatacggtgaacaggtgaacgagatactttgtcgcagctccgtctggtcggctttcaaggaccagaagcacgacttatttataagcgaatcgcaaactgcaggatatcttacgggtccgggtgtcgccggatacctgaccgctggcacttcgacttcagtcatgtccaacctgccacctccagttgatcacgaagccggtgacttaggctatcaaacctag

SEQ ID NO: 185599 - DNA, 6732 bp, Artificial Sequence
  derived and/or modified sequence
atgaacatcatcagagagaacaaggacctggcctgcttctacaccaccaagcacagctggagaggcaagtacaagagagtgttcagcgtgggcacccacgccatcaccacctacaaccccaacaccctggaggtgaccaaccagtggccctacggcgacatctgcagcatcagccccgtgggcaagggccagggcaccgagttcaacctgaccttcagaaagggcagcggcaagaagagcgagaccctgaagttcagcaccgagcacagaaccgagctgctgaccgaggccctgagattcagaaccgacttcagcgagggcaagatcaccggcagaagatacaactgctacaagcaccactggagcgacagcagaaagcccgtgatcctggaggtgacccccggcggcttcgaccagatcaaccccgccaccaacagagtgctgtgcagctacgactacagaaacatcgagggcttcgtggacctgagcgactaccagggcggcttctgcatcctgtacggcggcttcagcagactgcacctgttcgccagcgagcagagagaggagatcatcaagagcgccatcgaccacgccggcaactacatcggcatcagcctgagaatcagaaaggagcccctggagttcgagcagtacctgaacctgagattcggcaagtacagcaccgacgagagcatcaccagcctggccgagttcgtggtgcagaagatcagccccagacacagcgagcccgtgaagagagtgctggccctgaccgagacctgcctggtggagagagaccccgccacctacaacatcgccaccctgaagcccctgggcgaggtgttcgccctggtgtgcgacagcgagaacccccagctgttcaccatcgagttcatcaagggccaggtgagaaagtacagcagcaccgagagagacagcctgctggccagcctgctggacggcgtgagagccagcggcaacagagacgtgtgcgtgaagatgacccccacccacaagggccagagatggggcctgctgagcatgcccgtggacgaggaggtggagagcctgcacctgagattcctggccaccccccccaacggcaacttcgccgacgccgtgttcagattcaacgccaacatcagctacagcggcgtgctgcacgccgtgacccaggacggcctgttcagcgagaacaaggagaagctgatcaacaacgccatcaccgccctgctgagccaggagggcgacgtggtggccagcaacgccgagctggagagccagttccaggccgtgagaagactggtggccagcaaggccggcttcctggccttcacccagctgcccaagttcagagagagactgggcgtgaaggtggtgaaggccctgaagagaagcaacaacggcatcatccacgccgccgtggacatgctgtgcgccctgatgtgccccatgcacgacgactacgacctgagacaggagcagctgaacaaggccagcctgctgagcagcaagaagttcctggagaacctgctggagaagttcaacagccacgtggaccacggcaccggcgccctggtgatcagcagcctgctggacttcctgaccttcgccctgtgcgccccctacagcgagaccaccgagggccagcagttcgacatgctgctggagatggtggccagcaacggcagaaccctgttcaagctgttccagcaccccagcatggccatcatcaagggcgccggcctggtgatgaaggccatcatcgaggagggcgacaaggagatcgccaccaagatgcaggagctggccctgagcgagggcgccctgcccagacacctgcacaccgccatgttcaccatcagcagcgaccagagaatgctgaccaacagacagctgagcagacacctggtgggcctgtggaccgccgacaacgccaccgccaccaacctgctgaagagaatcctgccccccggcctgctggcctacctggagagcagcgacctggtgcccgagaaggacgccgacagaatgcacgtgagagacaacgtgaagatcgccatggaccagtacggcaagttcaacaaggtgcccgagtggcagagactggccggcaaggccgccaaggaggtggagaagttcgccaaggagaaggtggacctggtgctgatgcactggagagacagaatgggcatcgcccagaaggagaacatcaaccagaagcccgtggtgctgagaaagagaagacagagaatcaagatcgaggccaactgggacctgttctactacagattcggccaggaccacgccagaagcaacctgatctggaacttcaagaccagagaggagctgaaggacaccctggagagcgagatgagagccttcaacatcgacagagagctgggcagcgccaacgtgatcagctggaaccaccacgagttcgaggtgaagtacgagtgcctggccgaggagatcaagatcggcgactactacctgagactgctgctggaggaggacgagaacgaggagagcggcagcatcaagagaagctacgagttcttcaacgagctgtaccacagattcctgctgacccccaaggtgaacatgaagtgcctgtgcctgcaggccctggccatcgtgtacggcagatgccacgaggagatcggccccttcaccgacaccagatacatcatcggcatgctggagagatgcaccgacaagctggagagagacagactgatcctgttcctgaacaagctgatcctgaacaagaagaacgtgaaggacctgatggacagcaacggcatcagaatcctggtggacctgctgaccctggcccacctgcacgtgagcagagccaccgtgcccctgcagagcaacgtgatcgaggccgcccccgacatgaagagagagagcgagaaggagtggtacttcggcaacgccgacaaggagagaagcggcccctacggcttccacgagatgcaggagctgtggaccaagggcatgctgaacgccaagaccagatgctgggcccagggcatggacggctggagacccctgcagagcatcccccagctgaagtggtgcctgctggccagcggccaggccgtgctgaacgagaccgacctggccaccctgatcctgaacatgctgatcaccatgtgcggctacttccccagcagagaccaggacaacgccatcatcagacccctgcccaaggtgaagagactgctgagcgacagcacctgcctgccccacatcatccagctgctgctgaccttcgaccccatcctggtggagaaggtggccatcctgctgtaccacatcatgcaggacaacccccagctgcccagactgtacctgagcggcgtgttcttcttcatcatgatgtacaccggcagcaacgtgctgcccgtggccagattcctgaagtacacccacaccaagcaggccttcaagagcgaggagaccaagggccaggacatcttccagagaagcatcctgggccacatcctgcccgaggccatggtgtgctacctggagaactacgagcccgagaagttcagcgagatcttcctgggcgagttcgacacccccgaggccatctggagcagcgagatgagaagactgatgatcgagaagatcgccgcccacctggccgacttcacccccagactgcagagcaacaccagagccctgtaccagtactgccccatccccatcatcaactacccccagctggagaacgagctgttctgcaacatctactacctgaagcagctgtgcgacaccctgagattccccgactggcccatcaaggaccccgtgaagctgctgaaggacaccctggacgcctggaagaaggaggtggagaagaagccccccatgatgagcatcgacgacgcctacgaggtgctgaacctgccccagggccagggcccccacgacgagagcaagatcagaaaggcctacttcagactggcccagaagtaccaccccgacaagaaccccgagggcagagacatgttcgagaaggtgaacaaggcctacgagttcctgtgcaccaagagcgccaagatcgtggacggccccgaccccgagaacatcatcctgatcctgaagacccagagcatcctgttcaacagacacaaggaggacctgcagccctacaagtacgccggctaccccatgctgatcagaaccatcaccatggagaccagcgacgacctgctgttcagcaaggagagccccctgctgcccgccgccaccgagctggccttccacaccgtgaactgcagcgccctgaacgccgaggagctgagaagagagaacggcctggaggtgctgcaggaggccttcagcagatgcgtggccgtgctgaccagagccagcaagcccagcgacatgagcgtgcaggtgtgcggctacatcagcaagtgctacagcgtggccgcccagttcgaggagtgcagagagaagatcaccgagatgcccagcatcatcaaggacctgtgcagagtgctgtacttcggcaagagcatccccagagtggccgccctgggcgtggagtgcgtgagcagcttcgccgtggacttctggctgcagacccacctgttccaggccggcatcctgtggtacctgctgggcttcctgttcaactacgactacaccctggaggagagcggcatccagaagagcgaggagaccaaccagcaggaggtggccaacagcctggccaagctgagcgtgcacgccctgagcagactgggcggctacctggccgaggagcaggccacccccgagaaccccaccatcagaaagagcctggccggcatgctgaccccctacgtggccagaaagctggccgtggccagcgtgaccgagatcctgaagatgctgaacagcaacaccgagagcccctacctgatctggaacaacagcaccagagccgagctgctggagttcctggagagccagcaggagaacatgatcaagaagggcgactgcgacaagacctacggcagcgagttcgtgtacagcgaccacgccaaggagctgatcgtgggcgagatcttcgtgagagtgtacaacgaggtgcccaccttccagctggaggtgcccaaggccttcgccgccagcctgctggactacatcggcagccaggcccagtacctgcacaccttcatggccatcacccacgccgccaaggtggagagcgagcagcacggcgacagactgcccagagtggagatggccctggaggccctgagaaacgtgatcaagtacaaccccggcagcgagagcgagtgcatcggccacttcaagctgatcttcagcctgctgagagtgcacggcgccggccaggtgcagcagctggccctggaggtggtgaacatcgtgaccagcaaccaggactgcgtgaacaacatcgccgagagcatggtgctgagcagcctgctggccctgctgcacagcctgcccagcagcagacagctggtgctggagaccctgtacgccctgaccagcagcaccaagatcatcaaggaggccatggccaagggcgccctgatctacctgctggacatgttctgcaacagcacccacccccaggtgagagcccagaccgccgagctgttcgccaagatgaccgccgacaagctgatcggccccaaggtgagaatcaccctgatgaagttcctgcccagcgtgttcatggacgccatgagagacaaccccgaggccgccgtgcacatcttcgagggcacccacgagaaccccgagctgatctggaacgacaacagcagagacaaggtgagcaccaccgtgagagagatgatgctggagcacttcaagaaccagcaggacaaccccgaggccaactggaagctgcccgaggacttcgccgtggtgttcggcgaggccgagggcgagctggccgtgggcggcgtgttcctgagaatcttcatcgcccagcccgcctgggtgctgagaaagcccagagagttcctgatcgccctgctggagaagctgaccgagctgctggagaagaacaacccccacggcgagaccctggagaccctgaccatggccaccgtgtgcctgttcagcgcccagccccagctggccgaccaggtgccccccctgggccacctgcccaaggtgatccaggccatgaaccacagaaacaacgccatccccaagagcgccatcagagtgatccacgccctgagcgagaacgagctgtgcgtgagagccatggccagcctggagaccatcggccccctgatgaacggcatgaagaagagagccgacaccgtgggcctggcctgcgaggccatcaacagaatgttccagaaggagcagagcgagctggtggcccaggccctgaaggccgacctggtgccctacctgctgaagctgctggagggcatcggcctggagaacctggacagccccgccgccaccaaggcccagatcgtgaaggccctgaaggccatgaccagaagcctgcagtacggcgagcaggtgaacgagatcctgtgcagaagcagcgtgtggagcgccttcaaggaccagaagcacgacctgttcatcagcgagagccagaccgccggctacctgaccggccccggcgtggccggctacctgaccgccggcaccagcaccagcgtgatgagcaacctgcccccccccgtggaccacgaggccggcgacctgggctaccagacctag

SEQ ID NO: 185600 - DNA, 2673 bp, Artificial Sequence
  derived and/or modified sequence
atgtaccagatcagcaagaacagcggctgggccagaagcagagagtacaacttcaacctgaagacccagagcatcctgttcaacagacacaaggaggacctgcagccctacaagtacgccggctaccccatgctgatcagaaccatcaccatggagaccagcgacgacctgctgttcagcaaggagagccccctgctgcccgccgccaccgagctggccttccacaccgtgaactgcagcgccctgaacgccgaggagctgagaagagagaacggcctggaggtgctgcaggaggccttcagcagatgcgtggccgtgctgaccagagccagcaagcccagcgacatgagcgtgcaggtgtgcggctacatcagcaagtgctacagcgtggccgcccagttcgaggagtgcagagagaagatcaccgagatgcccagcatcatcaaggacctgtgcagagtgctgtacttcggcaagagcatccccagagtggccgccctgggcgtggagtgcgtgagcagcttcgccgtggacttctggctgcagacccacctgttccaggccggcatcctgtggtacctgctgggcttcctgttcaactacgactacaccctggaggagagcggcatccagaagagcgaggagaccaaccagcaggaggtggccaacagcctggccaagctgagcgtgcacgccctgagcagactgggcggctacctggccgaggagcaggccacccccgagaaccccaccatcagaaagagcctggccggcatgctgaccccctacgtggccagaaagctggccgtggccagcgtgaccgagatcctgaagatgctgaacagcaacaccgagagcccctacctgatctggaacaacagcaccagagccgagctgctggagttcctggagagccagcaggagaacatgatcaagaagggcgactgcgacaagacctacggcagcgagttcgtgtacagcgaccacgccaaggagctgatcgtgggcgagatcttcgtgagagtgtacaacgaggtgcccaccttccagctggaggtgcccaaggccttcgccgccagcctgctggactacatcggcagccaggcccagtacctgcacaccttcatggccatcacccacgccgccaaggtggagagcgagcagcacggcgacagactgcccagagtggagatggccctggaggccctgagaaacgtgatcaagtacaaccccggcagcgagagcgagtgcatcggccacttcaagctgatcttcagcctgctgagagtgcacggcgccggccaggtgcagcagctggccctggaggtggtgaacatcgtgaccagcaaccaggactgcgtgaacaacatcgccgagagcatggtgctgagcagcctgctggccctgctgcacagcctgcccagcagcagacagctggtgctggagaccctgtacgccctgaccagcagcaccaagatcatcaaggaggccatggccaagggcgccctgatctacctgctggacatgttctgcaacagcacccacccccaggtgagagcccagaccgccgagctgttcgccaagatgaccgccgacaagctgatcggccccaaggtgagaatcaccctgatgaagttcctgcccagcgtgttcatggacgccatgagagacaaccccgaggccgccgtgcacatcttcgagggcacccacgagaaccccgagctgatctggaacgacaacagcagagacaaggtgagcaccaccgtgagagagatgatgctggagcacttcaagaaccagcaggacaaccccgaggccaactggaagctgcccgaggacttcgccgtggtgttcggcgaggccgagggcgagctggccgtgggcggcgtgttcctgagaatcttcatcgcccagcccgcctgggtgctgagaaagcccagagagttcctgatcgccctgctggagaagctgaccgagctgctggagaagaacaacccccacggcgagaccctggagaccctgaccatggccaccgtgtgcctgttcagcgcccagccccagctggccgaccaggtgccccccctgggccacctgcccaaggtgatccaggccatgaaccacagaaacaacgccatccccaagagcgccatcagagtgatccacgccctgagcgagaacgagctgtgcgtgagagccatggccagcctggagaccatcggccccctgatgaacggcatgaagaagagagccgacaccgtgggcctggcctgcgaggccatcaacagaatgttccagaaggagcagagcgagctggtggcccaggccctgaaggccgacctggtgccctacctgctgaagctgctggagggcatcggcctggagaacctggacagccccgccgccaccaaggcccagatcgtgaaggccctgaaggccatgaccagaagcctgcagtacggcgagcaggtgaacgagatcctgtgcagaagcagcgtgtggagcgccttcaaggaccagaagcacgacctgttcatcagcgagagccagaccgccggctacctgaccggccccggcgtggccggctacctgaccgccggcaccagcaccagcgtgatgagcaacctgcccccccccgtggaccacgaggccggcgacctgggctaccagacctag

SEQ ID NO: 185601 - DNA, 7730 bp, Artificial Sequence
  derived and/or modified sequence
gcgaagatggcggcctccagagtgaaactctgagaggcagagggaggaggcggagggggcggggaggcagcgccgcggcggcaccaggaacccgcggcagcggagctgcagggccccggcgggggaaaggggaagtggtgagggtgaggaggccggagggcgcctcatcccactctggaagctgagccggcggcgggaggagctagggctggagcctctccagcctcccgcgaaggtttgagcacaaaatgaacataattagggaaaataaggatctggcatgtttctacacaacaaaacattcatggagggggaagtataagcgtgtcttttcagttggaactcatgcgattactacatataatcccaataccttagaagtaacaaatcagtggccttatggagacatttgcagcatcagccctgttggaaaaggacaaggaacggagttcaacctcacatttcgtaaaggcagtggaaaaaagtcagaaactttaaaattttctacagagcacagaacagaacttcttacagaagcattgagatttagaactgatttttcagagggaaaaatcacaggaaggagatacaactgctataagcatcactggagtgactcaagaaaacctgtaattttggaagtaactccaggaggctttgaccaaattaatcctgcaaccaacagagtactctgttcctatgactatagaaatattgaaggatttgtagatctctcagattatcaaggaggattttgtatactttatggaggatttagtagattgcatttatttgcgtcagagcaaagagaagagattattaaaagtgcaatagaccatgctggtaactacataggtatttcattgcggatcaggaaagagcctttagaattcgagcaatatttgaatcttcgctttggaaaatacagcactgatgaatccatcacatctttagcagagtttgtagtccaaaaaatatcacctagacattcggagcctgttaaaagagttctagcacttacagaaacatgtttagtagaacgtgatccggcaacctataatattgcaacattgaagcctttaggagaagtatttgcgttggtctgtgactcagaaaatccacaactttttaccattgaatttataaaagggcaagtacggaaatattcttcaacagagagagattccttattagcaagtttgctggatggagtaagagcctctggtaatagagatgtttgtgtaaaaatgacaccaacccataaaggtcagcgatgggggttactcagcatgcctgttgatgaggaagtagagagccttcacctcaggttcttagctacgcctccaaatggcaactttgcagatgctgtattcaggttcaatgctaatatttcatacagtggagtcctacatgcagtaacacaagatggtctcttctcagaaaacaaagaaaaactgatcaataatgccataacagcattactgtcccaagaaggggatgtcgttgcttcaaatgcggaacttgagagtcagttccaggctgtgaggaggcttgtggcatccaaagctggtttcctggctttcactcagcttccaaagtttcgcgagcgtctaggggtgaaggtagtaaaagcactcaaaagaagcaacaacggaataatccatgcagcagttgatatgctttgtgcccttatgtgtcccatgcatgatgactatgacttaagacaagaacagttgaacaaagcttctcttctctcgtcaaagaagtttctggaaaacttactggagaaatttaattcccatgtggatcatgggactggtgccctagttattagttcgctcttggacttccttacctttgccctctgtgctccatatagtgagacaactgaagggcagcagtttgatatgctcttggagatggtagcatccaatggaagaaccctttttaaactttttcagcatccttccatggcaataataaaaggagctgggttggttatgaaggcaataatagaggaaggtgataaagaaattgctacaaaaatgcaggagcttgccctaagtgaaggtgccttacctcgacacttgcatactgcgatgtttacaataagctcagatcaaaggatgcttacaaatagacagctaagtagacatttagtgggactctggacagctgataatgcaactgcaacaaacttgttgaaacgcattttgccgccaggcttgctggcatacttggaaagctcagatctcgtacctgagaaggatgctgatcggatgcatgttagagacaatgtgaaaatagcaatggatcagtatggaaaatttaataaagttccagagtggcaaagactagctggaaaagctgctaaagaagttgaaaaatttgccaaagaaaaagtggatcttgtattgatgcactggagggataggatgggcattgctcaaaaagagaatataaatcagaagccagtggttcttcgaaagagaagacaaagaataaaaatagaagcaaattgggatctcttctattataggtttggtcaagaccatgccaggtcaaaccttatttggaatttcaaaacacgagaagaactgaaagatactcttgaatctgaaatgagagcatttaatattgacagagaacttggaagtgcaaatgtgatctcctggaaccaccatgagtttgaggttaaatatgagtgcctggcagaggaaattaaaataggagactattacctgagattactattggaggaagatgagaatgaagaaagtggatcaattaagagatcgtatgaatttttcaatgagctttatcatcgcttcttgctcaccccaaaagtaaacatgaagtgtttatgtttacaagcccttgctattgtttatggcagatgtcacgaagaaataggaccttttacagataccagatatatcattggaatgttagagaggtgcacagataaacttgaacgagataggttgattctcttccttaacaagttgatccttaataagaaaaatgttaaggatctcatggattcaaatggaataagaatccttgtggacttgcttacccttgcacatctccatgtaagccgagctacagtaccactgcaaagcaatgtaattgaagctgctccagatatgaaaagagagagtgaaaaggaatggtattttggcaacgcagacaaagaaaggagtggcccgtatggatttcatgagatgcaagaattgtggaccaaaggaatgttaaatgcaaaaaccagatgctgggctcaaggcatggatggatggcgaccacttcagtccataccccagcttaagtggtgtctcttagccagtggacaggctgtcctgaatgaaactgaccttgctacccttatattgaacatgttgatcacaatgtgtggatattttccaagcagggatcaagacaatgccatcattcggcctctacccaaagtgaaaagactgctgtcagatagcacttgccttccccatattattcagctactgctgacctttgaccctatccttgttgagaaggttgctattttgttataccatatcatgcaagataacccacagttaccccgcctttatctgagtggagtatttttctttatcatgatgtacacaggttccaatgtgcttcctgttgctcgatttttgaaatacacacataccaaacaggctttcaagtcagaagagacaaaaggacaagatatttttcagagaagtatacttgggcacattctacctgaagcaatggtttgttacttagaaaattatgaacctgaaaagttttctgagatttttctaggagaatttgatactccagaagcaatctggagcagtgaaatgaggcgcctgatgatagagaagattgctgcccatctcgcggatttcacacctcgtcttcagagtaacacaagagcactttatcagtattgccccattcctataatcaactatccacaactcgaaaatgaactattttgtaatatttattacctcaaacaactgtgtgatacactccggtttccagattggccaattaaagacccggttaagcttctaaaagatacccttgatgcctggaagaaagaagtagaaaagaagccacctatgatgtcaatagatgatgcttatgaagtgcttaatctgcctcaaggacagggaccgcatgatgagagcaagattaggaaagcttacttcagacttgcacaaaagtaccaccctgataagaatccagaagggagggacatgtttgaaaaagtaaataaagcatatgaatttttatgtaccaaatcagcaaaaatagtggatgggccagatccagagaatataattttaattctaaaaacacagagcatcctcttcaaccgtcataaagaagatttacagccttataaatatgcaggataccccatgcttattcggactataacaatggaaacttcagatgacctccttttctcaaaagaatcaccattgttgcctgcggctacagagctagctttccatactgtcaactgttcagccctcaatgctgaagagctcagaagagagaatggactagaggtgttacaagaggcatttagtcgctgtgtggctgtcttgactcgtgctagtaaaccaagtgacatgtcagtacaggtgtgtggatacataagtaaatgctacagtgtggctgctcagtttgaggaatgccgagagaagatcacggaaatgcctagcatcatcaaggatctctgtcgggtactatattttggcaagagtattccccgcgtagctgctcttggggtagaatgtgtcagttcttttgctgtggatttctggctacagacacacctatttcaggctggaattttgtggtatctccttggttttctgtttaattatgactacacactagaagagagtggcattcagaaaagtgaagaaacaaaccagcaggaggtagcaaacagccttgccaaactgagtgtccatgctctgagtcgccttggagggtatttggctgaagaacaagcaactccagaaaatccaaccataaggaaaagcttagctggcatgctgacaccctatgttgctagaaaacttgctgtggctagtgtgactgagattttgaagatgcttaacagcaacacagaaagtccatatttgatatggaacaattctacaagagcagaattacttgaatttcttgaatcccaacaagaaaacatgattaaaaaaggtgattgtgacaaaacttatggatcagaatttgtctacagtgatcatgccaaagaacttattgtaggggagatttttgttagggtgtataatgaagttcctactttccaactggaggttccaaaagcatttgctgcaagtctcttggattatataggctcgcaggcccaatacttgcacacattcatggccatcacacacgcggcaaaagtggagtcagagcaacatggagatcgcttaccgagagtagaaatggctttggaggctctgagaaatgtcataaaatacaatccaggttctgagagtgaatgcattgggcactttaagttgatattttctcttctccgagttcatggagctggtcaagtgcagcagttggctttagaggttgtgaatatagtgacatctaaccaagactgtgtcaacaatattgctgaatcaatggttttgtccagtttattggctcttctacattcattgccatcaagtcgtcagcttgttctggaaactctttatgctttgacatcgagtacaaaaataatcaaagaagcaatggcaaagggtgctttgatctatttactggatatgttctgcaattcaacacatccacaggttcgagcccaaacagcagaactttttgccaaaatgacagcagataaactgataggtccaaaggttcgaattacgttaatgaaatttctaccaagcgttttcatggatgctatgagagacaatcctgaagctgctgtacatatttttgaaggaactcatgaaaatcctgagttaatttggaatgataattccagagataaagtgtccacaacagttagggaaatgatgctagagcactttaaaaatcagcaggacaaccctgaggcaaactggaagttgcctgaagattttgctgtggtgtttggagaagcagagggtgaacttgctgttggaggagtcttcttgaggatctttattgcacaaccagcctgggttctaagaaagcctagagaatttcttattgccctgttagaaaaattaactgagctcctagagaagaacaatcctcatggagaaactctggaaaccttgacaatggcaacagtgtgtctcttcagcgcacaacctcagctggcagatcaggtcccgccattgggccatcttcccaaagttatccaggcaatgaatcataggaacaatgccattcctaagagtgccattcgggttatccatgccttgtctgaaaatgagctgtgtgttcgagccatggcatctttagagaccattggcccactgatgaatggaatgaaaaagcgagcagatactgttggtctagcctgtgaagcaattaatcgaatgtttcagaaggagcagagtgaattagtagcacaagccctgaaagcagatttggttccatacctcttaaaattactcgaaggcattggccttgaaaacctggacagcccagcagccactaaggctcagattgttaaagctctcaaggcaatgactcgaagtttgcagtatggagaacaggtgaatgaaatcctgtgccgttcttcagtctggagtgccttcaaagatcagaaacatgatttgttcatttctgagtcacaaacagcaggatacctcacaggacctggagttgctggctaccttaccgcaggtacatctacatcagtcatgtctaacctgccacctcctgtagaccatgaggcaggcgaccttggctatcagacttgaaatattcacgagagacaataaacgctgaaaggccagtgccaagtccacattcctccagctgatacgttgaagcaaactcttactgcctttctcctggtttcatgacagtgttattcctttttctataaatatatttttaggaaaaaaagtcagtgatcctaattgtatcacattataagaaagcactctgtggatcaacataagtgggtacacaagaattttttttttcttggtgtatgtaagcacatttgttcctttatatctgtttacaaaactgtgaatcaaaaagacaaaactttcttcctagtttttgtaattttttttttgaactagcatgactgtagggttgagctacagtcaacaaaaattgggctaagtcacttttccccaggaaagaatatttccctctcctgcatcaagtctgcgtggccatcctccccccaccatccaagactattaggttttgtccctgcacccttcactggcatcctcaatcattaaccttctgaaagctcacagtacacattagtatgtataactggctttaccaaattgaatgaaaaggagcttgtgcaaaaaaatttaaaaatggatgtcaagatgttatgtaaaagatgagtgtaattgtgaaatgttctatacactatcaaatatataaagctttctatattgaatgtacattatacagatcattcatatgtgtacataaaattttaaaaataaagggaattgactgctttgttaatgaga

SEQ ID NO: 185602 - DNA, 3972 bp, Artificial Sequence
  derived and/or modified sequence
gcacattctacctgaagcaatggtttgttacttagaaaattatgaacctgaaaagttttctgagatttttctaggagaatttgatactccagaagcaatctggagcagtgaaatgaggcgcctgatgatagagaagattgctgcccatctcgcggatttcacacctcgtcttcagagtaacacaagagcactttatcagtattgccccattcctataatcaactatccacaactcgaaaatgaactattttgtaatatttattacctcaaacaactgtgtgatacactccggtttccagattggccaattaaagacccggttaagcttctaaaagatacccttgatgcctggaagaaagaagtagaaaagaagccacctatgatgtcaatagatgatgcttatgaagtgcttaatctgcctcaaggacagggaccgcatgatgagagcaagattaggaaagcttacttcagacttgcacaaaagtaccaccctgataagaatccagaagggagggacatgtttgaaaaagtaaataaagcatatgaatttttatgtaccaaatcagcaaaaatagtggatgggccagatccagagaatataattttaatctaaaaacacagagcatcctcttcaaccgtcataaagaagatttacagccttataaatatgcaggataccccatgcttattcggactataacaatggaaacttcagatgacctccttttctcaaaagaatcaccattgttgcctgcggctacagagctagctttccatactgtcaactgttcagccctcaatgctgaagagctcagaagagagaatggactagaggtgttacaagaggcatttagtcgctgtgtggctgtcttgactcgtgctagtaaaccaagtgacatgtcagtacaggtgtgtggatacataagtaaatgctacagtgtggctgctcagtttgaggaatgccgagagaagatcacggaaatgcctagcatcatcaaggatctctgtcgggtactatattttggcaagagtattccccgcgtagctgctcttggggtagaatgtgtcagttcttttgctgtggatttctggctacagacacacctatttcaggctggaattttgtggtatctccttggttttctgtttaattatgactacacactagaagagagtggcattcagaaaagtgaagaaacaaaccagcaggaggtagcaaacagccttgccaaactgagtgtccatgctctgagtcgccttggagggtatttggctgaagaacaagcaactccagaaaatccaaccataaggaaaagcttagctggcatgctgacaccctatgttgctagaaaacttgctgtggctagtgtgactgagattttgaagatgcttaacagcaacacagaaagtccatatttgatatggaacaattctacaagagcagaattacttgaatttcttgaatcccaacaagaaaacatgattaaaaaaggtgattgtgacaaaacttatggatcagaatttgtctacagtgatcatgccaaagaacttattgtaggggagatttttgttagggtgtataatgaagttcctactttccaactggaggttccaaaagcatttgctgcaagtctcttggattatataggctcgcaggcccaatacttgcacacattcatggccatcacacacgcggcaaaagtggagtcagagcaacatggagatcgcttaccgagagtagaaatggctttggaggctctgagaaatgtcataaaatacaatccaggttctgagagtgaatgcattgggcactttaagttgatattttctcttctccgagttcatggagctggtcaagtgcagcagttggctttagaggttgtgaatatagtgacatctaaccaagactgtgtcaacaatattgctgaatcaatggttttgtccagtttattggctcttctacattcattgccatcaagtcgtcagcttgttctggaaactctttatgctttgacatcgagtacaaaaataatcaaagaagcaatggcaaagggtgctttgatctatttactggatatgttctgcaattcaacacatccacaggttcgagcccaaacagcagaactttttgccaaaatgacagcagataaactgataggtccaaaggttcgaattacgttaatgaaatttctaccaagcgttttcatggatgctatgagagacaatcctgaagctgctgtacatatttttgaaggaactcatgaaaatcctgagttaatttggaatgataattccagagataaagtgtccacaacagttagggaaatgatgctagagcactttaaaaatcagcaggacaaccctgaggcaaactggaagttgcctgaagattttgctgtggtgtttggagaagcagagggtgaacttgctgttggaggagtcttcttgaggatctttattgcacaaccagcctgggttctaagaaagcctagagaatttcttattgccctgttagaaaaattaactgagctcctagagaagaacaatcctcatggagaaactctggaaaccttgacaatggcaacagtgtgtctcttcagcgcacaacctcagctggcagatcaggtcccgccattgggccatcttcccaaagttatccaggcaatgaatcataggaacaatgccattcctaagagtgccattcgggttatccatgccttgtctgaaaatgagctgtgtgttcgagccatggcatctttagagaccattggcccactgatgaatggaatgaaaaagcgagcagatactgttggtctagcctgtgaagcaattaatcgaatgtttcagaaggagcagagtgaattagtagcacaagccctgaaagcagatttggttccatacctcttaaaattactcgaaggcattggccttgaaaacctggacagcccagcagccactaaggctcagattgttaaagctctcaaggcaatgactcgaagtttgcagtatggagaacaggtgaatgaaatcctgtgccgttcttcagtctggagtgccttcaaagatcagaaacatgatttgttcatttctgagtcacaaacagcaggatacctcacaggacctggagttgctggctaccttaccgcaggtacatctacatcagtcatgtctaacctgccacctcctgtagaccatgaggcaggcgaccttggctatcagacttgaaatattcacgagagacaataaacgctgaaaggccagtgccaagtccacattcctccagctgatacgttgaagcaaactcttactgcctttctcctggtttcatgacagtgttattcctttttctataaatatatttttaggaaaaaaagtcagtgatcctaattgtatcacattataagaaagcactctgtggatcaacataagtgggtacacaagaattttttttttcttggtgtatgtaagcacatttgttcctttatatctgtttacaaaactgtgaatcaaaaagacaaaactttcttcctagtttttgtaattttttttttgaactagcatgactgtagggttgagctacagtcaacaaaaattgggctaagtcacttttccccaggaaagaatatttccctctcctgcatcaagtctgcgtggccatcctccccccaccatccaagactattaggttttgtccctgcacccttcactggcatcctcaatcattaaccttctgaaagctcacagtacacattagtatgtataactggctttaccaaattgaatgaaaaggagcttgtgcaaaaaaatttaaaaatggatgtcaagatgttatgtaaaagatgagtgtaattgtgaaatgttctatacactatcaaatatataaagctttctatattgaatgtacattatacagatcattcatatgtgtacataaaattttaaaaataaagggaattgactgctttgttaatg

SEQ ID NO: 185603 - protein, 1168 aa, Artificial Sequence
  derived and/or modified sequence
MSWFSGLLVPKVDERKTAWGERNGQKRSRRRGTRAGGFCTPRYMSCLRDAEPPSPTPAGPPRCPWQDDAFIRRGGPGKGKELGLRAVALGFEDTEVTTTAGGTAEVAPDAVPRSGRSCWRRLVQVFQSKQFRSAKLERLYQRYFFQMNQSSLTLLMAVLVLLTAVLLAFHAAPARPQPAYVALLACAAALFVGLMVVCNRHSFRQDSMWVVSYVVLGILAAVQVGGALAADPRSPSAGLWCPVFFVYIAYTLLPIRMRAAVLSGLGLSTLHLILAWQLNRGDAFLWKQLGANVLLFLCTNVIGICTHYPAEVSQRQAFQETRGYIQARLHLQHENRQQERLLLSVLPQHVAMEMKEDINTKKEDMMFHKIYIQKHDNVSILFADIEGFTSLASQCTAQELVMTLNELFARFDKLAAENHCLRIKILGDCYYCVSGLPEARADHAHCCVEMGVDMIEAISLVREVTGVNVNMRVGIHSGRVHCGVLGLRKWQFDVWSNDVTLANHMEAGGRAGRIHITRATLQYLNGDYEVEPGRGGERNAYLKEQHIETFLILGASQKRKEEKAMLAKLQRTRANSMEGLMPRWVPDRAFSRTKDSKAFRQMGIDDSSKDNRGTQDALNPEDEVDEFLSRAIDARSIDQLRKDHVRRFLLTFQREDLEKKYSRKVDPRFGAYVACALLVFCFICFIQLLIFPHSTLMLGIYASIFLLLLITVLICAVYSCGSLFPKALQRLSRSIVRSRAHSTAVGIFSVLLVFTSAIANMFTCNHTPIRSCAARMLNLTPADITACHLQQLNYSLGLDAPLCEGTMPTCSFPEYFIGNMLLSLLASSVFLHISSIGKLAMIFVLGLIYLVLLLLGPPATIFDNYDLLLGVHGLASSNETFDGLDCPAAGRVALKYMTPVILLVFALALYLHAQQVESTARLDFLWKLQATGEKEEMEELQAYNRRLLHNILPKDVAAHFLARERRNDELYYQSCECVAVMFASIANFSEFYVELEANNEGVECLRLLNEIIADFDEIISEERFRQLEKIKTIGSTYMAASGLNASTYDQVGRSHITALADYAMRLMEQMKHINEHSFNNFQMKIGLNMGPVVAGVIGARKPQYDIWGNTVNVSSRMDSTGVPDRIQVTTDLYQVLAAKGYQLECRGVVKVKGKGEMTTYFLNGGPSS

SEQ ID NO: 185604 - protein, 1115 aa, Artificial Sequence
  derived and/or modified sequence
MSWFSGLLVPKVDERKTAWGERNGQKRSRRRGTRAGGFCTPRYMSCLRDAEPPSPTPAGPPRCPWQDDAFIRRGGPGKGKELGLRAVALGFEDTEVTTTAGGTAEVAPDAVPRSGRSCWRRLVQVFQSKQFRSAKLERLYQRYFFQMNQSSLTLLMAVLVLLTAVLLAFHAAPARPQPAYVALLACAAALFVGLMVVCNRHSFRQDSMWVVSYVVLGILAAVQVGGALAADPRSPSAGLWCPVFFVYIAYTLLPIRMRAAVLSGLGLSTLHLILAWQLNRGDAFLWKQLGANVLLFLCTNVIGICTHYPAEVSQRQAFQETRGYIQARLHLQHENRQQERLLLSVLPQHVAMEMKEDINTKKEDMMFHKIYIQKHDNVSILFADIEGFTSLASQCTAQELVMTLNELFARFDKLAAENHCLRIKILGDCYYCVSGLPEARADHAHCCVEMGVDMIEAISLVREVTGVNVNMRVGIHSGRVHCGVLGLRKWQFDVWSNDVTLANHMEAGGRAGRIHITRATLQYLNGDYEVEPGRGGERNAYLKEQHIETFLILGASQKRKEEKAMLAKLQRTRANSMEGLMPRWVPDRAFSRTKDSKAFRQMGIDDSSKDNRGTQDALNPEDEVDEFLSRAIDARSIDQLRKDHVRRFLLTFQREDLEKKYSRKVDPRFGAYVACALLVFCFICFIQLLIFPHSTLMLGIYASIFLLLLITVLICAVYSCGSLFPKALQRLSRSIVRSRAHSTAVGIFSVLLVFTSAIANMYFIGNMLLSLLASSVFLHISSIGKLAMIFVLGLIYLVLLLLGPPATIFDNYDLLLGVHGLASSNETFDGLDCPAAGRVALKYMTPVILLVFALALYLHAQQVESTARLDFLWKLQATGEKEEMEELQAYNRRLLHNILPKDVAAHFLARERRNDELYYQSCECVAVMFASIANFSEFYVELEANNEGVECLRLLNEIIADFDEIISEERFRQLEKIKTIGSTYMAASGLNASTYDQVGRSHITALADYAMRLMEQMKHINEHSFNNFQMKIGLNMGPVVAGVIGARKPQYDIWGNTVNVSSRMDSTGVPDRIQVTTDLYQVLAAKGYQLECRGVVKVKGKGEMTTYFLNGGPSS

SEQ ID NO: 185605 - DNA, 6583 bp, Artificial Sequence
  derived and/or modified sequence
tttttttttttttgagacggagtctcactctgtcacccaggctggagtgcaatggcgcgatctttgctcactgcaacctctgccacccgggttcaagcaattctcctgcctcagctcctgagtagctgggattacaggcgcccgccaccacgcccggctaatttttgtatttttagtagagacgaggtttcaccatcttggccaggctggtcttgaactcctgaccttgtgatctacctgccagggccttccaaagtgctgggattacggacgtgagccaccacgcctggcccaggctaattttttgaaattttaatagaggcagggtcttgctgtattgcccaggttgctctcacattcctagccttaagccatcctcctatctcggcctcacaaagtgctgggattacaggtgtaagccactgtgcctggttttgggcaagtttcttgtcctgactgtgtcttgggttctcacctgttgattggggatacccttgttgcctacctccaagtaattttatgaggatgaaactcatagcttgtcagtgggaagtgcttaggtaatgagctactagtggtggcagtggctgtgatggtggtattaataccactcctactggatggtctctaatactatctccttccttccctaccagcaacatgtcatggtttagtggcctcctggtccctaaagtggatgaacggaaaacagcctggggtgaacgcaatgggcagaagcgttcgcggcgccgtggcactcgggcaggtggcttctgcacgccccgctatatgagctgcctccgggatgcagagccacccagccccacccctgcgggcccccctcggtgcccctggcaggatgacgccttcatccggaggggcggcccaggcaagggcaaggagctggggctgcgggcagtggccctgggcttcgaggataccgaggtgacaacgacagcgggcgggacggctgaggtggcgcccgacgcggtgcccaggagtgggcgatcctgctggcgccgtctggtgcaggtgttccagtcgaagcagttccgttcggccaagctggagcgcctgtaccagcggtacttcttccagatgaaccagagcagcctgacgctgctgatggcggtgctggtgctgctcacagcggtgctgctggctttccacgccgcacccgcccgccctcagcctgcctatgtggcactgttggcctgtgccgccgccctgttcgtggggctcatggtggtgtgtaaccggcatagcttccgccaggactccatgtgggtggtgagctacgtggtgctgggcatcctggcggcagtgcaggtcgggggcgctctcgcagcagacccgcgcagcccctctgcgggcctctggtgccctgtgttctttgtctacatcgcctacacgctcctccccatccgcatgcgggctgccgtcctcagcggcctgggcctctccaccttgcatttgatcttggcctggcaacttaaccgtggtgatgccttcctctggaagcagctcggtgccaatgtgctgctgttcctctgcaccaacgtcattggcatctgcacacactatccagcagaggtgtctcagcgccaggcctttcaggagacccgcggttacatccaggcccggctccacctgcagcatgagaatcggcagcaggagcggctgctgctgtcggtattgccccagcacgttgccatggagatgaaagaagacatcaacacaaaaaaagaagacatgatgttccacaagatctacatacagaagcatgacaatgtcagcatcctgtttgcagacattgagggcttcaccagcctggcatcccagtgcactgcgcaggagctggtcatgaccctgaatgagctctttgcccggtttgacaagctggctgcggagaatcactgcctgaggatcaagatcttgggggactgttactactgtgtgtcagggctgccggaggcccgggccgaccatgcccactgctgtgtggagatgggggtagacatgattgaggccatctcgctggtacgtgaggtgacaggtgtgaatgtgaacatgcgcgtgggcatccacagcgggcgcgtgcactgcggcgtccttggcttgcggaaatggcagttcgatgtgtggtccaatgatgtgaccctggccaaccacatggaggcaggaggccgggctggccgcatccacatcactcgggcaacactgcagtacctgaacggggactacgaggtggagccaggccgtggtggcgagcgcaacgcgtacctcaaggagcagcacattgagactttcctcatcctgggcgccagccagaaacggaaagaggagaaggccatgctggccaagctgcagcggactcgggccaactccatggaagggctgatgccgcgctgggttcctgatcgtgccttctcccggaccaaggactccaaggccttccgccagatgggcattgatgattccagcaaagacaaccggggcacccaagatgccctgaaccctgaggatgaggtggatgagttcctgagccgtgccatcgatgcccgcagcattgatcagctgcggaaggaccatgtgcgccggtttctgctcaccttccagagagaggatcttgagaagaagtactcccggaaggtggatccccgcttcggagcctacgttgcctgtgccctgttggtcttctgcttcatctgcttcatccagcttctcatcttcccacactccaccctgatgcttgggatctatgccagcatcttcctgctgctgctaatcaccgtgctgatctgtgctgtgtactcctgtggttctctgttccctaaggccctgcaacgtctgtcccgcagcattgtccgctcacgggcacatagcaccgcagttggcatcttttccgtcctgcttgtgtttacttctgccattgccaacatgttcacctgtaaccacacccccatacggagctgtgcagcccggatgctgaatttaacacctgctgacatcactgcctgccacctgcagcagctcaattactctctgggcctggatgctcccctgtgtgagggcaccatgcccacctgcagctttcctgagtacttcatcgggaacatgctgctgagtctcttggccagctctgtcttcctgcacatcagcagcatcgggaagttggccatgatctttgtcttggggctcatctatttggtgctgcttctgctgggtcccccagccaccatctttgacaactatgacctactgcttggcgtccatggcttggcttcttccaatgagacctttgatgggctggactgtccagctgcagggagggtggccctcaaatatatgacccctgtgattctgctggtgtttgcgctggcgctgtatctgcatgctcagcaggtggagtcgactgcccgcctagacttcctctggaaactacaggcaacaggggagaaggaggagatggaggagctacaggcatacaaccggaggctgctgcataacattctgcccaaggacgtggcggcccacttcctggcccgggagcgccgcaatgatgaactctactatcagtcgtgtgagtgtgtggctgttatgtttgcctccattgccaacttctctgagttctatgtggagctggaggcaaacaatgagggtgtcgagtgcctgcggctgctcaacgagatcatcgctgactttgatgagattatcagcgaggagcggttccggcagctggaaaagatcaagacgattggtagcacctacatggctgcctcagggctgaacgccagcacctacgatcaggtgggccgctcccacatcactgccctggctgactacgccatgcggctcatggagcagatgaagcacatcaatgagcactccttcaacaatttccagatgaagattgggctgaacatgggcccagtcgtggcaggtgtcatcggggctcggaagccacagtatgacatctgggggaacacagtgaatgtctctagtcgtatggacagcacgggggtccccgaccgaatccaggtgaccacggacctgtaccaggttctagctgccaagggctaccagctggagtgtcgaggggtggtcaaggtgaagggcaagggggagatgaccacctacttcctcaatgggggccccagcagttaacagggcccagccacaaattcagctgaagggaccaaggtgggcattgagtggactctgtgctcactgggtggagctgtggcagggggcactgagcctccagaccctgctaaccacaaaagggaacatcccagcaggctgtgcttggatcatgctcgtctgccctcaagctggaaaacaaggggctacctaccgagaggattatgcaagtgactttctttcttacttggggtagggctgttccctctccaatcttccagcctttgggagcaggggaggggtcagtagcagaagcagagggaggcctcttgcctgagggattaaaatggcagcttgccatgcctacccttccctgtctgtctgggcagcaggttcagggctgagcccttcttttccctcttttttcctgggaatattttgtacaatattttgtacaaagacaggcatgaggagtgcctattccatgcttgcctttgcaatacctgcatccccagcactggtcctgggcacttccccaccccagccaggtgtccctcctatgcacagagcagaggagggagaagctctggggagccagctttggccatatttcaggagaatgtttccatgtgccaaatcttagtcccatgatctgtccccaaaggggaacaaagggacctctgacagcttagatttagccccagttcctgcacgctccagggaacggggtgtctggcctcactggtactgtgaaaaatgctcagagagcaagcctgtgtgtggggatgtcaggtcaggagctggaagttcacctgcaggtgccaaagagcaggccggccagggctggggcagtgccagactctgatctgaggaccccgtcggggtccagatcaggtcactctgccccagtgctctcttgctgtctgctgacaagggggcatggagcatctcttcctcttctgttgccaaatagaaaagggtcagggcatggagaaaggtgaccctgatcccaaacctgccctcccaagtctctggtgttggggagggcccgtgtgtttgtgtaactgtgtgtgcatgttggtctttgtgtgcatatctgttttccaggtctatgtgagtccttgtgctcctgctcctcagctctccaccccaggttgcctctctcctgtgggcctctgtcttctgggaataaagcagggtttcctacttcaggggatgtagagagatgcccaggttgcacaggagtgggatggggtgtggtagcaaaaggagggagaggagtcctttttgtgccaaatccctaagtgccgttcgggggccatgtgtgcagcatgactctccctgtctgtggcagggacccaagcgcttgcttaagccccagtgctccatgccagcacttgaactgtctggggtttgatggacagaggctgaggaatttcctggcttccccagatagtgtcctgggacatggtatgctttggggctggggtagcatggaatccctctgaggacctggatactggtactacggggtggggaagaggaaccttaaacttggctttccccagccttcagcctgagtctagcatgtttctagctccccagtcccttgtgaagccttgagggctggcagaagggttaggaggttgaactctagattcccttcctgtctttgccttccttttacccctttccctgcaacctccttgactctggcctgaatttgttggtgcctcagtttctctgtctgtacctatttaagccaaaggcactagcctgaattttgcttgaagatcactttgtcttggaaatgactagagaggcagaggagaagggtttccagagttgctaggtttgggagtggaaggggcaggcagtgcacttgcccctcctcatgccccttctgacaccagctccctgtggaggcctggtttctgggtaatgcctcccttgggcatcttcatgcatcaaccaaatgggccatcaggtacttcattagtcatggcagaaggaggggaaaagacttgttttccagacagaaaatctactcccctgtccccagccatatccctggataggaagggataggaagagactacttggtgccatggggtaggggtgagggtataagtagatcagagtgggaagacctcagccttgggtggcttgtctctgcttcttgccaggtgggagggcctgtccacaccctggatccccgtaccacagtgccagccatgcccttcccctgggctaccattgtccctttcctcacccagttggtagaggagtcaggaggtgggaggccgtgggctttggttttataatgtaaccactgtgggggtgggggaggatggtgaaccatgtatttcagtgaaatatttaatatatttaaatatcaataaaatcaaactctttgtaaaattaaaaaaaaaaaaaaaaa

SEQ ID NO: 185606 - DNA, 5877 bp, Artificial Sequence
  derived and/or modified sequence
cggacggcggacggcgggcgggacggccaggacgcgcgggctcggaggaccgcgggacggccggccggccggccggagcccgcgggggcggcggggcgggggcccagggcaggcgcggagccgggccggcagcaacatgtcatggtttagtggcctcctggtccctaaagtggatgaacggaaaacagcctggggtgaacgcaatgggcagaagcgttcgcggcgccgtggcactcgggcaggtggcttctgcacgccccgctatatgagctgcctccgggatgcagagccacccagccccacccctgcgggcccccctcggtgcccctggcaggatgacgccttcatccggaggggcggcccaggcaagggcaaggagctggggctgcgggcagtggccctgggcttcgaggataccgaggtgacaacgacagcgggcgggacggctgaggtggcgcccgacgcggtgcccaggagtgggcgatcctgctggcgccgtctggtgcaggtgttccagtcgaagcagttccgttcggccaagctggagcgcctgtaccagcggtacttcttccagatgaaccagagcagcctgacgctgctgatggcggtgctggtgctgctcacagcggtgctgctggctttccacgccgcacccgcccgccctcagcctgcctatgtggcactgttggcctgtgccgccgccctgttcgtggggctcatggtggtgtgtaaccggcatagcttccgccaggactccatgtgggtggtgagctacgtggtgctgggcatcctggcggcagtgcaggtcgggggcgctctcgcagcagacccgcgcagcccctctgcgggcctctggtgccctgtgttctttgtctacatcgcctacacgctcctccccatccgcatgcgggctgccgtcctcagcggcctgggcctctccaccttgcatttgatcttggcctggcaacttaaccgtggtgatgccttcctctggaagcagctcggtgccaatgtgctgctgttcctctgcaccaacgtcattggcatctgcacacactatccagcagaggtgtctcagcgccaggcctttcaggagacccgcggttacatccaggcccggctccacctgcagcatgagaatcggcagcaggagcggctgctgctgtcggtattgccccagcacgttgccatggagatgaaagaagacatcaacacaaaaaaagaagacatgatgttccacaagatctacatacagaagcatgacaatgtcagcatcctgtttgcagacattgagggcttcaccagcctggcatcccagtgcactgcgcaggagctggtcatgaccctgaatgagctctttgcccggtttgacaagctggctgcggagaatcactgcctgaggatcaagatcttgggggactgttactactgtgtgtcagggctgccggaggcccgggccgaccatgcccactgctgtgtggagatgggggtagacatgattgaggccatctcgctggtacgtgaggtgacaggtgtgaatgtgaacatgcgcgtgggcatccacagcgggcgcgtgcactgcggcgtccttggcttgcggaaatggcagttcgatgtgtggtccaatgatgtgaccctggccaaccacatggaggcaggaggccgggctggccgcatccacatcactcgggcaacactgcagtacctgaacggggactacgaggtggagccaggccgtggtggcgagcgcaacgcgtacctcaaggagcagcacattgagactttcctcatcctgggcgccagccagaaacggaaagaggagaaggccatgctggccaagctgcagcggactcgggccaactccatggaagggctgatgccgcgctgggttcctgatcgtgccttctcccggaccaaggactccaaggccttccgccagatgggcattgatgattccagcaaagacaaccggggcacccaagatgccctgaaccctgaggatgaggtggatgagttcctgagccgtgccatcgatgcccgcagcattgatcagctgcggaaggaccatgtgcgccggtttctgctcaccttccagagagaggatcttgagaagaagtactcccggaaggtggatccccgcttcggagcctacgttgcctgtgccctgttggtcttctgcttcatctgcttcatccagcttctcatcttcccacactccaccctgatgcttgggatctatgccagcatcttcctgctgctgctaatcaccgtgctgatctgtgctgtgtactcctgtggttctctgttccctaaggccctgcaacgtctgtcccgcagcattgtccgctcacgggcacatagcaccgcagttggcatcttttccgtcctgcttgtgtttacttctgccattgccaacatgtacttcatcgggaacatgctgctgagtctcttggccagctctgtcttcctgcacatcagcagcatcgggaagttggccatgatctttgtcttggggctcatctatttggtgctgcttctgctgggtcccccagccaccatctttgacaactatgacctactgcttggcgtccatggcttggcttcttccaatgagacctttgatgggctggactgtccagctgcagggagggtggccctcaaatatatgacccctgtgattctgctggtgtttgcgctggcgctgtatctgcatgctcagcaggtggagtcgactgcccgcctagacttcctctggaaactacaggcaacaggggagaaggaggagatggaggagctacaggcatacaaccggaggctgctgcataacattctgcccaaggacgtggcggcccacttcctggcccgggagcgccgcaatgatgaactctactatcagtcgtgtgagtgtgtggctgttatgtttgcctccattgccaacttctctgagttctatgtggagctggaggcaaacaatgagggtgtcgagtgcctgcggctgctcaacgagatcatcgctgactttgatgagattatcagcgaggagcggttccggcagctggaaaagatcaagacgattggtagcacctacatggctgcctcagggctgaacgccagcacctacgatcaggtgggccgctcccacatcactgccctggctgactacgccatgcggctcatggagcagatgaagcacatcaatgagcactccttcaacaatttccagatgaagattgggctgaacatgggcccagtcgtggcaggtgtcatcggggctcggaagccacagtatgacatctgggggaacacagtgaatgtctctagtcgtatggacagcacgggggtccccgaccgaatccaggtgaccacggacctgtaccaggttctagctgccaagggctaccagctggagtgtcgaggggtggtcaaggtgaagggcaagggggagatgaccacctacttcctcaatgggggccccagcagttaacagggcccagccacaaattcagctgaagggaccaaggtgggcattgagtggactctgtgctcactgggtggagctgtggcagggggcactgagcctccagaccctgctaaccacaaaagggaacatcccagcaggctgtgcttggatcatgctcgtctgccctcaagctggaaaacaaggggctacctaccgagaggattatgcaagtgactttctttcttacttggggtagggctgttccctctccaatcttccagcctttgggagcaggggaggggtcagtagcagaagcagagggaggcctcttgcctgagggattaaaatggcagcttgccatgcctacccttccctgtctgtctgggcagcaggttcagggctgagcccttcttttccctcttttttcctgggaatattttgtacaatattttgtacaaagacaggcatgaggagtgcctattccatgcttgcctttgcaatacctgcatccccagcactggtcctgggcacttccccaccccagccaggtgtccctcctatgcacagagcagaggagggagaagctctggggagccagctttggccatatttcaggagaatgtttccatgtgccaaatcttagtcccatgatctgtccccaaaggggaacaaagggacctctgacagcttagatttagccccagttcctgcacgctccagggaacggggtgtctggcctcactggtactgtgaaaaatgctcagagagcaagcctgtgtgtggggatgtcaggtcaggagctggaagttcacctgcaggtgccaaagagcaggccggccagggctggggcagtgccagactctgatctgaggaccccgtcggggtccagatcaggtcactctgccccagtgctctcttgctgtctgctgacaagggggcatggagcatctcttcctcttctgttgccaaatagaaaagggtcagggcatggagaaaggtgaccctgatcccaaacctgccctcccaagtctctggtgttggggagggcccgtgtgtttgtgtaactgtgtgtgcatgttggtctttgtgtgcatatctgttttccaggtctatgtgagtccttgtgctcctgctcctcagctctccaccccaggttgcctctctcctgtgggcctctgtcttctgggaataaagcagggtttcctacttcaggggatgtagagagatgcccaggttgcacaggagtgggatggggtgtggtagcaaaaggagggagaggagtcctttttgtgccaaatccctaagtgccgttcgggggccatgtgtgcagcatgactctccctgtctgtggcagggacccaagcgcttgcttaagccccagtgctccatgccagcacttgaactgtctggggtttgatggacagaggctgaggaatttcctggcttccccagatagtgtcctgggacatggtatgctttggggctggggtagcatggaatccctctgaggacctggatactggtactacggggtggggaagaggaaccttaaacttggctttccccagccttcagcctgagtctagcatgtttctagctccccagtcccttgtgaagccttgagggctggcagaagggttaggaggttgaactctagattcccttcctgtctttgccttccttttacccctttccctgcaacctccttgactctggcctgaatttgttggtgcctcagtttctctgtctgtacctatttaagccaaaggcactagcctgaattttgcttgaagatcactttgtcttggaaatgactagagaggcagaggagaagggtttccagagttgctaggtttgggagtggaaggggcaggcagtgcacttgcccctcctcatgccccttctgacaccagctccctgtggaggcctggtttctgggtaatgcctcccttgggcatcttcatgcatcaaccaaatgggccatcaggtacttcattagtcatggcagaaggaggggaaaagacttgttttccagacagaaaatctactcccctgtccccagccatatccctggataggaagggataggaagagactacttggtgccatggggtaggggtgagggtataagtagatcagagtgggaagacctcagccttgggtggcttgtctctgcttcttgccaggtgggagggcctgtccacaccctggatccccgtaccacagtgccagccatgcccttcccctgggctaccattgtccctttcctcacccagttggtagaggagtcaggaggtgggaggccgtgggctttggttttataatgtaaccactgtgggggtgggggaggatggtgaaccatgtatttcagtgaaatatttaatatatttaaatatcaataaaatcaaactctttgt

SEQ ID NO: 185607 - DNA, 3507 bp, Artificial Sequence
  derived and/or modified sequence
atgtcgtggttttccggcctcctggttcctaaggtcgatgagcgtaagacagcttggggagaacgcaatggccagaagcggtccagacggaggggaacacgcgctggcggcttctgcactccaagatacatgagctgcctaagagacgcagagccaccttccccgacaccagccggccctccaaggtgcccatggcaggatgacgccttcattcggagaggtggcccaggcaaaggcaaggagctgggcctgagagcagttgcccttggctttgaggacaccgaagtgacgacaacagccggcggaaccgctgaagtggcccctgacgccgtcccaagatcaggtagatcttgttggcggagactggtgcaagtatttcaatcgaaacagttccggtcagccaagctggagcgtctctaccagcggtatttctttcagatgaatcaaagctccctcaccctgttaatggcagtcctggtgctgctgaccgccgtccttctggcttttcacgctgcacccgcacgcccacagccagcttacgtcgcactgctcgcctgtgccgctgctctgtttgtaggacttatggtagtgtgcaatagacactcgtttcggcaggactccatgtgggttgtaagctacgtggtactgggcatcctcgccgccgtgcaggtgggtggcgccctggccgccgatccccgctcccccagcgcgggcctgtggtgtccagtcttctttgtatatatcgcctatactctgctacctatcaggatgagagcagccgtgctcagcggcctgggcctcagcacccttcatctcatacttgcctggcagcttaatcgaggggacgccttcctgtggaaacagctcggcgctaacgtcctgctgtttctgtgcaccaacgtgattgggatctgtactcattacccagccgaggtgtcccagcgccaggcatttcaagagacgagggggtatatccaggctcgactgcacctccagcatgagaatcgtcagcaagagaggctgcttttgagtgtactgccccagcatgtggcgatggagatgaaggaggatatcaacacaaaaaaagaggatatgatgtttcataaaatctatattcaaaaacacgacaatgtgtcaatcttattcgccgacattgagggcttcaccagcttggccagccagtgcaccgctcaagaacttgtaatgacgctgaacgagctgttcgctcggtttgataagctggccgcggagaaccattgtttgcgcattaagatacttggggattgctattactgcgttagtggattaccagaggcgcgggcagatcatgcccactgctgcgtagagatgggagtggatatgattgaggctatctccctcgtgcgcgaagtcactggggtaaacgtgaacatgagagtgggtatccactcagggcgagtccactgtggagttctcgggctccgcaagtggcagttcgacgtttggtccaacgacgtaactcttgccaaccatatggaggcaggcggacgggccggtagaatccatataacgagggctactttgcagtatctgaatggagactacgaagttgagccgggtcgcggaggcgaacgtaacgcctacctgaaagagcaacacatcgagaccttcctgatcttaggcgcctctcagaagcggaaagaggagaaggctatgctggctaagttacagcgaaccagagccaacagtatggagggcctcatgccacgttgggtgcctgatagggcattctcccgaaccaaagactctaaggcatttcggcagatggggatagacgacagcagcaaggacaatcgcggcacacaggacgcactgaatccagaggatgaagtggatgagttcctgtcaagagctatcgatgcacggtccatcgatcaactgaggaaggaccatgtgcggcggttcttgctaacatttcagcgagaggatctggagaaaaagtacagtcggaaggtcgaccctcgcttcggagcatacgtggcatgtgcattgctggtcttctgttttatctgtttcatccagctcttgatatttccacactcaactctgatgcttgggatctacgcctcgatatttctgctgttactgatcactgtgctcatatgtgccgtgtacagctgcggctctctcttcccaaaagccctacaacgactctcccgttctatagtgaggagccgggcacatagcaccgcagtggggatattcagtgtgctgctcgtttttactagcgcgattgcaaatatgtttacttgtaaccacacaccaattaggtcatgcgctgccaggatgcttaacctcacccccgccgacatcaccgcctgccatttgcagcagctgaattactccttgggtctggacgcacccctgtgtgaaggaactatgcccacctgcagcttccctgagtacttcattggcaacatgctattaagcctacttgcatcaagtgtgttccttcatatcagcagcatcggtaagctcgcgatgatatttgtgctaggcctaatctatctggttctgctcctcctcggcccacccgcaaccatctttgacaattatgacctgctcctaggcgtgcacggcctggcatcctctaacgaaacatttgacggcctcgattgcccggccgccggaagggtcgccctgaaatacatgaccccagttattctgctcgtgtttgctttggctctctatctgcacgctcaacaggtggaaagcacggctaggcttgacttcttatggaaactgcaggctacaggagaaaaggaagagatggaagaattacaggcttataatcgcaggctgctccacaacatcctccctaaagacgtggcagcgcattttctggcgagggagagacgcaatgacgagttgtattatcagtcgtgcgaatgcgttgctgtcatgtttgcctccatcgccaatttttcagaattttatgtggaactggaggctaacaatgaaggagtggagtgtttgcggcttctcaatgagataattgcagattttgacgagattatctcagaggagcggttcaggcagcttgaaaaaatcaagactatcggcagcacatacatggccgcttccggcttgaacgcctctacctacgaccaggtgggtagaagccatattacagccctagcagactacgccatgagacttatggagcaaatgaagcatatcaacgaacactcttttaacaatttccaaatgaagatagggctgaacatgggccctgtggtagctggagttataggggcacgtaaacctcaatatgatatctggggaaacactgttaacgtatcgagtaggatggacagcactggtgttcccgatagaattcaggttacaacggatctttaccaggttctagctgccaaagggtaccaactagaatgtcggggcgtggtgaaagtgaaagggaaaggcgaaatgactacctatttcttaaacggaggcccctcctcatag

SEQ ID NO: 185608 - DNA, 3348 bp, Artificial Sequence
  derived and/or modified sequence
atgagctggttctcaggactattggtccccaaggtcgacgaacgaaaaaccgcgtggggcgagcggaatggacagaagcgaagtagaaggagaggaactcgagctgggggattctgcaccccccggtatatgtcctgcctaagagatgctgagccaccgtctccgacaccagcaggtcctcctagatgcccctggcaagacgacgccttcatacggcgtgggggaccgggcaaaggcaaggagttgggactccgggctgtggcgctgggtttcgaagatacagaggttaccacaacagccgggggcacggccgaggtggcccccgatgcagtccctagatctggccgctcctgttggcgtagactggtgcaggtcttccagtccaaacagttccggagcgctaaactggagcgcttatatcaaagatatttcttccagatgaatcaaagctctctgactttactgatggccgtgctcgtcctactgacagccgttctgctggccttccacgctgctccagcaagaccccaacccgcgtatgtggcccttttggcttgtgctgccgccttgttcgtgggtttaatggtggtatgtaataggcatagtttcagacaggactcgatgtgggtagtttcatatgtggtccttggcattctagccgccgtccaggtcgggggcgccctggccgccgaccctcggtccccttcagccggcctgtggtgtccggtgtttttcgtctacatagcctacacgttacttccaatccgcatgagagcagccgtcctgagtggcctgggccttagcactttgcatctgattctcgcctggcagcttaatagaggagacgcatttctctggaaacagctgggtgctaatgtgctgctgtttctgtgtacaaatgttatcggtatttgcacacactaccctgctgaagttagccagcggcaggcctttcaggagacacgcggatacattcaggcacgactacatctgcaacacgaaaataggcagcaagaacgcttattgttgagtgtcctacctcagcatgtcgctatggaaatgaaagaggatataaatacaaaaaaagaggatatgatgtttcacaaaatctacattcagaaacatgataatgtctcaattctattcgcagacatcgagggtttcacctccttagcaagccagtgcacggctcaggagttggtaatgactttgaacgaactctttgctcggttcgacaaactcgctgccgaaaaccattgccttaggatcaagattctaggcgactgttactattgcgtgtctgggctccccgaagcacgcgccgatcacgctcactgttgcgtggagatgggagtcgatatgattgaagccattagcctggtgagagaagtgaccggggtcaatgtcaatatgcgggtgggtattcactcgggtagggttcattgcggagttttggggctccggaagtggcagttcgatgtctggagtaacgacgttacactggcaaaccacatggaggctgggggcagggcaggcaggattcacattacgcgggcaactctccagtacctcaatggagactacgaagtagaaccaggtcgggggggtgagcgcaacgcctatctgaaggaacagcatatcgagacgttcttgatcctcggcgcttctcagaaaagaaaggaggagaaggccatgctagcaaaactacagcggacccgcgccaatagcatggaggggcttatgccgagatgggtgcctgatcgcgccttctccaggacaaaagactcaaaggccttcagacagatgggcatcgatgattcctccaaagacaatcgcggaacacaagacgcccttaacccagaggacgaggtcgacgaattcttatcaagagccattgatgccagatccatagaccaattacgaaaggatcatgtccggcggttcctgctcactttccagcgagaggatcttgagaagaaatattctaggaaggtggatccacgtttcggggcgtacgtcgcctgcgctttgctggtattctgcttcatctgcttcattcaactgctcatctttccccattcaactctgatgttagggatctatgcatcaatttttcttctgttactgattacggtactaatttgcgcggtgtatagttgcgggtccctgttcccaaaagccttgcaacggctgagccggtctatagttcgctccagggcacacagcactgcagtgggcattttttccgtactgctcgtgttcacttcagccatagcaaacatgtatttcattggcaacatgcttcttagcctcctggcctccagtgtgttccttcacattagcagcatcggcaagctcgccatgattttcgtcttaggcttgatctatttggttctactccttctcgggccgcccgcaactatctttgataactacgatctcctattaggagtccacgggcttgcctcctctaacgagacattcgacggacttgattgtccggctgccggacgtgtggccttgaagtacatgaccccagtgatactgctcgtgtttgcactggctctgtacctgcacgcccagcaggtcgaaagcactgctagacttgactttctgtggaagctgcaagcaaccggtgaaaaagaggagatggaagaactccaagcctataaccgccggcttctccacaacattttgcctaaggacgtggccgcacactttctcgctagagagaggcgcaacgacgaattatattatcagtcgtgcgaatgtgtagctgtcatgtttgcttcaatcgcaaatttttccgagttttatgtggagctggaggccaataatgagggcgtcgagtgtctgcggttgctgaacgaaatcatcgccgactttgatgagatcatctccgaggaacggtttagacagttggaaaaaataaagacgattggatctacatatatggcagccagcgggctcaatgcctctacatacgaccaggtgggccggagtcatattacggccctcgcagactatgcaatgaggttgatggagcagatgaaacatattaacgagcactccttcaataatttccaaatgaagattggattaaacatggggcctgtcgtcgccggtgtaataggtgcaaggaaaccccagtacgatatttgggggaacactgttaacgtgtctagccgcatggacagtacaggcgtgcctgacagaattcaggtgacaaccgatttgtatcaggtccttgccgccaagggttatcagctggaatgccggggagtagtgaaagtcaagggcaagggggagatgaccacgtacttcttgaacggcgggccttcatcctag

SEQ ID NO: 185609 - DNA, 3348 bp, Artificial Sequence
  derived and/or modified sequence
atgagttggttttccggactcttggtgcctaaggtggacgaaaggaaaacagcctggggggaacgaaatggacaaaagcgttcaagaaggcgcggcacacgtgcaggcggattttgtacgcctagatacatgagctgtctgagggatgccgagccgccttcccctacgccggccgggccgccaagatgcccttggcaggacgacgccttcattcggcgagggggtcccgggaagggcaaggaattaggcttacgagcggttgccctcggctttgaagatactgaagtgaccactactgccggtggcactgccgaagtcgcccctgatgcagttccaaggtcaggcagaagctgctggcgaaggctggtgcaggtcttccagagcaagcagtttagaagcgccaaattagagcgtttatatcaacgatacttcttccagatgaaccaatccagtctgacgttattgatggccgtgctcgtgctgcttactgcagtcctgctcgcttttcacgcagcgcctgccagacctcaaccggcgtacgtggccctgctggcctgtgccgccgctctgtttgtgggattaatggtggtttgcaatcggcatagcttcaggcaggattccatgtgggtcgtgtcctacgttgtcctgggcatcttggcagccgtgcaagtgggtggcgccctagccgccgacccccggagtccctcagctgggctgtggtgccccgtgttcttcgtgtatattgcttacacccttctgccaatcaggatgagagccgcggtactgagtggtctgggattgtcaacactccaccttatcctggcatggcaactcaacagaggagacgcctttttgtggaaacaattgggtgctaatgtactgcttttcttgtgtactaacgttattgggatatgtacgcattaccccgccgaggtctctcagaggcaggcctttcaggaaacgcggggctacattcaggctcggctccaccttcagcacgagaacagacagcaggagcgtttgctgctttctgttctgccacagcacgtcgccatggaaatgaaggaagatatcaacaccaagaaggaggatatgatgtttcacaagatctacatccagaaacatgacaatgtgagcattttattcgctgacattgaaggcttcacatcccttgcctcccagtgcaccgctcaagagctggttatgacattgaatgagctattcgcccgtttcgacaagctggctgccgaaaatcactgcctgcgaataaaaatcctcggagactgctactattgcgtgtcgggccttcccgaggccagagccgaccacgcacactgctgtgtggagatgggcgttgatatgattgaggctatctcacttgtgcgggaagtgaccggcgttaatgtgaacatgcgggtggggatccactctggcagagtccattgcggcgtgctggggcttaggaaatggcagttcgacgtctggtccaatgatgtaacattggctaaccacatggaggcaggcgggagggccggaagaattcacatcactcgggccacactccagtatctgaatggcgattatgaagtagagccaggacggggcggggagcggaatgcatatcttaaggaacagcacattgagacgttcctgatcctgggtgcatcccagaagaggaaggaagaaaaggccatgctggctaagctccaacggaccagagccaactccatggaaggcctgatgccccgctgggtgcccgatcgcgcttttagcagaacaaaagactctaaggcattccgccaaatgggcattgatgactcctctaaggacaatcgggggactcaggatgccctcaacccagaggacgaggtagatgagtttctcagcagggctatcgacgcacgctcaatagaccaattgcgcaaagaccatgtccggagatttctccttacattccagagggaagacctcgagaagaagtactctcggaaggtggatcctcgttttggggcctatgtggcatgcgcactccttgtgttttgctttatctgcttcatacagctgctcattttcccgcactcaacactcatgctgggaatctacgccagcattttcctgctgctgttgatcactgtgctgatttgcgccgtatatagctgcgggtctctgttccctaaggctctgcagagactaagtcgctctatcgtgcggagcagggcccactccacagccgttggaatcttttctgtcctcctagtctttacctccgcaatcgccaacatgtatttcattggtaatatgcttctaagcttgctcgcgtcttctgtctttttacacatatcttcaatcggcaagttagctatgatcttcgttctgggcctgatctatctggtcctgttactcctcggaccacctgcaacaatatttgacaactatgatctgctgctcggtgttcacggactggcatccagtaatgagacctttgatggcctagattgcccggccgcggggagggtggcactgaagtacatgaccccggtcatcctgctggtctttgcactggcactatacctgcacgcccagcaggtcgagagcacggctcgactggacttcctctggaaattacaagccactggcgaaaaagaggagatggaggagctccaggcttacaatagacggctcctccataatattctcccaaaagatgtcgccgcccactttctggcgagagagcggcggaacgatgaactgtattaccaatcttgcgagtgtgttgctgtgatgtttgctagtatagctaacttttccgagttttatgtggagctggaagctaacaacgagggcgtggaatgcctgcgcctgctgaatgaaattatcgcagatttcgacgagatcatcagcgaagagagattcagacagttggaaaaaatcaaaactatcggctcgacctacatggctgccagcggccttaatgctagcacgtacgaccaggtggggcggtcacatattacagccttagccgattacgcgatgcgcttaatggagcagatgaagcacattaatgagcactcttttaacaacttccaaatgaagataggactgaatatggggcctgtagtcgcaggcgtgatcggcgccaggaaaccccagtacgacatttggggtaacactgtaaacgttagtagtaggatggatagtaccggcgtgcccgatcggatccaggttacaaccgatctgtaccaggtcctggccgccaaagggtatcagttggagtgccgtggtgtggtgaaagttaagggcaaaggagagatgaccacttattttctgaacggaggaccttcaagttag

SEQ ID NO: 185610 - DNA, 6464 bp, Artificial Sequence
  derived and/or modified sequence
ccggtctataggtgcataccaccacaccaggctaatttttttttttttgagacggagtctcactctgtcacccaggctggagtgcaatggcgcgatctttgctcactgcaacctctgccacccgggttcaagcaattctcctgcctcagctcctgagtagctgggattacaggcgcccgccaccacgcccggctaatttttgtatttttagtagagacgaggtttcaccatcttggccaggctggtcttgaactcctgaccttgtgatctacctgccagggccttccaaagtgctgggattacggacgtgagccaccacgcctggcccaggctaattttttgaaattttaatagaggcagggtcttgctgtattgcccaggttgctctcacattcctagccttaagccatcctcctatctcggcctcacaaagtgctgggattacaggtgtaagccactgtgcctggttttgggcaagtttcttgtcctgactgtgtcttgggttctcacctgttgattggggatacccttgttgcctacctccaagtaattttatgaggatgaaactcatagcttgtcagtgggaagtgcttaggtaatgagctactagtggtggcagtggctgtgatggtggtattaataccactcctactggatggtctctaatactatctccttccttccctaccagcaacatgtcatggtttagtggcctcctggtccctaaagtggatgaacggaaaacagcctggggtgaacgcaatgggcagaagcgttcgcggcgccgtggcactcgggcaggtggcttctgcacgccccgctatatgagctgcctccgggatgcagagccacccagccccacccctgcgggcccccctcggtgcccctggcaggatgacgccttcatccggaggggcggcccaggcaagggcaaggagctggggctgcgggcagtggccctgggcttcgaggataccgaggtgacaacgacagcgggcgggacggctgaggtggcgcccgacgcggtgcccaggagtgggcgatcctgctggcgccgtctggtgcaggtgttccagtcgaagcagttccgttcggccaagctggagcgcctgtaccagcggtacttcttccagatgaaccagagcagcctgacgctgctgatggcggtgctggtgctgctcacagcggtgctgctggctttccacgccgcacccgcccgccctcagcctgcctatgtggcactgttggcctgtgccgccgccctgttcgtggggctcatggtggtgtgtaaccggcatagcttccgccaggactccatgtgggtggtgagctacgtggtgctgggcatcctggcggcagtgcaggtcgggggcgctctcgcagcagacccgcgcagcccctctgcgggcctctggtgccctgtgttctttgtctacatcgcctacacgctcctccccatccgcatgcgggctgccgtcctcagcggcctgggcctctccaccttgcatttgatcttggcctggcaacttaaccgtggtgatgccttcctctggaagcagctcggtgccaatgtgctgctgttcctctgcaccaacgtcattggcatctgcacacactatccagcagaggtgtctcagcgccaggcctttcaggagacccgcggttacatccaggcccggctccacctgcagcatgagaatcggcagcaggagcggctgctgctgtcggtattgccccagcacgttgccatggagatgaaagaagacatcaacacaaaaaaagaagacatgatgttccacaagatctacatacagaagcatgacaatgtcagcatcctgtttgcagacattgagggcttcaccagcctggcatcccagtgcactgcgcaggagctggtcatgaccctgaatgagctctttgcccggtttgacaagctggctgcggagaatcactgcctgaggatcaagatcttgggggactgttactactgtgtgtcagggctgccggaggcccgggccgaccatgcccactgctgtgtggagatgggggtagacatgattgaggccatctcgctggtacgtgaggtgacaggtgtgaatgtgaacatgcgcgtgggcatccacagcgggcgcgtgcactgcggcgtccttggcttgcggaaatggcagttcgatgtgtggtccaatgatgtgaccctggccaaccacatggaggcaggaggccgggctggccgcatccacatcactcgggcaacactgcagtacctgaacggggactacgaggtggagccaggccgtggtggcgagcgcaacgcgtacctcaaggagcagcacattgagactttcctcatcctgggcgccagccagaaacggaaagaggagaaggccatgctggccaagctgcagcggactcgggccaactccatggaagggctgatgccgcgctgggttcctgatcgtgccttctcccggaccaaggactccaaggccttccgccagatgggcattgatgattccagcaaagacaaccggggcacccaagatgccctgaaccctgaggatgaggtggatgagttcctgagccgtgccatcgatgcccgcagcattgatcagctgcggaaggaccatgtgcgccggtttctgctcaccttccagagagaggatcttgagaagaagtactcccggaaggtggatccccgcttcggagcctacgttgcctgtgccctgttggtcttctgcttcatctgcttcatccagcttctcatcttcccacactccaccctgatgcttgggatctatgccagcatcttcctgctgctgctaatcaccgtgctgatctgtgctgtgtactcctgtggttctctgttccctaaggccctgcaacgtctgtcccgcagcattgtccgctcacgggcacatagcaccgcagttggcatcttttccgtcctgcttgtgtttacttctgccattgccaacatgttcacctgtaaccacacccccatacggagctgtgcagcccggatgctgaatttaacacctgctgacatcactgcctgccacctgcagcagctcaattactctctgggcctggatgctcccctgtgtgagggcaccatgcccacctgcagctttcctgagtacttcatcgggaacatgctgctgagtctcttggccagctctgtcttcctgcacatcagcagcatcgggaagttggccatgatctttgtcttggggctcatctatttggtgctgcttctgctgggtcccccagccaccatctttgacaactatgacctactgcttggcgtccatggcttggcttcttccaatgagacctttgatgggctggactgtccagctgcagggagggtggccctcaaatatatgacccctgtgattctgctggtgtttgcgctggcgctgtatctgcatgctcagcaggtggagtcgactgcccgcctagacttcctctggaaactacaggcaacaggggagaaggaggagatggaggagctacaggcatacaaccggaggctgctgcataacattctgcccaaggacgtggcggcccacttcctggcccgggagcgccgcaatgatgaactctactatcagtcgtgtgagtgtgtggctgttatgtttgcctccattgccaacttctctgagttctatgtggagctggaggcaaacaatgagggtgtcgagtgcctgcggctgctcaacgagatcatcgctgactttgatgagattatcagcgaggagcggttccggcagctggaaaagatcaagacgattggtagcacctacatggctgcctcagggctgaacgccagcacctacgatcaggtgggccgctcccacatcactgccctggctgactacgccatgcggctcatggagcagatgaagcacatcaatgagcactccttcaacaatttccagatgaagattgggctgaacatgggcccagtcgtggcaggtgtcatcggggctcggaagccacagtatgacatctgggggaacacagtgaatgtctctagtcgtatggacagcacgggggtccccgaccgaatccaggtgaccacggacctgtaccaggttctagctgccaagggctaccagctggagtgtcgaggggtggtcaaggtgaagggcaagggggagatgaccacctacttcctcaatgggggccccagcagttaacagggcccagccacaaattcagctgaagggaccaaggtgggcattgagtggactctgtgctcactgggtggagctgtggcagggggcactgagcctccagaccctgctaaccacaaaagggaacatcccagcaggctgtgcttggatcatgctcgtctgccctcaagctggaaaacaaggggctacctaccgagaggattatgcaagtgactttctttcttacttggggtagggctgttccctctccaatcttccagcctttgggagcaggggaggggtcagtagcagaagcagagggaggcctcttgcctgagggattaaaatggcagcttgccatgcctacccttccctgtctgtctgggcagcaggttcagggctgagcccttcttttccctcttttttcctgggaatattttgtacaatattttgtacaaagacaggcatgaggagtgcctattccatgcttgcctttgcaatacctgcatccccagcactggtcctgggcacttccccaccccagccaggtgtccctcctatgcacagagcagaggagggagaagctctggggagccagctttggccatatttcaggagaatgtttccatgtgccaaatcttagtcccatgatctgtccccaaaggggaacaaagggacctctgacagcttagatttagccccagttcctgcacgctccagggaacggggtgtctggcctcactggtactgtgaaaaatgctcagagagcaagcctgtgtgtggggatgtcaggtcaggagctggaagttcacctgcaggtgccaaagagcaggccggccagggctggggcagtgccagactctgatctgaggaccccgtcggggtccagatcaggtcactctgccccagtgctctcttgctgtctgctgacaagggggcatggagcatctcttcctcttctgttgccaaatagaaaagggtcagggcatggagaaaggtgaccctgatcccaaacctgccctcccaagtctctggtgttggggagggcccgtgtgtttgtgtaactgtgtgtgcatgttggtctttgtgtgcatatctgttttccaggtctatgtgagtccttgtgctcctgctcctcagctctccaccccaggttgcctctctcctgtgggcctctgtcttctgggaataaagcagggtttcctacttcaggggatgtagagagatgcccaggttgcacaggagtgggatggggtgtggtagcaaaaggagggagaggagtcctttttgtgccaaatccctaagtgccgttcgggggccatgtgtgcagcatgactctccctgtctgtggcagggacccaagcgcttgcttaagccccagtgctccatgccagcacttgaactgtctggggtttgatggacagaggctgaggaatttcctggcttccccagatagtgtcctgggacatggtatgctttggggctggggtagcatggaatccctctgaggacctggatactggtactacggggtggggaagaggaaccttaaacttggctttccccagccttcagcctgagtctagcatgtttctagctccccagtcccttgtgaagccttgagggctggcagaagggttaggaggttgaactctagattcccttcctgtctttgccttccttttacccctttccctgcaacctccttgactctggcctgaatttgttggtgcctcagtttctctgtctgtacctatttaagccaaaggcactagcctgaattttgcttgaagatcactttgtcttggaaatgactagagaggcagaggagaagggtttccagagttgctaggtttgggagtggaaggggcaggcagtgcacttgcccctcctcatgccccttctgacaccagctccctgtggaggcctggtttctgggtaatgcctcccttgggcatcttcatgcatcaaccaaatgggccatcaggtacttcattagtcatggcagaaggaggggaaaagacttgttttccagacagaaaatctactcccctgtccccagccatatccctggataggaagggataggaagagactacttggtgccatggggtaggggtgagggtataagtagatcagagtgggaagacctcagccttgggtggcttgtctctgcttcttgccaggtgggagggcctgtccacaccctggatccccgtaccacagtgccagccatgcccttcccctgggctaccattgtccctttcctcacccagttggtagagg

SEQ ID NO: 185611 - DNA, 6407 bp, Artificial Sequence
  derived and/or modified sequence
tttttttttttttgagacggagtctcactctgtcacccaggctggagtgcaatggcgcgatctttgctcactgcaacctctgccacccgggttcaagcaattctcctgcctcagctcctgagtagctgggattacaggcgcccgccaccacgcccggctaatttttgtatttttagtagagacgaggtttcaccatcttggccaggctggtcttgaactcctgaccttgtgatctacctgccagggccttccaaagtgctgggattacggacgtgagccaccacgcctggcccaggctaattttttgaaattttaatagaggcagggtcttgctgtattgcccaggttgctctcacattcctagccttaagccatcctcctatctcggcctcacaaagtgctgggattacaggtgtaagccactgtgcctggttttgggcaagtttcttgtcctgactgtgtcttgggttctcacctgttgattggggatacccttgttgcctacctccaagtaattttatgaggatgaaactcatagcttgtcagtgggaagtgcttaggtaatgagctactagtggtggcagtggctgtgatggtggtattaataccactcctactggatggtctctaatactatctccttccttccctaccagcaacatgtcatggtttagtggcctcctggtccctaaagtggatgaacggaaaacagcctggggtgaacgcaatgggcagaagcgttcgcggcgccgtggcactcgggcaggtggcttctgcacgccccgctatatgagctgcctccgggatgcagagccacccagccccacccctgcgggcccccctcggtgcccctggcaggatgacgccttcatccggaggggcggcccaggcaagggcaaggagctggggctgcgggcagtggccctgggcttcgaggataccgaggtgacaacgacagcgggcgggacggctgaggtggcgcccgacgcggtgcccaggagtgggcgatcctgctggcgccgtctggtgcaggtgttccagtcgaagcagttccgttcggccaagctggagcgcctgtaccagcggtacttcttccagatgaaccagagcagcctgacgctgctgatggcggtgctggtgctgctcacagcggtgctgctggctttccacgccgcacccgcccgccctcagcctgcctatgtggcactgttggcctgtgccgccgccctgttcgtggggctcatggtggtgtgtaaccggcatagcttccgccaggactccatgtgggtggtgagctacgtggtgctgggcatcctggcggcagtgcaggtcgggggcgctctcgcagcagacccgcgcagcccctctgcgggcctctggtgccctgtgttctttgtctacatcgcctacacgctcctccccatccgcatgcgggctgccgtcctcagcggcctgggcctctccaccttgcatttgatcttggcctggcaacttaaccgtggtgatgccttcctctggaagcagctcggtgccaatgtgctgctgttcctctgcaccaacgtcattggcatctgcacacactatccagcagaggtgtctcagcgccaggcctttcaggagacccgcggttacatccaggcccggctccacctgcagcatgagaatcggcagcaggagcggctgctgctgtcggtattgccccagcacgttgccatggagatgaaagaagacatcaacacaaaaaaagaagacatgatgttccacaagatctacatacagaagcatgacaatgtcagcatcctgtttgcagacattgagggcttcaccagcctggcatcccagtgcactgcgcaggagctggtcatgaccctgaatgagctctttgcccggtttgacaagctggctgcggagaatcactgcctgaggatcaagatcttgggggactgttactactgtgtgtcagggctgccggaggcccgggccgaccatgcccactgctgtgtggagatgggggtagacatgattgaggccatctcgctggtacgtgaggtgacaggtgtgaatgtgaacatgcgcgtgggcatccacagcgggcgcgtgcactgcggcgtccttggcttgcggaaatggcagttcgatgtgtggtccaatgatgtgaccctggccaaccacatggaggcaggaggccgggctggccgcatccacatcactcgggcaacactgcagtacctgaacggggactacgaggtggagccaggccgtggtggcgagcgcaacgcgtacctcaaggagcagcacattgagactttcctcatcctgggcgccagccagaaacggaaagaggagaaggccatgctggccaagctgcagcggactcgggccaactccatggaagggctgatgccgcgctgggttcctgatcgtgccttctcccggaccaaggactccaaggccttccgccagatgggcattgatgattccagcaaagacaaccggggcacccaagatgccctgaaccctgaggatgaggtggatgagttcctgagccgtgccatcgatgcccgcagcattgatcagctgcggaaggaccatgtgcgccggtttctgctcaccttccagagagaggatcttgagaagaagtactcccggaaggtggatccccgcttcggagcctacgttgcctgtgccctgttggtcttctgcttcatctgcttcatccagcttctcatcttcccacactccaccctgatgcttgggatctatgccagcatcttcctgctgctgctaatcaccgtgctgatctgtgctgtgtactcctgtggttctctgttccctaaggccctgcaacgtctgtcccgcagcattgtccgctcacgggcacatagcaccgcagttggcatcttttccgtcctgcttgtgtttacttctgccattgccaacatgtacttcatcgggaacatgctgctgagtctcttggccagctctgtcttcctgcacatcagcagcatcgggaagttggccatgatctttgtcttggggctcatctatttggtgctgcttctgctgggtcccccagccaccatctttgacaactatgacctactgcttggcgtccatggcttggcttcttccaatgagacctttgatgggctggactgtccagctgcagggagggtggccctcaaatatatgacccctgtgattctgctggtgtttgcgctggcgctgtatctgcatgctcagcaggtggagtcgactgcccgcctagacttcctctggaaactacaggcaacaggggagaaggaggagatggaggagctacaggcatacaaccggaggctgctgcataacattctgcccaaggacgtggcggcccacttcctggcccgggagcgccgcaatgatgaactctactatcagtcgtgtgagtgtgtggctgttatgtttgcctccattgccaacttctctgagttctatgtggagctggaggcaaacaatgagggtgtcgagtgcctgcggctgctcaacgagatcatcgctgactttgatgagattatcagcgaggagcggttccggcagctggaaaagatcaagacgattggtagcacctacatggctgcctcagggctgaacgccagcacctacgatcaggtgggccgctcccacatcactgccctggctgactacgccatgcggctcatggagcagatgaagcacatcaatgagcactccttcaacaatttccagatgaagattgggctgaacatgggcccagtcgtggcaggtgtcatcggggctcggaagccacagtatgacatctgggggaacacagtgaatgtctctagtcgtatggacagcacgggggtccccgaccgaatccaggtgaccacggacctgtaccaggttctagctgccaagggctaccagctggagtgtcgaggggtggtcaaggtgaagggcaagggggagatgaccacctacttcctcaatgggggccccagcagttaacagggcccagccacaaattcagctgaagggaccaaggtgggcattgagtggactctgtgctcactgggtggagctgtggcagggggcactgagcctccagaccctgctaaccacaaaagggaacatcccagcaggctgtgcttggatcatgctcgtctgccctcaagctggaaaacaaggggctacctaccgagaggattatgcaagtgactttctttcttacttggggtagggctgttccctctccaatcttccagcctttgggagcaggggaggggtcagtagcagaagcagagggaggcctcttgcctgagggattaaaatggcagcttgccatgcctacccttccctgtctgtctgggcagcaggttcagggctgagcccttcttttccctcttttttcctgggaatattttgtacaatattttgtacaaagacaggcatgaggagtgcctattccatgcttgcctttgcaatacctgcatccccagcactggtcctgggcacttccccaccccagccaggtgtccctcctatgcacagagcagaggagggagaagctctggggagccagctttggccatatttcaggagaatgtttccatgtgccaaatcttagtcccatgatctgtccccaaaggggaacaaagggacctctgacagcttagatttagccccagttcctgcacgctccagggaacggggtgtctggcctcactggtactgtgaaaaatgctcagagagcaagcctgtgtgtggggatgtcaggtcaggagctggaagttcacctgcaggtgccaaagagcaggccggccagggctggggcagtgccagactctgatctgaggaccccgtcggggtccagatcaggtcactctgccccagtgctctcttgctgtctgctgacaagggggcatggagcatctcttcctcttctgttgccaaatagaaaagggtcagggcatggagaaaggtgaccctgatcccaaacctgccctcccaagtctctggtgttggggagggcccgtgtgtttgtgtaactgtgtgtgcatgttggtctttgtgtgcatatctgttttccaggtctatgtgagtccttgtgctcctgctcctcagctctccaccccaggttgcctctctcctgtgggcctctgtcttctgggaataaagcagggtttcctacttcaggggatgtagagagatgcccaggttgcacaggagtgggatggggtgtggtagcaaaaggagggagaggagtcctttttgtgccaaatccctaagtgccgttcgggggccatgtgtgcagcatgactctccctgtctgtggcagggacccaagcgcttgcttaagccccagtgctccatgccagcacttgaactgtctggggtttgatggacagaggctgaggaatttcctggcttccccagatagtgtcctgggacatggtatgctttggggctggggtagcatggaatccctctgaggacctggatactggtactacggggtggggaagaggaaccttaaacttggctttccccagccttcagcctgagtctagcatgtttctagctccccagtcccttgtgaagccttgagggctggcagaagggttaggaggttgaactctagattcccttcctgtctttgccttccttttacccctttccctgcaacctccttgactctggcctgaatttgttggtgcctcagtttctctgtctgtacctatttaagccaaaggcactagcctgaattttgcttgaagatcactttgtcttggaaatgactagagaggcagaggagaagggtttccagagttgctaggtttgggagtggaaggggcaggcagtgcacttgcccctcctcatgccccttctgacaccagctccctgtggaggcctggtttctgggtaatgcctcccttgggcatcttcatgcatcaaccaaatgggccatcaggtacttcattagtcatggcagaaggaggggaaaagacttgttttccagacagaaaatctactcccctgtccccagccatatccctggataggaagggataggaagagactacttggtgccatggggtaggggtgagggtataagtagatcagagtgggaagacctcagccttgggtggcttgtctctgcttcttgccaggtgggagggcctgtccacaccctggatccccgtaccacagtgccagccatgcccttcccctgggctaccattgtccctttcctcacccagttggtagaggagtcaggaggtgggaggccgtgggctttggttttataatgtaaccactgtgggggtgggggaggatggtgaaccatgtatttcagtgaaatatttaatatatttaaatatcaataaaatcaaactctttgtaaaatt

SEQ ID NO: 185612 - DNA, 3507 bp, Artificial Sequence
  derived and/or modified sequence
atgtcctggttcagcggcctgctggtgcccaaggtggatgagaggaagacagcctggggcgagagaaatggccagaagaggagcagaagaagaggcaccagggctgggggcttctgcaccccccgctacatgagctgcctgagagatgctgagccccccagccccaccccagctggccccccacgctgcccctggcaggatgatgccttcatccggcggggcggccctgggaagggcaaggagctgggcctgcgggctgtggccctgggctttgaggacacagaggtgaccaccacagctgggggcacagctgaggtggccccagatgctgtgcccaggagcggccgcagctgctggaggcggctggtgcaggtgttccagagcaagcagttccgcagcgccaagctggagcggctgtaccagcgctacttcttccagatgaaccagagcagcctgaccctgctgatggctgtgctggtgctgctgacagctgtgctgctggccttccacgccgccccagcccggccccagcctgcctacgtggccctgctggcctgtgccgccgccctgtttgtgggcctgatggtggtgtgcaacagacacagcttccggcaggacagcatgtgggtggtgtcctatgtggtgctgggcatcctggccgctgtgcaggtgggcggggccctggccgctgaccccaggagccccagcgctggcctgtggtgccctgtgttctttgtgtacatcgcctacaccctgctgcccatccgcatgagagctgctgtgctgagcggcctgggcctgagcaccctgcacctgatcctggcctggcagctgaacagaggagatgccttcctgtggaagcagctgggcgccaacgtgctgctcttcctgtgcaccaacgtcatcggcatctgcacccactacccagctgaggtgtcccagaggcaggccttccaggagacccggggctacatccaggcccggctgcacctgcagcacgagaaccggcagcaggagcggctgctgctgtctgtgctgccccagcacgtggccatggagatgaaggaggacatcaacaccaagaaggaggacatgatgttccacaagatctacatccagaagcatgacaacgtgtccatcctgtttgctgacatcgagggcttcaccagcctggccagccagtgcacagcccaggagctggtgatgaccctgaatgagctgtttgccaggtttgacaagctggccgctgagaaccactgcctgcgcatcaagatcctgggggactgctactactgtgtgtctggcctgcctgaggcccgggctgaccacgcccactgctgcgtggagatgggcgtggacatgattgaggccatcagcctggtgcgggaggtgactggagtgaatgtgaacatgagggtgggcatccacagcggccgggtgcactgcggcgtgctgggcctgaggaagtggcagtttgatgtgtggagcaatgatgtgaccctggccaaccacatggaggccggcggccgggccggccgcatccacatcacccgggccaccctgcagtacctgaatggagactatgaggtggagcccggccggggcggggagagaaatgcctacctgaaggagcagcacatcgagaccttcctgatcctgggcgccagccagaagaggaaggaggagaaggccatgctggccaagctgcagaggacccgggccaacagcatggagggcctgatgccccgctgggtgcctgaccgggccttcagcaggaccaaggacagcaaggccttccggcagatgggcattgatgacagcagcaaggacaacagaggcacccaggatgccctgaacccagaagatgaggtggatgagttcctgagccgggccattgatgcccggagcattgaccagctgaggaaggaccacgtgcggcgcttcctgctgaccttccagcgggaggacctggagaagaagtacagcaggaaggtggaccccaggtttggagcctacgtggcctgtgccctgctggtgttctgcttcatctgcttcatccagctgctgatcttcccccacagcaccctgatgctgggcatctatgccagcatcttcctgctgctgctgatcaccgtgctgatctgtgctgtgtacagctgtggcagcctcttccccaaggccctgcagaggctgagccgcagcatcgtgcgcagccgggcccacagcacagctgtgggcatcttctctgtgctgctggtgttcaccagcgccatcgccaacatgttcacctgcaaccacacccccatccgcagctgtgccgccaggatgctgaacctgaccccagctgacatcacagcctgccacctgcagcagctgaactacagcctgggcctggatgcccccctgtgtgagggcaccatgcccacctgcagcttccctgagtacttcatcggcaacatgctgctgagcctgctggccagcagcgtcttcctgcacatcagcagcatcggcaagctggccatgatctttgtgctgggcctcatctacctggtgctgctgctgctgggccccccagccaccatctttgacaactatgacctgctgctgggcgtgcacggcctggccagcagcaatgagacctttgatggcctggactgcccagctgctggccgggtggccctgaagtacatgacccctgtgatcctgctggtgtttgccctggccctgtacctgcacgcccagcaggtggagagcacagcccggctggacttcctgtggaagctgcaggccactggagagaaggaggagatggaggagctgcaggcctacaacagaaggctgctgcacaacatcctgcccaaggatgtggccgcccacttcctggcccgggagaggagaaatgatgagctgtactaccagagctgtgaatgtgtggccgtgatgtttgccagcatcgccaacttcagcgagttctacgtggagctggaggccaacaatgaaggagtggagtgcctgcggctgctgaatgagatcatcgctgactttgatgagatcatcagcgaggagcgcttccggcagctggagaagatcaagaccatcggcagcacctacatggccgccagcggcctgaatgccagcacctatgaccaggtgggccgcagccacatcacagccctggccgactatgccatgaggctgatggagcagatgaagcacatcaatgagcacagcttcaacaacttccagatgaagattggcctgaacatgggccctgtggtggccggcgtgattggagccaggaagccccagtatgacatctggggcaacacagtgaatgtgagcagcaggatggacagcactggagtgcctgaccgcatccaggtgaccacagacctgtaccaggtgctggccgccaagggctaccagctggagtgccggggcgtggtgaaggtgaagggcaagggggagatgaccacctacttcctgaatggaggccccagcagctag

SEQ ID NO: 185613 - DNA, 3348 bp, Artificial Sequence
  derived and/or modified sequence
atgtcctggttcagcggcctgctggtgcccaaggtggatgagaggaagacagcctggggcgagagaaatggccagaagaggagcagaagaagaggcaccagggctgggggcttctgcaccccccgctacatgagctgcctgagagatgctgagccccccagccccaccccagctggccccccacgctgcccctggcaggatgatgccttcatccggcggggcggccctgggaagggcaaggagctgggcctgcgggctgtggccctgggctttgaggacacagaggtgaccaccacagctgggggcacagctgaggtggccccagatgctgtgcccaggagcggccgcagctgctggaggcggctggtgcaggtgttccagagcaagcagttccgcagcgccaagctggagcggctgtaccagcgctacttcttccagatgaaccagagcagcctgaccctgctgatggctgtgctggtgctgctgacagctgtgctgctggccttccacgccgccccagcccggccccagcctgcctacgtggccctgctggcctgtgccgccgccctgtttgtgggcctgatggtggtgtgcaacagacacagcttccggcaggacagcatgtgggtggtgtcctatgtggtgctgggcatcctggccgctgtgcaggtgggcggggccctggccgctgaccccaggagccccagcgctggcctgtggtgccctgtgttctttgtgtacatcgcctacaccctgctgcccatccgcatgagagctgctgtgctgagcggcctgggcctgagcaccctgcacctgatcctggcctggcagctgaacagaggagatgccttcctgtggaagcagctgggcgccaacgtgctgctcttcctgtgcaccaacgtcatcggcatctgcacccactacccagctgaggtgtcccagaggcaggccttccaggagacccggggctacatccaggcccggctgcacctgcagcacgagaaccggcagcaggagcggctgctgctgtctgtgctgccccagcacgtggccatggagatgaaggaggacatcaacaccaagaaggaggacatgatgttccacaagatctacatccagaagcatgacaacgtgtccatcctgtttgctgacatcgagggcttcaccagcctggccagccagtgcacagcccaggagctggtgatgaccctgaatgagctgtttgccaggtttgacaagctggccgctgagaaccactgcctgcgcatcaagatcctgggggactgctactactgtgtgtctggcctgcctgaggcccgggctgaccacgcccactgctgcgtggagatgggcgtggacatgattgaggccatcagcctggtgcgggaggtgactggagtgaatgtgaacatgagggtgggcatccacagcggccgggtgcactgcggcgtgctgggcctgaggaagtggcagtttgatgtgtggagcaatgatgtgaccctggccaaccacatggaggccggcggccgggccggccgcatccacatcacccgggccaccctgcagtacctgaatggagactatgaggtggagcccggccggggcggggagagaaatgcctacctgaaggagcagcacatcgagaccttcctgatcctgggcgccagccagaagaggaaggaggagaaggccatgctggccaagctgcagaggacccgggccaacagcatggagggcctgatgccccgctgggtgcctgaccgggccttcagcaggaccaaggacagcaaggccttccggcagatgggcattgatgacagcagcaaggacaacagaggcacccaggatgccctgaacccagaagatgaggtggatgagttcctgagccgggccattgatgcccggagcattgaccagctgaggaaggaccacgtgcggcgcttcctgctgaccttccagcgggaggacctggagaagaagtacagcaggaaggtggaccccaggtttggagcctacgtggcctgtgccctgctggtgttctgcttcatctgcttcatccagctgctgatcttcccccacagcaccctgatgctgggcatctatgccagcatcttcctgctgctgctgatcaccgtgctgatctgtgctgtgtacagctgtggcagcctcttccccaaggccctgcagaggctgagccgcagcatcgtgcgcagccgggcccacagcacagctgtgggcatcttctctgtgctgctggtgttcaccagcgccatcgccaacatgtacttcatcggcaacatgctgctgagcctgctggccagctctgtgttcctgcacatcagcagcatcggcaagctggccatgatctttgtgctgggcctcatctacctggtgctgctgctgctgggccccccagccaccatctttgacaactatgacctgctgctgggcgtgcacggcctggccagcagcaatgagacctttgatggcctggactgcccagctgctggccgggtggccctgaagtacatgacccctgtgatcctgctggtgtttgccctggccctgtacctgcacgcccagcaggtggagagcacagcccggctggacttcctgtggaagctgcaggccaccggggagaaggaggagatggaggagctgcaggcctacaacagaaggctgctgcacaacatcctgcccaaggatgtggccgcccacttcctggcccgggagaggagaaatgatgagctgtactaccagagctgtgaatgtgtggccgtgatgtttgccagcatcgccaacttcagcgagttctacgtggagctggaggccaacaatgaaggagtggagtgcctgcggctgctgaatgagatcatcgctgactttgatgagatcatcagcgaggagcgcttccggcagctggagaagatcaagaccatcggcagcacctacatggccgccagcggcctgaatgccagcacctatgaccaggtgggccgcagccacatcacagccctggccgactatgccatgaggctgatggagcagatgaagcacatcaatgagcacagcttcaacaacttccagatgaagattggcctgaacatgggccctgtggtggccggggtcatcggggccaggaagccccagtatgacatctggggcaacacagtgaatgtgagcagcaggatggacagcactggagtgcctgaccgcatccaggtgaccacagacctgtaccaggtgctggccgccaagggctaccagctggagtgccggggcgtggtgaaggtgaagggcaaaggagagatgaccacctacttcctgaatggaggccccagcagctag

SEQ ID NO: 185614 - DNA, 3507 bp, Artificial Sequence
  derived and/or modified sequence
atgagctggttcagcggcctgctggtgcccaaggtggacgagcggaaaactgcctggggcgaacggaatggacagaagcgttcacgcagacgggggacgcgcgctggcggcttctgtactccacgatacatgagctgtctccgggacgctgagccgcccagtcctacaccggccggcccgcctaggtgtccatggcaagacgacgccttcatccggcgtgggggccctggcaaaggcaaggaactgggcctgcgcgccgtggccctcggattcgaggacaccgaagtgactactacagccggaggcacagccgaggtcgcgccagatgcagtgccacgctccggacgatcctgttggagaaggttagttcaagtgtttcagtccaagcagtttaggtctgcaaagctcgagcgcctgtatcaaagatacttcttccagatgaaccagtcctcactgaccttactaatggccgttctggtcctgcttaccgctgtgctgttagcctttcatgcggctcctgcccggccacagcccgcatacgtggccctgttagcatgcgctgccgccttatttgtgggcctgatggtcgtctgtaaccgccactcatttaggcaggactccatgtgggtcgttagctacgtggttttgggtatacttgcagcagtccaggtgggcggtgcgttggccgcagatcctcgcagtccctctgctggcctttggtgcccagtattttttgtgtacattgcctatactctactgcctatccggatgcgcgcagccgtcctcagcgggctcgggctgagcacactgcatctgattctcgcttggcaactgaaccggggggatgcgtttctgtggaaacaattgggtgctaacgttttgcttttcctgtgcaccaatgtaattggaatctgtacccactaccccgccgaagtatcgcagcggcaggcattccaggagacccgcgggtacattcaggcccgcctgcatttacagcacgagaatcggcaacaggagagattgcttttgtccgtcctgccacagcatgtcgccatggagatgaaggaggatattaataccaaaaaggaggatatgatgttccacaaaatatacattcagaaacatgataacgtgagcatccttttcgcagatatcgaggggttcaccagtcttgcttcccaatgcacagcacaggagcttgtgatgaccctgaatgagctttttgcccgctttgacaaacttgcagcagaaaatcactgtctgcggataaagatcctcggcgactgctattattgtgtcagcggccttccagaggcaagagctgaccatgcccactgctgcgtggaaatgggcgtggacatgattgaggcaatttccctggtccgcgaagtaactggggtgaatgtgaacatgcgcgttggaatccactccggccgggtccactgtggagttctcgggctcagaaagtggcagttcgatgtgtggtctaacgatgtgactctggccaaccatatggaggcaggaggccgagcaggacgcatccacatcacccgagcgacactgcagtatctgaacggcgattacgaagtggaacctgggcgtgggggcgagcgtaatgcctacctgaaagagcaacatattgagacattcctgattcttggagcgtctcagaagaggaaagaagagaaggctatgctggcaaaactccagagaaccagggctaattctatggagggtctgatgccccggtgggtcccggaccgggcattcagccgcacaaaggattctaaggcatttagacagatgggcatagacgattccagcaaggacaatagaggcacacaggatgctctaaaccctgaggacgaggtggatgagtttctctcccgagccatcgacgcacgatcgatagatcagttaagaaaggatcatgtaaggcgcttcctgctgacatttcagcgcgaggatttagagaagaagtacagcagaaaggttgaccctaggttcggtgcttatgttgcgtgtgccctccttgttttctgcttcatatgctttatccaacttttaattttcccccattcaaccttgatgttgggcatttatgcaagtatcttcctgttactgctgattactgtcctgatttgtgcggtctatagctgtggatctctcttccccaaggcactccagaggctctcgcggagtattgtgagatccagagcacattcgacagctgtagggatcttctccgttctgcttgtgtttaccagtgctatagcaaacatgttcacttgcaatcatactcctatccgatcgtgcgctgctcggatgctgaacttgaccccagcagacatcacggcctgtcatctgcaacagcttaattatagcctgggtttggatgcccctctctgcgaggggaccatgccaacctgctcgtttccagagtacttcatcggaaacatgctgcttagcttactagcaagctccgtcttccttcatatttcaagtatcggcaagctggccatgatctttgtcctggggctgatctacctggtgctgctgttgctcggtccgccagctacaatcttcgacaactatgatttgctgctgggcgtgcatggcctggcaagttccaatgaaacattcgatggactggattgtcccgcggccggaagggtcgccttgaaatacatgacccctgttatattattagtgttcgctctggccttataccttcatgcccaacaagtggaatctactgcccgtctggatttcctctggaagctccaagccacgggtgaaaaggaggaaatggaggagctccaggcgtacaataggcgcctcctgcacaacatcctgccaaaggacgttgctgctcacttcctggcgagagaacgtaggaatgacgaactttactatcagagctgtgagtgcgttgccgtgatgttcgcctcaatcgctaactttagcgagttttacgttgagttggaggcgaataacgagggtgtggagtgtctgcgcctactcaacgagatcatagcagatttcgatgagattataagcgaggagcggttccgtcagttggagaagataaaaaccatcggatctacctacatggcggctagtggcttgaacgcaagtacatacgaccaggtaggaagatctcatatcactgcactggccgactatgctatgcggctgatggagcagatgaaacatattaacgaacattcattcaataactttcagatgaaaatcgggttaaatatgggtcctgtcgtggccggcgtgatcggtgcacgaaaaccacagtatgatatatggggaaatacggtgaacgtgtcgtcccgcatggattctaccggggtccctgatcggatacaggtaacaacagacctttaccaagtgttagcggccaagggctaccagctagagtgcaggggagtcgtgaaagtgaaggggaagggggagatgaccacttatttcctgaatggcggcccatcctcctag

SEQ ID NO: 185615 - DNA, 3348 bp, Artificial Sequence
  derived and/or modified sequence
atgagctggttcagcggcctgctggtgcccaaggtggacgagcggaaaaccgcatggggagagaggaacggacagaaaaggtctaggagacgtggaacgcgcgcaggtggcttctgtacaccacgctacatgtcttgcctccgcgacgcagaacccccttcaccaacccccgccggcccgccacgctgtccttggcaggacgacgcattcatcaggagaggcggacctggcaaagggaaggagctgggcctgcgtgcagtggccctggggttcgaagatactgaagtgacaaccaccgcaggaggaacggccgaagtagcacctgacgccgttcctcgcagtggccgctcgtgctggcggagactggtgcaggtgtttcagtcgaaacagtttcggtctgctaagctggagcggctgtaccagagatacttcttccagatgaatcagagttccttgaccctgttgatggccgtgctggttctgttgacagccgtgttgctggcgttccacgcagcccctgcgagaccacaacccgcatatgtggctctgttggcatgcgccgccgcattgtttgtagggcttatggttgtttgcaataggcacagtttccggcaggattccatgtgggtggtgagttacgtggttctgggaattctggcagccgttcaagtgggaggggccttggctgccgatccacgatcccccagtgcggggctatggtgccctgtctttttcgtttacattgcctatactttgctgcctataagaatgagggccgcagtgcttagtgggctgggtctttcaacattacacctgattctggcctggcagctcaataggggagacgctttcctctggaagcaacttggagcgaacgtccttctgttcctttgtacgaatgttatagggatttgtactcactatcccgcagaggtttcccagaggcaagcctttcaagaaacccgaggttatatacaagcacggctgcacctgcagcacgagaataggcaacaggaaaggctgttgctctccgtgctcccacagcatgtggctatggagatgaaggaggacattaacaccaaaaaagaagacatgatgtttcacaaaatctatatacagaaacatgacaatgtcagcattctgttcgcagacattgaaggctttacttcacttgcctcccagtgtacagcccaagagcttgtcatgaccctgaacgagctcttcgcccgattcgacaagctcgcagcggaaaaccattgtctgaggattaagatcctgggcgattgttactactgtgtctcgggcctacctgaggccagggccgaccacgcccattgctgtgttgaaatgggggttgatatgattgaagccatcagcctcgttcgggaagttaccggagttaatgttaacatgcgggtgggaatacatagcggacgggtgcactgtggagtgttgggcttgaggaagtggcagtttgatgtttggtccaacgacgtcactctggcaaatcatatggaggctgggggcagagccggccgaatccacatcacccgcgctacgctgcagtacctgaacggagactacgaggtggagcccggccgcggtggcgaaaggaatgcttatctcaaggaacagcatatcgagacctttcttattcttggagcaagtcagaagagaaaagaggaaaaggctatgcttgcgaagcttcagcggacacgggccaattcaatggaggggctcatgcccagatgggtgccagacagagcgttctcacgaaccaaagactctaaggcatttagacaaatggggatcgacgactcatcaaaggataataggggaacccaggatgctctgaaccctgaggatgaggtggacgaattcctgtctcgagccattgatgcccggtctatagaccaactccgcaaggatcacgtgagaaggttcttactgactttccagagggaggatctcgaaaagaaatactccaggaaggtcgatcctcgttttggcgcgtatgtcgcctgtgcactcctggtgttctgcttcatttgctttattcagctccttatcttccctcacagcacacttatgttagggatttatgccagcattttcttgctgcttcttattaccgtgctgatatgcgcagtctattcttgtggaagcctcttccctaaagcgctccaacggctgagtcgcagtatagtcagatctcgtgctcacagcaccgctgtggggattttttccgtgctacttgtgtttacaagtgctattgctaacatgtatttcatcgggaacatgctgctctccctgctggccagttccgtgttccttcatatcagtagcattggcaaacttgcaatgatctttgtgttgggactcatctatttagtgcttcttttactgggcccacctgccaccatcttcgacaattacgatctcctgctcggtgtgcatggactcgcttcttccaatgaaacttttgacggacttgattgccctgctgccggaagagtggctctcaagtatatgacgcctgtgatactgcttgtattcgctttggcattatacctacatgcacagcaggtggagagcaccgcccgcttagactttctctggaagctgcaggcaacgggagagaaggaggaaatggaagaactgcaggcgtataatcgccgtctcctacacaatatactccccaaagatgttgctgcacattttctggcccgcgagaggagaaacgacgagctgtattatcagtcgtgtgagtgtgttgccgtgatgtttgcctctatcgcgaatttctcagaattctacgtagagctggaggcgaacaatgagggcgtcgagtgtctgagactcctgaacgagataattgccgacttcgacgagattatcagcgaggagagatttcgacagctggagaagataaaaaccattggtagtacgtatatggccgcttcgggtcttaatgctagtacatatgaccaggtgggaagatctcatataacagcactggctgactacgctatgcgcctaatggagcagatgaagcatatcaatgagcattcattcaataacttccagatgaagattgggctcaacatggggcctgtggtagctggggtgattggggccaggaaaccacaatatgacatctggggcaataccgtgaatgtcagcagccgaatggactccactggcgtcccagacagaatccaggttactaccgacttataccaagtgctagcagccaagggataccagctggagtgtagaggcgtggtgaaagttaaaggtaagggggagatgacgacctatttcctgaatggggggccaagctcttag

SEQ ID NO: 185616 - DNA, 3348 bp, Artificial Sequence
  derived and/or modified sequence
atgagctggttcagcggcctgctggtgcccaaggtggacgagcggaagaccgcatggggtgagcgaaacggccagaaacgttcaaggaggcggggaaccagggccggtggtttttgtacacctcgttatatgtcctgtctgagggatgctgaaccaccttcaccgactccagctgggccgccccgctgtccatggcaggacgatgcctttattaggcggggcggcccagggaaaggcaaagagctgggcctaagggccgtcgccctgggtttcgaagacaccgaggtaactaccactgcaggagggaccgccgaagtcgctccagatgccgttcctcggagtggacgctcttgttggcggcgtttggtccaggtgttccagagcaagcaatttaggagtgccaaactcgaacgactctaccaaaggtacttttttcaaatgaatcagtccagtcttaccctgctgatggcagttctggtcttgctgactgctgtgcttctggcattccatgccgctccagccaggccacagccggcatacgtggctctgctggcatgcgcagctgccctgttcgtcgggctgatggtggtgtgcaatcggcattcctttaggcaggatagcatgtgggttgtctcctatgtggtgctaggaattttagccgctgtgcaagtcggaggagccctggcagctgacccccgatcacccagcgctggcttgtggtgtccagttttttttgtatacatagcttacaccctattgcccatacgcatgcgggccgcagtgttgtcaggtctggggctgtctacacttcaccttattttagcttggcaactcaatcggggcgatgcattcctatggaagcagctaggcgcgaatgtcctgttgttcctgtgcactaatgtcatcggaatttgcactcactaccctgctgaagtctctcagagacaggccttccaggagacgagggggtatattcaggcgcgtttgcatctacagcacgaaaaccgacaacaggagcgtcttctgttgtcagtgttgccccagcacgtcgcgatggaaatgaaggaagatatcaacaccaaaaaagaagatatgatgttccacaaaatatatatccaaaagcacgataacgtgtccattctgttcgcagacatcgagggttttacctccctggccagccagtgcaccgcccaggagctggttatgacactaaatgaattgttcgcaaggttcgataagctggcagcggaaaaccactgtctgaggattaaaatactgggagactgctattactgcgtgtcaggtttgccggaagcacgggctgatcatgcccattgctgtgtggagatgggcgtggatatgatcgaagcaatttccctagtaagagaggttactggagtaaatgtcaacatgcgtgtagggatacacagtggaagagtacactgcggcgtgctgggcctgcgcaagtggcagttcgatgtgtggtcgaacgacgttactctggccaaccatatggaggctggtgggcgggcagggcgcatccatataactagggcaacactccaataccttaacggtgattatgaggtggaaccaggaaggggtggcgaacgtaacgcctaccttaaggaacagcatattgaaacatttctgattctgggagcttcccaaaaaagaaaggaggaaaaagccatgctggctaagttacagaggacccgtgctaattccatggagggcctcatgccacgctgggtccccgatcgagccttctcccgcactaaagattccaaggcattccgccagatgggtatcgacgacagtagtaaggacaatcggggcactcaggacgccttgaatcctgaggacgaagtggatgaatttttgagccgtgcgatcgatgcgcggtcaatcgaccagctacgcaaagaccacgtccggcgattcttgctgacattccagcgggaagacctggaaaagaaatattctagaaaagtggatccccggtttggggcatacgtggcctgcgcactgctggtgttctgcttcatctgctttatccagttgctgatcttcccccactcaacgctgatgctgggtatctacgcctccattttcctgttgttgctcattactgtgttaatttgcgcagtgtactcatgtgggtcactttttcctaaagcactacaacggctatcccggagcatagtgcggagtcgagcccattctaccgcagtgggaatattctccgttctcctggtctttacaagtgctatagctaacatgtactttatcggcaacatgctgttgtctctgctcgcatcgagcgtgttcctacacatctccagcattgggaaacttgctatgatttttgtactcggactgatatatctggtgcttttactcctgggtcctccagccaccatattcgacaattacgaccttctcctgggtgtacacggactcgccagcagtaacgaaacttttgacggcctcgactgcccagctgcaggccgggtggctctgaaatacatgacaccggttatactgcttgtgttcgcattagccctgtaccttcatgcccagcaagtggagtccacagctcggctggattttctgtggaaattgcaggccacgggcgaaaaggaagagatggaagaattgcaggcttacaacaggaggctgctgcacaatatcctgccaaaggacgtggccgcccattttctggcgcgggaacggcggaatgacgaactgtactatcagtcatgcgaatgcgtggcagttatgttcgcctctattgccaacttctccgaattttacgtcgaattagaagcaaataacgaaggagtggagtgcttgcggctcctgaatgagattatcgccgattttgatgaaatcatttccgaggaacgcttccgtcagctcgagaagatcaagacaattggttcaacttacatggcagcctctggcctaaatgctagcacatatgatcaggtgggacgtagccacattacagcactagccgattacgccatgaggctcatggagcagatgaagcacatcaatgagcacagtttcaacaactttcaaatgaagatagggctgaatatgggtcccgtggtagctggggtgatcggcgcccgtaaaccacaatatgatatatgggggaataccgtaaatgtgtccagccgtatggactcaactggcgtgcctgaccgtatccaggtcaccaccgatctataccaggttcttgccgcaaaggggtatcaactcgaatgtcgcggagtggttaaagtcaaaggaaagggagagatgacgacctacttcctgaatggaggaccatcgagttag

SEQ ID NO: 185617 - DNA, 3507 bp, Artificial Sequence
  derived and/or modified sequence
atgagctggttcagcggtttgcttgtgcctaaggtcgacgaacggaagacagcgtggggggaacggaatgggcagaaaaggagccgccgtaggggaactcgggctggtggcttttgtaccccacggtatatgtcatgtttgcgtgacgcagagcccccaagccccacgccggctgggcctccgagatgtccctggcaagatgatgcctttatacgaaggggaggtcctggaaagggaaaagaactgggcctgagagccgtggctttggggtttgaggatactgaagtgacaacgacagccggaggcactgccgaggtagcgccagacgcagtccctaggtcagggcgatcgtgctggagacggctggtacaggttttccagtctaaacagttcagaagtgcgaagctggaacgtctttaccagcgctatttctttcaaatgaaccaatcttcccttacccttcttatggccgtccttgtactgctgactgctgtgctgctggctttccatgcagcccctgcgagaccccagcccgcttacgtagcactactagcctgcgctgccgctctcttcgttggcctcatggtcgtgtgcaatagacacagctttagacaagactccatgtgggtggtaagttatgttgtactggggattctggccgcagtacaggtggggggtgccttggccgctgatccaaggagcccctccgctggcttatggtgccctgtgttttttgtatatatcgcctataccctacttcccatcaggatgagagcagcggtactcagtggcctaggtctctctactctgcacctcatcctggcgtggcaactgaatcgcggagatgcattcctgtggaagcaactaggcgctaatgtgctcctcttcctctgcaccaacgttatcggcatctgcacccactaccctgccgaggtgtcccagagacaagcatttcaggagaccaggggctacatccaggcccgactgcacctgcaacatgagaacagacagcaggagaggcttctgctttctgttttgccccagcatgtcgccatggagatgaaggaggatatcaacacaaagaaggaggacatgatgttccataagatttacattcagaagcacgataacgtttcaatcttgtttgcagatatagaaggtttcacctcactcgcgtctcagtgtactgcgcaggaacttgttatgacactgaatgagctatttgcccgattcgacaagctggcagcagaaaaccattgcttgcgtatcaagatcctaggggattgttattactgcgtgtccgggctgccggaggccagagccgatcacgctcactgctgcgtagagatgggtgtagatatgatcgaggccatttcgctcgtccgcgaggttaccggggtgaatgtgaacatgcgcgtgggcatccattctggtagggtccactgtggcgtcctgggactcaggaaatggcaattcgatgtgtggtcgaacgacgttacgctggccaaccatatggaggccggaggtagggccggacggatacacataacaagagccaccctccaatatctgaacggagactacgaggtcgagcccggtcgtggcggagagagaaatgcatacttgaaggaacagcacatcgagactttcttgattcttggcgctagtcaaaagcgtaaggaggagaaggctatgctggccaagttgcaacggacacgcgctaattcaatggagggcctgatgcccagatgggtgcccgatagagcgttttcaagaactaaggactcaaaagcattcaggcagatgggaatagacgacagtagtaaggataacagggggacccaagacgcactgaatccggaggacgaggttgacgagtttctttccagagccatagacgcgcgatcaatcgaccagctgcggaaagaccacgttcggcgatttctgcttacgtttcagcgcgaagatctggagaaaaagtactctagaaaggtggatcctagattcggagcatatgtagcatgtgctctcctcgtcttttgtttcatctgctttatccagttgctgatcttcccccacagcactttgatgcttgggatctacgcgtctattttcctcctgctgctcatcactgtcctgatttgtgcagtctacagctgtggcagcctatttcccaaagccttgcagagactatctaggagcatagttcggtctagagcacactccactgccgttggaatttttagcgtacttttagtgtttacttccgcaattgcaaacatgtttacatgtaaccacacgccaattcggtcatgcgcagccagaatgttaaatcttaccccagcagatattacagcgtgccacctgcagcagctgaactatagcttgggactcgatgctccactctgtgagggaacaatgccaacctgttctttccccgaatactttatcgggaatatgcttctgtcattactcgcatcgtccgtttttctgcacattagctctataggcaagcttgctatgatctttgtactgggcctaatctatctggttctcctcttgctgggccctcctgctactatcttcgataattatgacttgcttttgggcgtccacggtctcgctagcagcaatgaaaccttcgatgggctggattgccctgctgccggacgggttgccctgaagtatatgaccccagtcatcttattggtgttcgctctagccctttacctgcatgcacagcaggtcgaatctaccgcaaggttggatttcctctggaagttgcaagcaactggagagaaggaggagatggaagagctacaggcatataataggagattactacataacatcctcccgaaggatgtggccgcacacttcttagcaagggagcggagaaacgatgaactgtactaccagagctgcgagtgtgtggccgtgatgttcgcatctatcgctaatttctcagaattttacgttgaactcgaagccaataatgagggggtcgagtgcttacggttactgaatgagattatagctgacttcgatgagatcataagcgaggagaggttccgccagctcgagaagattaaaacaattggctcaacttacatggccgcttccggattgaacgcttccacatatgaccaagtggggcgatctcacataacagccttggccgactatgcaatgcggttgatggaacagatgaagcatattaacgaacattctttcaacaatttccagatgaagattggcctaaacatgggacctgtcgtcgccggagtaataggggcaagaaagccgcagtacgacatatggggaaacacagtcaacgtgagtagcagaatggattccaccggggtgcccgatcgaatacaggtgacaaccgatttataccaagtccttgccgctaagggataccaactcgagtgcagaggggtcgtaaaggtgaagggaaagggggagatgaccacatacttcctcaatggcggtccgtcttcctag

SEQ ID NO: 185618 - DNA, 3348 bp, Artificial Sequence
  derived and/or modified sequence
atgtcctggttctctggcctgcttgttccaaaagtcgatgagagaaagaccgcatggggagaaaggaatggccagaaaaggtcacgccgaaggggtactagggctggaggattctgtaccccgagatacatgtcttgtttaagagatgccgagccgccttctccaacacctgccggaccccctcgatgcccatggcaggatgatgctttcattcggagggggggacctggaaaaggaaaggagctcggcctaagagccgttgcgctggggtttgaggatactgaagtgacaacgaccgccggaggtaccgcagaagtggcacccgatgcggtgccccgatccggacgctcatgctggagacgcctcgtgcaggttttccaaagtaagcagtttagatctgctaagttggaaaggctgtatcaaagatattttttccagatgaaccagagtagcctgaccctgcttatggccgtgctggtgctgctgactgccgttttgctggctttccacgctgctcccgcaagaccccagcctgcttatgtagctcttctagcctgtgcagcagccctcttcgtgggattgatggtggtatgtaatcggcacagtttccgccaggattccatgtgggtggtgtcttacgtggttctgggaatcttggccgctgtgcaggtcggcggtgctctggccgcagatccacgtagcccctcggcaggcctgtggtgtcctgtgttcttcgtgtacatcgcctacacattgctacccatcaggatgagggcagctgtgctgtctggcctgggcctctctaccctgcatctcattctggcctggcagctgaataggggcgacgcttttctttggaagcagttaggagccaatgtgctcttgtttctatgtacaaatgtcatcggcatctgcacgcactacccagccgaagtgagtcaacggcaggcttttcaggagacccgaggctatatccaggcccgtttgcacctccagcatgagaaccggcaacaagaacgcctcctgctgtcggttctgccacaacacgttgccatggagatgaaggaagacattaacacaaagaaagaagacatgatgttccataagatctatattcagaaacacgataatgtgtccatcttatttgcggacatagagggatttaccagtctggcttctcagtgtaccgcacaagagctcgtgatgacactgaacgaactcttcgcacgatttgataaactggcagctgagaatcactgcctccgaattaagattctaggggactgttactactgtgtctccggcctgccagaggcgagagctgaccacgcccactgttgcgtggaaatgggagtggacatgatcgaggcaattagtcttgtgcgtgaggtcactggagtgaatgttaacatgcgcgtgggcatccactccggcagagttcattgtggcgtcctgggcctcagaaagtggcagttcgatgtttggtccaacgacgtgaccctggccaatcacatggaggccggaggccgagctggcaggatccacataacacgagctactcttcaatacttgaacggcgactatgaggtcgaaccaggacgcggaggcgaacgaaatgcctacctgaaagaacaacatatcgagacatttttgattttaggtgcttcccagaaacgcaaagaagaaaaggcgatgctggccaagctccagcggacacgggcaaactctatggaaggtcttatgccacggtgggtcccagaccgcgctttctcccgcacgaaagacagcaaagcttttcgtcagatgggcattgacgattcgtctaaggataacagaggcacccaggatgccttgaaccctgaggacgaagttgatgaattcttgtcgcgcgctatagatgccaggagcatcgatcaactgagaaaggaccacgtgcgcaggtttctcctgacatttcagagagaagacctggagaaaaagtatagccggaaagtagatccgcgattcggcgcttatgtcgcatgcgcactgctcgttttttgtttcatctgctttatacagctcctgatatttcctcatagcacccttatgttaggcatctatgccagcattttcctgttactgttgataactgtgctgatctgcgcagtctacagttgtgggagcctttttcccaaagccctccagcggctctcaaggagtatagtgcggagcagagctcactctactgcagtcggaatctttagcgtactgctcgtgtttacttctgccatcgcaaacatgtactttatcggaaatatgctcctcagtctgctggccagttcagtattcctgcacatatcctcgattggaaagctagctatgatttttgttctggggctgatatatttggtgcttctgctgttgggacctcccgctactatcttcgacaactatgacctgctcctaggcgtgcacggcctcgcttcaagtaacgagaccttcgatggcctcgactgcccagcagcaggaagggtagctttgaagtacatgacaccagtgatcttattggtgttcgctttggctctctacctccacgcgcagcaggtggagtctactgcccgattagacttcctgtggaagctgcaagccacaggcgaaaaggaagagatggaggagttgcaggcgtacaaccggagactgctgcacaacattctcccaaaggatgtggctgcgcacttcctggccagagagcgtagaaacgatgagctctactatcagtcctgtgaatgtgtggccgtaatgttcgcctcaatagctaatttctcagaattctatgttgagctcgaggcaaataatgagggcgtcgaatgcctgaggctgcttaatgagatcatcgccgattttgacgagatcatctccgaagaaaggttccggcaactggagaagataaaaactattggttctacatacatggctgcatctggcttgaacgcgagtacctacgaccaggtggggcgttcacacatcaccgctctggctgactacgcgatgaggctcatggaacagatgaaacatattaatgagcatagtttcaacaacttccagatgaaaattgggctcaacatgggacctgtggtagccggagttataggtgctagaaaaccccagtacgatatttgggggaacaccgtgaacgtttcatcccgaatggacagcacaggtgttcctgatcgcatacaagtgaccacagatctctatcaagttctggccgcaaaaggctaccaactggagtgtcggggagtggttaaagttaaaggtaaaggcgaaatgacaacttacttcttaaacggaggaccttctagctag

SEQ ID NO: 185619 - DNA, 3348 bp, Artificial Sequence
  derived and/or modified sequence
atgtcttggttttccggactcctggtgcctaaagtagatgaaaggaaaaccgcatggggggagcggaacggacaaaagaggagtcggagaagagggacgagggctggcggattttgcaccccccgttacatgagctgcctaagagacgcggaaccaccaagccccacacccgctggtccccctcgctgcccatggcaggacgacgcattcattagacgtggaggtcccggtaaggggaaagaattaggtctgcgggctgtagccttgggtttcgaggacacagaagttactacaacagctggtggaacagcggaggtggccccagacgccgtcccacgctccggtcggagctgctggcgcagactggtgcaggtatttcagagcaagcagtttcggtccgctaaattggagcgcctgtatcagcggtacttctttcagatgaaccagtcttccctgaccttgctgatggctgtcctggtgttgctgacagcggtgcttttagcattccacgcagcacccgcacggccacagccagcctatgtggcattgttagcttgcgctgcggcactgttcgtgggcctgatggtggtctgtaaccgacattctttcaggcaggactctatgtgggtggtctcttacgttgtgttgggaatcttggctgccgtgcaggttggtggggctctggctgccgatccccgatctccctccgccggactgtggtgccccgtattttttgtctacattgcttacacgttgttacctatacgcatgagggctgcggtgctgtctgggctgggcctatcaacgcttcacctgatcttagcttggcagctgaaccgcggagacgcctttctctggaagcagctgggtgcaaatgtgcttctgttcctctgcaccaacgtaataggcatctgcacacattaccctgccgaagtgagtcaacggcaagctttccaggaaacacggggatatattcaggctcgactacatctgcaacacgagaacaggcagcaggaaagacttctgctgtctgtgctgccgcagcatgtcgcgatggagatgaaggaagacatcaacacaaaaaaggaggatatgatgttccataaaatatacatacaaaaacacgacaacgttagcattctgttcgccgacatcgagggatttactagcttggcatctcaatgtactgctcaagagctggtcatgacccttaatgaactgttcgcaaggttcgataagttggcggcagagaaccactgtctacggattaagatcctgggcgattgctattactgtgtgtctgggttgcctgaggccagggccgaccatgctcattgctgcgtagaaatgggtgtggatatgatcgaggcgatctctttagttcgtgaagtgacgggggttaacgtaaacatgcgcgtgggcatccacagtggcagagtacactgtggcgtattgggcttgaggaaatggcagttcgacgtttggagtaatgatgtgacgctggcaaatcatatggaggctggaggccgagccggaagaatccacattacgcgcgcaactctgcaatacctgaatggtgattacgaggtggagccaggaaggggaggagagagaaatgcctacctgaaagagcagcacatcgagacgtttctcatcctgggcgcaagccagaagcgtaaggaggaaaaagcgatgctggcaaaattacaacgcacaagagctaactcaatggaagggctaatgccacggtgggttcctgatcgggctttctctcggacaaaggactccaaggcttttcggcaaatgggaatagatgactcatctaaggacaaccggggtactcaggacgccctgaatcccgaagacgaggtcgacgaattcctcagccgagctatcgacgcacggtctatcgaccaactgcggaaagatcatgtgcgcagatttctcctcactttccagagagaagatctggagaagaagtacagcagaaaggtcgatcccaggttcggggcatacgtggcttgcgctttattagtattttgcttcatctgtttcatacaattgcttatctttccacactccactctgatgttggggatatatgccagcatctttttgttgcttctcatcacagttctgatttgtgcagtgtatagctgcggctctctgtttcccaaagctttgcagcgtctgtctagaagtatagtaaggagtagggctcattctacagccgtgggtattttcagtgtactgctcgttttcacatctgccatagccaacatgtattttatcggcaatatgctcttatccctcctcgcctcctcagtcttcctacacatttcctccatcggtaagctcgccatgatttttgttctgggactgatctatctggtgctgctactgcttggtccgcctgctaccatttttgacaactacgatcttctgctgggagtccatggtctggcgagcagtaacgaaacttttgacgggctggattgtccagccgcagggagggtggccctaaagtatatgacaccagtcatactgctggtgtttgcccttgccctgtatttgcatgcgcaacaggtggagtccacagcaaggctggattttctgtggaaacttcaagctactggggagaaggaggaaatggaagagctccaggcatacaacaggcgcctgctgcataacatactacctaaggatgtcgctgcgcactttctagcgagagagcggagaaacgacgagctgtactaccagtcatgtgaatgtgtcgctgtcatgtttgcttcgattgctaacttctcagagttctacgtagaactcgaggcaaacaatgagggtgtcgagtgtctgcgactactgaatgagataattgcagatttcgacgagattatttccgaggaacggtttcggcagcttgagaaaattaaaacaatcggctctacatatatggctgcttctgggctgaacgccagcacctacgatcaggtcggacgcagtcacatcacagctttggcagattacgctatgcggttgatggagcagatgaaacatattaatgaacatagcttcaataattttcagatgaagattggactgaatatgggtcctgtggtagctggagttatcggcgctcgaaaaccccagtatgacatttgggggaatactgtaaacgtgtcgtctaggatggactcgactggagttccggaccgaatccaagtaaccacagacctgtatcaagtgctggcagccaaaggctatcagttagagtgtcggggtgttgtgaaggttaaaggcaaaggagagatgaccacttactttttaaacgggggaccctcctcctag

SEQ ID NO: 185620 - DNA, 3507 bp, Artificial Sequence
  derived and/or modified sequence
atgagctggttcagcggcctgctggtgcccaaggtggacgagagaaagaccgcctggggcgagagaaacggccagaagagaagcagaagaagaggcaccagagccggcggcttctgcacccccagatacatgagctgcctgagagacgccgagccccccagccccacccccgccggcccccccagatgcccctggcaggacgacgccttcatcagaagaggcggccccggcaagggcaaggagctgggcctgagagccgtggccctgggcttcgaggacaccgaggtgaccaccaccgccggcggcaccgccgaggtggcccccgacgccgtgcccagaagcggcagaagctgctggagaagactggtgcaggtgttccagagcaagcagttcagaagcgccaagctggagagactgtaccagagatacttcttccagatgaaccagagcagcctgaccctgctgatggccgtgctggtgctgctgaccgccgtgctgctggccttccacgccgcccccgccagaccccagcccgcctacgtggccctgctggcctgcgccgccgccctgttcgtgggcctgatggtggtgtgcaacagacacagcttcagacaggacagcatgtgggtggtgagctacgtggtgctgggcatcctggccgccgtgcaggtgggcggcgccctggccgccgaccccagaagccccagcgccggcctgtggtgccccgtgttcttcgtgtacatcgcctacaccctgctgcccatcagaatgagagccgccgtgctgagcggcctgggcctgagcaccctgcacctgatcctggcctggcagctgaacagaggcgacgccttcctgtggaagcagctgggcgccaacgtgctgctgttcctgtgcaccaacgtgatcggcatctgcacccactaccccgccgaggtgagccagagacaggccttccaggagaccagaggctacatccaggccagactgcacctgcagcacgagaacagacagcaggagagactgctgctgagcgtgctgccccagcacgtggccatggagatgaaggaggacatcaacaccaagaaggaggacatgatgttccacaagatctacatccagaagcacgacaacgtgagcatcctgttcgccgacatcgagggcttcaccagcctggccagccagtgcaccgcccaggagctggtgatgaccctgaacgagctgttcgccagattcgacaagctggccgccgagaaccactgcctgagaatcaagatcctgggcgactgctactactgcgtgagcggcctgcccgaggccagagccgaccacgcccactgctgcgtggagatgggcgtggacatgatcgaggccatcagcctggtgagagaggtgaccggcgtgaacgtgaacatgagagtgggcatccacagcggcagagtgcactgcggcgtgctgggcctgagaaagtggcagttcgacgtgtggagcaacgacgtgaccctggccaaccacatggaggccggcggcagagccggcagaatccacatcaccagagccaccctgcagtacctgaacggcgactacgaggtggagcccggcagaggcggcgagagaaacgcctacctgaaggagcagcacatcgagaccttcctgatcctgggcgccagccagaagagaaaggaggagaaggccatgctggccaagctgcagagaaccagagccaacagcatggagggcctgatgcccagatgggtgcccgacagagccttcagcagaaccaaggacagcaaggccttcagacagatgggcatcgacgacagcagcaaggacaacagaggcacccaggacgccctgaaccccgaggacgaggtggacgagttcctgagcagagccatcgacgccagaagcatcgaccagctgagaaaggaccacgtgagaagattcctgctgaccttccagagagaggacctggagaagaagtacagcagaaaggtggaccccagattcggcgcctacgtggcctgcgccctgctggtgttctgcttcatctgcttcatccagctgctgatcttcccccacagcaccctgatgctgggcatctacgccagcatcttcctgctgctgctgatcaccgtgctgatctgcgccgtgtacagctgcggcagcctgttccccaaggccctgcagagactgagcagaagcatcgtgagaagcagagcccacagcaccgccgtgggcatcttcagcgtgctgctggtgttcaccagcgccatcgccaacatgttcacctgcaaccacacccccatcagaagctgcgccgccagaatgctgaacctgacccccgccgacatcaccgcctgccacctgcagcagctgaactacagcctgggcctggacgcccccctgtgcgagggcaccatgcccacctgcagcttccccgagtacttcatcggcaacatgctgctgagcctgctggccagcagcgtgttcctgcacatcagcagcatcggcaagctggccatgatcttcgtgctgggcctgatctacctggtgctgctgctgctgggcccccccgccaccatcttcgacaactacgacctgctgctgggcgtgcacggcctggccagcagcaacgagaccttcgacggcctggactgccccgccgccggcagagtggccctgaagtacatgacccccgtgatcctgctggtgttcgccctggccctgtacctgcacgcccagcaggtggagagcaccgccagactggacttcctgtggaagctgcaggccaccggcgagaaggaggagatggaggagctgcaggcctacaacagaagactgctgcacaacatcctgcccaaggacgtggccgcccacttcctggccagagagagaagaaacgacgagctgtactaccagagctgcgagtgcgtggccgtgatgttcgccagcatcgccaacttcagcgagttctacgtggagctggaggccaacaacgagggcgtggagtgcctgagactgctgaacgagatcatcgccgacttcgacgagatcatcagcgaggagagattcagacagctggagaagatcaagaccatcggcagcacctacatggccgccagcggcctgaacgccagcacctacgaccaggtgggcagaagccacatcaccgccctggccgactacgccatgagactgatggagcagatgaagcacatcaacgagcacagcttcaacaacttccagatgaagatcggcctgaacatgggccccgtggtggccggcgtgatcggcgccagaaagccccagtacgacatctggggcaacaccgtgaacgtgagcagcagaatggacagcaccggcgtgcccgacagaatccaggtgaccaccgacctgtaccaggtgctggccgccaagggctaccagctggagtgcagaggcgtggtgaaggtgaagggcaagggcgagatgaccacctacttcctgaacggcggccccagcagctag

SEQ ID NO: 185621 - DNA, 3348 bp, Artificial Sequence
  derived and/or modified sequence
atgagctggttcagcggcctgctggtgcccaaggtggacgagagaaagaccgcctggggcgagagaaacggccagaagagaagcagaagaagaggcaccagagccggcggcttctgcacccccagatacatgagctgcctgagagacgccgagccccccagccccacccccgccggcccccccagatgcccctggcaggacgacgccttcatcagaagaggcggccccggcaagggcaaggagctgggcctgagagccgtggccctgggcttcgaggacaccgaggtgaccaccaccgccggcggcaccgccgaggtggcccccgacgccgtgcccagaagcggcagaagctgctggagaagactggtgcaggtgttccagagcaagcagttcagaagcgccaagctggagagactgtaccagagatacttcttccagatgaaccagagcagcctgaccctgctgatggccgtgctggtgctgctgaccgccgtgctgctggccttccacgccgcccccgccagaccccagcccgcctacgtggccctgctggcctgcgccgccgccctgttcgtgggcctgatggtggtgtgcaacagacacagcttcagacaggacagcatgtgggtggtgagctacgtggtgctgggcatcctggccgccgtgcaggtgggcggcgccctggccgccgaccccagaagccccagcgccggcctgtggtgccccgtgttcttcgtgtacatcgcctacaccctgctgcccatcagaatgagagccgccgtgctgagcggcctgggcctgagcaccctgcacctgatcctggcctggcagctgaacagaggcgacgccttcctgtggaagcagctgggcgccaacgtgctgctgttcctgtgcaccaacgtgatcggcatctgcacccactaccccgccgaggtgagccagagacaggccttccaggagaccagaggctacatccaggccagactgcacctgcagcacgagaacagacagcaggagagactgctgctgagcgtgctgccccagcacgtggccatggagatgaaggaggacatcaacaccaagaaggaggacatgatgttccacaagatctacatccagaagcacgacaacgtgagcatcctgttcgccgacatcgagggcttcaccagcctggccagccagtgcaccgcccaggagctggtgatgaccctgaacgagctgttcgccagattcgacaagctggccgccgagaaccactgcctgagaatcaagatcctgggcgactgctactactgcgtgagcggcctgcccgaggccagagccgaccacgcccactgctgcgtggagatgggcgtggacatgatcgaggccatcagcctggtgagagaggtgaccggcgtgaacgtgaacatgagagtgggcatccacagcggcagagtgcactgcggcgtgctgggcctgagaaagtggcagttcgacgtgtggagcaacgacgtgaccctggccaaccacatggaggccggcggcagagccggcagaatccacatcaccagagccaccctgcagtacctgaacggcgactacgaggtggagcccggcagaggcggcgagagaaacgcctacctgaaggagcagcacatcgagaccttcctgatcctgggcgccagccagaagagaaaggaggagaaggccatgctggccaagctgcagagaaccagagccaacagcatggagggcctgatgcccagatgggtgcccgacagagccttcagcagaaccaaggacagcaaggccttcagacagatgggcatcgacgacagcagcaaggacaacagaggcacccaggacgccctgaaccccgaggacgaggtggacgagttcctgagcagagccatcgacgccagaagcatcgaccagctgagaaaggaccacgtgagaagattcctgctgaccttccagagagaggacctggagaagaagtacagcagaaaggtggaccccagattcggcgcctacgtggcctgcgccctgctggtgttctgcttcatctgcttcatccagctgctgatcttcccccacagcaccctgatgctgggcatctacgccagcatcttcctgctgctgctgatcaccgtgctgatctgcgccgtgtacagctgcggcagcctgttccccaaggccctgcagagactgagcagaagcatcgtgagaagcagagcccacagcaccgccgtgggcatcttcagcgtgctgctggtgttcaccagcgccatcgccaacatgtacttcatcggcaacatgctgctgagcctgctggccagcagcgtgttcctgcacatcagcagcatcggcaagctggccatgatcttcgtgctgggcctgatctacctggtgctgctgctgctgggcccccccgccaccatcttcgacaactacgacctgctgctgggcgtgcacggcctggccagcagcaacgagaccttcgacggcctggactgccccgccgccggcagagtggccctgaagtacatgacccccgtgatcctgctggtgttcgccctggccctgtacctgcacgcccagcaggtggagagcaccgccagactggacttcctgtggaagctgcaggccaccggcgagaaggaggagatggaggagctgcaggcctacaacagaagactgctgcacaacatcctgcccaaggacgtggccgcccacttcctggccagagagagaagaaacgacgagctgtactaccagagctgcgagtgcgtggccgtgatgttcgccagcatcgccaacttcagcgagttctacgtggagctggaggccaacaacgagggcgtggagtgcctgagactgctgaacgagatcatcgccgacttcgacgagatcatcagcgaggagagattcagacagctggagaagatcaagaccatcggcagcacctacatggccgccagcggcctgaacgccagcacctacgaccaggtgggcagaagccacatcaccgccctggccgactacgccatgagactgatggagcagatgaagcacatcaacgagcacagcttcaacaacttccagatgaagatcggcctgaacatgggccccgtggtggccggcgtgatcggcgccagaaagccccagtacgacatctggggcaacaccgtgaacgtgagcagcagaatggacagcaccggcgtgcccgacagaatccaggtgaccaccgacctgtaccaggtgctggccgccaagggctaccagctggagtgcagaggcgtggtgaaggtgaagggcaagggcgagatgaccacctacttcctgaacggcggccccagcagctag

SEQ ID NO: 185622 - protein, 771 aa, Artificial Sequence
  derived and/or modified sequence
MHRSGRYGTQQQRAGSKTAGPPCQWSRMASEGTNIPSPVVRQIDKQFLICSICLERYKNPKVLPCLHTFCERCLQNYIPAHSLTLSCPVCRQTSILPEKGVAALQNNFFITNLMDVLQRTPGSNAEESSILETVTAVAAGKPLSCPNHDGNVMEFYCQSCETAMCRECTEGEHAEHPTVPLKDVVEQHKASLQVQLDAVNKRLPEIDSALQFISEIIHQLTNQKASIVDDIHSTFDELQKTLNVRKSVLLMELEVNYGLKHKVLQSQLDTLLQGQESIKSCSNFTAQALNHGTETEVLLVKKQMSEKLNELADQDFPLHPRENDQLDFIVETEGLKKSIHNLGTILTTNAVASETVATGEGLRQTIIGQPMSVTITTKDKDGELCKTGNAYLTAELSTPDGSVADGEILDNKNGTYEFLYTVQKEGDFTLSLRLYDQHIRGSPFKLKVIRSADVSPTTEGVKRRVKSPGSGHVKQKAVKRPASMYSTGKRKENPIEDDLIFRVGTKGRNKGEFTNLQGVAASTNGKILIADSNNQCVQIFSNDGQFKSRFGIRGRSPGQLQRPTGVAVHPSGDIIIADYDNKWVSIFSSDGKFKTKIGSGKLMGPKGVSVDRNGHIIVVDNKACCVFIFQPNGKIVTRFGSRGNGDRQFAGPHFAAVNSNNEIIITDFHNHSVKVFNQEGEFMLKFGSNGEGNGQFNAPTGVAVDSNGNIIVADWGNSRIQVFDGSGSFLSYINTSADPLYGPQGLALTSDGHVVVADSGNHCFKVYRYLQ

SEQ ID NO: 185623 - DNA, 2316 bp, Artificial Sequence
  derived and/or modified sequence
atgcacagaagcggcagatacggcacccagcagcagagagccggcagcaagaccgccggccccccctgccagtggagcagaatggccagcgagggcaccaacatccccagccccgtggtgagacagatcgacaagcagttcctgatctgcagcatctgcctggagagatacaagaaccccaaggtgctgccctgcctgcacaccttctgcgagagatgcctgcagaactacatccccgcccacagcctgaccctgagctgccccgtgtgcagacagaccagcatcctgcccgagaagggcgtggccgccctgcagaacaacttcttcatcaccaacctgatggacgtgctgcagagaacccccggcagcaacgccgaggagagcagcatcctggagaccgtgaccgccgtggccgccggcaagcccctgagctgccccaaccacgacggcaacgtgatggagttctactgccagagctgcgagaccgccatgtgcagagagtgcaccgagggcgagcacgccgagcaccccaccgtgcccctgaaggacgtggtggagcagcacaaggccagcctgcaggtgcagctggacgccgtgaacaagagactgcccgagatcgacagcgccctgcagttcatcagcgagatcatccaccagctgaccaaccagaaggccagcatcgtggacgacatccacagcaccttcgacgagctgcagaagaccctgaacgtgagaaagagcgtgctgctgatggagctggaggtgaactacggcctgaagcacaaggtgctgcagagccagctggacaccctgctgcagggccaggagagcatcaagagctgcagcaacttcaccgcccaggccctgaaccacggcaccgagaccgaggtgctgctggtgaagaagcagatgagcgagaagctgaacgagctggccgaccaggacttccccctgcaccccagagagaacgaccagctggacttcatcgtggagaccgagggcctgaagaagagcatccacaacctgggcaccatcctgaccaccaacgccgtggccagcgagaccgtggccaccggcgagggcctgagacagaccatcatcggccagcccatgagcgtgaccatcaccaccaaggacaaggacggcgagctgtgcaagaccggcaacgcctacctgaccgccgagctgagcacccccgacggcagcgtggccgacggcgagatcctggacaacaagaacggcacctacgagttcctgtacaccgtgcagaaggagggcgacttcaccctgagcctgagactgtacgaccagcacatcagaggcagccccttcaagctgaaggtgatcagaagcgccgacgtgagccccaccaccgagggcgtgaagagaagagtgaagagccccggcagcggccacgtgaagcagaaggccgtgaagagacccgccagcatgtacagcaccggcaagagaaaggagaaccccatcgaggacgacctgatcttcagagtgggcaccaagggcagaaacaagggcgagttcaccaacctgcagggcgtggccgccagcaccaacggcaagatcctgatcgccgacagcaacaaccagtgcgtgcagatcttcagcaacgacggccagttcaagagcagattcggcatcagaggcagaagccccggccagctgcagagacccaccggcgtggccgtgcaccccagcggcgacatcatcatcgccgactacgacaacaagtgggtgagcatcttcagcagcgacggcaagttcaagaccaagatcggcagcggcaagctgatgggccccaagggcgtgagcgtggacagaaacggccacatcatcgtggtggacaacaaggcctgctgcgtgttcatcttccagcccaacggcaagatcgtgaccagattcggcagcagaggcaacggcgacagacagttcgccggcccccacttcgccgccgtgaacagcaacaacgagatcatcatcaccgacttccacaaccacagcgtgaaggtgttcaaccaggagggcgagttcatgctgaagttcggcagcaacggcgagggcaacggccagttcaacgcccccaccggcgtggccgtggacagcaacggcaacatcatcgtggccgactggggcaacagcagaatccaggtgttcgacggcagcggcagcttcctgagctacatcaacaccagcgccgaccccctgtacggcccccagggcctggccctgaccagcgacggccacgtggtggtggccgacagcggcaaccactgcttcaaggtgtacagatacctgcagtag

SEQ ID NO: 185624 - DNA, 2235 bp, Artificial Sequence
  derived and/or modified sequence
atggccagcgagggcaccaacatccccagccccgtggtgagacagatcgacaagcagttcctgatctgcagcatctgcctggagagatacaagaaccccaaggtgctgccctgcctgcacaccttctgcgagagatgcctgcagaactacatccccgcccacagcctgaccctgagctgccccgtgtgcagacagaccagcatcctgcccgagaagggcgtggccgccctgcagaacaacttcttcatcaccaacctgatggacgtgctgcagagaacccccggcagcaacgccgaggagagcagcatcctggagaccgtgaccgccgtggccgccggcaagcccctgagctgccccaaccacgacggcaacgtgatggagttctactgccagagctgcgagaccgccatgtgcagagagtgcaccgagggcgagcacgccgagcaccccaccgtgcccctgaaggacgtggtggagcagcacaaggccagcctgcaggtgcagctggacgccgtgaacaagagactgcccgagatcgacagcgccctgcagttcatcagcgagatcatccaccagctgaccaaccagaaggccagcatcgtggacgacatccacagcaccttcgacgagctgcagaagaccctgaacgtgagaaagagcgtgctgctgatggagctggaggtgaactacggcctgaagcacaaggtgctgcagagccagctggacaccctgctgcagggccaggagagcatcaagagctgcagcaacttcaccgcccaggccctgaaccacggcaccgagaccgaggtgctgctggtgaagaagcagatgagcgagaagctgaacgagctggccgaccaggacttccccctgcaccccagagagaacgaccagctggacttcatcgtggagaccgagggcctgaagaagagcatccacaacctgggcaccatcctgaccaccaacgccgtggccagcgagaccgtggccaccggcgagggcctgagacagaccatcatcggccagcccatgagcgtgaccatcaccaccaaggacaaggacggcgagctgtgcaagaccggcaacgcctacctgaccgccgagctgagcacccccgacggcagcgtggccgacggcgagatcctggacaacaagaacggcacctacgagttcctgtacaccgtgcagaaggagggcgacttcaccctgagcctgagactgtacgaccagcacatcagaggcagccccttcaagctgaaggtgatcagaagcgccgacgtgagccccaccaccgagggcgtgaagagaagagtgaagagccccggcagcggccacgtgaagcagaaggccgtgaagagacccgccagcatgtacagcaccggcaagagaaaggagaaccccatcgaggacgacctgatcttcagagtgggcaccaagggcagaaacaagggcgagttcaccaacctgcagggcgtggccgccagcaccaacggcaagatcctgatcgccgacagcaacaaccagtgcgtgcagatcttcagcaacgacggccagttcaagagcagattcggcatcagaggcagaagccccggccagctgcagagacccaccggcgtggccgtgcaccccagcggcgacatcatcatcgccgactacgacaacaagtgggtgagcatcttcagcagcgacggcaagttcaagaccaagatcggcagcggcaagctgatgggccccaagggcgtgagcgtggacagaaacggccacatcatcgtggtggacaacaaggcctgctgcgtgttcatcttccagcccaacggcaagatcgtgaccagattcggcagcagaggcaacggcgacagacagttcgccggcccccacttcgccgccgtgaacagcaacaacgagatcatcatcaccgacttccacaaccacagcgtgaaggtgttcaaccaggagggcgagttcatgctgaagttcggcagcaacggcgagggcaacggccagttcaacgcccccaccggcgtggccgtggacagcaacggcaacatcatcgtggccgactggggcaacagcagaatccaggtgttcgacggcagcggcagcttcctgagctacatcaacaccagcgccgaccccctgtacggcccccagggcctggccctgaccagcgacggccacgtggtggtggccgacagcggcaaccactgcttcaaggtgtacagatacctgcagtag

SEQ ID NO: 185625 - DNA, 2316 bp, Artificial Sequence
  derived and/or modified sequence
atgcaccgctccggccgctacggtacgcagcagcaaagagccgggagcaagacagccgggcctccttgccagtggtcgcgtatggcaagcgaaggaaccaacatccctagccctgtcgtcaggcagatcgataaacaatttttaatctgtagcatttgtttagagcggtataagaaccccaaagtcctaccgtgcctgcacactttttgcgagcggtgcttgcagaattatatccccgctcattcactgacactcagctgccctgtctgccggcagacctctatattgccggagaaaggggttgccgcccttcaaaataacttcttcatcaccaacctgatggacgtgttgcagagaactccagggtccaacgctgaagagtcctccattctcgagacggtgacagcagtggccgccggaaaaccgctcagctgccctaaccatgacggaaatgtgatggaattctactgtcagtcatgcgagaccgctatgtgtcgggagtgcaccgagggtgaacacgcggaacatcctacagtcccgctgaaagacgtggtcgagcagcacaaagcctccctgcaagttcagctcgatgctgtgaataagcgtttgccggaaattgacagtgctctgcagttcatttccgagatcattcaccagctcactaaccagaaagcttcgatagtggatgatatacattctactttcgatgaactccagaaaactcttaatgttaggaagtcagtcctgctcatggaactggaggtaaactatggtctgaagcacaaagttctccaatcacaattggacactttactacaaggccaggaatctattaagagttgcagtaatttcacagcacaagcacttaaccacggcactgagacagaggttttgctcgtgaaaaaacagatgtccgagaaactcaacgaactggccgaccaggattttcctctccatccgagggagaatgaccagttggatttcatcgtcgagactgagggtttgaagaagagtatccacaacctgggcaccatactcactaccaacgctgtagcgtccgaaactgttgctacgggcgaaggcctccgacagaccatcataggccagccgatgtcagtaacaattacaacgaaggataaggacggagagctgtgtaagaccggcaacgcctaccttacagcagaacttagcacccctgacggctccgtggcagatggggaaattcttgataataagaacggcacgtatgagttcctctacaccgtccagaaagagggtgacttcacactgtctctgaggctctacgaccagcacatacgggggtcccccttcaagctaaaagtgattcgaagcgcggatgtgagcccaacaactgaaggagtaaaacggcgcgtgaagagccccggcagcgggcatgttaagcagaaggcagtgaagcgcccagcaagcatgtactctaccggcaaacgtaaggaaaatcccattgaagacgacctcatctttcgcgtggggacaaagggaagaaataaaggcgagtttactaacctccagggcgttgctgctagtaccaacggcaagatcctgattgcggactcaaataaccagtgcgtgcaaatctttagcaatgatggacaattcaagagccgcttcggaattcgcggccggagccccggccaattgcaaagacctaccggagtggcagtacatccttctggcgacatcattattgcagattacgacaataagtgggttagtatcttctcatctgatggtaagtttaaaaccaaaatcggctccgggaaactaatgggccccaaaggcgtgagcgtggaccggaatggccatatcattgtggtggataataaagcttgctgtgttttcatattccagccaaatggtaaaatagtgacccgattcggcagccggggcaatggtgacaggcaattcgccggcccacacttcgccgccgtgaactcaaataatgaaattatcattactgatttccataatcattccgtgaaggtattcaaccaggaaggggagttcatgcttaaatttggttctaacggcgagggcaatgggcagttcaatgccccgaccggggttgccgtggattccaacggcaacatcatagtggccgattgggggaactcccggatccaggtctttgacggatctggctccttccttagctatatcaatacctcagctgatcccctgtatggcccccagggattggctctgacctctgatggtcatgtagtggttgctgatagcggcaaccactgcttcaaggtatatagatacctacagtag

SEQ ID NO: 185626 - DNA, 2235 bp, Artificial Sequence
  derived and/or modified sequence
atggcgagcgaggggaccaacatcccaagcccagtggtcagacaaatcgacaaacagttcctgatatgctcaatctgtttagagcgatataagaaccctaaggtgttgccttgcctgcacacattttgtgagagatgcctgcagaactatattccagcacacagtctgacactgtcatgccctgtctgccgccagaccagtattctgccagagaaaggcgttgcagcactgcagaacaatttcttcatcacaaatctaatggacgtcctacagaggacacccggatctaatgccgaggagtccagcatcctggaaacagtgactgccgtcgcagccggaaagccacttagctgtcctaaccatgacggcaacgtgatggaattttattgccagtcttgcgaaaccgcaatgtgccgggagtgtaccgagggcgaacatgcagagcatcctactgtgcccctgaaggatgtggtggaacagcataaagcttccctccaggtacaacttgacgctgtcaataaaaggctccctgagatcgacagcgctctccagtttatcagcgagataatacaccagcttactaatcagaaggcttctatagtggacgatatccacagtactttcgacgagcttcaaaagacacttaatgtgcggaaatctgtgcttctgatggagcttgaagtgaactacggactgaagcataaagtgctccagtcacagctggacaccttgctccagggacaggagagcattaagagttgtagcaatttcactgcacaggccctaaatcatggcacagagacggaggtcctactcgtgaagaaacagatgagtgagaaattgaatgagctcgccgaccaggatttcccacttcacccgagagaaaatgatcaactggacttcatcgtcgagacagagggcctcaagaaatcgattcacaatttgggaacaatcttgaccaccaatgccgttgccagtgaaacagtggcgactggggagggactgaggcagaccatcatcgggcaacctatgtccgtcacaatcaccaccaaagataaggatggggagttgtgtaagaccggaaatgcctatttgacagccgagttgtcaactccagacgggtctgttgctgacggagaaatcttggataacaagaacggaacatatgaattcctgtacaccgtacagaaagagggagattttacactgagcctgcgattgtatgatcaacacattcgcggatctccatttaagcttaaagttatacgctcagccgacgtttctcctactaccgagggcgttaaaaggcgggtgaagtcccctggcagtggccacgtgaaacagaaggccgtaaagaggccagcgtctatgtactccactggcaagcggaaagagaaccccatcgaggacgatctgatttttagggtgggaacgaaaggaagaaacaaaggggaatttacgaacctgcagggagtggcagccagcacaaatggtaaaattctgatcgcagattctaacaatcagtgtgttcagattttctctaatgatggccaattcaagtcacggttcgggatacgtgggcgatcgcctggccagctgcaaaggccaaccggcgtggcagtacacccctctggtgatattattatcgcagactacgataataagtgggttagtatcttcagtagtgacgggaagtttaagaccaaaattggctcaggaaagctgatggggccaaagggggtttcagtggatcggaatgggcacatcattgtcgtggacaacaaagcttgctgtgtattcatcttccaacccaatgggaagatcgtgacgagatttgggtctcgtggcaatggggacagacagttcgccgggccccactttgccgccgtgaacagcaacaatgagattatcattacggacttccacaatcacagcgtcaaagttttcaatcaggagggtgagttcatgttgaagtttggttctaatggagaaggtaatggacaatttaacgcacctacaggggtcgctgtcgattcaaacggcaacatcatcgtcgccgactggggcaattctcggatccaagtcttcgacggttccggaagtttcctgtcatacatcaatacttctgcggacccgctgtacggacctcaggggctggccttaacctctgatggccacgttgtcgtggccgatagcggtaaccactgtttcaaggtctacagatatttgcaatag

SEQ ID NO: 185627 - DNA, 2316 bp, Artificial Sequence
  derived and/or modified sequence
atgcacaggagcggccgctatggcacccagcagcagagagctggcagcaagacagctggccccccctgccagtggagcaggatggccagcgagggcaccaacatccccagccctgtggtgcggcagattgacaagcagttcctgatctgcagcatctgcctggagcgctacaagaaccccaaggtgctgccctgcctgcacaccttctgtgagcgctgcctgcagaactacatcccagcccacagcctgaccctgagctgccctgtgtgccggcagaccagcatcctgcctgagaagggcgtggccgccctgcagaacaacttcttcatcaccaacctgatggatgtgctgcagaggaccccaggcagcaatgctgaggagagcagcatcctggagaccgtgacagctgtggccgccggcaagcccctgagctgccccaaccatgatggaaatgtgatggagttctactgccagagctgtgaaacagccatgtgcagagaatgtacagaaggagaacatgctgagcaccccaccgtgcccctgaaggatgtggtggagcagcacaaggccagcctgcaggtgcagctggatgctgtgaacaagaggctgcctgagattgacagcgccctgcagttcatcagcgagatcatccaccagctgaccaaccagaaggccagcatcgtggatgacatccacagcacctttgatgagctgcagaagaccctgaatgtgaggaagtctgtgctgctgatggagctggaggtgaactacggcctgaagcacaaggtgctgcagagccagctggacaccctgctgcagggccaggagagcatcaagagctgcagcaacttcaccgcccaggccctgaaccacggcacagaaacagaggtgctgctggtgaagaagcagatgtctgagaagctgaatgagctggccgaccaggacttccccctgcacccccgggagaatgaccagctggacttcatcgtggagacagagggcctgaagaagagcatccacaacctgggcaccatcctgaccaccaatgctgtggccagcgagaccgtggccaccggggagggcctgcggcagaccatcatcggccagcccatgtctgtgaccatcaccaccaaggacaaggatggagagctgtgcaagacaggaaatgcctacctgacagctgagctgagcaccccagatggctctgtggctgatggagagatcctggacaacaagaatggcacctatgagttcctgtacacagtgcagaaggagggggacttcaccctgagcctgcggctgtatgaccagcacatccggggcagccccttcaagctgaaggtgatccgctctgcagatgtgagccccaccacagagggcgtgaagagaagagtgaagagccctggcagcggccacgtgaagcagaaggctgtgaagaggcctgcctccatgtacagcacaggcaagaggaaggagaaccccattgaagatgacctgatcttccgggtgggcaccaagggcaggaacaagggggagttcaccaacctgcagggcgtggccgccagcaccaacgggaagatcctgattgctgacagcaacaaccagtgtgtgcagatcttcagcaatgatggccagttcaagagccgcttcggcatccggggccgcagccctggccagctgcagaggcccaccggggtggccgtgcaccccagcggggacatcatcatcgctgactatgacaacaagtgggtgtccatcttcagcagtgatggcaagttcaagaccaagattggcagcggcaagctgatgggccccaagggcgtgtctgtggacagaaatggccacatcatcgtggtggacaacaaggcctgctgcgtgttcatcttccagcccaacgggaagatcgtgaccaggtttggcagcagaggaaatggagaccggcagtttgctggcccccactttgctgctgtgaacagcaacaatgagatcatcatcacagacttccacaaccacagcgtgaaggtgttcaaccaggagggggagttcatgctgaagtttggcagcaatggagagggcaatggccagttcaatgcccccaccggggtggccgtggacagcaatggaaacatcatcgtggccgactggggcaacagccgcatccaggtgtttgatggcagcggcagcttcctgagctacatcaacaccagcgctgaccccctgtatggcccccagggcctggccctgaccagtgatggccacgtggtggtggccgacagcggcaaccactgcttcaaggtgtaccgctacctgcagtag

SEQ ID NO: 185628 - DNA, 2235 bp, Artificial Sequence
  derived and/or modified sequence
atggccagcgagggcaccaacatccccagccctgtggtgcggcagattgacaagcagttcctgatctgcagcatctgcctggagcgctacaagaaccccaaggtgctgccctgcctgcacaccttctgtgagcgctgcctgcagaactacatcccagcccacagcctgaccctgagctgccctgtgtgccggcagaccagcatcctgcctgagaagggcgtggccgccctgcagaacaacttcttcatcaccaacctgatggatgtgctgcagaggaccccaggcagcaatgctgaggagagcagcatcctggagaccgtgacagctgtggccgccggcaagcccctgagctgccccaaccatgatggaaatgtgatggagttctactgccagagctgtgaaacagccatgtgccgggagtgcacagaaggagagcacgccgagcaccccaccgtgcccctgaaggatgtggtggagcagcacaaggccagcctgcaggtgcagctggatgctgtgaacaagaggctgcctgagattgattctgccctgcagttcatcagcgagatcatccaccagctgaccaaccagaaggccagcatcgtggatgacatccacagcacctttgatgagctgcagaagaccctgaatgtgaggaagtctgtgctgctgatggagctggaggtgaactacggcctgaagcacaaggtgctgcagagccagctggacaccctgctgcagggccaggagagcatcaagagctgcagcaacttcaccgcccaggccctgaaccacggcacagaaacagaggtgctgctggtgaagaagcagatgtctgagaagctgaatgagctggccgaccaggacttccccctgcaccccagagaaaatgaccagctggacttcatcgtggagacagagggcctgaagaagagcatccacaacctgggcaccatcctgaccaccaatgctgtggccagcgagaccgtggccactggagagggcctgcggcagaccatcatcggccagcccatgtctgtgaccatcaccaccaaggacaaggatggagagctgtgcaagacaggaaatgcctacctgacagctgagctgagcaccccagatggctctgtggctgatggagagatcctggacaacaagaatggcacctatgagttcctgtacacagtgcagaaggagggggacttcaccctgagcctgcggctgtatgaccagcacatccggggcagccccttcaagctgaaggtgatccgctctgcagatgtgagccccaccacagaaggagtgaagagaagagtgaagagccctggcagcggccacgtgaagcagaaggctgtgaagaggcctgcctccatgtacagcacaggcaagaggaaagaaaaccccattgaagatgacctgatcttccgggtgggcaccaagggcagaaataaaggagagttcaccaacctgcagggcgtggccgccagcaccaacgggaagatcctgattgctgacagcaacaaccagtgtgtgcagatcttcagcaatgatggccagttcaagagcagatttggcatccggggccgcagccctggccagctgcagaggcccactggagtggccgtgcaccccagcggggacatcatcatcgctgactatgacaacaagtgggtgtccatcttcagcagtgatggcaagttcaagaccaagattggcagcggcaagctgatgggccccaagggcgtgtctgtggacagaaatggccacatcatcgtggtggacaacaaggcctgctgcgtgttcatcttccagcccaacgggaagatcgtgacccgcttcggcagcagaggaaatggagaccggcagtttgctggcccccactttgctgctgtgaacagcaacaatgagatcatcatcacagacttccacaaccacagcgtgaaggtgttcaaccaggagggggagttcatgctgaagtttggcagcaatggagagggcaatggccagttcaatgcccccactggagtggccgtggacagcaatggaaacatcatcgtggccgactggggcaacagccgcatccaggtgtttgatggcagcggcagcttcctgagctacatcaacaccagcgctgaccccctgtatggcccccagggcctggccctgaccagtgatggccacgtggtggtggccgacagcggcaaccactgcttcaaggtgtaccgctacctgcagtag

SEQ ID NO: 185629 - DNA, 2316 bp, Artificial Sequence
  derived and/or modified sequence
atgcaccggagcggccggtacggcacccagcagcagcgggccggctctaaaactgctgggcccccttgccaatggagccggatggctagcgaaggtaccaatatcccttcccccgtcgtgagacaaatagataagcaattcctcatctgctcaatctgtctagaacggtacaaaaaccctaaagtcttaccatgcttacacaccttctgcgaacgctgtctccagaactacattcctgcccactctctgaccctgtcgtgtccagtctgcaggcagacgtccatactgccagagaaaggggttgctgcccttcagaacaactttttcatcacaaacctaatggacgtgttgcagcgaactcccgggtctaatgcggaagaatcctccatcctggagactgtcacagctgtcgctgctggcaaacctctcagttgccctaatcatgatggcaatgttatggagttttactgccaaagctgcgaaactgctatgtgcagagaatgcacagagggtgaacacgctgaacacccaacagtgcctctcaaagacgtggtcgagcaacacaaagcatcactgcaggtgcagctggacgcggttaacaagaggctgcccgagatcgactctgccctgcagttcattagtgagatcattcaccagttaaccaaccagaaagcctctattgtggatgatatccattccacctttgacgaactgcaaaaaaccctaaatgtgcgcaaatcagttctgctgatggagctggaggtaaactatggcctgaaacataaagttctgcagtcacagctggacaccctcctgcaggggcaggaatctatcaagagttgctccaactttacagctcaggcactaaatcacggcacggagactgaagttcttcttgttaagaagcagatgagcgaaaaactgaacgagctcgcggatcaggattttcccctacatccccgcgaaaatgaccagctggactttatcgtcgaaacggagggtctcaagaagtccatccacaatttggggactattctaaccactaatgccgtagcatctgagaccgttgcgactggcgaggggctccgacaaaccatcatcggacagcccatgtcggttactattaccaccaaagacaaagatggagagctgtgtaaaaccgggaatgcgtacctcacagcagagctaagcacgccagatggcagcgtggccgacggcgaaatcctggacaataagaacgggacctatgaatttctttacactgtccagaaagagggcgactttacactttccctgagactatacgaccagcacattcgtggaagtccttttaaactgaaggtaatccggagcgctgacgtctcgcccaccacagaaggagtgaaaagacgggtcaagtcccccgggtccgggcacgttaaacaaaaggctgttaaacggccagcgagcatgtactctaccggtaagaggaaagagaacccaatagaagatgaccttatcttccgggtgggtacgaagggaagaaacaaaggagaattcaccaacttgcagggggttgcagcaagcacaaatggaaagatcttgattgcagactcaaataaccaatgcgtgcagattttctccaatgatgggcagtttaaaagcaggtttggtatccgaggtagatccccaggccagttacagagacctacgggagtcgccgtgcacccctcaggagacatcataattgctgattatgataataaatgggtgtcaattttttcttcagacgggaagttcaagaccaaaatcggctccggaaaacttatgggaccaaaaggcgtgtctgtcgatcgcaatggtcacatcattgttgttgacaataaggcttgttgcgtgtttatattccaaccaaatgggaaaattgtgaccagattcggctcacggggcaatggcgataggcaatttgcaggaccacattttgctgcggtgaattctaacaacgagatcatcattaccgactttcataatcatagtgttaaagtttttaatcaggaaggggaattcatgctgaaattcgggtcaaatggggagggtaatggacagttcaacgccccaacaggggtggccgtcgactcaaatggaaacatcattgtcgctgattggggcaacagccgaatccaggtgttcgacggttctggcagtttcctgagctacatcaataccagcgcggatcccctctatgggccacaggggctggcccttacctcggacggccatgtagtggtggcagactctggcaaccattgttttaaggtgtatcgatatctgcagtag

SEQ ID NO: 185630 - DNA, 2235 bp, Artificial Sequence
  derived and/or modified sequence
atggccagcgagggcaccaacatccccagccccgtggtgcggcagattgataaacaattcctgatttgttccatttgcctggaacggtataagaatcccaaggtcctgccctgtcttcacactttttgcgagcggtgcctccagaactacattcccgcccactctctgactctctcatgccccgtatgccggcaaactagtatattgcctgagaagggagtggccgctctgcaaaacaatttttttataaccaatttgatggatgtgttgcaaaggacacccggtagcaatgcggaggaatcttcgatcctggaaacagtgaccgctgttgctgcagggaaaccactgtcatgtccaaatcacgacggcaatgtaatggagttctactgtcagtcatgtgaaaccgcgatgtgtagagagtgtactgagggtgagcacgcagagcatccgactgtgcctcttaaagacgttgtggagcaacacaaagcaagcctgcaggtgcaactggacgccgtgaacaagaggctgccagagattgactctgcgctgcaattcatatcagagatcatacaccagctaaccaaccaaaaagcttctattgtggatgacatccactctaccttcgatgagctgcagaagacactgaatgtgcgcaaatccgttctgctaatggagctggaagtgaactacggcttgaagcataaggtcctccagtcccagctggacaccctgctgcaggggcaggaatccattaaatcctgctccaattttactgcccaggcgctgaaccacgggacagagacagaagtgctcctggtcaagaagcagatgtccgagaagctgaacgagctagccgaccaggactttccactgcatccccgagagaatgatcagttggattttattgtcgaaaccgaaggcttaaagaagtctatccataatcttggaaccatcttgacgactaatgcggtagctagtgaaacagtggcaaccggagaaggcctcagacagacaattatcggacagccaatgagtgtgactatcacaaccaaagacaaagatggagaactttgcaagaccggcaatgcatatctcacagccgagctgagcacacccgatggctcagtcgccgatggggagatcttggataataaaaatggcacatacgagtttctctataccgttcagaaagagggggattttaccctctccctacggctatacgatcagcatattagaggcagcccgtttaagctgaaggtcattcggtcagcagacgtgtccccaacgaccgaaggtgtgaaaagacgagtcaaatcgcctggctcaggccacgtcaaacagaaggcagtcaagcgcccggccagcatgtattctaccggtaagcgcaaagaaaacccaattgaggacgacctgatattccgggtggggacaaagggcagaaataagggtgaattcaccaatctgcagggggtggccgcttctactaacggcaagattttgattgcggactctaataatcagtgcgtacagattttttccaatgacggccagttcaagtcccgttttggcattcggggtcgatcccccgggcagcttcagaggcctacaggagtggcagtacacccatccggcgacattatcatcgcagattatgacaacaagtgggtgtccatcttctcttccgatggtaaatttaaaactaagattgggagcggaaaactgatgggacccaaaggtgtctcggtagatcgcaacggtcacatcattgtcgtagataataaagcatgctgcgtcttcatatttcagcccaacggcaagattgtgacacgctttggaagtcgtggcaacggggatcgacagttcgcgggaccacactttgcggcggtgaattccaataacgagatcatcatcaccgacttccacaatcactccgtaaaagttttcaatcaggagggggaattcatgttgaaatttgggtccaatggagagggcaatggacagttcaacgcccccactggagtggcagtggattctaatggcaatattattgtcgccgactggggaaattcacggatccaggtgtttgatgggagcggatcctttttgtcttacataaatacttctgccgacccactgtatgggccacaggggctggccctgacgtctgatgggcatgtggttgtcgctgacagcggaaatcactgtttcaaggtctacagatacctgcagtag

SEQ ID NO: 185631 - DNA, 2316 bp, Artificial Sequence
  derived and/or modified sequence
atgcaccgaagtggaaggtacggtacccagcagcagagggcaggtagcaagactgctggccctccctgccagtggtcccgaatggcgtcagaaggcacaaacattcctagtcccgtagtccgacagattgacaaacaatttctgatctgcagcatttgtttagaacgctataagaacccaaaggtgcttccttgtcttcatacgttctgtgagcgctgcctgcaaaactacatccctgcccactcgctaactctgtcctgtccggtatgtcgccaaacctctatcctgccggaaaaaggcgtcgctgccttacaaaacaatttctttatcactaacctgatggacgtactgcagcgcactccgggttcaaacgccgaagagagcagtatccttgagacagtcacagctgttgcagccggtaagccattatcttgtcctaatcatgacgggaatgtgatggagttctactgtcagagttgcgaaactgccatgtgtagagagtgcactgagggggaacatgccgagcatccaactgttccactcaaggacgtggtggaacagcataaggcgtcgctccaagtgcagctagatgctgtgaacaaacgcctgccagagattgactcagcactacaatttatttccgagattatccatcaactgactaatcagaaggccagcatcgttgacgacatccactcaacattcgatgagttgcaaaaaactctaaatgtgcggaagtcagtcttactgatggaactggaggtgaattacggcctcaagcacaaagttctgcagagtcagcttgacaccctgcttcaagggcaagagagtattaagagttgctcaaattttactgctcaggccctgaatcatggaactgaaaccgaggtgctcctagtgaagaagcaaatgtccgaaaagctcaacgaactcgctgaccaagattttccactccatcctagagagaatgaccagctagatttcatcgtggagactgaaggactgaagaagtctattcacaacttgggaactattttaacgacaaacgccgtcgcaagcgaaaccgtcgcgaccggcgaaggactgaggcagacgataattgggcagcccatgtctgtgaccatcaccacaaaggataaggacggcgagctgtgcaaaactggaaacgcttacctgaccgctgaactgtccacccctgacgggtccgtggcagatggagagatattagacaacaaaaatgggacatatgaattcctatatacggttcaaaaggagggtgacttcacactgtctttgcggctctatgatcaacatattagggggtctccgttcaagttgaaagtcattagatctgccgacgttagtcctaccaccgagggcgtgaaaaggcgagtgaagagcccgggaagtggtcacgtgaaacagaaggcagtaaaacgtccagctagcatgtattccactggaaaacggaaagaaaaccccatagaagatgacctgatattccgtgttgggactaaaggacggaataagggggaattcaccaatctgcaaggagtggctgctagcacgaatggaaaaatcttgattgcagatagtaacaatcaatgtgtccagattttttcaaacgacgggcagttcaaaagccgctttggaattcggggtcggagcccgggacagctgcagcgacctaccggggtggcagtccacccatcaggggatatcatcatcgctgattacgacaacaaatgggtgagcatattttcttctgatggcaaattcaaaaccaaaatcggatctggtaagctcatgggtccaaagggtgtaagtgtagatcgaaatggacatatcattgtcgtggacaacaaggcctgctgtgtctttatcttccaacccaatggaaaaatcgtcacccgctttggatctcggggtaacggggacagacagtttgccggtccacactttgccgcagtgaacagcaacaacgagatcattattactgattttcataatcacagcgtgaaagttttcaatcaggagggcgaatttatgcttaaattcggcagtaatggagaaggaaatggccaatttaacgctccaaccggagttgccgtggactctaatgggaacattattgtcgccgattgggggaactctaggattcaggtgttcgatggatcgggaagcttcctgtcttacattaataccagtgcagatccattatacggcccacaggggctggctcttacatctgatggccatgtcgtcgtcgccgactctggaaaccattgcttcaaagtttatcgatatctccagtag

SEQ ID NO: 185632 - DNA, 2235 bp, Artificial Sequence
  derived and/or modified sequence
atggcttccgagggcacaaacatccctagtcccgtagtcaggcagatagacaagcagttcctcatctgttcaatttgccttgaaaggtataagaatcctaaagttctgccatgtttgcataccttctgtgagcgctgccttcagaattacatccccgctcattcactcactttgtcttgcccagtatgtcgacagaccagcatactaccagagaaaggggtggctgcactgcaaaacaatttctttatcacaaacttgatggacgtgctgcagaggacccctgggagcaacgctgaagaaagcagcatactcgagaccgtcacagccgtggctgcaggcaaacctctgagttgccccaaccatgacggcaatgtcatggagttctactgccaatcctgtgaaactgctatgtgtcgcgagtgcaccgagggggaacatgctgagcaccctacggtgccactgaaagacgtggtcgaacaacacaaggcctctttgcaagtacagctagacgccgtcaacaaacggctgccagaaatagacagcgcactgcagtttattagcgagatcatccaccaactcaccaaccaaaaagccagtattgttgatgatatccatagcactttcgacgagctgcagaagacccttaacgtgaggaagtctgtgctcttgatggaactggaggtcaattacggactaaaacataaagtgctgcaatcacagctggacaccctcctgcagggacaggaatctattaagtcctgttcaaatttcacagcccaggcactcaatcacgggacagagaccgaagtcctgctggtaaagaaacagatgagtgaaaagctcaatgagctggcagaccaggattttcctctgcatccaagagagaacgaccaactggattttatcgttgaaacagaaggtctgaagaagagcatccacaatctcgggaccatcctaaccaccaatgctgtggcctccgaaacagtggcgactggggaagggctcagacagactatcatcggacagccgatgagtgttaccatcactaccaaagacaaggatggagaactttgcaaaaccggaaatgcctatctcacagcggagctgtccactcctgacggaagtgtcgctgatggtgaaatcctagacaataagaatggtacctacgagtttctgtacaccgttcaaaaggagggggacttcaccttgagcctccgactttacgaccaacacatccggggaagtccctttaagttaaaagtaattcggtctgccgacgtttcaccgacgactgaaggcgtgaagcgccgagtcaagagccctggcagtggacatgtaaagcagaaggcggtgaagcgtcccgcatcgatgtattctacaggaaaacgaaaagagaacccgatcgaggatgacctgattttccgcgtcggcactaaggggaggaataaaggagagttcacaaatcttcagggagtagctgcaagcactaacggcaaaatcctgatcgccgactctaataaccaatgtgtgcagatctttagcaacgatggtcaattcaaatccagattcggtataaggggcaggtcccccggacagctgcaaaggcctactggcgtggccgtacacccctcaggtgacattattatagcggactacgacaacaaatgggtgagcattttctctagcgatggcaagtttaagaccaagataggaagtggcaaacttatgggccctaaaggggtgagcgtggatcgtaacggccatattatcgttgtagacaataaggcttgctgcgtgttcatcttccagcccaacggaaaaatcgtcactcggtttggctccagaggtaacggcgataggcagttcgcgggaccacattttgcagccgtgaattcaaataatgagataataatcaccgacttccacaatcacagtgtcaaagttttcaaccaggaaggggaattcatgctgaaatttggatctaacggcgaggggaacgggcaatttaacgctccaacgggggtcgcagtcgacagtaacggcaacattatcgtggcagattggggtaactctcggatccaggtgttcgacggcagcggctcattcctgtcctatataaacacaagcgccgaccccctctacgggcctcaggggctcgccttgacgagcgacggacacgtggtagttgccgactctggaaatcattgcttcaaagtataccgctacctgcagtag

SEQ ID NO: 185633 - DNA, 6735 bp, Artificial Sequence
  derived and/or modified sequence
cccagttgtctgcgggctgcggggagctaagtccccagattggaggaggctggctctggtcttcgatgcacaggagtggccgttatggaacgcagcagcagcgtgcagggtcaaagacagccggccccccatgtcagtggtctaggatggccagtgaaggcaccaacatcccaagtcctgtggtgcgccagattgacaagcagtttctgatttgcagtatatgcctggaacggtacaagaatcccaaggttctcccctgtctgcacactttctgcgagaggtgcctgcagaactacattcctgcccacagtttaaccctctcctgcccagtgtgccgccagacctccatcctgcccgagaaaggggtggccgcgctccagaacaatttcttcatcacaaacctgatggacgtgctgcagcgaactccaggcagcaacgctgaggagtcttccatcctggagacagtcactgctgtggctgcgggaaagcctctctcttgcccaaaccacgatgggaatgtgatggaattttactgccagtcctgtgagactgccatgtgtcgggagtgcacggagggggagcacgcagagcaccccacagttccactcaaggatgtggtggaacagcacaaggcctcgctccaggtccagctggatgctgtcaacaaaaggctcccagaaatagattctgctcttcagttcatctctgaaatcattcatcagttaaccaaccaaaaggccagcatcgtggatgacattcattccacctttgatgagctccagaagactttaaatgtgcgcaagagtgtgctgcttatggaattggaggtcaactatggcctcaaacacaaagtcctccagtcgcagctggatactctgctccaggggcaggagagcattaagagctgcagcaacttcacagcgcaggccctcaaccatggcacggagaccgaggtcctactggtgaagaagcagatgagcgagaagctgaacgagctggccgaccaggacttccccttgcacccgcgggagaacgaccagctggatttcatcgtggaaaccgaggggctgaagaagtccatccacaacctcgggacgatcttaaccaccaacgccgttgcctcagagacagtggccacgggcgaggggctgcggcagaccatcatcgggcagcccatgtccgtcaccatcaccaccaaggacaaagacggtgagctgtgcaaaaccggcaacgcctacctcaccgccgaactgagcacccccgacgggagcgtggcagacggggagatcctggacaacaagaacggcacctatgagtttttgtacactgtccagaaggaaggggactttaccctgtctctgagactctatgaccagcacatccgaggcagcccgtttaagctgaaagtgatccgatccgctgatgtgtctcccaccacagaaggcgtgaagaggcgcgttaagtccccggggagcggccacgtcaagcagaaagctgtgaaaagacccgcaagcatgtacagcactggaaaacgaaaagagaatcccatcgaagacgatttgatctttcgagtgggtaccaaaggaagaaataaaggagagtttacaaatcttcagggggtagctgcatctacaaatggaaagatattaattgcagacagtaacaaccaatgtgtgcagatattttccaatgatggccagttcaaaagtcgttttggcatacggggacgctctccggggcagctgcagcggcccacaggagtggctgtacatcccagtggggacataatcattgccgattatgataataaatgggtcagcattttctcctccgatgggaaatttaagacaaaaattggatcaggaaagctgatgggacccaaaggagtttctgtggaccgcaatgggcacattattgttgtggacaacaaggcgtgctgcgtgtttatcttccagccaaacgggaaaatagtcaccaggtttggtagccgaggaaatggggacaggcagtttgcaggtccccattttgcagctgtaaatagcaataatgagattattattacagatttccataatcattctgtcaaggtgtttaatcaggaaggagaattcatgttgaagtttggctcaaatggagaaggaaatgggcagtttaatgctccaacaggtgtagcagtggattcaaatggaaacatcattgtggccgactggggaaacagcaggatccaggtttttgatgggagtggatcatttttgtcctacattaacacatctgctgacccactctatggcccccaaggcctggccctaacttcagatggtcatgttgtggttgcagactctggaaatcactgtttcaaagtctatcgatacttacagtaatggtgggcaggtggatacccgcttccatggtcttgcactataaactggaatggatttctcaatgcgggaccagattatgactagagtttttatgccagaaggaatcattggtgaactttccaaggttatttctgaatgtaacaatttccttaaaaatgacttatccaatttctgtatttcacctttagggttaaaaaaaactcttctactgaatctataaaaactgcagttttacatctgtgaactatggcttaagggacaggatttatgtagctaaactaattttgcaaatcaaacagacacttaaaaaactagcatatgtaaaggtattcgttaatcctgtgaatggtagcttttgcacagaacttccaaaagcaaaacaaaaacaaaatctattgtagttatatacttcatttaacctaggtcacaagacccagggaatcttctaacctcacttttacagtaggtattactcttgtgacatttttttggttatcaacaactaaatataaattactttggaaaaagtaaggctgtcttgcaaaatgatcccagctctgattagcagccctctggagttcagaacttaagtatcagtgcaaatttctcaacctttctgggttagacaaagatccttttttgtgtgttcttttcaccacccctttggctcaccttgtatcagcaaacaaagtacttcttcagggaaacctgaaatttctaatgccttgaaaagcatattacaaaagtaatgctaccttttgggaaacaaactgccccgttaactccagatcattgcactggaatgtaatcaagaaagttagtcatgttttatgtaccatgttttcacacgtgtctcttctcttcgacttcctgaaagcgaaagctttacctcctgcaaatgtcagcacatgtagtaggacaccagtatcctaggacagagagccataagtagccctttggaggactgatggtgtcaaccaaaggcatgtgattgattaatgattcccccttagaaagcaagtgttaccaaagttgtgttatcttgaaagcattacaggtaagggcatgttatggttatttatcattgtttaatgaatagtagaggtgtcaagggactatgtatacatgattagggtaagatagaatgtattatatatatatatatatacacacacacatatatatagctgaatctttggtgtattgaaataggcagcactctgaaagacagaagcttcgtccagccactcttcagcacattcctttactaagcagtttaaagccgtcctagtggagcaagccctaaagcagatttaatttttgccattttccaagaatgacggtggtggcttttagtcagaaaatggccttctgtgctttcaaaaaaaaaaacaaaaaaaaaaccacacacacacataaaaaacccaacaggtcaaaataaaagttgaacttgagttacatttaatttaaatataaatgcattttgagaaatgttaagaacaatttagtcaatcgttcatctgtcattggtactgtaaaataagctgtggtctatttccactgtttaattttctactcagttctaccaaataggatgtcatgtttgacatttttgatagtgactttggggtcttcttcactgaaagcaccttagaactgtactataagaaaacatttcccctatgtataattatatgaatgtgatgtttattgcttattaatttataattcagtcattctctatataggacttcttaaaatttagaagggaaatctagctacttcaaattgtctgttaaatttattatgcccaaatcaacctctgaaaaaaggtttttccaggaagatttacatttaggtttaatatttttttagttaggtagagttttaaaaaatacttgagcctgtccgtgataaagctataaaattcaataactttttagaatgttaaatgaagacactgtttcctaacatcagtgagatacatctttgaatttaaacattcatatttactgagtacctactaggtaccaagtactcttttaggcactggaaatacagtgatggacaaaacaggtaaaaaatcgctgccccctcagagctgacattctggggtgggaatttcattttgccacgtactaacgttctgcacaaaagacaggctagactcttgtctagattgtttaaaagaaacttttcaaattggttacattaattttagtttattttcacaagtaaaaatggctttttatttagattctttctgtcccaggctgttgatcttaaaactagttgatttaaagagtttttttgcacaacatttcaattatatttgtgaacttagaaattaacttacaatctaaccagccatcatatcatatcctatcaggctagatatctcaatagtagactgaatacaaagctaattttttttacatgtcaatattggcacaaactggaatgaaagaatagtttgattcagacctgctccactatgtgttgctaaaacacatgctatgagcactccaggaaacactatattttttccaaaaaatatgtgattatatatgttaaagtatagataacatttcacacttggatacatatgtgcatttactgtatttcttggtaagcatatttttgggggaaagtgctgctgatatgatacaagtagacaaaatttaaatgaaattttgtcacattctatggaaaatggtttctggtaaactgagaaggatattaaaataagtggcttttttctgggctaccattattgtttgatttctctttgtcaagtgtatagaacctgtcatacattcatgataagtagcactgaaaaattactcattcaaatttcccctgggcacgtaaggcaaaatattgccggttgggatttcaaggtcagtgacgacgcatttcctcccagtacagaccccccagccccccttgctggacatggggaggcagagagtcacttgaccatccagaaatacatgactacaagtcctttatgactgtttgccattttttttaatggtacttagtattttgatcaaactttagtctccagaactaaacaagtccctaagtttccttattttaatttactgtgactagatttgaagcaaataaatactccagatccatgcagctagaacacacttgcttccactactaaatatacagggtatgtcctaacatggagttaactggaatagcagtacactagcaagtatctgtgaatccttagcactgacgggttaacagaaatgctttggtaatacctacttagttaattggaggaagtagtaaataaacattaggtaatctgcagattacttcaaatgggaaaaatctttttgtagactctatagtaccctctctattcactagcttctgaaaagggaggagtatttttagtttgacaatttaataatttaaaaacaagacatctccaggtaggaaaaaatgaaagctatttcatgcaaacattatctaatttagcttaaaagtgaaagtggtaatactgttggtttctgtaaatgttgcagggttttaaactttataattactttaatatttttgataactagaaatctagtattgccataaaggaaactaagtgcccatcaaagatttgtttggtataaataaagaattatttgttttgttttcaatgacagtaagctacaaatcatgatgcttaaaaactttctaaagatgaattgtgtggcagtgattggtctgtttgtggagaatgtatgaaagctattaatattctagaatagattaataaattggctatgttgttccaatgaatgtacagcacttccattaacttttgaaagcaacacagccttaaactcaatgcttttgctttatgacatgggaatgttctgtcatcaatggagtgtattcttgtaatagaattctttatatcgttctcaattctatagactttcaagcctatgtatgaatatgaaggggttttttttttttgctttgttttctttttagattttgtacattccatctttataggtctgtttcatatgttttatgtatagaacactaagtcttgcactctctgacattgatactgatatattctcgtcatttgttcttttatgaatcaaaatgttgactgcctatttaaagaaaagaatgaacgctgtgcatcaaagtgtttgtatgttcgtagctacatacgtaccacagtattttggatgctttagtctacaatgaaactttcaattaattctgtcttgaaacataggagaaacaggattcatgtgtatctctttaccatgcacaaaatctcaaatcattataataaagcttgttttctccattt

SEQ ID NO: 185634 - DNA, 3832 bp, Artificial Sequence
  derived and/or modified sequence
agcattttgagtgagcttgcagaaaatgaggggctttcagctggtcgcctgcttgtcacctctcgctgcctgaaaggcagctctcagagccctttcctgtccttctaattacagcggcgggggcagtgcgcgcttcgggacgcaattggaaaccagcgtgcagggtcaaagacagccggccccccatgtcagtggtctaggatggccagtgaaggcaccaacatcccaagtcctgtggtgcgccagattgacaagcagtttctgatttgcagtatatgcctggaacggtacaagaatcccaaggttctcccctgtctgcacactttctgcgagaggtgcctgcagaactacattcctgcccacagtttaaccctctcctgcccagtgtgccgccagacctccatcctgcccgagaaaggggtggccgcgctccagaacaatttcttcatcacaaacctgatggacgtgctgcagcgaactccaggcagcaacgctgaggagtcttccatcctggagacagtcactgctgtggctgcgggaaagcctctctcttgcccaaaccacgatgggaatgtgatggaattttactgccagtcctgtgagactgccatgtgtcgggagtgcacggagggggagcacgcagagcaccccacagttccactcaaggatgtggtggaacagcacaaggcctcgctccaggtccagctggatgctgtcaacaaaaggctcccagaaatagattctgctcttcagttcatctctgaaatcattcatcagttaaccaaccaaaaggccagcatcgtggatgacattcattccacctttgatgagctccagaagactttaaatgtgcgcaagagtgtgctgcttatggaattggaggtcaactatggcctcaaacacaaagtcctccagtcgcagctggatactctgctccaggggcaggagagcattaagagctgcagcaacttcacagcgcaggccctcaaccatggcacggagaccgaggtcctactggtgaagaagcagatgagcgagaagctgaacgagctggccgaccaggacttccccttgcacccgcgggagaacgaccagctggatttcatcgtggaaaccgaggggctgaagaagtccatccacaacctcgggacgatcttaaccaccaacgccgttgcctcagagacagtggccacgggcgaggggctgcggcagaccatcatcgggcagcccatgtccgtcaccatcaccaccaaggacaaagacggtgagctgtgcaaaaccggcaacgcctacctcaccgccgaactgagcacccccgacgggagcgtggcagacggggagatcctggacaacaagaacggcacctatgagtttttgtacactgtccagaaggaaggggactttaccctgtctctgagactctatgaccagcacatccgaggcagcccgtttaagctgaaagtgatccgatccgctgatgtgtctcccaccacagaaggcgtgaagaggcgcgttaagtccccggggagcggccacgtcaagcagaaagctgtgaaaagacccgcaagcatgtacagcactggaaaacgaaaagagaatcccatcgaagacgatttgatctttcgagtgggtaccaaaggaagaaataaaggagagtttacaaatcttcagggggtagctgcatctacaaatggaaagatattaattgcagacagtaacaaccaatgtgtgcagatattttccaatgatggccagttcaaaagtcgttttggcatacggggacgctctccggggcagctgcagcggcccacaggagtggctgtacatcccagtggggacataatcattgccgattatgataataaatgggtcagcattttctcctccgatgggaaatttaagacaaaaattggatcaggaaagctgatgggacccaaaggagtttctgtggaccgcaatgggcacattattgttgtggacaacaaggcgtgctgcgtgtttatcttccagccaaacgggaaaatagtcaccaggtttggtagccgaggaaatggggacaggcagtttgcaggtccccattttgcagctgtaaatagcaataatgagattattattacagatttccataatcattctgtcaaggtgtttaatcaggaaggagaattcatgttgaagtttggctcaaatggagaaggaaatgggcagtttaatgctccaacaggtgtagcagtggattcaaatggaaacatcattgtggccgactggggaaacagcaggatccaggtttttgatgggagtggatcatttttgtcctacattaacacatctgctgacccactctatggcccccaaggcctggccctaacttcagatggtcatgttgtggttgcagactctggaaatcactgtttcaaagtctatcgatacttacagtaatggtgggcaggtggatacccgcttccatggtcttgcactataaactggaatggatttctcaatgcgggaccagattatgactagagtttttatgccagaaggaatcattggtgaactttccaaggttatttctgaatgtaacaatttccttaaaaatgacttatccaatttctgtatttcacctttagggttaaaaaaaactcttctactgaatctataaaaactgcagttttacatctgtgaactatggcttaagggacaggatttatgtagctaaactaattttgcaaatcaaacagacacttaaaaaactagcatatgtaaaggtattcgttaatcctgtgaatggtagcttttgcacagaacttccaaaagcaaaacaaaaacaaaatctattgtagttatatacttcatttaacctaggtcacaagacccagggaatcttctaacctcacttttacagtaggtattactcttgtgacatttttttggttatcaacaactaaatataaattactttggaaaaagtaaggctgtcttgcaaaatgatcccagctctgattagcagccctctggagttcagaacttaagtatcagtgcaaatttctcaacctttctgggttagacaaagatccttttttgtgtgttcttttcaccacccctttggctcaccttgtatcagcaaacaaagtacttcttcagggaaacctgaaatttctaatgccttgaaaagcatattacaaaagtaatgctaccttttgggaaacaaactgccccgttaactccagatcattgcactggaatgtaatcaagaaagttagtcatgttttatgtaccatgttttcacacgtgtctcttctcttcgacttcctgaaagcgaaagctttacctcctgcaaatgtcagcacatgtagtaggacaccagtatcctaggacagagagccataagtagccctttggaggactgatggtgtcaaccaaaggcatgtgattgattaatgattcccccttagaaagcaagtgttaccaaagttgtgttatcttgaaagcattacaggtaagggcatgttatggttatttatcattgtttaatgaatagtagaggtgtcaagggactatgtatacatgattagggtaagatagaatgtattatatatatatatatatacacacacacatatatatagctgaatctttggtgtattgaaataggcagcactctgaaagacagaagcttcgtccagccactcttcagcacattcctttactaagcagtttaaagccgtcctagtggagcaagccctaaagcagatttaatttttgccattttccaagaatgacggtggtggcttttagtcagaaaatggccttctgtgctttcaaaaaaaaaaacaaa

SEQ ID NO: 185635 - protein, 1315 aa, Artificial Sequence
  derived and/or modified sequence
MSGPTDETAGDLPVKDTGLNLFGMGGLQETSTTRTMKSRQAVSRVSREELEDRFLRLHDENILLKQHARKQEDKIKRMATKLIRLVNDKKRYERVGGGPKRLGRDVEMEEMIEQLQEKVHELEKQNETLKNRLISAKQQLQTQGYRQTPYNNVQSRINTGRRKANENAGLQECPRKGIKFQDADVAETPHPMFTKYGNSLLEEARGEIRNLENVIQSQRGQIEELEHLAEILKTQLRRKENEIELSLLQLREQQATDQRSNIRDNVEMIKLHKQLVEKSNALSAMEGKFIQLQEKQRTLRISHDALMANGDELNMQLKEQRLKCCSLEKQLHSMKFSERRIEELQDRINDLEKERELLKENYDKLYDSAFSAAHEEQWKLKEQQLKVQIAQLETALKSDLTDKTEILDRLKTERDQNEKLVQENRELQLQYLEQKQQLDELKKRIKLYNQENDINADELSEALLLIKAQKEQKNGDLSFLVKVDSEINKDLERSMRELQATHAETVQELEKTRNMLIMQHKINKDYQMEVEAVTRKMENLQQDYELKVEQYVHLLDIRAARIHKLEAQLKDIAYGTKQYKFKPEIMPDDSVDEFDETIHLERGENLFEIHINKVTFSSEVLQASGDKEPVTFCTYAFYDFELQTTPVVRGLHPEYNFTSQYLVHVNDLFLQYIQKNTITLEVHQAYSTEYETIAACQLKFHEILEKSGRIFCTASLIGTKGDIPNFGTVEYWFRLRVPMDQAIRLYRERAKALGYITSNFKGPEHMQSLSQQAPKTAQLSSTDSTDGNLNELHITIRCCNHLQSRASHLQPHPYVVYKFFDFADHDTAIIPSSNDPQFDDHMYFPVPMNMDLDRYLKSESLSFYVFDDSDTQENIYIGKVNVPLISLAHDRCISGIFELTDHQKHPAGTIHVILKWKFAYLPPSGSITTEDLGNFIRSEEPEVVQRLPPASSVSTLVLAPRPKPRQRLTPVDKKVSFVDIMPHQSDETSPPPEDRKEISPEVEHIPEIEINMLTVPHVPKVSQEGSVDEVKENTEKMQQGKDDVSLLSEGQLAEQSLASSEDETEITEDLEPEVEEDMSASDSDDCIIPGPISKNIKQSLALSPGLGCSSAISAHCNFRLPGSSDFPASASQVDGITGACHHTQPSEKIRIEIIALSLNDSQVTMDDTIQRLFVECRFYSLPAEETPVSLPKPKSGQWVYYNYSNVIYVDKENNKAKRDILKAILQKQEMPNRSLRFTVVSDPPEDEQDLECEDIGVAHVDLADMFQEGRDLIEQNIDVFDARADGEGIGKLRVTVEALHALQSVYKQYRDDLEA

SEQ ID NO: 185636 - DNA, 3948 bp, Artificial Sequence
  derived and/or modified sequence
atgtctggcccaacagatgagactgcgggggatctgccagttaaagacaccggtctgaatctttttggaatgggaggtcttcaggaaacttcaaccactagaacgatgaagagccgccaggcggtgagtcgcgtgagccgagaagagttggaggataggttcctgcggctgcacgatgaaaatattttacttaagcagcacgcacggaagcaggaagacaaaatcaagaggatggcaaccaagctgatccggctggtgaatgacaaaaaacggtatgagagggtgggcggcgggcctaagcgcctgggcagggatgtggaaatggaggagatgattgaacagctgcaggagaaggtgcacgaattagaaaaacaaaacgagaccctgaagaaccgactcatctctgcaaagcagcagcttcaaacacaaggttacagacagaccccctacaataatgtgcaatcacggattaacactggacgcagaaaggctaacgagaatgcaggactgcaagaatgtcccaggaagggcattaagtttcaggacgctgatgtggctgaaaccccccaccccatgttcacaaaatacggtaattcattgcttgaagaagctaggggagaaattcgcaacctggaaaatgtgatccagagtcagcgcggacagatagaagagcttgagcacttggcagagatcttaaagacccagttgcggcgtaaggagaatgagatagaactgagcctcttgcaactcagggagcaacaggccaccgaccagcgttctaacattcgggataacgttgagatgataaagcttcacaaacagctggtagagaaatccaatgccttgtcagcaatggagggaaagtttattcagctgcaggaaaagcagagaacgcttaggatatcacacgatgctctgatggctaatggagacgaactcaatatgcagcttaaagaacagcgactcaagtgttgcagtctcgagaaacagctgcattctatgaagttttccgaaagacgaattgaggagctgcaggatcgaataaacgatctggaaaaagagcgggagctcctcaaagaaaattacgacaaactctacgatagtgcattcagtgccgctcatgaagagcagtggaagctcaaggagcagcaacttaaagtacagatcgcccagctcgaaaccgctttgaagagcgatctgaccgacaagacagagattctagaccggctgaaaactgaaagggatcagaacgaaaagcttgtccaggagaacagagaactccagttacagtacctggaacagaagcaacagcttgacgagctgaaaaagaggattaaactttataatcaggaaaacgatattaacgcagacgaactgagtgaggccctcctactaataaaagctcaaaaagagcagaaaaacggcgacctgtccttcttggtcaaggtcgattccgaaatcaacaaggatctggaacggagtatgcgcgaactccaggcaacacatgctgaaacggtgcaagagctggagaagacaaggaatatgttaattatgcagcacaagatcaacaaggattaccaaatggaggttgaagccgtgacccgcaagatggagaacctgcagcaggattatgagttgaaagtggagcaatacgtgcacttgttggatatcagagctgctcgcatacataaactggaggcacagcttaaggatatcgcatatggtactaaacagtacaaattcaaaccagagattatgcctgacgatagtgtggacgaatttgatgagactatccaccttgaaagaggggagaatctgtttgagatacacatcaataaagtgaccttcagctccgaggtactgcaggctagtggagacaaagagccagtaaccttttgtacatacgctttttacgatttcgagctccagacaactcccgtggtgaggggcctacatcccgagtacaacttcacatcgcagtacttagttcacgtgaacgacctctttctgcaatacatccaaaaaaatactataaccctggaggtccatcaggcctatagcactgagtacgaaaccatcgcagcttgccaactgaaatttcatgagattttagaaaaatccggacggattttttgtactgcctcgctgatcggcacaaaaggcgacatcccaaacttcggcaccgttgaatattggttccggctgcgggtccctatggatcaagccattcggttatatagggagcgagcaaaagctctcggctatattaccagcaactttaagggccccgagcacatgcaatcactatctcaacaggcacccaagacagcccagctgtcatcaaccgactccactgacggtaacttgaacgaactgcacattacaatccgctgctgtaatcaccttcagagccgagcaagtcatcttcagccacatccttacgtcgtgtacaagttcttcgattttgccgaccatgataccgcaattatcccctcatctaacgacccccagtttgatgaccacatgtactttcccgtgccgatgaacatggacctcgatcgttatctcaaatctgagtcactgtcgttttacgtttttgatgattctgatacccaggagaatatttatattggaaaggtcaacgtgccattgatctccttggcacatgataggtgtataagcggcatatttgaactcacagaccaccagaagcatcccgcagggacaatccatgttatcctgaagtggaagttcgcctatctgcctccatccgggtcgataactactgaagatctgggaaatttcattagaagcgaggagcccgaggtggtacagcggctcccccccgcgtcaagcgtaagcacactggtcttagctcctaggccaaagcctagacagagactgacgccggtcgacaagaaggtatcatttgtggatattatgccacatcaatcagacgaaacttccccaccccccgaggatagaaaggagataagtcccgaggttgagcacatccctgaaattgagattaacatgctgactgtaccacatgtgcctaaggtcagccaggagggcagcgtggacgaggttaaagagaatacggaaaaaatgcagcaaggtaaggatgacgtgtcccttctctcagaaggtcagctcgcggaacaatctctggcctctagcgaggacgaaaccgagatcacagaggatctggagccagaagttgaagaggacatgtccgcttctgacagtgacgattgtataatccccggcccaatttccaaaaatatcaagcaaagcttggccctctctccggggttgggctgctctagtgctatctctgcacattgtaacttcagactccccgggtcatcagacttccccgcaagtgcgagtcaggttgatgggatcaccggcgcctgccaccatacacagccatctgaaaaaattcggatcgagatcatcgcgctatccctcaacgactctcaagtgaccatggatgatacaatccagagattattcgtagaatgtcgattttattctctgcctgcggaagagaccccggtcagcctgccgaagccgaaatccggacaatgggtgtactataactattcgaacgtcatttatgttgacaaggaaaataataaggctaagcgagatatcctaaaagccattttgcaaaagcaggagatgcctaaccggagtttgcgctttacggtcgttagtgacccgcccgaggacgaacaggatttggagtgtgaggacataggcgtggctcatgttgatctggccgacatgtttcaagaaggaagggatttgatagagcagaacatagatgtgtttgacgcccgcgctgacggagaaggcatcggcaagctgcgggtgaccgttgaagcccttcatgcccttcaaagtgtgtataaacaatatcgcgatgatctggaagcatag

SEQ ID NO: 185637 - DNA, 3948 bp, Artificial Sequence
  derived and/or modified sequence
atgagcggccccacagatgaaacagctggggacctgcctgtgaaggacaccggcctgaacctgtttggcatgggcggcctgcaggagaccagcaccaccaggaccatgaagagccggcaggccgtgtcccgggtgtcccgggaggagctggaggaccgcttcctgcggctgcatgatgagaacatcctgctgaagcagcacgccaggaagcaggaggacaagatcaagaggatggccaccaagctgatccggctggtgaatgacaagaagagatatgaaagagtgggcggcggccccaagaggctgggcagagatgtggagatggaggagatgattgagcagctgcaggagaaggtgcatgagctggagaagcagaatgagaccctgaagaacagactcatcagcgccaagcagcagctgcagacccagggctaccggcagaccccctacaacaacgtgcagagccgcatcaacacaggaagaaggaaggccaatgaaaatgccggcctgcaggagtgccccaggaagggcatcaagttccaggatgctgatgtggccgagaccccccaccccatgttcaccaagtatggcaacagcctgctggaggaggcccggggggagatccggaacctggagaatgtcatccagagccagaggggccagatcgaggagctggagcacctggccgagatcctgaagacccagctgcggaggaaagaaaatgaaattgagctgagcctgctgcagctgcgggagcagcaggccacagaccagaggagcaacatccgggacaacgtggagatgatcaagctgcacaagcagctggtggagaagagcaatgccctgagcgccatggagggcaagttcatccagctgcaggagaagcagaggaccctgcgcatcagccatgatgccctgatggccaatggagatgagctgaacatgcagctgaaggagcagaggctgaagtgctgcagcctggagaagcagctgcacagcatgaagttcagcgagaggagaattgaggagctgcaggaccgcatcaatgacctggagaaggagcgggagctgctgaaggagaactatgacaagctgtatgacagcgccttctctgctgcccacgaggagcagtggaagctgaaggagcagcagctgaaggtgcagatcgcccagctggagacagccctgaagagtgacctgacagacaagacagagatcctggaccggctgaagacagagcgggaccagaatgagaagctggtgcaggagaaccgggagctgcagctgcagtacctggagcagaagcagcagctggatgagctgaagaagaggatcaagctgtacaaccaggagaatgacatcaatgctgatgagctgtctgaggccctgctgctgatcaaggcccagaaggagcagaagaatggagacctgtccttcctggtgaaggtggacagcgagatcaacaaggacctggagaggtccatgagggagctgcaggccacccatgctgagaccgtgcaggagctggagaagaccaggaacatgctgatcatgcagcacaagatcaacaaggactaccagatggaggtggaggccgtgaccaggaagatggagaacctgcagcaggactatgagctgaaggtggagcagtatgtgcacctgctggacatccgggccgcccgcatccacaagctggaggcccagctgaaggacatcgcctacggcaccaagcagtacaagttcaagccagagatcatgccagatgacagcgtggatgaatttgatgagaccatccacctggagcggggggagaacctgtttgagatccacatcaacaaggtgaccttcagcagcgaggtgctgcaggccagcggggacaaggagcctgtgaccttctgcacctacgccttctatgactttgagctgcagaccacccctgtggtgcggggcctgcaccctgagtacaacttcaccagccagtacctggtgcacgtgaatgacctcttcctgcagtacatccagaagaacaccatcaccctggaggtgcaccaggcctacagcacagaatatgagaccatcgccgcctgccagctgaagttccacgagatcctggagaagagcggccgcatcttctgcacagccagcctgattggcaccaagggggacatccccaactttggcaccgtggagtactggttccggctgcgggtgcccatggaccaggccatccggctgtaccgggagcgggccaaggccctgggctacatcaccagcaacttcaagggccctgagcacatgcagagcctgagccagcaggcccccaagacagcccagctgagcagcacagacagcacagatggcaacctgaatgagctgcacatcaccatccgctgctgcaaccacctgcagagccgggccagccacctgcagccccacccctacgtggtgtacaagttctttgattttgctgaccatgacacagccatcatccccagcagcaatgacccccagtttgatgaccacatgtacttccctgtgcccatgaacatggacctggaccgctacctgaagtctgagagcctgtccttctacgtgtttgatgacagcgacacccaggagaacatctacatcggcaaggtgaatgtgcccctcatcagcctggcccatgaccgctgcatcagcggcatctttgagctgacagaccaccagaagcaccctgctggcaccatccacgtgatcctgaagtggaagtttgcctacctgccccccagcggcagcatcaccacagaggacctgggcaacttcatccgctctgaggagcctgaggtggtgcagaggctgcccccagccagctctgtgtccaccctggtgctggccccccggcccaagccccggcagaggctgacccctgtggacaagaaggtgtcctttgtggacatcatgccccaccagagtgatgagaccagccccccacctgaggacaggaaggagatcagccctgaggtggagcacatccctgagattgagatcaacatgctgactgtgccccacgtgcccaaggtgtcccaggagggctctgtggatgaggtgaaggagaacacagagaagatgcagcagggcaaggatgatgtgtccctgctgtctgagggccagctggccgagcagagcctggccagcagtgaagatgaaacagagatcacagaggacctggagcctgaggtggaggaggacatgtctgccagtgacagtgatgactgcatcatccctggccccatcagcaagaacatcaagcagagcctggccctgagccctggcctgggctgcagcagcgccatcagcgcccactgcaacttccggctgcccggcagcagtgacttccctgccagcgccagccaggtggatggcatcactggagcctgccaccacacccagcccagcgagaagatcagaattgagatcatcgccctgagcctgaatgacagccaggtgaccatggatgacaccatccagaggctgtttgtggagtgccgcttctacagcctgcctgctgaggagacccctgtgtccctgcccaagcccaagagcggccagtgggtgtactacaactacagcaatgtcatctacgtggacaaggagaacaacaaggccaagagggacatcctgaaggccatcctgcagaagcaggagatgcccaacagaagcctgcgcttcaccgtggtgtctgaccccccagaagatgagcaggacctggagtgtgaagatattggagtggcccacgtggacctggccgacatgttccaggagggccgggacctgattgagcagaacattgatgtgtttgatgcccgggcagatggagagggcatcggcaagctgcgggtgacagtggaggccctgcacgccctgcagagcgtgtacaagcagtacagagatgacctggaggcctag

SEQ ID NO: 185638 - DNA, 3948 bp, Artificial Sequence
  derived and/or modified sequence
atgagcggccccaccgacgagaccgccggcgacctgcccgtgaaggatactgggcttaatttgttcggtatggggggcctgcaagagacaagtactacaaggacaatgaaaagccgccaggctgtgtctcgggtctcaagagaggaacttgaagacagattccttagactgcacgacgagaacattctgctgaagcagcacgcgcgcaaacaggaagataaaattaaaaggatggcaactaagctgatcaggctggtcaacgacaaaaagcgctacgagagggtgggggggggcccaaaaagacttgggcgggacgttgagatggaggaaatgatagagcaactgcaggaaaaggtgcacgagcttgaaaaacagaacgagacgctgaagaatcgcctgatatctgccaagcaacagttacagactcagggatacagacagaccccatacaacaatgtacagtctcgcatcaacaccggccgcagaaaagctaacgaaaatgctggcttacaggaatgcccccgaaaggggatcaagttccaggatgccgatgttgcggaaacccctcatcctatgttcaccaaatacggcaactcgttacttgaagaagcaaggggcgaaatcagaaatctggagaatgtgatccagagccagcgggggcagatcgaggagctggagcacctcgctgaaatactgaagactcaactgcgccgcaaggaaaacgagatcgagctcagcctgctgcagctccgggagcagcaggccaccgaccaacgctctaacatccgggataatgtggaaatgatcaaattgcacaaacagctggtggagaaatccaacgcactgtcggcaatggagggtaaatttattcagctgcaggagaaacagaggactttgaggatatcccatgacgccctgatggctaacggcgacgaactgaacatgcaactgaaggagcagcggctgaagtgttgcagtttggaaaaacagcttcattccatgaaattctccgagcggagaatcgaggaactacaggatcgaatcaacgacctagaaaaggagcgagaattacttaaggagaactacgataagctctatgatagcgcattttctgctgcccacgaggaacagtggaaactaaaggagcagcagctcaaggtgcagatcgctcagttggaaactgctttaaagtcagatcttaccgacaagactgagattctcgaccgattgaagactgagcgggaccagaacgagaagctggtacaggagaacagggaactgcagctgcaatatctcgagcaaaaacaacaattagacgagttgaaaaagcgcatcaagctttataaccaggagaatgacatcaatgccgacgagctttcggaggcacttctgctgattaaggcccagaaagagcagaagaatggagacctaagttttctcgtgaaggtggactccgagatcaataaggatctcgaacggtctatgcgcgagttacaggctacacacgccgaaactgtgcaggagctggagaaaactcggaacatgctgattatgcaacacaagatcaataaagactatcagatggaagtggaggcagtgacccgtaagatggaaaatctccagcaggactacgaactaaaagtggaacagtacgtccacctgctggacattcgcgctgcccggatacataagcttgaggctcagctgaaagacatagcctatggaaccaaacagtataaattcaagccagagatcatgccagatgattccgtggatgaatttgatgagacgatacaccttgagcgtggcgaaaatctattcgaaattcacatcaacaaggtaacattctctagtgaagtgctgcaagctagtggggacaaagagcccgttacattttgcacatacgccttttacgactttgaattgcagactacgcctgtagtgaggggtctgcatcccgaatacaacttcacctcccagtatctggtgcacgtgaatgatctctttcttcagtatattcagaaaaatacaattactctggaggtccatcaggcctacagcactgagtatgaaactattgccgcttgccagctgaagttccacgagatcttagagaagtctgggagaatcttctgcactgctagcctaatcggaacaaaaggagacatccctaattttggcacagtggagtattggttccgacttagagtgccaatggaccaggctatccggctctaccgcgaaagggccaaggctctgggatacattacatccaacttcaaagggccggaacatatgcagtctcttagccagcaggctcctaaaactgcccagctgtcgagcacagacagtaccgatggaaatcttaacgagctccacataactatcaggtgttgtaaccaccttcaatctagggcttctcacctgcagccacacccttacgtggtctacaagttcttcgactttgcggatcacgataccgcaattataccaagctctaatgatcctcagttcgacgatcacatgtacttcccggttcctatgaatatggatctcgatcggtaccttaagtctgagagcctaagcttttacgtattcgatgactcggacactcaggaaaacatatacattgggaaggtaaatgtgcccctcataagtcttgcccatgaccggtgtattagcgggatttttgagctcacagaccaccagaaacacccagctggaactattcacgtgatattaaaatggaaatttgcgtaccttccacccagtggatcaatcacaaccgaagatctgggtaacttcatccgttccgaggaaccagaggtagtccagaggctgccaccagcatcatccgttagcacacttgttctggctccccgccctaagccgagacaacgactgaccccagttgacaaaaaggtgagctttgtcgatattatgcctcatcagtctgacgagacttcaccacctcctgaggatcgaaaagaaatatctcccgaagtagagcacattcccgagattgaaatcaacatgttgacagtcccgcatgtgcctaaagtgtctcaggagggctcagtggacgaagtgaaggaaaacaccgaaaaaatgcagcaggggaaggacgatgtctcgcttttatctgagggccaactcgccgagcaaagcttggcatcttcagaagatgaaaccgaaataaccgaggaccttgaacccgaggtggaagaggacatgtcagcctctgacagcgacgattgtatcattccaggcccgatctccaaaaatatcaagcaaagcctggctttatcccccggcttgggctgcagcagtgccattagcgctcactgcaattttcgccttccaggctcaagtgacttccctgcctcagcctcccaggtcgacggcataaccggggcatgccaccacacccaaccatctgaaaagattcgaattgagattattgctctctcacttaacgatagccaggtgacaatggatgataccatccaacggctttttgttgagtgtagattttattctctgcctgctgaagagacacccgttagcctgccgaagcctaaatcaggccagtgggtgtactacaattatagcaatgtcatctatgtggacaaggagaataataaagctaagcgagacatcctaaaagccattctgcagaaacaggaaatgcccaataggtccctaagattcacagtcgtgtccgaccctccggaggatgagcaggacctcgagtgcgaagatatcggtgtggcacacgtggaccttgcagacatgtttcaggaggggcgagaccttattgaacagaacattgatgttttcgacgccagagccgacggtgaaggaattgggaaactgagggtgacggtcgaggcactccacgcactccagtcagtgtataagcagtatcgggacgacctggaagcttag

SEQ ID NO: 185639 - DNA, 3948 bp, Artificial Sequence
  derived and/or modified sequence
atgagtggccctactgacgagaccgccggtgaccttcctgtgaaggatactggactgaacctgtttgggatgggcggtctgcaagaaacaagcactaccagaaccatgaagtctaggcaggctgttagccgggtcagcagagaggagttggaagacagattcttgaggttgcacgacgagaacattctgctgaagcaacatgctagaaaacaagaggacaagattaagcgaatggccactaaactcattcggctggtcaacgacaagaaacgatatgagagggtgggaggcggtcctaaacgactggggagggacgtcgaaatggaagaaatgatagagcagctccaggagaaagtgcacgaactggaaaagcagaatgagacccttaaaaaccggctcatttccgctaagcagcagctgcagacgcagggctaccggcagacaccttacaataacgttcaatcaagaatcaacaccggacggaggaaagccaatgaaaacgctgggctccaggaatgcccccgaaaggggattaagttccaagatgctgacgtggccgagacgcctcatcccatgtttaccaagtacgggaactcactgttagaggaagcaaggggtgagataaggaatctggagaacgtaatccaatctcaaagaggccagatcgaagagctggagcatctggccgaaatcctgaagacgcagttgcggagaaaagagaatgagatcgagttgagcttgctgcagctacgcgagcaacaggcaactgatcagaggtccaatatccgcgataacgttgaaatgatcaaacttcataagcagttagtggagaaaagcaatgctctgtcagctatggagggtaagttcatccagcttcaggagaagcagagaactctgcggatctctcatgacgccttgatggccaacggagacgagctgaacatgcaactgaaggaacagcggctcaagtgctgtagcttagagaagcaacttcacagcatgaagttctcagagaggcgaatcgaagagctacaggaccggattaacgacttggagaaggagcgcgaactgctaaaggagaactatgataaactctacgacagcgctttctccgcagcgcacgaagagcagtggaagctgaaggagcagcagctcaaggttcaaatcgcacaacttgaaacggccctgaagtcagacctcaccgacaaaacagagatactagaccgattgaaaacagagcgcgatcaaaatgaaaagctcgtacaggagaacagagagctgcagctgcaatacctggaacagaagcaacaactggacgagctgaagaaaagaattaaactatacaaccaagagaatgatatcaacgctgatgaattgtccgaagcccttctgctgatcaaagctcaaaaagagcagaagaacggggatctctcattcctggtcaaagtggactccgagatcaacaaagaccttgaaaggagtatgcgagagcttcaggcaacacacgcagaaacagttcaggagctcgagaagacccgcaatatgctaatcatgcagcacaagattaataaggactatcaaatggaggtcgaagctgtgactcggaaaatggaaaatctacaacaagattatgagctgaaagtggaacagtatgtccaccttcttgatattagggcagcaaggattcataaactggaggctcagctgaaagatatcgcatatggcacgaagcaatacaagttcaagcccgaaattatgcctgacgactccgtggatgaattcgatgagacaatccacctggagcggggagaaaatctgttcgagatccacattaacaaagtcaccttttcgtcagaagtgctgcaggcaagtggagacaaggagccagtaacgttctgtacctatgccttctacgacttcgagctacagacaactcctgtcgtgagaggactgcatccagagtacaactttacatcccagtatctggtccacgtgaatgatcttttcctccaatatatacagaagaataccattactctagaggtccaccaggcgtatagtaccgaatacgagacgatcgcagcctgccagttgaagttccatgagatcctcgaaaagtccggacgaatcttctgcaccgcgagtcttattggcacaaagggcgacattcctaacttcggcacagtcgagtattggttccgcctgcgagtgcccatggatcaggcgattcgcctgtacagagaaagggcaaaagcactggggtacataactagcaacttcaagggtcccgaacacatgcagagcctatcccagcaggcccctaagacagcccaactttccagcactgactctacagatggaaatcttaatgagcttcacatcacaattcgctgctgtaaccatttgcagagtagagctagccacctccagccacatccatatgtcgtgtacaagttcttcgattttgctgaccacgatacagccatcatcccatctagcaatgatccccagttcgatgaccacatgtacttccctgtgccaatgaacatggacttagacaggtatctgaaaagcgagtcattgagtttttacgtgttcgacgattctgacacccaggagaacatctacattggaaaggtgaacgtgcccctgatttcattggcacacgaccgttgcatttcgggcatctttgagctgacggatcaccagaagcatccagccggaaccattcacgtgatccttaagtggaagttcgcttacttgccccctagcggatctatcaccaccgaggatctggggaattttattcgaagcgaagagcccgaagtcgtgcagcgtctgccccctgcctcctcagtgagcaccctggtgctcgctccccgtcccaaacccagacaacgcctgactcctgtggacaaaaaagtaagcttcgtggatatcatgccgcaccagtcagacgaaacctcaccgccacctgaagaccgtaaagaaataagccctgaagttgagcatatccccgagatcgaaataaacatgcttactgtgccacatgtgcctaaggtgtctcaggaaggatccgtggacgaggtgaaagagaacactgaaaagatgcagcaagggaaggacgacgtcagtctcctgagcgaaggccagctggccgaacagagcctcgcatcgtctgaggacgagacagaaattacagaagatctcgagcctgaggtggaggaagacatgagcgcatccgattccgacgactgtatcattcccggtcccatctctaagaatatcaagcagagtctggctctgtcccctggcctcggttgctcatctgcaatcagcgcccattgtaattttcgccttcccggaagctccgactttccggcatcggcgtcccaggtggatgggattaccggcgcttgtcatcacactcagccgagcgagaagatcaggatcgaaatcattgcgctgtcgctgaatgactcccaggttactatggatgacacgatacaaaggctgttcgtggagtgtcgcttctactccctcccggcagaggagaccccagtgtctctaccgaagccaaaatcaggccagtgggtttattacaactattccaatgtgatatacgtagacaaagaaaataacaaagcaaaacgggatatcttgaaggctatcttgcaaaagcaagagatgcctaaccgaagtttaagatttacggtggtgtctgatccccctgaggacgagcaggaccttgagtgcgaggacataggagtggcacatgtggaccttgccgatatgttccaggaaggcagagatctgatagagcaaaacatcgatgtattcgacgctcgcgctgatggtgagggcattggcaaattaagggtgaccgtagaggcgctgcacgcactccagtccgtgtataagcagtaccgtgatgacctagaggcatag

SEQ ID NO: 185640 - DNA, 6176 bp, Artificial Sequence
  derived and/or modified sequence
gcccgccacgctgtcggcgctatagcaacggtagctagctgcagggccagtggcacgctaggccatgtctggtccaactgatgagactgcaggagacttgcctgtgaaagatacaggtctaaacctctttggaatgggagggttacaagaaacttcaacaacacggacaatgaagtctcgccaggcagtgtcacgtgtcagtcgtgaggaactggaagacagatttttgcgtttgcatgatgagaacattttacttaaacagcatgcccgcaagcaggaggataaaattaaaagaatggccaccaagttaatacggctagttaatgacaagaaaagatatgagcgggttggtggcggccccaagcggctgggacgagatgtggaaatggaagaaatgattgagcagctgcaagagaaagttcatgagcttgaaaaacaaaatgaaaccctcaaaaacagactgatttcagccaaacagcaacttcaaacccagggttacaggcaaactccatacaataatgtacaatctcgtattaacactgggcgtagaaaagcaaatgaaaatgctggtttacaggaatgccccaggaaaggtataaaattccaagatgcagatgtagcagaaactccacatcccatgtttacaaaatatggcaacagtttacttgaagaagccagaggagaaataagaaatttagaaaacgttattcagtcacaaagaggccagatagaggagttagagcacttggctgagatcctgaaaactcagttgaggagaaaagaaaatgaaattgagttatctcttcttcagcttcgagaacagcaagctacagatcaaaggtcaaatattcgggacaatgtagaaatgattaagcttcataaacagctagtagagaaaagcaatgctctttcagcaatggaaggaaaatttattcagcttcaagagaagcaaagaactctcagaatcagccacgatgctttgatggcaaatggggatgaattaaacatgcaacttaaagagcagcgtttaaaatgctgcagtcttgagaaacaattacattctatgaagttttctgaaagaagaatagaagagctgcaggatagaattaatgatttagaaaaggaacgggaacttttaaaggaaaactatgataaactttatgacagtgccttcagtgctgcccatgaagagcaatggaagttaaaggagcaacagctgaaagtgcagattgctcagctcgagactgccttgaagtctgacttaacagacaaaactgaaatccttgacagattaaaaactgaaagagatcaaaatgaaaaactcgttcaagagaatagagaactacagttacagtatctggaacaaaagcaacaacttgatgaacttaaaaaacgcataaaattgtacaaccaggagaatgatattaatgctgatgaattgagtgaagctctcctacttataaaggctcaaaaagaacaaaaaaatggagacctttcctttttagtgaaagtagatagtgaaattaataaagatctagaacgctctatgagagagctgcaagcaactcatgcagaaacggtgcaagagctggaaaagacaagaaacatgctaattatgcaacacaaaattaataaagattatcagatggaggttgaggcagtgacccgtaagatggaaaatttgcagcaagattatgaactcaaagtggaacagtatgttcatcttcttgatatcagggctgcacgtatccataaactagaagcccaattaaaggatattgcctatggcaccaagcagtacaaatttaaaccagaaatcatgccagatgactctgttgatgaatttgatgaaaccatccacttagaacgaggcgaaaatctatttgaaatccatatcaacaaagtaaccttttcttctgaagttttacaggcatctggagataaagagcctgtcactttctgtacctatgctttctatgattttgaactacagacaactcccgtagtgcgaggccttcatcccgaatataacttcacttctcaatatcttgttcatgttaatgacttatttttgcaatatattcagaagaatactatcacccttgaggtccaccaggcttatagcacagaatatgaaacaattgcagcatgtcaattaaaatttcacgaaattcttgaaaaaagcggccgaatattttgtacagcaagtttgattggaacaaaaggagacatcccaaattttggcacagtggaatactggttccgattaagagttcccatggatcaagcaattcgactttatcgagaaagggcaaaggctttggggtatataacatcaaattttaaggggccagagcatatgcagtcgttaagtcagcaagcacccaaaactgctcaactcagttctacagattccacagatggcaacttaaatgaacttcacattacaataagatgttgcaaccacctgcagtcccgagcaagccacctgcagccacacccatatgttgtgtacaagttttttgattttgcagaccatgatacagctatcattcccagtagcaatgatccacagtttgatgatcatatgtatttcccagtgccaatgaatatggacttggatcgataccttaagtcagagtctctgagtttttatgtttttgatgatagtgatacccaggagaatatttacataggaaaagtcaatgtgcctctgatttcgttggcacatgacaggtgtatctcaggaatatttgagttaacagaccatcaaaagcatcctgctggcaccatccatgttatattgaaatggaaatttgcttaccttccaccaagtggatcaataacaactgaagacttaggaaatttcattcgcagcgaagagccagaagttgttcaaagacttcctccagcatcctctgttagcacactagttttagcaccaagacctaaaccaagacaacgtttaacacctgtagataagaaggtatctttcgtggatatcatgccacatcagagtgatgagacttctcctcctcctgaagataggaaggaaatttcaccagaggtagagcatataccagaaatagaaattaatatgctgactgttccacatgttcccaaggtttcacaagaaggcagtgtagatgaggtaaaagagaatactgagaaaatgcagcaaggaaaagatgatgtgtctttactatctgaaggtcagcttgcagaacaaagcttggcatcttctgaagatgaaacagaaataacagaggacttggaaccagaagttgaagaggacatgtcagcttctgacagtgatgactgtattattccaggtcctatctccaagaatatcaaacagagtctcgcattgtctcccgggctggggtgcagtagcgcgatctcagctcactgcaacttccgcctcccgggttccagcgattttcctgcctcagcctcccaagtagatgggattacaggtgcctgccaccacacccagccatcagaaaaaattcggattgagatcatagctctaagccttaatgattctcaagtaaccatggatgacactatccaacggctgtttgttgagtgtcgattctacagtcttcctgctgaagagacacccgtgtcacttccaaaacccaagagtgggcagtgggtctactataactatagcaatgtgatctacgtggataaagaaaacaacaaagcaaagagagacatcttaaaagctatactacaaaaacaagagatgcctaatagaagccttcgcttcaccgtggtcagtgaccctccagaggacgagcaggacctggagtgtgaggacattggcgtggctcacgtcgaccttgccgacatgtttcaggaagggagggacctcattgagcaaaatatcgatgtttttgatgcacgagcagatggtgaaggtattggcaagctcagggtaacagtcgaagctctccatgccctccagtctgtctacaagcaatacagagatgacttggaggcttgaaagcaaatgctccagaggcatctcctactcctcagtaaatgctcacatgaaagttcctacatgagatttttgtaattactctggtgtatataatctataattcatgggaagctgggagcggggagacctgggtttgaagtgttgaagttttgtatactttttcatttgtttatttctctattccctccttctcataactgccacccctcaggacttaagttctccataatgggcagtaccttctcaataatttatacctacgtgatagcgtgagaaagtctatttgcattttcaacattttcttaggaagaaccgaaatgcaattcccatttttatttttaataagcaaaagcataaatcttagaaaacctatgaaaaagaaatacttttatgttatccctaatcgtcccactaaatggaatgcctatgattagcttcattaagagttttatactgtgaagattttattagaagcaatatatgaaaattacttggattaatgtgttaatcttcctctttaaaatgctaatatccattttatgcacattaaagctcagtatgcattttctttgatgcatgcagtttctatcaattaaatataaagaatgaaacttagcaccaacttattcaatgactgcaagttttttgtctttctttcttaaaagttcattctatttgtattattttcatacatttgtaatggtgacccagggatgtatatataaaaaggagatagttatatagatagatgtgaaatttacacgttgaaaacttagtatatgacacagaaagaaattatgaaaagtataactcaaattctgatatgcttagttagacgtgaaaggagtatctttttatcattttttaaatttacatcaagccagtacagtgccagggtgtatctgggtaaccagatcctcgaaaagcagctctgaaagttaattttctagcttttacccaatctcactgaaggatttaattgatatttttaatggagctgtgaatcaatgctgcaaaggaattgtctctagaggtctaggatataatgcatttcattttttaatttacttttttatttgtcattttcttcaaaggatttttataggctgtgggttttcactgtttgcaaacaggctatgttccttcttaagcatatgtaaagtattcagggagataagtaatttattaaaatctacctaatttgccgtgatatattaaatctctgcttcagtgatcacagaccatttcatttagagaattaggcattccctctttgtgtgattaaagctctggaaaatgagttctttgctcctatttgtgaacattcaaagcctgctaatggcaagaagatggaatagattatgagacaattcattacagttcaatagaaaaaaaaagcagctataatgcaaaaatgcaagtatgaatatctgcatatagtttgaaccatctgtgctctaatggcttcaataatgactctcgtctttagaaggctttgaaatgacatccgtacaatattaatttgttgatgtacattgtgggaccagtagagtatgatctgaccacagaaatctataaattctgtctataccactgggcctccctgtcctggggcctgccatctccgagaagaatcttgctctcatccaactctgcaaatcttcataacaactcgttcctctggaaccttctggagaccacaaacatctgcagactaaacctctccagtcctagtaaacaaccacatgtttgttgtcacttcggctggctctgagctcatttttttggcccctttttctagctttctttggctttatgcagttacagtgtcattaaggcccataatattccctgcagtaatttaaaacagccagattataccctgggattaactgagtggtttttgagacatttattgtggtattctcccaggaggtttgtattattgttgtaaaatgttacatcccaaactaaataacccttctgcagggagaagaaccagattgcactgacttcttaggatcattaagtggaaaggaaaagtttttcttagaaaacttatgggacccagtcacctgtatggaatgtatatctcagacaagatgagagaaacagccatgtttctgtcacattgtttactgtcatattaaagatatctagtttt

SEQ ID NO: 185641 - DNA, 3948 bp, Artificial Sequence
  derived and/or modified sequence
atgagcggccccaccgacgagaccgccggcgacctgcccgtgaaggacaccggcctgaacctgttcggcatgggcggcctgcaggagaccagcaccaccagaaccatgaagagcagacaggccgtgagcagagtgagcagagaggagctggaggacagattcctgagactgcacgacgagaacatcctgctgaagcagcacgccagaaagcaggaggacaagatcaagagaatggccaccaagctgatcagactggtgaacgacaagaagagatacgagagagtgggcggcggccccaagagactgggcagagacgtggagatggaggagatgatcgagcagctgcaggagaaggtgcacgagctggagaagcagaacgagaccctgaagaacagactgatcagcgccaagcagcagctgcagacccagggctacagacagaccccctacaacaacgtgcagagcagaatcaacaccggcagaagaaaggccaacgagaacgccggcctgcaggagtgccccagaaagggcatcaagttccaggacgccgacgtggccgagaccccccaccccatgttcaccaagtacggcaacagcctgctggaggaggccagaggcgagatcagaaacctggagaacgtgatccagagccagagaggccagatcgaggagctggagcacctggccgagatcctgaagacccagctgagaagaaaggagaacgagatcgagctgagcctgctgcagctgagagagcagcaggccaccgaccagagaagcaacatcagagacaacgtggagatgatcaagctgcacaagcagctggtggagaagagcaacgccctgagcgccatggagggcaagttcatccagctgcaggagaagcagagaaccctgagaatcagccacgacgccctgatggccaacggcgacgagctgaacatgcagctgaaggagcagagactgaagtgctgcagcctggagaagcagctgcacagcatgaagttcagcgagagaagaatcgaggagctgcaggacagaatcaacgacctggagaaggagagagagctgctgaaggagaactacgacaagctgtacgacagcgccttcagcgccgcccacgaggagcagtggaagctgaaggagcagcagctgaaggtgcagatcgcccagctggagaccgccctgaagagcgacctgaccgacaagaccgagatcctggacagactgaagaccgagagagaccagaacgagaagctggtgcaggagaacagagagctgcagctgcagtacctggagcagaagcagcagctggacgagctgaagaagagaatcaagctgtacaaccaggagaacgacatcaacgccgacgagctgagcgaggccctgctgctgatcaaggcccagaaggagcagaagaacggcgacctgagcttcctggtgaaggtggacagcgagatcaacaaggacctggagagaagcatgagagagctgcaggccacccacgccgagaccgtgcaggagctggagaagaccagaaacatgctgatcatgcagcacaagatcaacaaggactaccagatggaggtggaggccgtgaccagaaagatggagaacctgcagcaggactacgagctgaaggtggagcagtacgtgcacctgctggacatcagagccgccagaatccacaagctggaggcccagctgaaggacatcgcctacggcaccaagcagtacaagttcaagcccgagatcatgcccgacgacagcgtggacgagttcgacgagaccatccacctggagagaggcgagaacctgttcgagatccacatcaacaaggtgaccttcagcagcgaggtgctgcaggccagcggcgacaaggagcccgtgaccttctgcacctacgccttctacgacttcgagctgcagaccacccccgtggtgagaggcctgcaccccgagtacaacttcaccagccagtacctggtgcacgtgaacgacctgttcctgcagtacatccagaagaacaccatcaccctggaggtgcaccaggcctacagcaccgagtacgagaccatcgccgcctgccagctgaagttccacgagatcctggagaagagcggcagaatcttctgcaccgccagcctgatcggcaccaagggcgacatccccaacttcggcaccgtggagtactggttcagactgagagtgcccatggaccaggccatcagactgtacagagagagagccaaggccctgggctacatcaccagcaacttcaagggccccgagcacatgcagagcctgagccagcaggcccccaagaccgcccagctgagcagcaccgacagcaccgacggcaacctgaacgagctgcacatcaccatcagatgctgcaaccacctgcagagcagagccagccacctgcagccccacccctacgtggtgtacaagttcttcgacttcgccgaccacgacaccgccatcatccccagcagcaacgacccccagttcgacgaccacatgtacttccccgtgcccatgaacatggacctggacagatacctgaagagcgagagcctgagcttctacgtgttcgacgacagcgacacccaggagaacatctacatcggcaaggtgaacgtgcccctgatcagcctggcccacgacagatgcatcagcggcatcttcgagctgaccgaccaccagaagcaccccgccggcaccatccacgtgatcctgaagtggaagttcgcctacctgccccccagcggcagcatcaccaccgaggacctgggcaacttcatcagaagcgaggagcccgaggtggtgcagagactgccccccgccagcagcgtgagcaccctggtgctggcccccagacccaagcccagacagagactgacccccgtggacaagaaggtgagcttcgtggacatcatgccccaccagagcgacgagaccagccccccccccgaggacagaaaggagatcagccccgaggtggagcacatccccgagatcgagatcaacatgctgaccgtgccccacgtgcccaaggtgagccaggagggcagcgtggacgaggtgaaggagaacaccgagaagatgcagcagggcaaggacgacgtgagcctgctgagcgagggccagctggccgagcagagcctggccagcagcgaggacgagaccgagatcaccgaggacctggagcccgaggtggaggaggacatgagcgccagcgacagcgacgactgcatcatccccggccccatcagcaagaacatcaagcagagcctggccctgagccccggcctgggctgcagcagcgccatcagcgcccactgcaacttcagactgcccggcagcagcgacttccccgccagcgccagccaggtggacggcatcaccggcgcctgccaccacacccagcccagcgagaagatcagaatcgagatcatcgccctgagcctgaacgacagccaggtgaccatggacgacaccatccagagactgttcgtggagtgcagattctacagcctgcccgccgaggagacccccgtgagcctgcccaagcccaagagcggccagtgggtgtactacaactacagcaacgtgatctacgtggacaaggagaacaacaaggccaagagagacatcctgaaggccatcctgcagaagcaggagatgcccaacagaagcctgagattcaccgtggtgagcgacccccccgaggacgagcaggacctggagtgcgaggacatcggcgtggcccacgtggacctggccgacatgttccaggagggcagagacctgatcgagcagaacatcgacgtgttcgacgccagagccgacggcgagggcatcggcaagctgagagtgaccgtggaggccctgcacgccctgcagagcgtgtacaagcagtacagagacgacctggaggcctag

SEQ ID NO: 185642 - protein, 1173 aa, Artificial Sequence
  derived and/or modified sequence
MAVETLSPDWEFDRVDDGSQKIHAEVQLKNYGKFLEEYTSQLRRIEDALDDSIGDVWDFNLDPIALKLLPYEQSSLLELIKTENKVLNKVITVYAALCCEIKKLKYEAETKFYNGLLFYGEGATDASMVEGDCQIQMGRFISFLQELSCFVTRCYEVVMNVVHQLAALYISNKIAPKIIETTGVHFQTMYEHLGELLTVLLTLDEIIDNHITLKDHWTMYKRLLKSVHHNPSKFGIQEEKLKPFEKFLLKLEGQLLDGMIFQACIEQQFDSLNGGVSVSKNSTFAEEFAHSIRSIFANVEAKLGEPSEIDQRDKYVGICGLFVLHFQIFRTIDKKFYKSLLDICKKVPAITLTANIIWFPDNFLIQKIPAAAKLLDRKSLQAIKIHRDTFLQQKAQSLTKDVQSYYVFVSSWMMKMESILSKEQRMDKFAEDLTNRCNVFIQGFLYAYSISTIIKTTMNLYMSMQKPMTKTSVKALCRLVELLKAIEHMFYRRSMVVADSVSHITQHLQHQALHSISVAKKRVISDKKYSEQRLDVLSALVLAENTLNGPSTKQRRLIVSLALSVGTQMKTFKDEELFPLQVVMKKLDLISELRERVQTQCDCCFLYWHRAVFPIYLDDVYENAVDAARLHYMFSALRDCVPAMMHARHLESYEILLDCYDKEIMEILNEHLLDKLCKEIEKDLRLSVHTHLKLDDRNPFKVGMKDLALFFSLNPIRFFNRFIDIRAYVTHYLDKTFYNLTTVALHDWATYSEMRNLATQRYGLVMTEAHLPSQTLEQGLDVLEIMRNIHIFVSRYLYNLNNQIFIERTSNNKHLNTINIRHIANSIRTHGTGIMNTTVNFTYQFLKKKFYIFSQFMYDEHIKSRLIKDIRFFREIKDQNDHKYPFDRAEKFNRGIRKLGVTPEGQSYLDQFRQLISQIGNAMGYVRMIRSGGLHCSSNAIRFVPDLEDIVNFEELVKEEGLAEETLKAARHLDSVLSDHTRNSAEGTEYFKMLVDVFAPEFRRPKNIHLRNFYIIVPPLTLNFVEHSISCKEKLNKKNKIGAAFTDDGFAMGVAYILKLLDQYREFDSLHWFQSVREKYLKEIRAVAKQQNVQSASQDEKLLQTMNLTQKRLDVYLQEFELLYFSLSSARIFFRADKTAAEENQEKKEKEEETKTSNGDLSDSTVSADPVVK

SEQ ID NO: 185643 - DNA, 3522 bp, Artificial Sequence
  derived and/or modified sequence
atggccgtggagaccctgagccccgactgggagttcgacagagtggacgacggcagccagaagatccacgccgaggtgcagctgaagaactacggcaagttcctggaggagtacaccagccagctgagaagaatcgaggacgccctggacgacagcatcggcgacgtgtgggacttcaacctggaccccatcgccctgaagctgctgccctacgagcagagcagcctgctggagctgatcaagaccgagaacaaggtgctgaacaaggtgatcaccgtgtacgccgccctgtgctgcgagatcaagaagctgaagtacgaggccgagaccaagttctacaacggcctgctgttctacggcgagggcgccaccgacgccagcatggtggagggcgactgccagatccagatgggcagattcatcagcttcctgcaggagctgagctgcttcgtgaccagatgctacgaggtggtgatgaacgtggtgcaccagctggccgccctgtacatcagcaacaagatcgcccccaagatcatcgagaccaccggcgtgcacttccagaccatgtacgagcacctgggcgagctgctgaccgtgctgctgaccctggacgagatcatcgacaaccacatcaccctgaaggaccactggaccatgtacaagagactgctgaagagcgtgcaccacaaccccagcaagttcggcatccaggaggagaagctgaagcccttcgagaagttcctgctgaagctggagggccagctgctggacggcatgatcttccaggcctgcatcgagcagcagttcgacagcctgaacggcggcgtgagcgtgagcaagaacagcaccttcgccgaggagttcgcccacagcatcagaagcatcttcgccaacgtggaggccaagctgggcgagcccagcgagatcgaccagagagacaagtacgtgggcatctgcggcctgttcgtgctgcacttccagatcttcagaaccatcgacaagaagttctacaagagcctgctggacatctgcaagaaggtgcccgccatcaccctgaccgccaacatcatctggttccccgacaacttcctgatccagaagatccccgccgccgccaagctgctggacagaaagagcctgcaggccatcaagatccacagagacaccttcctgcagcagaaggcccagagcctgaccaaggacgtgcagagctactacgtgttcgtgagcagctggatgatgaagatggagagcatcctgagcaaggagcagagaatggacaagttcgccgaggacctgaccaacagatgcaacgtgttcatccagggcttcctgtacgcctacagcatcagcaccatcatcaagaccaccatgaacctgtacatgagcatgcagaagcccatgaccaagaccagcgtgaaggccctgtgcagactggtggagctgctgaaggccatcgagcacatgttctacagaagaagcatggtggtggccgacagcgtgagccacatcacccagcacctgcagcaccaggccctgcacagcatcagcgtggccaagaagagagtgatcagcgacaagaagtacagcgagcagagactggacgtgctgagcgccctggtgctggccgagaacaccctgaacggccccagcaccaagcagagaagactgatcgtgagcctggccctgagcgtgggcacccagatgaagaccttcaaggacgaggagctgttccccctgcaggtggtgatgaagaagctggacctgatcagcgagctgagagagagagtgcagacccagtgcgactgctgcttcctgtactggcacagagccgtgttccccatctacctggacgacgtgtacgagaacgccgtggacgccgccagactgcactacatgttcagcgccctgagagactgcgtgcccgccatgatgcacgccagacacctggagagctacgagatcctgctggactgctacgacaaggagatcatggagatcctgaacgagcacctgctggacaagctgtgcaaggagatcgagaaggacctgagactgagcgtgcacacccacctgaagctggacgacagaaaccccttcaaggtgggcatgaaggacctggccctgttcttcagcctgaaccccatcagattcttcaacagattcatcgacatcagagcctacgtgacccactacctggacaagaccttctacaacctgaccaccgtggccctgcacgactgggccacctacagcgagatgagaaacctggccacccagagatacggcctggtgatgaccgaggcccacctgcccagccagaccctggagcagggcctggacgtgctggagatcatgagaaacatccacatcttcgtgagcagatacctgtacaacctgaacaaccagatcttcatcgagagaaccagcaacaacaagcacctgaacaccatcaacatcagacacatcgccaacagcatcagaacccacggcaccggcatcatgaacaccaccgtgaacttcacctaccagttcctgaagaagaagttctacatcttcagccagttcatgtacgacgagcacatcaagagcagactgatcaaggacatcagattcttcagagagatcaaggaccagaacgaccacaagtaccccttcgacagagccgagaagttcaacagaggcatcagaaagctgggcgtgacccccgagggccagagctacctggaccagttcagacagctgatcagccagatcggcaacgccatgggctacgtgagaatgatcagaagcggcggcctgcactgcagcagcaacgccatcagattcgtgcccgacctggaggacatcgtgaacttcgaggagctggtgaaggaggagggcctggccgaggagaccctgaaggccgccagacacctggacagcgtgctgagcgaccacaccagaaacagcgccgagggcaccgagtacttcaagatgctggtggacgtgttcgcccccgagttcagaagacccaagaacatccacctgagaaacttctacatcatcgtgccccccctgaccctgaacttcgtggagcacagcatcagctgcaaggagaagctgaacaagaagaacaagatcggcgccgccttcaccgacgacggcttcgccatgggcgtggcctacatcctgaagctgctggaccagtacagagagttcgacagcctgcactggttccagagcgtgagagagaagtacctgaaggagatcagagccgtggccaagcagcagaacgtgcagagcgccagccaggacgagaagctgctgcagaccatgaacctgacccagaagagactggacgtgtacctgcaggagttcgagctgctgtacttcagcctgagcagcgccagaatcttcttcagagccgacaagaccgccgccgaggagaaccaggagaagaaggagaaggaggaggagaccaagaccagcaacggcgacctgagcgacagcaccgtgagcgccgaccccgtggtgaagtag

SEQ ID NO: 185644 - DNA, 5812 bp, Artificial Sequence
  derived and/or modified sequence
aagtcacgtgctgtgacagtagctggggtgaggccgtcgtcgccgcacgggctggttggggctgtgtctgtgggaggcgccggggtgatggcggtggagactctgtccccggactgggagtttgaccgcgttgacgacggctcgcagaaaattcatgccgaagtccaacttaagaattatgggaaatttcttgaggagtatacctctcaactgagaagaattgaggacgctctggatgactcaattggagatgtttgggatttcaatcttgatcctatagcattaaagcttttgccttatgaacagtcctctcttttggaactcataaagactgaaaacaaggtcttaaacaaagtcatcactgtttatgctgcactttgttgtgaaatcaagaaattaaaatatgaggctgaaactaaattttacaatggtctcttgttttatggagaaggagctacagatgccagcatggtggaaggtgattgccaaattcaaatggggagatttatttcattcttacaggaactgtcttgctttgttacgaggtgctatgaagtggtgatgaacgtagtccaccagttggctgccctctatatcagtaacaagattgcacccaaaattatagagacaactggagttcattttcagactatgtatgagcacttgggagaactgctaacagttttgctcaccctggatgaaattattgataatcatatcacactgaaagaccactggactatgtacaaaaggttactgaaatctgtccatcacaatccttcaaaatttggaattcaggaagaaaaattaaagccatttgaaaagttcttgctgaagctagaagggcaattactggatggaatgatattccaggcctgtatagaacaacaatttgattctctcaatggaggagtatctgtgtcaaaaaatagtacttttgctgaggaatttgcacatagtattcggtcaatttttgcaaatgtagaagccaaacttggagaaccttctgaaattgaccagagagacaagtatgttggaatttgtggactctttgtattgcactttcagatttttcgaactattgataaaaagttttataagtctttattggacatttgtaagaaggtaccagccatcactctaactgctaatattatttggtttcctgataattttctgatccagaaaataccagcagctgccaaactgctagacagaaaaagtcttcaagccattaaaatacacagggatacttttctacaacagaaagctcaatcacttaccaaagatgtacagtcttactacgtctttgtgagctcatggatgatgaaaatggaatctattttgtctaaagagcagagaatggataaatttgctgaagatctcaccaatagatgtaatgtttttatacagggcttcttgtatgcatatagtattagtaccattattaaaaccacaatgaatctctacatgtccatgcaaaagccaatgaccaaaacctcagttaaggcattgtgcaggcttgttgaacttctcaaggcaatagagcatatgttctacaggagaagcatggttgtggctgattcagtttcacatataacacagcaccttcaacatcaggctcttcattctatttctgtggccaagaaaagagtgatttctgacaaaaaatacagcgaacagcgtcttgatgtgctctctgctctagttttggctgaaaacactctaaatggaccaagcacaaagcaacggcgacttattgtttctttggcactaagtgttggcacacaaatgaaaacatttaaagatgaagaactctttccacttcaagtagtcatgaaaaaactggatcttattagtgaacttagagaacgagtccaaacacaatgtgactgttgttttttatactggcatcgagctgtcttcccaatttatttagatgatgtatatgaaaatgctgttgatgcagccagattacattacatgttcagtgctttgcgcgactgtgtacctgctatgatgcatgcaaggcatttagagtcctatgagatacttctggattgctatgacaaggaaattatggaaattttaaatgagcatttgctggacaaattatgcaaagaaatagagaaagatctgcgactttctgtgcatactcatttaaagctggatgaccgaaaccctttcaaagttggcatgaaagacctggctctttttttctctctgaatccaattcggtttttcaatcgtttcattgacattcgggcttacgtaactcactacctagacaagactttctacaatctaacaactgtagcccttcatgactgggccacttatagtgagatgagaaacttagctactcagcgttatggactggttatgacagaggcacatcttcccagtcagactttggaacagggccttgatgttttagaaattatgagaaacattcatatatttgtgtcccgatacctctataatctcaacaatcagatttttattgaacgaacaagcaataacaagcatttgaatactattaatattcggcatattgctaattcaattcgaacacatggcacgggaattatgaatacaactgttaatttcacctaccagtttttgaaaaagaagttctatatatttagccaatttatgtatgatgaacacatcaaatccagattgattaaagatattcgatttttcagggaaattaaggaccaaaatgatcataagtatccttttgatagagcagaaaaattcaatcgaggcatcagaaaacttggagtaacacctgagggacagagctaccttgatcaattcaggcaactcatcagccagattggtaatgctatgggctatgtacgaatgataagatctggtggtcttcattgtagcagcaatgccattagatttgttcctgatcttgaagatattgtaaattttgaagaactagtaaaagaagaaggtcttgcagaagaaacattaaaagcagcaaggcatttggattcagtcctcagtgatcacacacgaaattctgccgaaggcacagaatatttcaaaatgcttgtagacgtttttgctccagaatttcgaaggccaaagaatatacatctccgaaatttctatataattgttccccctctgaccctcaactttgtagagcattccattagttgcaaggaaaaattaaataaaaaaaataaaattggagctgcctttactgatgatggctttgccatgggtgtggcttacattctaaagcttttggatcagtatcgggagtttgattcacttcactggttccagtctgttagagagaaatacctgaaggagataagagcagttgctaagcaacagaatgtacagtcagccagtcaagatgaaaaactcttacaaaccatgaatctcactcagaagcgactggatgtctatctacaggaatttgaattgctgtatttctcactgagcagtgcaagaattttcttcagagcagacaagactgcggctgaagaaaaccaagaaaagaaagagaaggaagaagaaactaaaacaagcaatggagacctgtctgacagcactgtgtctgctgatcctgttgtgaaatgatacggatggtattcactgcacatatgatgaaatcatcagaattgttaaaacttttgccagtggaatggataaactattgatgaattgtttcctgggtcacatctctggaaaatagatgttacagttcttaaaggcagtgctttaaagtgaagttcattctgtttccaaaggctctactttcaaaggttaagaatgagattttaaaattggatttttgcctggacttgagggtacaagatgtttctatttgaagtgaagttataaaagggcaaatccagattcataaactatcacctcggatttcttgtaatctacatgtttgtaatttgtatttgcatagatctttgatctatagttatttcaagtcatgggaaattcaatgcatatactatatacagccagtaaatacatgcttaacaaaaggaatgagcctgaagttcataaagaatacatatcaatattcttataaaaggaatatatgaagatggctttgatactagaggtgaggcacaagtgttttatgtactctcagtgtacagtataactgatgatccttctttcattgttaatttcatgtgactcacaagagctgctgatgtctttgatgagacattttataactagtttacattgctttgagaacatttaacctccaacagctgctttaaatttaagatttacttaatactcagaaaattcagataaagccatagagtcctgtttgaagcttcacttctattttggttgaaggcatgatgtatgatgtcagaaaaaaaattgaatgaattatttctacatccaaactcaggtttcttctacattagattgaattgaaattttggtgatggtttgggtagactttttttttatatcaagtataatttaaaacatcagattaaataattacactgttcaggcttttaaaaaaataccactgtgagaataaagcgctagcaagatacatcacttactgattttaaaaatacagaaagattttgagtaaattttgtgcccagcaagctgttagttttatttttgtaaaggtatgtaagttattaaatggttaatcatggccttttaaaaataaaataaagtgatacctttacaatgaagacaaaagtttaaaactttctaatacaaacaccattttgggaaatgcttgatttttttctattgcatttgtctgctaaacatttctttggataaatcctgcaaatacttctaacattattctttgattccagcttttagaatgggtgtacaatgccctgtttgtacttactggttagggtcagggtaacttgccagcccaagataaatactttaattgttaaaagtcagaagagacagaatatgtaggaaatgttttttgtttattatgtaaacatggcttacagaattatgaacagtggatagattaaaggcatttaatatttgtaattcataataactgtagaaatggccctaaagcatgctgcataattaataatttatattttcattattataagtgtttatattaatgatcttgcatttgattatatcaaattcgtcatttcatagcaacagtattgttttctctgtttttcttctctaacttctctgaaatcatctcctattaagggatagaaattgttactagaagagaatcacatgttctgtgttcattatccctacacatgtaaattaattattttatcaatactagatagagttcacatgctgactccctggatacctacagttgagaagaaaatgacagacaattatttttcctttaggtcaaaataatgtcactgctatctggataaattataagttcatatatttgaaataagatcctggaaacgaatttaaatggtgtcaaactgcagagcaacagggcttcagtatattcacatctaataggttaatatgtacatttggatgatgatttttcttgataacattaacattaattttattttttcagacatactgtaatttaaaaattaatgtgagcgtttgttttaagttcacagaaaacttaataattcaaattctcaggaattaaggactcaccataacattgtcagttctaatgaaattttgtaaaagatggcaagtttgttacctcacttgagtggggttttccttttcccccaattctaagagaatataatgtgtatactaaaacattaataaacataattttgaaaatttc

SEQ ID NO: 185645 - DNA, 3522 bp, Artificial Sequence
  derived and/or modified sequence
atggcggtggagactctcagcccagactgggaatttgacagggttgacgatgggagccaaaaaatccacgcggaggtacagctgaaaaattacggaaaatttttggaggaatatacctctcagctcagacgcatcgaagatgctcttgacgactctattggagatgtttgggattttaatcttgaccccatcgctctgaagcttctgccatatgagcaatcgagtctcttggagctaattaagacagagaacaaggtgttgaataaggtcataacagtgtacgcggcgctctgctgtgaaatcaaaaaactcaagtacgaggccgagactaaattctacaatggtctgctgttttacggcgaaggagctacggacgcttccatggttgagggagattgccagattcagatgggcagattcattagcttcctacaggaactttcatgcttcgtcacacggtgctacgaagtcgtgatgaacgtcgtccaccagctggctgccctttatatttcaaataaaatagccccaaaaatcatcgagactacaggcgtccacttccagacaatgtacgaacacctgggagaactgctcacagtgttactgactctagacgagatcatcgataatcatataactctcaaagatcattggactatgtataagcggctcctcaaatcagtgcatcacaatccatctaagtttggaatacaggaagagaaactcaagccctttgagaagtttcttctcaagttggaagggcagctgcttgacggtatgattttccaagcttgtatcgagcagcagttcgatagcctaaacggaggagtgagcgtcagcaaaaattctacattcgccgaagaatttgctcactccatccggagcatatttgcaaatgtggaagccaagttaggcgaaccttctgagattgaccaacgagacaagtacgtcggcatttgcggactctttgtcctgcacttccagatttttaggactatcgacaaaaagttctataagtcactcctggacatctgtaaaaaagtcccggcaattactcttactgcaaatatcatctggttcccagataactttctgattcagaagatcccagcagctgccaagctgctagatcgtaagagtctgcaggccatcaaaatccaccgggacacatttctgcagcagaaagcccagagtctcaccaaggatgtccaaagctattacgtctttgtgtcctcctggatgatgaaaatggagagtatcctatcaaaggaacagcggatggataaatttgcagaggacctcacgaatcggtgtaacgtgtttattcagggattcctatatgcttacagtatcagcacaatcatcaagacaacaatgaacctgtatatgtctatgcagaagcctatgaccaaaacaagcgtaaaggctctctgcaggctggtggagctcctgaaggccattgaacacatgttctatagaagaagtatggtcgtggccgacagcgtgtcacacatcacacagcacctgcagcatcaggccctgcattcgatctccgtagcaaaaaagagggtgatctccgataaaaaatattctgaacaaaggctggacgttctgagcgcgctggttctggcagagaataccctgaacgggccatccactaaacagagacgcctgattgtgtcacttgctctatcagtgggtacccagatgaagacgttcaaggacgaggaattattcccacttcaggtagtcatgaaaaagctcgatctgatttctgaactgcgcgaacgagttcaaacacaatgtgactgctgctttctgtattggcacagagccgtgttccccatctatctcgatgacgtttacgagaacgccgttgacgccgcgcggttgcattacatgtttagcgccctccgcgactgtgtacctgcgatgatgcatgctcggcacctagagtcctacgaaatcttgttagactgctatgataaagaaattatggaaatcctgaacgaacatctgcttgacaagctctgcaaagagatcgaaaaggacttgcgtttgtccgttcatacacatcttaagctggatgatcggaacccctttaaggttggcatgaaagacttggctttattcttctcactgaatcctatccgattcttcaacagattcatcgatatccgcgcgtatgtgacccattacctcgataaaaccttctataacttgactactgtcgcactgcacgattgggccacttactcagagatgagaaatttggcgacccagaggtacggattggtcatgactgaagctcacttgccgtcccaaactctcgagcaagggctggacgtgctggaaataatgcgcaatattcacatcttcgtgtccaggtatctctacaacctcaataatcagatttttattgagcggacttcgaacaacaaacatttgaatacaatcaacattcggcacattgccaacagcattcggacccacggcactgggatcatgaataccaccgtaaattttacataccagttcctgaaaaagaaattttatatctttagtcagttcatgtatgacgaacatatcaaatctaggctcatcaaggacattagattctttagagagatcaaagatcagaacgaccataagtacccattcgacagagccgagaagttcaatcgggggataagaaagctcggcgtgaccccggaaggtcagagctatctagatcaatttagacagcttattagccagatcggcaacgcaatgggatacgtgaggatgatccgttcaggagggctgcattgttcctctaatgctattagattcgttccagacctcgaagacattgtgaactttgaagaactggtgaaagaagagggtctagccgaagaaacgctgaaagctgcccgtcacctcgacagtgtcctgagcgatcacaccagaaatagcgctgaagggaccgagtactttaagatgctagtggacgtgtttgcccccgagtttcgtcggccaaaaaatatccacctgaggaacttctatattatagtcccgcctcttacactgaactttgtggagcacagtattagttgtaaggagaaactgaataagaagaacaagattggcgctgcttttacagacgatggcttcgccatgggggtggcctacatcctaaaactccttgaccagtatcgggaattcgatagcttacactggttccagtccgtgcgtgagaagtacttgaaggaaatacgtgccgtggcaaagcaacagaacgtgcaatcagcgtcgcaagatgaaaagttgctgcaaacgatgaatctgacccagaaacgcctcgacgtctacctgcaggaattcgaactgctatattttagcctttctagcgctaggatcttttttcgcgccgacaaaacggccgcggaggaaaaccaggagaaaaaggaaaaagaggaggaaacgaaaaccagtaacggtgacctgtcagactctacagtgagcgctgatccagtcgtcaaatag

SEQ ID NO: 185646 - DNA, 3522 bp, Artificial Sequence
  derived and/or modified sequence
atggctgtggagaccctgagcccagactgggagtttgacagagtggatgatggcagccagaagatccacgccgaggtgcagctgaagaactacggcaagttcctggaggagtacaccagccagctgcggagaattgaagatgccctggatgacagcattggagatgtgtgggacttcaacctggaccccatcgccctgaagctgctgccctatgagcagagcagcctgctggagctgatcaagacagagaacaaggtgctgaacaaggtgatcaccgtgtatgctgccctgtgctgtgagatcaagaagctgaagtatgaggccgagaccaagttctacaacggcctgctcttctatggagagggcgccacagatgcctccatggtggagggggactgccagatccagatgggccgcttcatctccttcctgcaggagctgagctgctttgtgacccgctgctatgaggtggtgatgaatgtggtgcaccagctggccgccctgtacatcagcaacaagatcgcccccaagatcatcgagaccaccggggtgcacttccagaccatgtatgagcacctgggggagctgctgactgtgctgctgaccctggatgagatcatcgacaaccacatcaccctgaaggaccactggaccatgtacaagaggctgctgaagtctgtgcaccacaaccccagcaagtttggcatccaggaggagaagctgaagccctttgagaagttcctgctgaagctggagggccagctgctggatggcatgatcttccaggcctgcatcgagcagcagtttgacagcctgaatggaggagtgtctgtgtccaagaacagcacctttgctgaggagtttgcccacagcatccgcagcatctttgccaacgtggaggccaagctgggggagcccagcgagattgaccagagggacaagtatgtgggcatctgtggcctgtttgtgctgcacttccagatcttccgcaccatcgacaagaagttctacaagagcctgctggacatctgcaagaaggtgcctgccatcaccctgacagccaacatcatctggttcccagacaacttcctgatccagaagatcccagctgctgccaagctgctggacaggaagagcctgcaggccatcaagatccaccgggacaccttcctgcagcagaaggcccagagcctgaccaaggatgtgcagagctactacgtgtttgtgtcctcctggatgatgaagatggagagcatcctgagcaaggagcagaggatggacaagtttgctgaggacctgaccaaccgctgcaatgtgttcatccagggcttcctgtatgcctacagcatcagcaccatcatcaagaccaccatgaacctgtacatgtccatgcagaagcccatgaccaagacctctgtgaaggccctgtgccgcctggtggagctgctgaaggccatcgagcacatgttctaccgccgctccatggtggtggccgacagcgtgagccacatcacccagcacctgcagcaccaggccctgcacagcatctctgtggccaagaagagggtcatcagtgacaagaagtacagcgagcagaggctggatgtgctgagcgccctggtgctggccgagaacaccctgaatggccccagcaccaagcagaggaggctcatcgtgtccctggccctgtctgtgggcacccagatgaagaccttcaaggatgaggagctgttccccctgcaggtggtgatgaagaagctggacctgatcagcgagctgcgggagcgggtgcagacccagtgtgactgctgcttcctgtactggcacagagctgtgttccccatctacctggatgatgtgtatgaaaatgctgtggatgctgcccggctgcactacatgttttctgccctgcgggactgtgtgcctgccatgatgcacgcccggcacctggagagctatgagatcctgctggactgctatgacaaggagatcatggagatcctgaatgagcacctgctggacaagctgtgcaaggagattgagaaggacctgcggctgtctgtgcacacccacctgaagctggatgacaggaaccccttcaaggtgggcatgaaggacctggccctcttcttcagcctgaaccccatccgcttcttcaaccgcttcatcgacatccgggcctacgtgacccactacctggacaagaccttctacaacctgaccaccgtggccctgcatgactgggccacctacagcgagatgaggaacctggccacccagagatatggcctggtgatgacagaggcccacctgcccagccagaccctggagcagggcctggatgtgctggagatcatgaggaacatccacatctttgtgagccgctacctgtacaacctgaacaaccagatcttcatcgagaggaccagcaacaacaagcacctgaacaccatcaacatccgccacatcgccaacagcatccgcacccacggcaccggcatcatgaacaccaccgtgaacttcacctaccagttcctgaagaagaagttctacatcttcagccagttcatgtatgatgagcacatcaagagccgcctcatcaaggacatccgcttcttccgggagatcaaggaccagaatgaccacaagtacccctttgacagagctgagaagttcaacagaggcatcaggaagctgggcgtgaccccagagggccagagctacctggaccagttccggcagctgatcagccagattggaaatgccatgggctacgtgaggatgatccgcagcggcggcctgcactgcagcagcaatgccatccgctttgtgcctgacctggaggacatcgtgaactttgaggagctggtgaaggaggagggcctggccgaggagaccctgaaggccgcccggcacctggacagcgtgctgagtgaccacaccaggaacagcgctgagggcacagagtacttcaagatgctggtggatgtgtttgcccctgagttcagaagacccaagaacatccacctgaggaacttctacatcatcgtgccccccctgaccctgaactttgtggagcacagcatcagctgcaaggagaagctgaacaagaagaacaagattggagctgccttcacagatgatggctttgccatgggcgtggcctacatcctgaagctgctggaccagtaccgggagtttgacagcctgcactggttccagagcgtgcgggagaagtacctgaaggagatccgggctgtggccaagcagcagaatgtgcagagcgccagccaggatgagaagctgctgcagaccatgaacctgacccagaagaggctggatgtgtacctgcaggagtttgagctgctgtacttcagcctgagcagcgcccgcatcttcttccgggctgacaagacagctgctgaggagaaccaggagaagaaggagaaggaggaggagaccaagaccagcaatggagacctgagtgacagcacagtgtctgctgaccctgtggtgaagtag

SEQ ID NO: 185647 - DNA, 3522 bp, Artificial Sequence
  derived and/or modified sequence
atggccgtggagaccctgagccccgactgggagttcgaccgggtggatgacggaagccagaagatacacgccgaggtccaacttaaaaactatggaaagtttctcgaggagtatacctcccagctccgtcgaatcgaagacgcactggacgattccattggagatgtctgggatttcaatctggatcccatagccttgaagttacttccttacgagcaatctagcctactggaactaatcaagaccgaaaataaagtcttgaataaagtgataaccgtctatgctgctctgtgttgcgaaataaagaaactcaaatacgaggctgagaccaagttctataatggcctgctgttctatggggaaggagctacagatgccagcatggtggagggggactgtcagatccagatgggccgcttcatctcattcctgcaagagctcagttgctttgtaacacgatgctatgaggtggtcatgaacgtggtccatcaactcgcagctctgtacatctcaaataagatcgctccgaaaatcatagaaacaactggagtgcactttcagacaatgtacgaacacctgggagaacttctgacggtcctgttaacactggatgaaatcattgacaaccatattacgctgaaagatcattggacaatgtataaacgcctgcttaaatcagtgcatcataacccgagcaaatttggcatccaggaggagaagctgaagccatttgagaaattcctccttaaactcgagggccaactactagatgggatgatttttcaggcctgcatcgagcagcagttcgattcattaaatggaggcgtgtccgtcagtaagaactcaaccttcgccgaagagtttgcccattccattaggtcaattttcgccaacgttgaggccaagctcggcgagccttccgaaattgaccaacgggataagtacgtgggcatttgcggcttgtttgtgctgcacttccagatattccgtacgatcgacaagaaattttacaagagcctactggatatctgtaaaaaggtcccagcaatcacacttactgccaatattatttggttccccgacaattttctgatccagaaaatccctgcggcagccaagctcctggacagaaagagcctacaggcgatcaagatccaccgggatacgttcctgcagcaaaaggctcagtctctgaccaaggatgtccagagctattacgtctttgtttcctcttggatgatgaaaatggagtccatcttgtcaaaggagcaacggatggataaattcgccgaggatcttactaaccggtgcaatgtgttcatccaaggatttctgtacgcctactcaatcagcacaataatcaagactacaatgaatctctacatgtctatgcagaagcctatgactaagacatctgtcaaggccctctgccgcttagtcgaactcctcaaggcaattgagcacatgttctaccgacgctcaatggttgtggccgactcagtttcgcacataactcaacatctccaacatcaagctctgcattccatctccgtagccaagaagagggtgatttccgataagaaatactccgaacagcgactggacgtgctctcagctctagtgttggcggaaaacactctaaacggaccctccaccaagcagcggcgattgatcgttagtcttgccttgagcgttgggactcagatgaaaaccttcaaggacgaggagctctttccactgcaggtggtgatgaagaagctggacctcataagcgagctccgcgagagagtacagacccagtgtgattgctgcttcctttactggcatcgagcagtgtttcccatttacctcgatgacgtgtacgagaatgcagtggacgctgcgaggctccactacatgtttagtgcactgcgggactgtgtgccagcgatgatgcacgcaagacatctcgagtcttacgagatcctcctcgattgctacgataaagaaataatggaaatcctgaacgagcacttgctggacaagctgtgtaaggagattgagaaagatctgaggctgtcggtgcacactcatttgaaacttgatgatagaaacccgttcaaggttggaatgaaagatcttgcacttttttttagtcttaaccccatcaggttcttcaaccgcttcattgatatcagagcctacgtcactcactatctggataagaccttttataacctgaccacagtggcgctccatgactgggctacgtactctgaaatgaggaatttggcgacgcagaggtatggcctggttatgacggaggcacacctgccttctcagactttggagcagggactggatgttcttgaaattatgcgaaacatccacatctttgtgtcaagatatttgtacaatctgaacaaccaaattttcattgagcgtactagcaataataaacatttgaatacgatcaatattcggcacatcgcgaatagcatcagaacgcacggtacaggcatcatgaatacgactgtcaattttacctaccaattcctgaagaaaaagttctatatctttagtcagtttatgtacgatgaacacattaaaagccgcctcatcaaggacatccgatttttccgtgagatcaaggaccagaacgaccataaatacccatttgaccgggctgaaaaatttaaccggggcatcagaaagctgggtgtcactcccgaaggccagagctatctggatcagttccgtcagctcatctcacagatagggaatgccatggggtacgtaagaatgatccgctccgggggcctgcattgttcgtccaatgctatcagatttgttcctgacctggaggacattgtgaactttgaagaacttgtgaaggaggaaggcctcgccgaagagaccctgaaagctgcaaggcatctggattccgtattatcggatcatacgcgaaattcagcagagggtacggaatactttaaaatgttagtggatgttttcgctccagagtttcggcgccccaaaaacatacacctgagaaacttttatataatcgttccccctctgaccctgaactttgtggaacattccatcagttgcaaagaaaagttgaataagaaaaataaaatcggagccgctttcacggacgatggctttgctatgggagtagcttacattctgaagcttctcgaccagtatagagaatttgattctctgcactggttccagtctgtgagggaaaagtacctgaaagaaattagagcagtggccaagcagcagaatgttcaaagcgcctcacaggatgaaaagttactccaaacgatgaacctgacccaaaagcgactggacgtatacctgcaagaatttgaactcctctattttagcctgagctcggctaggatttttttccgggccgacaaaactgctgccgaggagaaccaggagaaaaaagagaaggaagaagaaacaaaaactagcaatggtgatctttccgatagcaccgtgtctgccgaccccgttgtgaagtag

SEQ ID NO: 185648 - DNA, 3522 bp, Artificial Sequence
  derived and/or modified sequence
atggccgtcgaaaccctgagcccggactgggagttcgaccgagtagacgacggtagtcaaaagatccacgcagaggttcagctcaagaactacggaaaatttttggaggaatacacctctcagctccgccgtatcgaggacgcgcttgacgatagtatcggagacgtttgggatttcaacctggaccctatcgctctgaaacttctcccctacgaacagtccagcctgttggagttgatcaagaccgagaacaaagtgcttaataaggtgataactgtgtatgccgctctatgttgtgaaataaaaaagctgaagtacgaagcagagacaaagttttacaatggactacttttttatggcgaaggtgccaccgatgccagtatggtagagggtgactgccaaatccagatgggccgattcatttcgtttctccaggaactttcatgcttcgtgacgaggtgttacgaggtggtcatgaacgtggtccatcagcttgctgctctgtacatttcgaataagatagccccaaagatcatagagacgaccggggtccatttccagacgatgtacgagcaccttggggagctgcttaccgtcctgcttactctggacgagatcattgataaccatataaccctgaaagaccactggaccatgtacaaacggctactgaaatctgtacatcacaacccatcaaagttcggtatccaggaagaaaagctaaaaccattcgagaaattcctgctgaagctggagggccaattgctggacgggatgatatttcaggcctgcatcgagcagcaattcgacagtcttaatggaggagtctcagtgagcaagaactccacctttgctgaggagttcgcccacagtattaggtctatcttcgctaacgtggaagccaaactgggcgaacccagcgagattgaccaaagagacaagtacgtggggatctgcggccttttcgtgctccactttcagatctttcggactatcgataaaaaattttataagtctcttctcgatatttgtaagaaagtgcccgcaattaccctgactgctaatatcatctggtttccagataattttctgatacaaaaaatccccgctgctgccaagctgctggatcgaaaaagcttgcaggccataaaaatccatagagatacattcctgcagcaaaaagcacagagcttgacgaaggacgttcaatcctattatgtgtttgtcagtagctggatgatgaagatggaatccatattgagcaaagaacagcgcatggataagttcgccgaggacttgaccaatcggtgtaacgtcttcatccagggattcctgtacgcttattcaatttcaactatcataaaaacaacaatgaatctctacatgagcatgcagaagcccatgacaaagacctcagtcaaggccctgtgcagactggtagagctgctaaaggctattgagcatatgttttatcggcgtagcatggtggtcgccgattctgtctcacacatcacccagcacctgcagcaccaggcattgcactctatatccgtggccaagaagcgggtcatcagtgacaaaaaatactccgaacagcgccttgatgttctgtcagctctggttctggcagagaacaccctcaacggcccttccacaaagcagagaagacttatcgtgtcattggctctttccgttgggacgcagatgaaaaccttcaaagatgaagagctgttcccactgcaggtggttatgaaaaagctggatcttatctcagaattgagggaacgtgtccagacacaatgcgattgctgttttctgtactggcatagagccgtttttcccatttacctggatgacgtgtacgagaacgcagttgatgctgctcgcctccattatatgttcagcgcactgagggattgcgtgcccgctatgatgcacgctagacacctggaaagctacgaaatcctactggactgttacgataaagagattatggagatcttaaatgaacacctgctcgataagttgtgtaaggaaattgaaaaagatctgcgtttgtctgtgcatactcacttaaagctcgatgatcggaatccttttaaggtgggcatgaaagatctcgccctgtttttctctttaaatcccataagattctttaataggttcatcgatatcagggcatacgtcacccattacctcgacaaaacattctacaaccttacgaccgtggctcttcacgattgggcaacatactcagaaatgcgaaacctagccacacagcgatatgggttggttatgaccgaagcccatctaccctcccaaacattggagcaaggactggatgtcctggagatcatgcgcaacatacacatcttcgtgtcacgatatttgtacaacctcaacaaccagatcttcatcgaaaggacaagcaataacaaacatctcaatacaatcaacattcggcacattgccaactcaatcaggacccacggcaccgggatcatgaataccacagtaaactttacctaccagtttttgaaaaaaaagttctatattttcagccaattcatgtacgacgaacatatcaagagcagattgattaaagatattaggttttttagagagatcaaagaccagaacgaccataagtacccctttgatcgtgccgaaaagtttaacagagggatccgcaagctaggcgtgacgcccgagggccagtcttacctggaccaattccgtcagcttatttcccagattggcaatgccatgggatatgtcaggatgatcagaagcggcggtctgcactgtagctccaatgccatcaggtttgtccctgatctggaggacatcgttaacttcgaagagcttgtgaaggaggaaggactggcggaggagacgctgaaagcggctcgccacctggactccgttctgtccgatcataccagaaactcagcagagggcacagagtatttcaagatgctggtagacgtatttgcaccagagttcagacgacctaagaacattcacctgaggaatttttacatcatagtacctcctttgacactcaacttcgtcgagcattcaataagttgcaaggaaaagctcaataaaaagaataagatcggtgccgctttcacagatgacgggtttgctatgggggttgcctatattctcaagctactcgatcagtaccgcgaattcgattcgctccactggttccaatctgtgagggagaagtaccttaaggagatacgggcagtggccaagcagcagaatgtacagagtgcgagccaagacgaaaagttgctgcagacaatgaatctgactcagaagcgcttggatgtgtacctccaggaatttgaactcctgtacttttcactgagtagcgctagaatattctttagagcagataagactgcagcagaagagaatcaagagaagaaggaaaaggaagaagagacaaaaacaagcaacggtgacctgagcgattctacagtaagtgctgatccagttgtgaaatag

SEQ ID NO: 185649 - protein, 525 aa, Artificial Sequence
  derived and/or modified sequence
MVSRPEPEGEAMDAELAVAPPGCSHLGSFKVDNWKQNLRAIYQCFVWSGTAEARKRKAKSCICHVCGVHLNRLHSCLYCVFFGCFTKKHIHEHAKAKRHNLAIDLMYGGIYCFLCQDYIYDKDMEIIAKEEQRKAWKMQGVGEKFSTWEPTKRELELLKHNPKRRKITSNCTIGLRGLINLGNTCFMNCIVQALTHTPLLRDFFLSDRHRCEMQSPSSCLVCEMSSLFQEFYSGHRSPHIPYKLLHLVWTHARHLAGYEQQDAHEFLIAALDVLHRHCKGDDNGKKANNPNHCNCIIDQIFTGGLQSDVTCQVCHGVSTTIDPFWDISLDLPGSSTPFWPLSPGSEGNVVNGESHVSGTTTLTDCLRRFTRPEHLGSSAKIKCSGCHSYQESTKQLTMKKLPIVACFHLKRFEHSAKLRRKITTYVSFPLELDMTPFMASSKESRMNGQYQQPTDSLNNDNKYSLFAVVNHQGTLESGHYTSFIRQHKDQWFKCDDAIITKASIKDVLDSEGYLLFYHKQFLEYE

SEQ ID NO: 185650 - protein, 593 aa, Artificial Sequence
  derived and/or modified sequence
AAAARGRCLPCSLPSAIAQPHLCPASALCSRRPGLGQPGQPPSSPHAALASSSPPSPPPPARGRALPPMVSRPEPEGEAMDAELAVAPPGCSHLGSFKVDNWKQNLRAIYQCFVWSGTAEARKRKAKSCICHVCGVHLNRLHSCLYCVFFGCFTKKHIHEHAKAKRHNLAIDLMYGGIYCFLCQDYIYDKDMEIIAKEEQRKAWKMQGVGEKFSTWEPTKRELELLKHNPKRRKITSNCTIGLRGLINLGNTCFMNCIVQALTHTPLLRDFFLSDRHRCEMQSPSSCLVCEMSSLFQEFYSGHRSPHIPYKLLHLVWTHARHLAGYEQQDAHEFLIAALDVLHRHCKGDDNGKKANNPNHCNCIIDQIFTGGLQSDVTCQVCHGVSTTIDPFWDISLDLPGSSTPFWPLSPGSEGNVVNGESHVSGTTTLTDCLRRFTRPEHLGSSAKIKCSGCHSYQESTKQLTMKKLPIVACFHLKRFEHSAKLRRKITTYVSFPLELDMTPFMASSKESRMNGQYQQPTDSLNNDNKYSLFAVVNHQGTLESGHYTSFIRQHKDQWFKCDDAIITKASIKDVLDSEGYLLFYHKQFLEYE

SEQ ID NO: 185651 - protein, 513 aa, Artificial Sequence
  derived and/or modified sequence
MAPGWPSLSAGSRQEAPQLAAGGSAYQAVGRQFQPRATALQGPSQAKSCICHVCGVHLNRLHSCLYCVFFGCFTKKHIHEHAKAKRHNLAIDLMYGGIYCFLCQDYIYDKDMEIIAKEEQRKAWKMQGVGEKFSTWEPTKRELELLKHNPKRRKITSNCTIGLRGLINLGNTCFMNCIVQALTHTPLLRDFFLSDRHRCEMQSPSSCLVCEMSSLFQEFYSGHRSPHIPYKLLHLVWTHARHLAGYEQQDAHEFLIAALDVLHRHCKGDDNGKKANNPNHCNCIIDQIFTGGLQSDVTCQVCHGVSTTIDPFWDISLDLPGSSTPFWPLSPGSEGNVVNGESHVSGTTTLTDCLRRFTRPEHLGSSAKIKCSGCHSYQESTKQLTMKKLPIVACFHLKRFEHSAKLRRKITTYVSFPLELDMTPFMASSKESRMNGQYQQPTDSLNNDNKYSLFAVVNHQGTLESGHYTSFIRQHKDQWFKCDDAIITKASIKDVLDSEGYLLFYHKQFLEYE

SEQ ID NO: 185652 - DNA, 1578 bp, Artificial Sequence
  derived and/or modified sequence
atggtgagcagacccgagcccgagggcgaggccatggacgccgagctggccgtggccccccccggctgcagccacctgggcagcttcaaggtggacaactggaagcagaacctgagagccatctaccagtgcttcgtgtggagcggcaccgccgaggccagaaagagaaaggccaagagctgcatctgccacgtgtgcggcgtgcacctgaacagactgcacagctgcctgtactgcgtgttcttcggctgcttcaccaagaagcacatccacgagcacgccaaggccaagagacacaacctggccatcgacctgatgtacggcggcatctactgcttcctgtgccaggactacatctacgacaaggacatggagatcatcgccaaggaggagcagagaaaggcctggaagatgcagggcgtgggcgagaagttcagcacctgggagcccaccaagagagagctggagctgctgaagcacaaccccaagagaagaaagatcaccagcaactgcaccatcggcctgagaggcctgatcaacctgggcaacacctgcttcatgaactgcatcgtgcaggccctgacccacacccccctgctgagagacttcttcctgagcgacagacacagatgcgagatgcagagccccagcagctgcctggtgtgcgagatgagcagcctgttccaggagttctacagcggccacagaagcccccacatcccctacaagctgctgcacctggtgtggacccacgccagacacctggccggctacgagcagcaggacgcccacgagttcctgatcgccgccctggacgtgctgcacagacactgcaagggcgacgacaacggcaagaaggccaacaaccccaaccactgcaactgcatcatcgaccagatcttcaccggcggcctgcagagcgacgtgacctgccaggtgtgccacggcgtgagcaccaccatcgaccccttctgggacatcagcctggacctgcccggcagcagcacccccttctggcccctgagccccggcagcgagggcaacgtggtgaacggcgagagccacgtgagcggcaccaccaccctgaccgactgcctgagaagattcaccagacccgagcacctgggcagcagcgccaagatcaagtgcagcggctgccacagctaccaggagagcaccaagcagctgaccatgaagaagctgcccatcgtggcctgcttccacctgaagagattcgagcacagcgccaagctgagaagaaagatcaccacctacgtgagcttccccctggagctggacatgacccccttcatggccagcagcaaggagagcagaatgaacggccagtaccagcagcccaccgacagcctgaacaacgacaacaagtacagcctgttcgccgtggtgaaccaccagggcaccctggagagcggccactacaccagcttcatcagacagcacaaggaccagtggttcaagtgcgacgacgccatcatcaccaaggccagcatcaaggacgtgctggacagcgagggctacctgctgttctaccacaagcagttcctggagtacgagtag

SEQ ID NO: 185653 - DNA, 1782 bp, Artificial Sequence
  derived and/or modified sequence
gccgccgccgccagaggcagatgcctgccctgcagcctgcccagcgccatcgcccagccccacctgtgccccgccagcgccctgtgcagcagaagacccggcctgggccagcccggccagccccccagcagcccccacgccgccctggccagcagcagcccccccagcccccccccccccgccagaggcagagccctgccccccatggtgagcagacccgagcccgagggcgaggccatggacgccgagctggccgtggccccccccggctgcagccacctgggcagcttcaaggtggacaactggaagcagaacctgagagccatctaccagtgcttcgtgtggagcggcaccgccgaggccagaaagagaaaggccaagagctgcatctgccacgtgtgcggcgtgcacctgaacagactgcacagctgcctgtactgcgtgttcttcggctgcttcaccaagaagcacatccacgagcacgccaaggccaagagacacaacctggccatcgacctgatgtacggcggcatctactgcttcctgtgccaggactacatctacgacaaggacatggagatcatcgccaaggaggagcagagaaaggcctggaagatgcagggcgtgggcgagaagttcagcacctgggagcccaccaagagagagctggagctgctgaagcacaaccccaagagaagaaagatcaccagcaactgcaccatcggcctgagaggcctgatcaacctgggcaacacctgcttcatgaactgcatcgtgcaggccctgacccacacccccctgctgagagacttcttcctgagcgacagacacagatgcgagatgcagagccccagcagctgcctggtgtgcgagatgagcagcctgttccaggagttctacagcggccacagaagcccccacatcccctacaagctgctgcacctggtgtggacccacgccagacacctggccggctacgagcagcaggacgcccacgagttcctgatcgccgccctggacgtgctgcacagacactgcaagggcgacgacaacggcaagaaggccaacaaccccaaccactgcaactgcatcatcgaccagatcttcaccggcggcctgcagagcgacgtgacctgccaggtgtgccacggcgtgagcaccaccatcgaccccttctgggacatcagcctggacctgcccggcagcagcacccccttctggcccctgagccccggcagcgagggcaacgtggtgaacggcgagagccacgtgagcggcaccaccaccctgaccgactgcctgagaagattcaccagacccgagcacctgggcagcagcgccaagatcaagtgcagcggctgccacagctaccaggagagcaccaagcagctgaccatgaagaagctgcccatcgtggcctgcttccacctgaagagattcgagcacagcgccaagctgagaagaaagatcaccacctacgtgagcttccccctggagctggacatgacccccttcatggccagcagcaaggagagcagaatgaacggccagtaccagcagcccaccgacagcctgaacaacgacaacaagtacagcctgttcgccgtggtgaaccaccagggcaccctggagagcggccactacaccagcttcatcagacagcacaaggaccagtggttcaagtgcgacgacgccatcatcaccaaggccagcatcaaggacgtgctggacagcgagggctacctgctgttctaccacaagcagttcctggagtacgagtag

SEQ ID NO: 185654 - DNA, 1542 bp, Artificial Sequence
  derived and/or modified sequence
atggcccccggctggcccagcctgagcgccggcagcagacaggaggccccccagctggccgccggcggcagcgcctaccaggccgtgggcagacagttccagcccagagccaccgccctgcagggccccagccaggccaagagctgcatctgccacgtgtgcggcgtgcacctgaacagactgcacagctgcctgtactgcgtgttcttcggctgcttcaccaagaagcacatccacgagcacgccaaggccaagagacacaacctggccatcgacctgatgtacggcggcatctactgcttcctgtgccaggactacatctacgacaaggacatggagatcatcgccaaggaggagcagagaaaggcctggaagatgcagggcgtgggcgagaagttcagcacctgggagcccaccaagagagagctggagctgctgaagcacaaccccaagagaagaaagatcaccagcaactgcaccatcggcctgagaggcctgatcaacctgggcaacacctgcttcatgaactgcatcgtgcaggccctgacccacacccccctgctgagagacttcttcctgagcgacagacacagatgcgagatgcagagccccagcagctgcctggtgtgcgagatgagcagcctgttccaggagttctacagcggccacagaagcccccacatcccctacaagctgctgcacctggtgtggacccacgccagacacctggccggctacgagcagcaggacgcccacgagttcctgatcgccgccctggacgtgctgcacagacactgcaagggcgacgacaacggcaagaaggccaacaaccccaaccactgcaactgcatcatcgaccagatcttcaccggcggcctgcagagcgacgtgacctgccaggtgtgccacggcgtgagcaccaccatcgaccccttctgggacatcagcctggacctgcccggcagcagcacccccttctggcccctgagccccggcagcgagggcaacgtggtgaacggcgagagccacgtgagcggcaccaccaccctgaccgactgcctgagaagattcaccagacccgagcacctgggcagcagcgccaagatcaagtgcagcggctgccacagctaccaggagagcaccaagcagctgaccatgaagaagctgcccatcgtggcctgcttccacctgaagagattcgagcacagcgccaagctgagaagaaagatcaccacctacgtgagcttccccctggagctggacatgacccccttcatggccagcagcaaggagagcagaatgaacggccagtaccagcagcccaccgacagcctgaacaacgacaacaagtacagcctgttcgccgtggtgaaccaccagggcaccctggagagcggccactacaccagcttcatcagacagcacaaggaccagtggttcaagtgcgacgacgccatcatcaccaaggccagcatcaaggacgtgctggacagcgagggctacctgctgttctaccacaagcagttcctggagtacgagtag

SEQ ID NO: 185655 - DNA, 1578 bp, Artificial Sequence
  derived and/or modified sequence
atggtctcccggcctgaacccgaaggagaagcaatggatgcggaacttgccgtcgccccgcctggatgtagtcacctcgggtcattcaaggttgacaattggaagcagaaccttagagcaatctatcagtgcttcgtgtggagcggcaccgctgaggctcgtaagaggaaagctaaaagttgtatatgccatgtgtgtggggtgcaccttaatcgcctgcatagctgtctctattgtgtcttcttcggctgcttcacaaagaaacacattcacgagcatgccaaggcaaagcggcacaatctggcaatagacttaatgtatggcggaatctattgtttcctctgtcaagactacatttatgataaagatatggagattatcgccaaagaagaacagcgcaaggcttggaagatgcagggtgtcggagagaaattcagcacatgggagccaactaagcgcgagcttgagctccttaagcacaaccccaaacgccgaaagattaccagtaactgcaccattggcctacggggccttatcaatcttggcaatacatgtttcatgaattgtattgtgcaggcgcttacccacactccgctgctgagggattttttcctgtctgatcgccatcgctgcgagatgcagtcccccagcagctgcctggtctgtgagatgagttctctattccaggaattttactccggccatagaagcccgcatatcccctataagctcctccaccttgtatggactcatgcaagacatttggccgggtacgaacagcaggatgcccatgaattcctaattgctgctctggacgtcctgcatagacactgcaagggggacgacaatgggaaaaaggccaacaatccgaaccattgtaactgcatcattgaccagatatttaccggcggtttacagagcgacgtcacttgccaggtttgtcatggtgtaagtacaaccatcgaccctttctgggacatcagcctagacctgccaggcagttccacacccttctggccccttagcccaggcagtgagggcaatgtggtgaacggcgagtctcatgtttccggcacaaccacattaactgattgtctgaggcgcttcactcgaccagagcatttgggcagttcagccaaaataaaatgctctgggtgccacagttatcaggaaagcaccaaacagctgaccatgaaaaaactgcccatcgttgcttgcttccaccttaagagattcgagcattcagcaaaactgcgtagaaagattaccacatacgtgagctttccgctggaactcgatatgaccccttttatggcctctagcaaggaaagcaggatgaatggtcagtatcagcaaccaaccgactcgctcaataacgacaacaaatacagtttgttcgccgtggtgaaccatcaaggtaccctggagtccggacattataccagctttatccgtcagcacaaagaccagtggttcaaatgcgacgacgccattataaccaaggcttctattaaggacgtgctggatagcgagggatatttgctcttctatcataaacaatttctagagtatgagtag

SEQ ID NO: 185656 - DNA, 1782 bp, Artificial Sequence
  derived and/or modified sequence
gcagccgctgcccggggtcgatgtcttccttgctctctgccaagcgctattgctcagccgcacctgtgtcccgcatccgccctctgttccaggcggccaggcttaggccagcctggtcagcctcccagcagtcctcacgccgccctcgccagctcttcccctccctcgccaccacccccggccagaggtagggcgctgccccctatggttagtaggcccgagccggagggcgaggcaatggacgcagagctggcagtggctccccctggatgctctcacctcggtagcttcaaggtggacaattggaaacagaacctgcgagccatctaccagtgctttgtatggtccgggactgccgaggctagaaagcggaaggcaaagtcatgcatttgtcatgtatgtggcgtccacctcaatcgcttacattcttgcttatactgtgtgtttttcggctgcttcaccaaaaagcatatccacgaacacgccaaggctaagcggcacaacctcgctatcgacctgatgtatggagggatctactgctttctctgtcaggactacatctacgataaggatatggaaatcatagccaaggaagagcagcgcaaagcctggaagatgcagggagtgggagagaaattcagcacctgggaacctaccaagcgcgaactggaactgctgaaacacaatcctaagcgacggaagattacaagcaattgcacgattggtttaagaggtttaataaaccttggaaacacctgttttatgaactgcatagtgcaagccttaacacacacacctctgttacgagactttttcctctccgaccgtcaccgctgtgagatgcagagccccagctcttgtctcgtgtgcgaaatgtccagcctctttcaggagttctacagtggacatcgatccccccatatcccgtataaactcctacaccttgtctggactcatgctaggcacttggctgggtatgaacagcaggacgcacatgaattcctcattgctgcactcgatgtcttacatagacattgcaagggtgatgataacgggaaaaaagccaataacccaaatcattgcaactgcatcattgaccagatttttacagggggccttcaatctgacgtgacatgccaagtttgccacggcgtgagcacgacaattgatcccttctgggacatctccctggaccttcctggcagcagcactccgttctggccactgtctccaggctctgaaggcaacgtcgttaacggtgaaagtcacgtgtctggcaccacaactctgaccgactgtctgagaagatttacccgcccagagcacctgggctcatccgctaagataaagtgttccggctgccactcatatcaggagtcaacaaagcagctgaccatgaaaaagctccctattgtcgcgtgtttccacttgaagcgatttgaacactccgccaaacttaggcgcaagattacaacatacgtttcctttccattagaactggacatgacaccatttatggccagctcaaaggagtcaaggatgaacggccagtatcagcagcccaccgattcccttaacaacgacaacaaatactctctattcgctgtggtgaatcaccagggtacattggaatcaggacactatacaagttttatcaggcagcacaaagaccagtggttcaagtgcgacgatgctattatcacaaaggcaagcatcaaggatgtgttagactcagaaggatatctgctgttttatcacaaacagtttttggagtacgagtag

SEQ ID NO: 185657 - DNA, 1542 bp, Artificial Sequence
  derived and/or modified sequence
atggctccgggatggcctagcctgagtgctggaagccgccaggaagctccccagttggcagcgggtggaagcgcctaccaggcagtcggacgccagtttcagcctagggctactgccctgcagggaccgtcccaggccaagagctgtatctgtcacgtatgcggcgttcacctgaaccgactgcacagttgcctctactgcgtattctttggctgcttcactaaaaagcatattcatgaacacgctaaggcgaaaaggcataacctggccattgatttgatgtatggcggcatctactgcttcctctgccaagattacatttatgacaaagatatggaaatcattgccaaggaggagcagcggaaggcatggaaaatgcagggagttggggagaaattctcaacatgggagccaacgaagcgcgagctggagcttttgaaacacaaccctaaaagaagaaagatcaccagcaattgtactattggactgagaggcctgatcaacctgggcaatacctgctttatgaattgcatcgttcaggccctaacccatactcctcttctgagagattttttcctgtcagatcgacaccgctgtgagatgcagtctccaagcagttgcctcgtgtgcgagatgagctctctgtttcaggaattctattcaggacaccgatcacctcacatcccatataaactgctccatctagtgtggacccacgccaggcatctggccgggtacgaacagcaggatgcccacgagtttctcattgccgctctggacgtgttacatagacactgcaagggggacgataacggaaagaaagcgaacaacccgaaccattgtaactgtattatagatcagattttcacaggagggctgcagagcgatgtgacatgtcaggtttgccacggagtatctaccaccattgacccgttctgggatattagcctggatctccctggatccagcacaccgttctggcctctttccccaggctccgaagggaacgttgtcaacggagaatcccatgtcagcggtacaaccacattaacagattgtctgagaaggtttacacgccccgagcacctcggatcatcagcgaagattaagtgctctggctgtcatagctatcaagaaagcaccaaacagcttacaatgaagaagctacccatagtggcctgctttcacttgaaaagattcgaacacagcgcaaagctaaggagaaaaatcactacctacgtgagtttcccactcgaactggacatgaccccttttatggcttccagtaaggaatcacgaatgaatggccagtatcaacagccaacagactccctgaacaatgacaacaaatatagtctgtttgcagtcgtgaatcaccaggggacgctcgagtccgggcactacacatctttcatccgccaacataaggaccaatggtttaaatgtgacgatgctattattacaaaagccagcatcaaagatgttctggattccgagggctacctcctgttttaccacaaacagtttcttgaatatgagtag

SEQ ID NO: 185658 - DNA, 1578 bp, Artificial Sequence
  derived and/or modified sequence
atggtgtccaggcctgagcctgagggggaggccatggatgctgagctggccgtggcccctcctggctgcagccacctgggcagcttcaaggtggacaactggaagcagaacctgcgggccatctaccagtgctttgtgtggagcggcacagctgaggccaggaagaggaaggccaagagctgcatctgccacgtgtgtggggtgcacctgaaccggctgcacagctgcctgtactgtgtgttcttcggctgcttcaccaagaagcacatccatgaacatgccaaggccaagaggcacaacctggccatcgacctgatgtatggaggcatctactgcttcctgtgccaggactacatctatgacaaggacatggagatcatcgccaaggaggagcagaggaaggcctggaagatgcagggcgtgggggagaagttcagcacctgggagcccaccaagcgggagctggagctgctgaagcacaaccccaagaggaggaagatcaccagcaactgcaccatcggcctgcggggcctcatcaacctgggcaacacctgcttcatgaactgcatcgtgcaggccctgacccacacccccctgctgcgggacttcttcctgagtgacagacaccgctgtgagatgcagagccccagcagctgcctggtgtgtgagatgagcagcctcttccaggagttctacagcggccacaggagcccccacatcccctacaagctgctgcacctggtgtggacccacgcccggcacctggccggctatgagcagcaggatgcccacgagttcctgattgctgccctggatgtgctgcaccgccactgcaagggagatgacaatggcaagaaggccaacaaccccaaccactgcaactgcatcatcgaccagatcttcaccggcggcctgcagagtgatgtgacctgccaggtgtgccacggcgtgtccaccaccatcgaccccttctgggacatcagcctggacctgcccggcagcagcacccccttctggcccctgagccctggcagcgagggcaatgtggtgaatggagagagccacgtgtctggcaccaccaccctgacagactgcctgcggcgcttcaccaggcctgagcacctgggcagcagcgccaagatcaagtgcagcggctgccacagctaccaggagagcaccaagcagctgaccatgaagaagctgcccatcgtggcctgcttccacctgaagagatttgagcacagcgccaagctgcggaggaagatcaccacctacgtgtccttccccctggagctggacatgacccccttcatggccagcagcaaggagagcaggatgaatggccagtaccagcagcccacagacagcctgaacaatgacaacaagtacagcctgtttgctgtggtgaaccaccagggcaccctggagagcggccactacaccagcttcatccggcagcacaaggaccagtggttcaagtgtgatgatgccatcatcaccaaggccagcatcaaggatgtgctggacagcgagggctacctgctcttctaccacaagcagttcctggagtatgaatag

SEQ ID NO: 185659 - DNA, 1782 bp, Artificial Sequence
  derived and/or modified sequence
gctgctgctgcccggggccgctgcctgccctgcagcctgcccagcgccatcgcccagccccacctgtgcccagccagcgccctgtgcagcagaagacctggcctgggccagcccggccagccccccagcagcccccatgctgccctggccagcagcagcccccccagccccccacctccagcccggggccgggccctgccccccatggtgtccaggcctgagcctgagggggaggccatggatgctgagctggccgtggcccctcctggctgcagccacctgggcagcttcaaggtggacaactggaagcagaacctgcgggccatctaccagtgctttgtgtggagcggcacagctgaggccaggaagaggaaggccaagagctgcatctgccacgtgtgtggggtgcacctgaaccggctgcacagctgcctgtactgtgtgttcttcggctgcttcaccaagaagcacatccatgaacatgccaaggccaagaggcacaacctggccatcgacctgatgtatggaggcatctactgcttcctgtgccaggactacatctatgacaaggacatggagatcatcgccaaggaggagcagaggaaggcctggaagatgcagggcgtgggggagaagttcagcacctgggagcccaccaagcgggagctggagctgctgaagcacaaccccaagaggaggaagatcaccagcaactgcaccatcggcctgcggggcctcatcaacctgggcaacacctgcttcatgaactgcatcgtgcaggccctgacccacacccccctgctgcgggacttcttcctgagtgacagacaccgctgtgagatgcagagccccagcagctgcctggtgtgtgagatgagcagcctcttccaggagttctacagcggccacaggagcccccacatcccctacaagctgctgcacctggtgtggacccacgcccggcacctggccggctatgagcagcaggatgcccacgagttcctgattgctgccctggatgtgctgcaccgccactgcaagggagatgacaatggcaagaaggccaacaaccccaaccactgcaactgcatcatcgaccagatcttcaccggcggcctgcagagtgatgtgacctgccaggtgtgccacggcgtgtccaccaccatcgaccccttctgggacatcagcctggacctgcccggcagcagcacccccttctggcccctgagccctggcagcgagggcaatgtggtgaatggagagagccacgtgtctggcaccaccaccctgacagactgcctgcggcgcttcaccaggcctgagcacctgggcagcagcgccaagatcaagtgcagcggctgccacagctaccaggagagcaccaagcagctgaccatgaagaagctgcccatcgtggcctgcttccacctgaagagatttgagcacagcgccaagctgcggaggaagatcaccacctacgtgtccttccccctggagctggacatgacccccttcatggccagcagcaaggagagcaggatgaatggccagtaccagcagcccacagacagcctgaacaatgacaacaagtacagcctgtttgctgtggtgaaccaccagggcaccctggagagcggccactacaccagcttcatccggcagcacaaggaccagtggttcaagtgtgatgatgccatcatcaccaaggccagcatcaaggatgtgctggacagcgagggctacctgctcttctaccacaagcagttcctggagtatgaatag

SEQ ID NO: 185660 - DNA, 1542 bp, Artificial Sequence
  derived and/or modified sequence
atggcccctggctggcccagcctgtctgctggcagccggcaggaggccccccagctggccgccggcggcagcgcctaccaggccgtgggccggcagttccagccccgggccacagccctgcagggccccagccaggccaagagctgcatctgccacgtgtgtggggtgcacctgaaccggctgcacagctgcctgtactgtgtgttcttcggctgcttcaccaagaagcacatccatgaacatgccaaggccaagaggcacaacctggccatcgacctgatgtatggaggcatctactgcttcctgtgccaggactacatctatgacaaggacatggagatcatcgccaaggaggagcagaggaaggcctggaagatgcagggcgtgggggagaagttcagcacctgggagcccaccaagcgggagctggagctgctgaagcacaaccccaagaggaggaagatcaccagcaactgcaccatcggcctgcggggcctcatcaacctgggcaacacctgcttcatgaactgcatcgtgcaggccctgacccacacccccctgctgcgggacttcttcctgagtgacagacaccgctgtgagatgcagagccccagcagctgcctggtgtgtgagatgagcagcctcttccaggagttctacagcggccacaggagcccccacatcccctacaagctgctgcacctggtgtggacccacgcccggcacctggccggctatgagcagcaggatgcccacgagttcctgattgctgccctggatgtgctgcaccgccactgcaagggagatgacaatggcaagaaggccaacaaccccaaccactgcaactgcatcatcgaccagatcttcaccggcggcctgcagagtgatgtgacctgccaggtgtgccacggcgtgtccaccaccatcgaccccttctgggacatcagcctggacctgcccggcagcagcacccccttctggcccctgagccctggcagcgagggcaatgtggtgaatggagagagccacgtgtctggcaccaccaccctgacagactgcctgcggcgcttcaccaggcctgagcacctgggcagcagcgccaagatcaagtgcagcggctgccacagctaccaggagagcaccaagcagctgaccatgaagaagctgcccatcgtggcctgcttccacctgaagagatttgagcacagcgccaagctgcggaggaagatcaccacctacgtgtccttccccctggagctggacatgacccccttcatggccagcagcaaggagagcaggatgaatggccagtaccagcagcccacagacagcctgaacaatgacaacaagtacagcctgtttgctgtggtgaaccaccagggcaccctggagagcggccactacaccagcttcatccggcagcacaaggaccagtggttcaagtgtgatgatgccatcatcaccaaggccagcatcaaggatgtgctggacagcgagggctacctgctcttctaccacaagcagttcctggagtatgaatag

SEQ ID NO: 185661 - DNA, 1578 bp, Artificial Sequence
  derived and/or modified sequence
atggtgagccggcccgagcccgagggcgaggccatggacgccgagctggctgtggcccctcccgggtgtagtcatttaggttccttcaaggtcgataattggaaacaaaatttgcgggcaatctaccagtgctttgtttggagcggcaccgctgaagctcgaaagcgcaaggcgaaaagctgcatctgtcatgtgtgcggcgtgcatttgaatcgtctgcactcgtgcctatactgcgtcttcttcggatgtttcaccaagaagcacattcacgagcacgccaaggcaaagcgacacaatcttgctattgatttgatgtatgggggcatttactgtttcctttgccaggactacatttacgacaaggacatggagataattgccaaggaagaacagaggaaggcgtggaagatgcagggcgtgggggaaaagttttcaacttgggaacccacgaaacgtgaactcgaattgctgaaacacaacccaaagagaagaaagatcacctcaaactgcacgattgggctgaggggtctgattaacctcggcaacacgtgtttcatgaactgtatcgtacaggctttaacacataccccgctgctgcgagacttctttctgtcagacagacatcggtgcgaaatgcagtccccatctagctgcttggtttgtgaaatgagcagcctgtttcaggaattctactccgggcaccggagtccccacatcccatataaactgctccacttggtctggacacatgcacggcacctggctgggtatgagcaacaggatgcgcacgaatttctgatcgccgcgttggatgtccttcatcggcattgcaagggagacgacaacgggaagaaagctaataacccaaaccactgcaattgcatcatcgaccagatctttacaggtggcttgcagagcgacgtcacttgccaggtttgccacggcgtaagcaccacaattgaccctttttgggacataagtctggaccttcccggttcatcaactcccttttggcctctctcgcctggctctgaagggaatgtcgtcaacggagaatctcacgtgagtggaacgacgacgctgaccgactgcctgcggaggtttactagacccgagcacctcgggagtagcgcaaagattaagtgcagcggctgccactcataccaggaaagtactaaacaactgactatgaagaagctgcctatcgtagcctgtttccatctcaagagattcgaacacagcgccaagttaagacggaagatcacgacgtacgtgtcattcccactcgagctggatatgaccccttttatggcatctagtaaagaaagcaggatgaatgggcagtatcaacagcccactgacagcctgaacaacgataacaagtactccttgttcgctgtggtcaaccatcaagggacactggaatctggacactacactagctttatcaggcagcacaaggaccagtggtttaaatgcgatgatgcgatcatcaccaaggcgtctattaaggatgtcctggactcagaggggtacctgctgttctaccacaaacaatttctggagtatgagtag

SEQ ID NO: 185662 - DNA, 1782 bp, Artificial Sequence
  derived and/or modified sequence
gccgccgccgcccggggccggtgcctgccctgcagcctgcccagcgccatcgcccagccacatttgtgccccgcgagtgctctttgttctcgacgtcccggcctgggacagccggggcaacccccatcttcaccccatgccgctctggcctcttcttctcctccctcaccgcccccacctgcccgtgggagggcattacccccaatggtgtcgcgccctgagccggagggcgaggctatggatgcagagctggcggtggctccgcccgggtgtagccatttggggtcattcaaggtggacaattggaaacaaaacttacgggctatctatcagtgctttgtttggagcggtactgctgaggcccggaagcggaaggctaagtcatgtatatgtcacgtatgcggcgtacacttgaatcggctacactcttgcctctactgcgtctttttcggttgtttcactaagaaacatatacacgaacacgccaaagccaaacgacacaatctcgctatcgatctaatgtacgggggaatctattgcttcctctgtcaagactatatctacgacaaggacatggagataattgctaaagaggagcagcggaaggcctggaaaatgcagggagtcggcgaaaagttctcaacttgggagccaacgaagcgggagctggaactcctgaagcataaccccaagagacgaaaaatcacatcgaattgcacaatagggctgcgcggcttaataaatctggggaacacttgttttatgaattgtatcgtgcaggcgctgacccatacccccctactgcgggacttcttcctgagtgatcggcacaggtgcgagatgcagtctccttcttcttgcctggtatgtgagatgagctcactgtttcaggagttttactctggacaccggtcacctcatatcccttataagctgctccacctggtctggacacatgcacggcacctggcgggctacgagcagcaggacgcccacgagttcctcatagctgccctggatgtgctgcatcgacactgtaagggcgacgataatggtaaaaaagccaacaacccgaaccactgcaattgtatcattgatcagatcttcacaggggggttacagtccgacgtgacttgccaagtgtgccatggagtatctacaacgattgatcctttctgggatatatcgttagacctgcctgggtcctccacacccttctggccactatcacctggatccgagggcaacgtcgtcaacggggagtctcacgtgtcaggaactactacactgacagattgcctgaggagatttacccgccccgagcatcttggctcttccgcaaaaatcaagtgctctggctgtcactcctaccaggagagcaccaaacagctgacaatgaaaaagttaccaatagtggcctgttttcatctcaaacgattcgagcactctgccaaacttaggaggaagataacgacttacgtgtccttccctctggaactggacatgactccttttatggcttctagcaaagagagccgaatgaatgggcaataccagcagcctaccgatagcctgaataatgataacaaatattcattatttgctgtggtgaatcaccagggtacgttggaatcaggacattacacctcttttattcgccagcataaagatcagtggtttaaatgtgatgacgcgatcataacaaaagcttccattaaagatgtgctcgactccgaaggatacttacttttctaccataaacagttcctagaatacgaatag

SEQ ID NO: 185663 - DNA, 1542 bp, Artificial Sequence
  derived and/or modified sequence
atggcccccggctggcccagcctgagcgccggcagccggcaggaggccccgcagctggcggccggtggatcagcctatcaagccgttgggcgacagttccagccgagagccacagcactgcagggacctagtcaggcgaaatcctgcatctgccacgtttgcggcgtgcacttaaaccgattacatagctgcttatactgcgtgttcttcggatgtttcacgaaaaaacacatccacgagcatgccaaggcaaagagacataatctagcgattgatctcatgtacggaggcatttactgtttcctatgccaggactatatctatgacaaggatatggaaatcatcgccaaggaagagcagcgtaaagcatggaagatgcaaggggtgggtgaaaaatttagtacatgggagcctacaaaaagagagctagaattgctaaagcacaaccctaagcggcggaaaatcacgtcaaattgtaccattggccttcgcggtctgatcaacttaggcaacacctgtttcatgaactgtattgttcaggcactcacccacaccccattgttgagggacttcttcctgtctgaccggcacagatgcgaaatgcagtcgcctagtagctgtctcgtgtgcgaaatgagcagcctcttccaggaattctacagtgggcacagatctccacatataccttacaagttattgcacctggtatggacacatgcaaggcacctggccggatatgagcagcaagacgctcatgagtttctgattgccgcactcgatgtcctacacaggcactgcaagggtgatgacaacgggaagaaggccaataatcccaaccactgcaattgtataattgaccaaatattcactggcggcttgcaatccgatgtgacctgccaggtttgccacggggtgagcaccactatcgaccccttctgggatataagcttagacctacctgggtcctccaccccattttggcctctgtctccggggagcgagggtaatgtggtgaatggagaatcccacgtgagcggcacaacaacactcacagattgcctccgtaggttcacgagacccgagcatctgggctcctctgctaaaatcaaatgtagcgggtgtcacagttaccaggaatcaaccaaacagctcaccatgaagaagctgccgatcgtcgcatgcttccatctcaagagatttgaacactcagcaaaactgcggcgcaagattaccacttacgtgagtttcccactcgagttggacatgactccgttcatggctagctccaaggagtcccgaatgaatggacaataccagcagcctaccgatagccttaacaatgacaacaagtattcattgttcgccgtggtcaatcaccaggggaccctggaatctggccactacacctcctttattcgccagcacaaagaccagtggttcaagtgcgatgacgctattattacaaaagcctccattaaagacgtcctcgactccgagggctaccttcttttttatcataagcagttcttagagtatgaatag

SEQ ID NO: 185664 - DNA, 1578 bp, Artificial Sequence
  derived and/or modified sequence
atggtcagtagacccgagcccgaaggcgaagccatggatgctgagctcgccgtggccccaccgggttgctcacatttaggatctttcaaagtggataattggaagcaaaatctgcgggcaatctaccagtgttttgtctggtctggtaccgctgaggcaagaaagagaaaggctaagtcttgcatctgccacgtctgtggggtacacttgaatcgactgcactcatgtttgtattgcgttttttttgggtgtttcactaagaaacatattcacgaacacgctaaagccaaaaggcacaatttagccatagacctcatgtacggtggaatttattgctttctgtgccaggactacatctacgacaaagatatggaaattatagccaaggaggaacagaggaaggcgtggaagatgcagggcgtgggagagaagttttcaacgtgggagcccacaaaacgcgaactggagttattgaagcataaccctaaacgcagaaagataaccagtaattgtacgatcggactgcgcggactgattaacctgggcaacacatgttttatgaactgcatagtccaagcgctgacacatacaccgctgttgagggatttcttcctgagcgatcgacacaggtgcgagatgcaatccccttccagctgtcttgtgtgcgaaatgtcgtcattgttccaggagttttattctggccaccgttcaccccatattccctataaactgcttcacttagtgtggacacatgcacgacacctggccggatacgaacaacaggacgctcacgagtttcttattgctgcgcttgatgttctccacaggcattgcaaaggagatgataatggtaagaaggccaacaatcccaatcactgtaactgtataattgatcagatatttactggtggcctccagtcagatgtcacgtgccaagtctgtcatggtgtgagcacgacaatagaccctttttgggacatttccctggacttgcctggatcatccactcctttctggcccctttccccaggatccgaaggcaacgtggtcaatggtgagagtcacgtgagcggtacaaccacactgactgactgtctcaggaggtttaccagacctgagcacctgggttcttctgccaagatcaagtgttcaggatgccatagttatcaggaatcgacaaaacaactaaccatgaagaagcttccgatcgtggcctgtttccatctgaagaggttcgaacattccgctaaacttcggaggaaaataaccacctacgtatcctttccactcgaacttgacatgacacctttcatggcttccagtaaggagagtagaatgaacggacagtatcaacagccaacagattcccttaataatgacaataagtatagtctgttcgcagtggtgaatcaccaggggacacttgaaagtgggcattacactagctttatcagacaacacaaggaccagtggtttaagtgcgacgatgccatcatcaccaaagcctccatcaaggacgtcctggattcagagggctacttgttgttctaccataagcaattcttggagtacgagtag

SEQ ID NO: 185665 - DNA, 1782 bp, Artificial Sequence
  derived and/or modified sequence
gcagcggcagccagaggtaggtgtcttccctgctcgttgccatcagcgatcgcacagcctcacttatgcccagcctccgccttgtgtagcaggaggcccggacttggacaaccaggccaaccgcctagctcaccacacgctgccctggcttcctcttctcctcccagcccccctcctcccgcaagaggcagggctctgccaccaatggtgtcccgacccgaacctgaaggtgaggctatggatgcagagctagcagtcgctcctccaggatgttctcacctgggtagtttcaaagtggataactggaagcagaacctgagagctatctaccagtgctttgtctggtcaggaacagcggaggcacggaagagaaaagccaaaagttgcatttgccacgtgtgtggcgtgcacctgaatcgcctgcactcttgtttgtattgtgttttttttgggtgttttacaaaaaaacacattcatgagcacgcaaaagccaagaggcataatcttgccattgacctgatgtacggcggtatatactgttttctgtgtcaggattatatttatgataaggacatggaaataattgccaaggaggaacagaggaaagcctggaaaatgcagggcgtgggagagaaattctctacctgggagcccacgaaacgcgagctggagctgttgaaacacaaccccaaaaggagaaaaatcaccagcaattgcaccattggacttaggggcttgatcaacctcggtaacacctgcttcatgaattgcatcgtgcaggccctgactcacacacctttgttgcgtgacttttttttaagcgaccgccaccggtgtgagatgcagtcccctagctcctgtctggtgtgtgaaatgtctagcctgtttcaagaattctacagtggccacagaagtccccatattccatataaactgctgcacctggtgtggactcatgctcggcacttggctggctatgaacaacaggacgctcatgagtttctgatcgccgcactcgatgttctgcacaggcattgcaagggcgatgataacggaaagaaagccaacaatcctaatcattgcaactgcatcattgatcagatattcacgggaggtctacagtcggatgtcacatgccaagtgtgccatggggtcagtaccacgatcgacccattttgggacatctcactagacttacccggtagcagtacccccttttggcctctgagtccaggttccgaggggaacgtcgttaatggtgagagccatgtcagcggcacgacgaccctgaccgactgtctcaggcgctttacacggccagaacatcttggatcaagcgccaaaataaaatgcagcggctgccactcttaccaggagtccactaagcagttgaccatgaagaagttgccaattgttgcatgctttcacctgaaaaggttcgagcatagtgccaagttacggcgaaagattacaacttacgtgagcttccctcttgaactcgatatgacccctttcatggcctcttccaaggagtcccgaatgaacgggcaatatcagcagcccaccgacagtctcaacaatgacaacaaatatagcttatttgctgtggttaaccatcaggggacacttgagtccgggcactacacttccttcattagacaacacaaggaccaatggtttaagtgcgatgacgccatcattaccaaagccagtattaaggacgtactcgacagtgaagggtatctccttttctaccacaaacagttcttggaatacgagtag

SEQ ID NO: 185666 - DNA, 1542 bp, Artificial Sequence
  derived and/or modified sequence
atggcaccaggctggccctccctgagtgcaggttccaggcaggaggctccccaactcgcagcaggaggctcagcctaccaggcggtcggcagacagtttcaacccagggccaccgctctgcagggcccatcccaggccaagtcctgtatttgtcacgtgtgtggggtccatttaaatcgcttgcatagttgtctctactgtgttttctttggttgcttcactaagaagcacatccatgaacacgccaaggctaaaaggcacaacctcgccatcgacctcatgtacgggggaatctattgtttcctgtgccaggattacatctatgacaaggatatggaaattatcgctaaagaagaacagaggaaagcgtggaagatgcaaggcgtaggagaaaagtttagcacttgggaacccactaagcgggagctcgaactgctcaaacacaatcccaagcggagaaagatcactagcaactgcacgatcggcctcagaggcctaatcaatttgggaaatacatgctttatgaattgtattgttcaagccctcacccatacaccgctccttcgtgactttttcttgtccgaccgccaccgctgtgaaatgcaatctccatcctcttgcctagtctgcgaaatgtcctctctctttcaagagttctactccggccatagatcaccgcacattccctataaactgctgcacttagtttggacccatgccagacacctcgcaggctacgaacagcaggatgcgcacgaatttctaatagctgcactggacgttcttcacaggcattgtaagggggacgacaacgggaagaaggcgaataacccaaatcactgtaattgcattatcgaccagatcttcactggcggtttacagtccgatgtgacctgccaggtgtgtcacggggttagtacaacaatcgatcccttttgggacatcagcctcgatcttccgggatctagcactcccttctggcccctgtccccagggtctgagggcaacgttgtcaacggggagtctcacgtgtctgggactaccacattgactgattgtctcagacggttcacgaggcctgagcatctcggcagtagcgctaaaatcaaatgttccggctgtcattcctaccaagagtctaccaagcagcttaccatgaagaaattgcctatcgtcgcttgcttccacctgaagagatttgaacatagtgccaagctcagacggaaaattacaacctatgtgagttttccacttgagttagacatgactcccttcatggccagctccaaggagtctcgcatgaatgggcagtatcagcaacctacagatagtctgaacaacgacaacaagtacagcctgtttgcggtcgtcaatcatcagggcactctcgagtccggtcactacacttctttcatcagacagcacaaggatcaatggttcaagtgtgacgatgcgatcatcacgaaggcctctatcaaggatgtattggattccgagggttatctcttgttttaccacaaacaattcctggaatatgagtag

SEQ ID NO: 185667 - DNA, 5220 bp, Artificial Sequence
  derived and/or modified sequence
gcagccgcagctcgggggcggtgcctgccttgcagcctcccctcggcgatcgcgcagccccatctttgtccggcctccgcgctttgttctcggcgcccgggccttggccagcctggccagccgccgagcagcccccacgccgcgctggcgtcgtcctcgcctccctcgccgccgccccccgcgcgcggccgggccttgccccccatggtgtcccggccagagcccgagggcgaggccatggacgccgagctggcggtagcgccgccgggctgctcgcacctgggcagcttcaaggtggacaactggaagcagaacctgcgggccatctaccagtgcttcgtgtggagcggcacggctgaggcccgcaagcgcaaggccaagtcctgtatctgccatgtctgtggcgtccacctcaacaggctgcattcctgcctctactgtgtcttcttcggctgtttcacaaagaagcatattcacgagcatgcgaaggcgaagcggcacaacctggccattgatctgatgtacggaggcatctactgttttctgtgccaggactacatctatgacaaagacatggaaataatcgccaaggaggagcagcgaaaagcttggaaaatgcaaggcgttggagagaagttttcaacttgggaaccaaccaaacgggagcttgaactgctgaagcacaacccgaaaaggagaaagatcacctcgaactgcaccataggtctgcgtgggctgatcaaccttgggaacacatgcttcatgaactgcatcgtgcaggccctgacccacacgccacttctgcgggacttcttcctgtctgacaggcaccgctgtgagatgcagagccccagctcctgtctggtctgtgagatgtcctcactgtttcaggagttttactctggacaccggtcccctcacatcccgtataagttgctgcacctggtgtggacccacgcgaggcacctagcaggctacgagcagcaggacgcccacgagttcctcatcgcggccctggacgtgctccaccgacactgcaaaggtgatgacaatgggaagaaggccaacaaccccaaccactgcaactgcatcatagaccagatcttcacaggcgggttgcagtcagacgtcacctgccaagtctgccatggagtctccaccaccatcgaccccttctgggacatcagcttggatctccccggctcttccaccccattctggcccctgagcccagggagcgagggcaacgtggtaaacggggaaagccacgtgtcgggaaccaccacgctcacggactgcctgcgacgattcaccagaccagagcacttgggcagcagcgccaagatcaagtgcagcggttgccatagctaccaggagtccacaaagcagctcactatgaagaaactgcccatcgtagcctgttttcatctcaaacgatttgaacactcagccaagctgcggcggaagatcaccacgtatgtgtccttccccctggagctggacatgacccctttcatggcctccagcaaagagagcaggatgaatggacagtaccagcagcccacggacagtctcaacaatgacaacaagtattccctgtttgctgttgttaaccatcaagggaccttggagagtggccactacaccagctttatccggcagcacaaagaccagtggttcaagtgtgacgatgccatcatcaccaaggccagcatcaaggacgtcctggacagcgaagggtacttgctgttctatcacaaacagttcctggaatacgagtagccttatctgcagctggtcagaaaaacaaaggcaatgcattggcaagcctcacaaagtgatcctccctggcccccccctcccccaagtctcccgccgcctccccggcctggtgacaccacctcccatgcagatgtggcccctctgcacctgggacccatcgggtcgggatggaccacacggacggggaggctcctggagctgctttgaagatggatgagatgaggggtgtgctctgggtgggaggagcagcgtacacccgtcaccagaacatctcttgtgtcatgacatgggggtgcaacgggggcctcacagcacagagtgaccgctgcctggcgttccccagcactcggtgtggaaaggcccctacctgctgtaagattatgggtccatgaaagcagtaagctggacacagaggtgtagtgtgcgggacagagggccttgcagatgcctttctgttggtgttttagtgttaaaatacggagagtatggaactcttcacctccattttctcagcggctgtgaagcagcctcctagcttcggaagtacggacactacgtcgcgttttcaagcgtgtctgttctgcaggtaacagcatcaagctgcacgtggaagcatctcgcggttttctagaaacaggcattttcttatccctctcccgctcctttttccacaaaggtgaatttcataaatgtaatactagtaaagtgaatgaattactgagtttatacagaaatttaggtaacttctcctttagtctcaagagcgagtcttgctttttaatgggtgccgtttatgttgctgcccgccctgtgtgcctggctcctctgggtgccttggtgtctgctggtggctggcagtgggcgcagcggaggagagttgtgctgcagctcatacggtgtgtctgtcatctcagtctggagtaaatgcagtgtctgccggtgtctgatgggttctgtccctcgtattttctttgccttctatcccattgcctggctaccgctgcctggcagccaagggtgttggtcgcgaagctggagtggcctctggtggagcctgcatcttgtctcgtctgcctctgctttacatttggtgtactttcgggcgtggtggcagtaaaatgacaccgtgattgagcttgtcagcagagctgaaagagaaagtagaaggatgtgcattgtttcttgtaagatatcttgcatgtatctgtgtattcaaattcaaacagagatggtttgtccatttgtccactgagaaattagaaactagggacaagggggaggaaaagtactgaaatacagtttatgaagcaagtgtgtctcgggctgtgcttgtcccaggagccccagcagcatctgaactgaggcttcttcagtcctgcaggaacaggatcatctgtctcagcggtgggcagatgttttcatagacagccagggagtaaacactgttggctctgtgggctgtatggtctctgccataaatagtacagagatgtggctgtgtctagtacaacttttagacacagaaatctgaatgacatatattgttctgtgtcaagaaacttagattttttttttaactatttaaaaacgtgaaacctattcttagctcacaggccatggagaagctggtggggaccagacccagctccttagctggctgggctggggagggggtagtgacagtggcagctgctactcactgctcagtgtggaaaacacaggacttggcaatcacagcccgcagaaccatcatgtgtggcagaagcctgagggatgcggtttcttgcccacgtgctctgttcattttctgttgtttttctgcacttaaagaattcacatggaagcatgttttataaaatgaattaccagagaaacagagatgggccgagattttcagaaatggtcccatgtgaccaagttctgctgtttgggtgacagtgctttgaagatctcctttgaggatgtgcagtctttttttttttttttttgagatggagtttgttgcccaggctggagtgagtggcacagtctcggctcactgcaacctccacctcctgggttcaagcagttctcgtgccgcagcctcccaagtagctgggactacaggcatgcaccaccacgccaggctaatttttgtatttttagtagagatggggtttcaccatgtctcaaactcctgacctcaggcgatccacccacctcagcgtcccaaagtgctgggattataggcgtgagccaccgcacctggcctatgagtggtcttttaattaggaacaaatctaatggaaaggagagttgactgaagttggcccacaggattgtgagctgggcagtgccttcatgaaggcttgccaccttgggacgccccagtttactggggtgtcttgcggagtgcagaaggctttctggcagctgcctgggtttggccagaccctgcctcccctcccgccggccaacccctagtccccttcctgtctccacttgcattcaggggtggctgctgttctgagaacattagaactgggaagagagatggagtcacatggatttttggtgggcattattctaaactttcgtatccaagttagtcccccttattccactgtggcattgccgttctaagcagttacctgatgcctgctgctgaagagctgctcacaggaggcggcggcggccctggcactgccccttgcattaggtcttgtgtttgatgtgttcttgtgaatttactttgtcagaacaaaatatttacgcgttgggttcaggaatttcttttagctccccatctggctgtgaaattcaggaaacctcccgttgcctagtaatcaccccatgtaggtgtacattgtgacaaagtgcatctgaccactaaggggcccccttggtgaccccagcacattcacagcagtgttaaaatggcctgcattttggagatgctggctggcctttcagtgcctcccaggaagacacatggcctttccctcttcagatgcctgaagggagtgctttgaggcaggtgatgtgctgggagtgtgggcggcctccctctggccccggggccctctgtggaccttggctccctccgtggacctgggcttcgtggtgagcactgcagcctccctgggcattccctccagcgccagcaccactgcaacatatagacctgagtgctattgtattttggcttggtgtgtatgctcttcattgtgtaaaattgctgttcttttgacaatttaagtgattgttttgtttactgtaagtttgaaaataaaaatgaagaaaaaaattccaatgactgtgctgtggttggagactttatttaccaagatgtttactcttcctttccccttccattttgaggagctgtgtcactcctcctcccccccagtgctttgtagtctctcctatgtcataataaagctacattttctctgagaa

SEQ ID NO: 185668 - DNA, 5237 bp, Artificial Sequence
  derived and/or modified sequence
agcgcaggcggtccgcagcagccgcagctcgggggcggtgcctgccttgcagcctcccctcggcgatcgcgcagccccatctttgtccggcctccgcgctttgttctcggcgcccgggccttggccagcctggccagccgccgagcagcccccacgccgcgctggcgtcgtcctcgcctccctcgccgccgccccccgcgcgcggccgggccttgccccccatggtgtcccggccagagcccgagggcgaggccatggacgccgagctggcggtagcgccgccgggctgctcgcacctgggcagcttcaaggtggacaactggaagcagaacctgcgggccatctaccagtgcttcgtgtggagcggcacggctgaggcccgcaagcgcaaggccaagtcctgtatctgccatgtctgtggcgtccacctcaacaggctgcattcctgcctctactgtgtcttcttcggctgtttcacaaagaagcatattcacgagcatgcgaaggcgaagcggcacaacctggccattgatctgatgtacggaggcatctactgttttctgtgccaggactacatctatgacaaagacatggaaataatcgccaaggaggagcagcgaaaagcttggaaaatgcaaggcgttggagagaagttttcaacttgggaaccaaccaaacgggagcttgaactgctgaagcacaacccgaaaaggagaaagatcacctcgaactgcaccataggtctgcgtgggctgatcaaccttgggaacacatgcttcatgaactgcatcgtgcaggccctgacccacacgccacttctgcgggacttcttcctgtctgacaggcaccgctgtgagatgcagagccccagctcctgtctggtctgtgagatgtcctcactgtttcaggagttttactctggacaccggtcccctcacatcccgtataagttgctgcacctggtgtggacccacgcgaggcacctagcaggctacgagcagcaggacgcccacgagttcctcatcgcggccctggacgtgctccaccgacactgcaaaggtgatgacaatgggaagaaggccaacaaccccaaccactgcaactgcatcatagaccagatcttcacaggcgggttgcagtcagacgtcacctgccaagtctgccatggagtctccaccaccatcgaccccttctgggacatcagcttggatctccccggctcttccaccccattctggcccctgagcccagggagcgagggcaacgtggtaaacggggaaagccacgtgtcgggaaccaccacgctcacggactgcctgcgacgattcaccagaccagagcacttgggcagcagcgccaagatcaagtgcagcggttgccatagctaccaggagtccacaaagcagctcactatgaagaaactgcccatcgtagcctgttttcatctcaaacgatttgaacactcagccaagctgcggcggaagatcaccacgtatgtgtccttccccctggagctggacatgacccctttcatggcctccagcaaagagagcaggatgaatggacagtaccagcagcccacggacagtctcaacaatgacaacaagtattccctgtttgctgttgttaaccatcaagggaccttggagagtggccactacaccagctttatccggcagcacaaagaccagtggttcaagtgtgacgatgccatcatcaccaaggccagcatcaaggacgtcctggacagcgaagggtacttgctgttctatcacaaacagttcctggaatacgagtagccttatctgcagctggtcagaaaaacaaaggcaatgcattggcaagcctcacaaagtgatcctccctggcccccccctcccccaagtctcccgccgcctccccggcctggtgacaccacctcccatgcagatgtggcccctctgcacctgggacccatcgggtcgggatggaccacacggacggggaggctcctggagctgctttgaagatggatgagatgaggggtgtgctctgggtgggaggagcagcgtacacccgtcaccagaacatctcttgtgtcatgacatgggggtgcaacgggggcctcacagcacagagtgaccgctgcctggcgttccccagcactcggtgtggaaaggcccctacctgctgtaagattatgggtccatgaaagcagtaagctggacacagaggtgtagtgtgcgggacagagggccttgcagatgcctttctgttggtgttttagtgttaaaatacggagagtatggaactcttcacctccattttctcagcggctgtgaagcagcctcctagcttcggaagtacggacactacgtcgcgttttcaagcgtgtctgttctgcaggtaacagcatcaagctgcacgtggaagcatctcgcggttttctagaaacaggcattttcttatccctctcccgctcctttttccacaaaggtgaatttcataaatgtaatactagtaaagtgaatgaattactgagtttatacagaaatttaggtaacttctcctttagtctcaagagcgagtcttgctttttaatgggtgccgtttatgttgctgcccgccctgtgtgcctggctcctctgggtgccttggtgtctgctggtggctggcagtgggcgcagcggaggagagttgtgctgcagctcatacggtgtgtctgtcatctcagtctggagtaaatgcagtgtctgccggtgtctgatgggttctgtccctcgtattttctttgccttctatcccattgcctggctaccgctgcctggcagccaagggtgttggtcgcgaagctggagtggcctctggtggagcctgcatcttgtctcgtctgcctctgctttacatttggtgtactttcgggcgtggtggcagtaaaatgacaccgtgattgagcttgtcagcagagctgaaagagaaagtagaaggatgtgcattgtttcttgtaagatatcttgcatgtatctgtgtattcaaattcaaacagagatggtttgtccatttgtccactgagaaattagaaactagggacaagggggaggaaaagtactgaaatacagtttatgaagcaagtgtgtctcgggctgtgcttgtcccaggagccccagcagcatctgaactgaggcttcttcagtcctgcaggaacaggatcatctgtctcagcggtgggcagatgttttcatagacagccagggagtaaacactgttggctctgtgggctgtatggtctctgccataaatagtacagagatgtggctgtgtctagtacaacttttagacacagaaatctgaatgacatatattgttctgtgtcaagaaacttagattttttttttaactatttaaaaacgtgaaacctattcttagctcacaggccatggagaagctggtggggaccagacccagctccttagctggctgggctggggagggggtagtgacagtggcagctgctactcactgctcagtgtggaaaacacaggacttggcaatcacagcccgcagaaccatcatgtgtggcagaagcctgagggatgcggtttcttgcccacgtgctctgttcattttctgttgtttttctgcacttaaagaattcacatggaagcatgttttataaaatgaattaccagagaaacagagatgggccgagattttcagaaatggtcccatgtgaccaagttctgctgtttgggtgacagtgctttgaagatctcctttgaggatgtgcagtctttttttttttttttttgagatggagtttgttgcccaggctggagtgagtggcacagtctcggctcactgcaacctccacctcctgggttcaagcagttctcgtgccgcagcctcccaagtagctgggactacaggcatgcaccaccacgccaggctaatttttgtatttttagtagagatggggtttcaccatgtctcaaactcctgacctcaggcgatccacccacctcagcgtcccaaagtgctgggattataggcgtgagccaccgcacctggcctatgagtggtcttttaattaggaacaaatctaatggaaaggagagttgactgaagttggcccacaggattgtgagctgggcagtgccttcatgaaggcttgccaccttgggacgccccagtttactggggtgtcttgcggagtgcagaaggctttctggcagctgcctgggtttggccagaccctgcctcccctcccgccggccaacccctagtccccttcctgtctccacttgcattcaggggtggctgctgttctgagaacattagaactgggaagagagatggagtcacatggatttttggtgggcattattctaaactttcgtatccaagttagtcccccttattccactgtggcattgccgttctaagcagttacctgatgcctgctgctgaagagctgctcacaggaggcggcggcggccctggcactgccccttgcattaggtcttgtgtttgatgtgttcttgtgaatttactttgtcagaacaaaatatttacgcgttgggttcaggaatttcttttagctccccatctggctgtgaaattcaggaaacctcccgttgcctagtaatcaccccatgtaggtgtacattgtgacaaagtgcatctgaccactaaggggcccccttggtgaccccagcacattcacagcagtgttaaaatggcctgcattttggagatgctggctggcctttcagtgcctcccaggaagacacatggcctttccctcttcagatgcctgaagggagtgctttgaggcaggtgatgtgctgggagtgtgggcggcctccctctggccccggggccctctgtggaccttggctccctccgtggacctgggcttcgtggtgagcactgcagcctccctgggcattccctccagcgccagcaccactgcaacatatagacctgagtgctattgtattttggcttggtgtgtatgctcttcattgtgtaaaattgctgttcttttgacaatttaagtgattgttttgtttactgtaagtttgaaaataaaaatgaagaaaaaaattccaatgactgtgctgtggttggagactttatttaccaagatgtttactcttcctttccccttccattttgaggagctgtgtcactcctcctcccccccagtgctttgtagtctctcctatgtcataataaagctacattttctctgagaa

SEQ ID NO: 185669 - DNA, 4980 bp, Artificial Sequence
  derived and/or modified sequence
atggcgccgggttggccctcactatcagcgggctcccgacaggaggcgccccagcttgcggccgggggcagcgcctaccaggcagttggcaggcagttccagccccgggccacggcactgcagggcccgagccaggccaagtcctgtatctgccatgtctgtggcgtccacctcaacaggctgcattcctgcctctactgtgtcttcttcggctgtttcacaaagaagcatattcacgagcatgcgaaggcgaagcggcacaacctggccattgatctgatgtacggaggcatctactgttttctgtgccaggactacatctatgacaaagacatggaaataatcgccaaggaggagcagcgaaaagcttggaaaatgcaaggcgttggagagaagttttcaacttgggaaccaaccaaacgggagcttgaactgctgaagcacaacccgaaaaggagaaagatcacctcgaactgcaccataggtctgcgtgggctgatcaaccttgggaacacatgcttcatgaactgcatcgtgcaggccctgacccacacgccacttctgcgggacttcttcctgtctgacaggcaccgctgtgagatgcagagccccagctcctgtctggtctgtgagatgtcctcactgtttcaggagttttactctggacaccggtcccctcacatcccgtataagttgctgcacctggtgtggacccacgcgaggcacctagcaggctacgagcagcaggacgcccacgagttcctcatcgcggccctggacgtgctccaccgacactgcaaaggtgatgacaatgggaagaaggccaacaaccccaaccactgcaactgcatcatagaccagatcttcacaggcgggttgcagtcagacgtcacctgccaagtctgccatggagtctccaccaccatcgaccccttctgggacatcagcttggatctccccggctcttccaccccattctggcccctgagcccagggagcgagggcaacgtggtaaacggggaaagccacgtgtcgggaaccaccacgctcacggactgcctgcgacgattcaccagaccagagcacttgggcagcagcgccaagatcaagtgcagcggttgccatagctaccaggagtccacaaagcagctcactatgaagaaactgcccatcgtagcctgttttcatctcaaacgatttgaacactcagccaagctgcggcggaagatcaccacgtatgtgtccttccccctggagctggacatgacccctttcatggcctccagcaaagagagcaggatgaatggacagtaccagcagcccacggacagtctcaacaatgacaacaagtattccctgtttgctgttgttaaccatcaagggaccttggagagtggccactacaccagctttatccggcagcacaaagaccagtggttcaagtgtgacgatgccatcatcaccaaggccagcatcaaggacgtcctggacagcgaagggtacttgctgttctatcacaaacagttcctggaatacgagtagccttatctgcagctggtcagaaaaacaaaggcaatgcattggcaagcctcacaaagtgatcctccctggcccccccctcccccaagtctcccgccgcctccccggcctggtgacaccacctcccatgcagatgtggcccctctgcacctgggacccatcgggtcgggatggaccacacggacggggaggctcctggagctgctttgaagatggatgagatgaggggtgtgctctgggtgggaggagcagcgtacacccgtcaccagaacatctcttgtgtcatgacatgggggtgcaacgggggcctcacagcacagagtgaccgctgcctggcgttccccagcactcggtgtggaaaggcccctacctgctgtaagattatgggtccatgaaagcagtaagctggacacagaggtgtagtgtgcgggacagagggccttgcagatgcctttctgttggtgttttagtgttaaaatacggagagtatggaactcttcacctccattttctcagcggctgtgaagcagcctcctagcttcggaagtacggacactacgtcgcgttttcaagcgtgtctgttctgcaggtaacagcatcaagctgcacgtggaagcatctcgcggttttctagaaacaggcattttcttatccctctcccgctcctttttccacaaaggtgaatttcataaatgtaatactagtaaagtgaatgaattactgagtttatacagaaatttaggtaacttctcctttagtctcaagagcgagtcttgctttttaatgggtgccgtttatgttgctgcccgccctgtgtgcctggctcctctgggtgccttggtgtctgctggtggctggcagtgggcgcagcggaggagagttgtgctgcagctcatacggtgtgtctgtcatctcagtctggagtaaatgcagtgtctgccggtgtctgatgggttctgtccctcgtattttctttgccttctatcccattgcctggctaccgctgcctggcagccaagggtgttggtcgcgaagctggagtggcctctggtggagcctgcatcttgtctcgtctgcctctgctttacatttggtgtactttcgggcgtggtggcagtaaaatgacaccgtgattgagcttgtcagcagagctgaaagagaaagtagaaggatgtgcattgtttcttgtaagatatcttgcatgtatctgtgtattcaaattcaaacagagatggtttgtccatttgtccactgagaaattagaaactagggacaagggggaggaaaagtactgaaatacagtttatgaagcaagtgtgtctcgggctgtgcttgtcccaggagccccagcagcatctgaactgaggcttcttcagtcctgcaggaacaggatcatctgtctcagcggtgggcagatgttttcatagacagccagggagtaaacactgttggctctgtgggctgtatggtctctgccataaatagtacagagatgtggctgtgtctagtacaacttttagacacagaaatctgaatgacatatattgttctgtgtcaagaaacttagattttttttttaactatttaaaaacgtgaaacctattcttagctcacaggccatggagaagctggtggggaccagacccagctccttagctggctgggctggggagggggtagtgacagtggcagctgctactcactgctcagtgtggaaaacacaggacttggcaatcacagcccgcagaaccatcatgtgtggcagaagcctgagggatgcggtttcttgcccacgtgctctgttcattttctgttgtttttctgcacttaaagaattcacatggaagcatgttttataaaatgaattaccagagaaacagagatgggccgagattttcagaaatggtcccatgtgaccaagttctgctgtttgggtgacagtgctttgaagatctcctttgaggatgtgcagtctttttttttttttttttgagatggagtttgttgcccaggctggagtgagtggcacagtctcggctcactgcaacctccacctcctgggttcaagcagttctcgtgccgcagcctcccaagtagctgggactacaggcatgcaccaccacgccaggctaatttttgtatttttagtagagatggggtttcaccatgtctcaaactcctgacctcaggcgatccacccacctcagcgtcccaaagtgctgggattataggcgtgagccaccgcacctggcctatgagtggtcttttaattaggaacaaatctaatggaaaggagagttgactgaagttggcccacaggattgtgagctgggcagtgccttcatgaaggcttgccaccttgggacgccccagtttactggggtgtcttgcggagtgcagaaggctttctggcagctgcctgggtttggccagaccctgcctcccctcccgccggccaacccctagtccccttcctgtctccacttgcattcaggggtggctgctgttctgagaacattagaactgggaagagagatggagtcacatggatttttggtgggcattattctaaactttcgtatccaagttagtcccccttattccactgtggcattgccgttctaagcagttacctgatgcctgctgctgaagagctgctcacaggaggcggcggcggccctggcactgccccttgcattaggtcttgtgtttgatgtgttcttgtgaatttactttgtcagaacaaaatatttacgcgttgggttcaggaatttcttttagctccccatctggctgtgaaattcaggaaacctcccgttgcctagtaatcaccccatgtaggtgtacattgtgacaaagtgcatctgaccactaaggggcccccttggtgaccccagcacattcacagcagtgttaaaatggcctgcattttggagatgctggctggcctttcagtgcctcccaggaagacacatggcctttccctcttcagatgcctgaagggagtgctttgaggcaggtgatgtgctgggagtgtgggcggcctccctctggccccggggccctctgtggaccttggctccctccgtggacctgggcttcgtggtgagcactgcagcctccctgggcattccctccagcgccagcaccactgcaacatatagacctgagtgctattgtattttggcttggtgtgtatgctcttcattgtgtaaaattgctgttcttttgacaatttaagtgattgttttgtttactgtaagtttgaaaataaaaatgaagaaaaaaattccaatgactgtgctgtggttggagactttatttaccaagatgtttactcttcctttccccttccattttgaggagctgtgtcactcctcctcccccccagtgctttgtagtctctcctatgtcataataaagctacattttctctgagaa

SEQ ID NO: 185670 - protein, 835 aa, Artificial Sequence
  derived and/or modified sequence
MERPYTFKDFLLRPRSHKSRVKGFLRLKMAYMPKNGGQDEENSDQRDDMEHGWEVVDSNDSASQHQEELPPPPLPPGWEEKVDNLGRTYYVNHNNRTTQWHRPSLMDVSSESDNNIRQINQEAAHRRFRSRRHISEDLEPEPSEGGDVPEPWETISEEVNIAGDSLGLALPPPPASPGSRTSPQELSEELSRRLQITPDSNGEQFSSLIQREPSSRLRSCSVTDAVAEQGHLPPPSVAYVHTTPGLPSGWEERKDAKGRTYYVNHNNRTTTWTRPIMQLAEDGASGSATNSNNHLIEPQIRRPRSLSSPTVTLSAPLEGAKDSPVRRAVKDTLSNPQSPQPSPYNSPKPQHKVTQSFLPPGWEMRIAPNGRPFFIDHNTKTTTWEDPRLKFPVHMRSKTSLNPNDLGPLPPGWEERIHLDGRTFYIDHNSKITQWEDPRLQNPAITGPKAVPYSREFKQKYDYFRKKLKKPADIPNRFEMKLHRNNIFEESYRRIMSVKRPDVLKARLWIEFESEKGLDYGGVAREWFFLLSKEMFNPYYGLFEYSATDNYTLQINPNSGLCNEDHLSYFTFIGRVAGLAVFHGKLLDGFFIRPFYKMMLGKQITLNDMESVDSEYYNSLKWILENDPTELDLMFCIDEENFGQTYQVDLKPNGSEIMVTNENKREYIDLVIQWRFVNRVQKQMNAFLEGFTELLPIDLIKIFDENELELLMCGLGDVDVNDWRQHSIYKNGYCPNHPVIQWFWKAVLLMDAEKRIRLLQFVTGTSRVPMNGFAELYGSNGPQLFTIEQWGSPEKLPRAHTCFNRLDLPPYETFEDLREKLLMAVENAQGFEGVD

SEQ ID NO: 185671 - protein, 955 aa, Artificial Sequence
  derived and/or modified sequence
MATGLGEPVYGLSEDEGESRILRVKVVSGIDLAKKDIFGASDPYVKLSLYVADENRELALVQTKTIKKTLNPKWNEEFYFRVNPSNHRLLFEVFDENRLTRDDFLGQVDVPLSHLPTEDPTMERPYTFKDFLLRPRSHKSRVKGFLRLKMAYMPKNGGQDEENSDQRDDMEHGWEVVDSNDSASQHQEELPPPPLPPGWEEKVDNLGRTYYVNHNNRTTQWHRPSLMDVSSESDNNIRQINQEAAHRRFRSRRHISEDLEPEPSEGGDVPEPWETISEEVNIAGDSLGLALPPPPASPGSRTSPQELSEELSRRLQITPDSNGEQFSSLIQREPSSRLRSCSVTDAVAEQGHLPPPSVAYVHTTPGLPSGWEERKDAKGRTYYVNHNNRTTTWTRPIMQLAEDGASGSATNSNNHLIEPQIRRPRSLSSPTVTLSAPLEGAKDSPVRRAVKDTLSNPQSPQPSPYNSPKPQHKVTQSFLPPGWEMRIAPNGRPFFIDHNTKTTTWEDPRLKFPVHMRSKTSLNPNDLGPLPPGWEERIHLDGRTFYIDHNSKITQWEDPRLQNPAITGPAVPYSREFKQKYDYFRKKLKKPADIPNRFEMKLHRNNIFEESYRRIMSVKRPDVLKARLWIEFESEKGLDYGGVAREWFFLLSKEMFNPYYGLFEYSATDNYTLQINPNSGLCNEDHLSYFTFIGRVAGLAVFHGKLLDGFFIRPFYKMMLGKQITLNDMESVDSEYYNSLKWILENDPTELDLMFCIDEENFGQTYQVDLKPNGSEIMVTNENKREYIDLVIQWRFVNRVQKQMNAFLEGFTELLPIDLIKIFDENELELLMCGLGDVDVNDWRQHSIYKNGYCPNHPVIQWFWKAVLLMDAEKRIRLLQFVTGTSRVPMNGFAELYGSNGPQLFTIEQWGSPEKLPRAHTCFNRLDLPPYETFEDLREKLLMAVENAQGFEGVD

SEQ ID NO: 185672 - DNA, 2868 bp, Artificial Sequence
  derived and/or modified sequence
atggccacagggctgggagagccggtgtacggactctccgaagacgaaggcgagagcaggatcctcagagtgaaagtggtcagcggcatcgaccttgctaagaaggacatcttcggggcaagcgatccctacgtcaagttgagcctgtacgtggcagatgaaaaccgggagcttgctctggtgcaaaccaagaccatcaagaaaactctcaacccaaaatggaatgaggaattttactttagagttaatccctccaaccatcgtctgctgtttgaggtgttcgacgagaatcggcttactcgggacgattttctgggccaggtggatgtgccgctgtcgcacctccccacagaagatcctactatggaacggccgtatactttcaaagatttccttcttaggcccagaagtcacaaaagtagggtgaagggcttcttgcggttgaagatggcctacatgcctaaaaacggtggacaggatgaggagaatagcgaccagcgggacgacatggaacacggatgggaagtggtggattctaatgactcagcaagccagcaccaagaggagctgccccccccaccactgcccccaggttgggaggagaaggtggacaatctgggtaggacatactatgtaaatcacaataacaggaccacccaatggcatcggccgagtctgatggatgtgtcttcagaatccgacaataacatccggcagattaaccaggaggctgcgcacagaaggtttaggtctcggaggcacatcagcgaggatctggagcctgagcccagcgagggcggtgatgtacctgaaccgtgggaaaccattagtgaggaggtgaacatcgccggcgatagccttggtcttgcactcccgccccctcctgcgtcaccagggtcacgtacaagccctcaggaactttctgaagaactgtcaaggaggttgcagattacccccgacagtaacggagagcagttttcatccttgatccagagagagccttcaagccggctccgctcttgtagtgtgactgacgcagtcgctgagcagggccacttgccgcctcccagtgtagcatatgtgcatacaacacccgggctaccttcaggatgggaagagaggaaggatgccaagggaaggacctattacgtcaatcacaacaacagaacgactacctggacccggccaattatgcaactggctgaggatggcgcatctggctcagcgactaattcaaacaaccatctcatcgaaccacagataaggcggccgcgctcactcagttctcccacggtaaccctgagcgcgccattggagggggctaaagattctcctgtgcggcgggcggtgaaagacactctcagcaatcctcaaagtccacagccatctccttacaactctccaaagccccagcacaaagtgacacagtcctttctgcccccggggtgggaaatgcgaatcgcccccaacggtcgtccgtttttcatcgatcacaacactaaaaccaccacctgggaggacccacggctgaaattccctgttcatatgaggtcaaagacctcactcaatccaaacgacctgggaccgctaccccctggctgggaggaaagaatacatctggacgggcgaaccttttacattgaccacaacagcaaaatcacacagtgggaagacccccggttgcagaacccggccatcaccggaccagccgtgccatactctagggagttcaagcaaaaatatgactattttcgtaagaaattgaagaaaccggccgacatacctaacaggtttgaaatgaaactgcatcgtaacaacattttcgaagagagttacagaagaataatgtctgtgaaacggcccgacgttctgaaagcgcggctgtggattgaattcgaatccgaaaagggactggactacgggggagtggctcgcgaatggtttttccttctatctaaagagatgttcaatccatactacggcctgttcgagtattctgccaccgataactacacactgcagattaatcccaattccggcctgtgtaatgaagatcacctgagttattttactttcattggcagggttgcgggattggccgtgttccatgggaagttgcttgacggctttttcattcgcccattctacaaaatgatgctcggtaaacagattacccttaacgacatggagtccgtcgattcagaatattacaactctctcaagtggatcctcgaaaatgatccaaccgagctggacctcatgttttgtatcgacgaagaaaatttcggccagacctatcaggtagaccttaaaccaaatggaagtgagattatggttaccaatgagaacaaacgcgaatatatcgatctggtcatccaatggagatttgtgaatcgggtacagaagcagatgaacgccttcctggagggcttcacagagcttttgccgatagatttgattaagatatttgatgaaaatgaactcgaattgctcatgtgtggcctgggtgacgtggatgtcaatgactggcgccagcactccatttacaagaatggatactgtcccaaccatcctgtaattcaatggttttggaaggctgtactgcttatggatgctgaaaagagaataagactgctgcagttcgtgacggggacatctcgcgtccccatgaacggctttgccgagctctatggcagcaacgggccacagctgttcaccatcgaacaatggggctctccagaaaagcttcctcgtgctcacacgtgttttaataggctggatctcccaccttatgagacattcgaggatctccgggaaaagctgttgatggcagttgagaatgctcagggcttcgagggtgtggattag

SEQ ID NO: 185673 - DNA, 2868 bp, Artificial Sequence
  derived and/or modified sequence
atggccaccggcctgggggagcctgtgtatggcctgtctgaagatgaaggagagagccgcatcctgcgggtgaaggtggtgtctggcatcgacctggccaagaaggacatctttggagccagtgacccctacgtgaagctgagcctgtatgtggctgatgagaaccgggagctggccctggtgcagaccaagaccatcaagaagaccctgaaccccaagtggaatgaggagttctacttccgggtgaaccccagcaaccaccggctgctgtttgaggtgtttgatgagaaccggctgaccagagatgacttcctgggccaggtggatgtgcccctgagccacctgcccacagaggaccccaccatggagcggccctacaccttcaaggacttcctgctgcggcccaggagccacaagagccgggtgaagggcttcctgcggctgaagatggcctacatgcccaagaatggaggccaggatgaggagaacagcgaccagagagatgacatggagcacggctgggaggtggtggacagcaatgacagcgccagccagcaccaggaggagctgcccccaccacccctgcccccaggctgggaggagaaggtggacaacctgggccgcacctactacgtgaaccacaacaacagaaccacccagtggcaccggcccagcctgatggatgtgtcctctgagagtgacaacaacatccggcagatcaaccaggaggccgcccaccggcgcttccgcagccgccgccacatcagcgaggacctggagcctgagcccagcgagggcggagatgtgcctgagccctgggagaccatcagcgaggaggtgaacattgctggggacagcctgggcctggccctgcccccacctccagccagccctggcagcaggaccagcccccaggagctgtctgaggagctgagccggcggctgcagatcaccccagacagcaatggagagcagttcagcagcctcatccagcgggagcccagcagccggctgcggagctgcagcgtgacagatgctgtggccgagcagggccacctgcccccaccttctgtggcctacgtgcacaccaccccaggcctgcccagcggctgggaggagaggaaggatgccaagggccgcacctactacgtgaaccacaacaacagaaccaccacctggacccggcccatcatgcagctggccgaggatggagccagcggcagcgccaccaacagcaacaaccacctgattgagccccagatccggcggcccaggagcctgagcagccccaccgtgaccctgagcgcccccctggagggcgccaaggacagccctgtgagaagagctgtgaaggacaccctgagcaacccccagagcccccagcccagcccctacaacagccccaagccccagcacaaggtgacccagagcttcctgcccccaggctgggagatgagaattgcccccaacggccggcccttcttcatcgaccacaacaccaagaccaccacctgggaggacccccggctgaagtttcctgtgcacatgaggagcaagaccagcctgaaccccaatgacctgggccccctgcccccaggctgggaggagcgcatccacctggatggccgcaccttctacatcgaccacaacagcaagatcacccagtgggaggacccccggctgcagaacccagccatcactggacctgctgtgccctacagccgggagttcaagcagaagtatgactacttcaggaagaagctgaagaagccagctgacatccccaacagatttgagatgaagctgcacaggaacaacatctttgaggagagctaccgccgcatcatgtctgtgaagaggccagatgtgctgaaggcccggctgtggattgaatttgagagcgagaagggcctggactatggaggagtggcccgggagtggttcttcctgctgagcaaggagatgttcaacccctactacggcctgtttgagtacagcgccacagacaactacaccctgcagatcaaccccaacagcggcctgtgcaatgaagaccacctgagctacttcaccttcatcggccgggtggccggcctggccgtgttccacggcaagctgctggatggcttcttcatccggcccttctacaagatgatgctgggcaagcagatcaccctgaatgacatggagagcgtggacagcgagtactacaacagcctgaagtggatcctggagaatgaccccacagagctggacctgatgttctgcattgatgaggagaactttggccagacctaccaggtggacctgaagcccaatggaagtgagatcatggtgaccaatgaaaacaagcgggagtacatcgacctggtgatccagtggaggtttgtgaacagagtgcagaagcagatgaatgccttcctggagggcttcacagagctgctgcccatcgacctgatcaagatctttgatgaaaatgagctggagctgctgatgtgtggcctgggagatgtggatgtgaatgactggaggcagcacagcatctacaagaatggctactgccccaaccaccctgtgatccagtggttctggaaggctgtgctgctgatggatgctgagaagaggatccggctgctgcagtttgtgacaggcaccagccgggtgcccatgaatggatttgctgagctgtatggcagcaatggcccccagctgttcaccatcgagcagtggggcagccctgagaagctgccccgggcccacacctgcttcaaccggctggacctgcccccctatgagacctttgaggacctgcgggagaagctgctgatggctgtggagaatgcccagggctttgaaggagtggactag

SEQ ID NO: 185674 - DNA, 2868 bp, Artificial Sequence
  derived and/or modified sequence
atggccaccggcctgggcgagcccgtgtacggcctgagcgaggacgagggagagagccgcatccttagagttaaggtggtaagtgggatcgatttagccaaaaaggacatctttggcgcctccgacccctatgtgaagctctcactgtacgtggccgatgaaaatagggagctcgccctcgtgcaaaccaagacaatcaagaagacgttgaatcctaaatggaacgaggaattctattttagagttaatccaagtaatcatcggctgctctttgaagtcttcgacgaaaatagattgactcgggacgattttctcgggcaggtggatgtgccactatcacacttgccaacagaagaccctactatggaacgaccgtatactttcaaggactttcttcttcgccccagaagccataaatcgagggtgaagggttttctgcgtttgaagatggcctatatgcctaaaaacggcggccaggacgaagaaaacagtgaccagcgggatgacatggagcacggatgggaggtcgtcgattcgaatgacagtgcctcacagcatcaggaagaactccctccccccccactgccacccggatgggaggaaaaggttgacaaccttggaagaacctattacgttaaccacaacaacaggacaacccagtggcatcggccctcactgatggacgtgtcatcagaatctgataacaatatcaggcagattaatcaagaggctgcccaccggaggttcaggtccaggaggcatatttcagaagacttggagccagaaccatccgaaggcggtgacgtccctgagccgtgggaaactatttccgaagaagtgaacattgctggggattctctgggcctcgccttgcctcctcctcctgcctcacctggctctagaacctccccccaggagcttagtgaagagttgagtcggcgcttacagataacccctgatagtaatggagagcagttctcaagtctgatccaaagagagccaagtagccgccttcgaagctgttctgtgacagatgcagtcgccgaacagggacacctccctccaccatccgttgcctacgtgcatactaccccaggtctcccgtctgggtgggaggagcgaaaggacgctaagggccgaacctactacgtgaatcataacaacagaacaactacgtggactcgacctatcatgcagctggcagaagatggagcatccggaagtgctacaaatagtaacaaccacctgattgagccacaaataagaaggcctagaagcctatcaagccctacagttactcttagcgcccccctggagggggctaaggacagcccggtgaggcgcgccgtgaaagacacactgagcaacccgcagtcaccgcagccgtcaccttataattcgcccaaaccccagcataaggtgactcagagtttcctacccccaggctgggaaatgcgcattgctcctaacggcagacccttttttattgatcataacaccaagactacaacatgggaggacccaaggctgaagtttcccgttcatatgcgcagcaagacatccctgaacccaaacgatctcggccccctcccccctggatgggaggaacggatccacctcgacggccgcacgttctacattgaccataacagcaaaattactcagtgggaagatccaagactacagaaccctgcaatcaccggacccgccgtgccgtacagcagggaatttaagcagaagtatgactattttagaaaaaagctcaagaagcctgcggatattcccaaccgtttcgaaatgaaactgcatcggaacaacattttcgaggaatcttaccgccggatcatgtctgtcaagcgtcctgacgtgttgaaggctaggctctggattgagttcgaatccgagaaagggcttgactatggaggagtagcccgcgagtggttcttccttctgagtaaagaaatgtttaacccatactatgggctgtttgagtattcagccaccgacaactacaccttgcaaattaatcccaattccggactctgtaatgaggatcatctttcctatttcaccttcataggcagggtagcaggattagccgtgtttcacgggaagttgctggacgggttttttattaggcccttctataaaatgatgctggggaagcaaatcactctaaacgacatggaaagcgtcgattcggaatattataattccctgaaatggatcctggagaatgatcccaccgagttagacctgatgttttgtatcgacgaagaaaactttgggcagacttatcaggttgaccttaagcctaacggctctgaaatcatggtcaccaatgagaataaacgcgagtatatagatctggttatccaatggcggttcgtgaaccgtgttcagaagcagatgaacgcattcctcgagggttttaccgagctgctgcccattgatctgatcaagatcttcgatgagaacgaacttgagctcctgatgtgcggcctgggtgacgtggatgtgaatgattggcgccagcactcaatttataagaacggatactgcccaaaccatcccgtgatccaatggttctggaaagccgtgttactgatggatgctgaaaagaggatccgattgctccagtttgtcaccgggacatccagagtccccatgaatggcttcgctgagctctatggctcgaacggacctcagctatttacaatcgaacagtggggatcccccgaaaagttaccaagagctcatacgtgcttcaacaggctcgacttacccccttacgagactttcgaggatctgcgtgagaagctgctaatggcggtcgagaacgcacaaggatttgagggcgtcgattag

SEQ ID NO: 185675 - DNA, 8416 bp, Artificial Sequence
  derived and/or modified sequence
gagaggcgccggggctgccgcccggtgctcggcgcgctctcgggagccgcccgcccgctggtcccgcagccttccgggaggaagcggtgccggcagcgtccagggcgcgctctcgggcaccctcacctgccggcgcccggccgcttacccggcagggcgtgcgcagggtagggtgcgggaccggggggacctggaggcagaggggagaaccggccgtccgcgccgcagcacagccgctgggagcgcctcagaccccgcgcggggcgccggctccatggcgaccgggctcggggagccggtctatggactttccgaagacgagggagagtcccgtattctcagagtaaaagttgtttctggaattgatctcgccaaaaaggacatctttggagccagtgatccgtatgtgaaactttcattgtacgtagcggatgagaatagagaacttgctttggtccagacaaaaacaattaaaaagacactgaacccaaaatggaatgaagaattttatttcagggtaaacccatctaatcacagactcctatttgaagtatttgacgaaaatagactgacacgagacgacttcctgggccaggtggacgtgccccttagtcaccttccgacagaagatccaaccatggagcgaccctatacatttaaggactttctcctcagaccaagaagtcataagtctcgagttaagggatttttgcgattgaaaatggcctatatgccaaaaaatggaggtcaagatgaagaaaacagtgaccagagggatgacatggagcatggatgggaagttgttgactcaaatgactcggcttctcagcaccaagaggaacttcctcctcctcctctgcctcccgggtgggaagaaaaagtggacaatttaggccgaacttactatgtcaaccacaacaaccggaccactcagtggcacagaccaagcctgatggacgtgtcctcggagtcggacaataacatcagacagatcaaccaggaggcagcacaccggcgcttccgctcccgcaggcacatcagcgaagacttggagcccgagccctcggagggcggggatgtccccgagccttgggagaccatttcagaggaagtgaatatcgctggagactctctcggtctggctctgcccccaccaccggcctccccaggatctcggaccagccctcaggagctgtcagaggaactaagcagaaggcttcagatcactccagactccaatggggaacagttcagctctttgattcaaagagaaccctcctcaaggttgaggtcatgcagtgtcaccgacgcagttgcagaacagggccatctaccaccgccatcagtggcctatgtacataccacgccgggtctgccttcaggctgggaagaaagaaaagatgctaaggggcgcacatactatgtcaatcataacaatcgaaccacaacttggactcgacctatcatgcagcttgcagaagatggtgcgtccggatcagccacaaacagtaacaaccatctaatcgagcctcagatccgccggcctcgtagcctcagctcgccaacagtaactttatctgccccgctggagggtgccaaggactcacccgtacgtcgggctgtgaaagacaccctttccaacccacagtccccacagccatcaccttacaactcccccaaaccacaacacaaagtcacacagagcttcttgccacccggctgggaaatgaggatagcgccaaacggccggcccttcttcattgatcataacacaaagactacaacctgggaagatccacgtttgaaatttccagtacatatgcggtcaaagacatctttaaaccccaatgaccttggcccccttcctcctggctgggaagaaagaattcacttggatggccgaacgttttatattgatcataatagcaaaattactcagtgggaagacccaagactgcagaacccagctattactggtccgaaagctgtcccttactccagagaatttaagcagaaatatgactacttcaggaagaaattaaagaaacctgctgatatccccaataggtttgaaatgaaacttcacagaaataacatatttgaagagtcctatcggagaattatgtccgtgaaaagaccagatgtcctaaaagctagactgtggattgagtttgaatcagagaaaggtcttgactatgggggtgtggccagagaatggttcttcttactgtccaaagagatgttcaacccctactacggcctctttgagtactctgccacggacaactacacccttcagatcaaccctaattcaggcctctgtaatgaggatcatttgtcctacttcacttttattggaagagttgctggtctggccgtatttcatgggaagctcttagatggtttcttcattagaccattttacaagatgatgttgggaaagcagataaccctgaatgacatggaatctgtggatagtgaatattacaactctttgaaatggatcctggagaatgaccctactgagctggacctcatgttctgcatagacgaagaaaactttggacagacatatcaagtggatttgaagcccaatgggtcagaaataatggtcacaaatgaaaacaaaagggaatatatcgacttagtcatccagtggagatttgtgaacagggtccagaagcagatgaacgccttcttggagggattcacagaactacttcctattgatttgattaaaatttttgatgaaaatgagctggagttgctcatgtgcggcctcggtgatgtggatgtgaatgactggagacagcattctatttacaagaacggctactgcccaaaccaccccgtcattcagtggttctggaaggctgtgctactcatggacgccgaaaagcgtatccggttactgcagtttgtcacagggacatcgcgagtacctatgaatggatttgccgaactttatggttccaatggtcctcagctgtttacaatagagcaatggggcagtcctgagaaactgcccagagctcacacatgctttaatcgccttgacttacctccatatgaaacctttgaagatttacgagagaaacttctcatggccgtggaaaatgctcaaggatttgaaggggtggattaagcaccctgtgcctcgggggtggttgttcttcaagcaagttctgcttgcacttttgcatttgcctaacagacttttgcagaggcgatggcagagagcagctgcaggcatggtccctggagccgagccttcaccacgcactcgtccaagttcggatgcgggaacctggtcccagcttgagttcctgcctttcccaccacaaattatcaactggttgatgtgtacactaattacatttcaggaggacttaatgctatttatgttgtgcctctgcaggcaaagcccttaataaatattttacatcctttctaatgacaatgaatggaattaatcactcaacaggtatagtattacgactcatgtttactttttaaaatgatttagaccgattttcagattttatttcgttatgattaaagatgtctcatgtacttggaaaagtgagcattttttttttttttgtatttcactttcataccaggcttaatgtcaatgacatttttatttttgaagtactctgacacctccaccctctactttattagaattggaaggcaaatttttgtccaaaaacctacagacaagtactttgagagaatttccaatataatattagacataatgataattttttccatactcagaatgaaaaactggatattacgtttttgttttggggtttttttgtacaaatttagctaatagctacaggctgagagaattgtaacatagcatgacaaattttgtgttgacttgaaaggaatcacaccattattccttagaagtaattacatgtgttctaacacatttgagacagggttggactcccatttctcatccgagaaattacttaacccttcctggcgctgtacagtcatcttttattctatttcctctttgctgtttgtagtagagacattttgaatgaaacttggcactgcttgattcaaaactgtggaaaccagatctgtttagtctcctgtttgtatgcgtttgctaatggtagctaaataaccagtttttgttgtaaatgcaccaattctgaaggcactttatgtactacatggaggtcatatctggttttgtttttatttttttatcatgaacattaaatgtgatgatgatttcttttccctgcacacatctttccggtgcaatatctatcaattgtgaatctggctgctggtgtataaaaacctggatgtaaagctgagcctacagacctgtcctcaccaactgttttgtgatttctactcaactacaaagatttatttaatgtactcttaatctaactgagttttgttaccaatgacctgttgcatgcttcaataccgtgtactgcctgagttgtgcctcttgtgtgctagattaaaagtgagacagagacttgacttgatcctctgagctcaagctattgagctggtagtggcagaggactgagggtacctgcacagtttgattcttttccacgtgtaagtctccattgcagaattgtcgtgctttgagaaaacacctgaggcagtgtgggagttgaacgaccctgctgtcctttttaacctgtgttgtcctagaccctgtcggggcagtcaggggacactagagatttgatctcatgcgagtcatcaataggacaaaaaagttgtggtttggggaggtctgtttgttacataaaaaggacctttcggtgtaagaaattgccgtttttaccctgccctggctggcatgtgagaagccatggaaggttgtggttgtaaatgagttgtctaaaggggtgcagaggcctgaggtttctaaaagaaggtagatttctacagagctgagtgttggttcctttttcttattggttgaaaattacctggtagtgatcagaaaacttagatgctatgtaactaaaaaaaaaaaaaaaaaaaaaaaaaaaaaaaaaaaaattcccgctcatgagttttgactattggtgagatgttttccgctacagttaacatgacaaatgtctcagtggcaaaaatcccctttttgtaagcccccatagtctagaggcagttttctttttaagaatcatgccagagcctgagtcgagcagtatgctttcttggtttttgagagtaattgtgtaattgtagagggagaaatccaattctaacctaagaactgggattcttctgtcatcttgtaaaccgtatattgaaaaaaacagaatgtcactaaatgcatattaagtcaagtattggaaagtataaaagaaaaatcattctgacaatttctaagccagaagcaaacaagaattactgaaatctaccccatgaatacttggaaggcagtaattgtgagtgacacctcagttcatcaaccccttaataatatcagcttaattttaatgacaactaaatatgctgaagtgaggatttagtattttttaaaaaagcaaaacaaggttcagtagtcctcagcaattctccaagtttctctctttgcctaaaatggtcatagatcttgatttctctgaatcgtgatgaccacacccagtcatcttcacagcataattgcaggtggcagtaaagagagtgtgctgggtaaggagcagttgctgggtcattccttgggccccgacctgcccggggagtagccctgggggagagagggcagtgttgcctatcccagaggtcccagcagtcacactgctctgcaggccgggctctctttatagccagagaaatcaccttaatgcagtctctttagttgtctgctgaagctgtagttattatgggccacttacatgaggctgagaagtacgtgccggagctcacacactgcctgttgcggttctcttaacatcagttatcacagctgcctgtgggtcccgggtatttccattcctgccccttgttggcccgaggaaggatgtggaaagagcacctggtgggatgaaggtccaacagcctgtgcctctccactgctggccctggagccggcagcagtgaggcattcattgtctgtgttgcggtgtattcccagcttcagtgctcttttcctttttgcctgaaatgtttatgcttctctgcagccagtcctctaacaaatctcaagaacaaaggtaagacacttggtttttgtttccaggacccttcagaaggtgacatcagatattccctaaattcagacaatgagggatacagagcgacttggcatgtattatttctcccatgtaaggacaaagggacagattattattgttatttctgagacagagtcttgctctgtagctcaggctggagtgcagtggctcaatctcagctcaccacaacctctgcctcctggcttcaagcgattcttctgcctcagcctccccgaatagttgggattacaggcacccaccaccacgcctggctaatttttgtatttttagtagagatggtttcaccatgctggccaggctggtcttgaactcctgacctcaggtgatcctcccgcctcagccttccaaagtgctgggattacaagcatgagccaccgcacccggcctcacagtgacagattctgagaaacagcatgcaaaacatttgaaccattttctacatctcccattgttgcatagagagtgtgcaccgctgctatcttgccagatccacactggtcctcccgaaagccaggttcatacacagcaactttttaattattctaacagttacccattaacagtcgactcctgtatttctgagagtcttgtactcacctctgaaatttaaaaacgtataaagagagcctgggttaatcagttctgcagcccctacgtgacactgtgctagttctccttcttctgtctcctccttaccctggccctgcacccctgtacttaagagggagaggtgggaggtgctgtctggtatcatttgctgcctcgccagtagagggtgccgctgtgcagggtaactgcccgcctgctcccttcctgacctcccctgaccccgaagatcactacctctgtcattcaggcattggggtacatcctgataagtcgtgtcagaactgccaatttcaggactgagatgtgtttttaaaaaacaaatccttataaactccactttgtactttagattttaaaactggggaaaaatgtgatattctttggaccacttttttaatttatataagccttaatgaacagtgtctatacatttgcatacacacacccccaccccagagtgttctcagtatgtcagagaaagtgccacagcattaggacgggagcttggagaacgttttctagaaaagggttagcttcctgttggcatgaaattttccaagcaaacctcattaaacatctgttgtttgttaaagatgttccactgaaagcaacgcatgtttcaaaggcacgtctttccgttcgttggttttctgtgtgtaaggagtagcattgctgttggcgcctaacctcgcgtgcactgcattctcaaccccgtaccagtgcatcatcagaagccttcctcgtgaccataactctgtgtctgcagatatgtgttcccgtgtaagccagttttccccttttactcagactgatttcacctagattgtcacggtttccttcatgttaactttgcgtgactttgttcttcctttactactctgtatgtaatatatatacatatatacgtacatatgctgtccaaatatatttgtatatatttgtatagcatttttacacctttattgagtaatctggtttcgaaaggaggtgagagtttagtcccttctgcagttttctccaagctgtgtcctgtgaatttcaacccttggagcctaagaaaaccctaggaagatgatgttaatttgctgtcatttcctaattcaggatctatcatcaaatgaaacatgaaaaaaacagtgacttttaaggtgaaaagagtttcaagcattccaaataaattatcaatgtttcataactttttattataaacccacctcctaataggaagccaagtactatttgatacagtggtaaaaaccaaactaccttgaatttttttaaggcaacttatgaataatgctcattttcacagtcagaatagctttaaaatatggttgaatttgatacacacaggaagttttcttgaagaacaatcctttcgcttttcttttttcttgagagatctaaagagaaactgtagattgttttcctgacagcaaaagactaatgtgacaaaatgaagtcattgtaaagaagcgatgcaacttgtcaaatatttaataaagaattatggaagctggaacattttctac

SEQ ID NO: 185676 - DNA, 8413 bp, Artificial Sequence
  derived and/or modified sequence
gagaggcgccggggctgccgcccggtgctcggcgcgctctcgggagccgcccgcccgctggtcccgcagccttccgggaggaagcggtgccggcagcgtccagggcgcgctctcgggcaccctcacctgccggcgcccggccgcttacccggcagggcgtgcgcagggtagggtgcgggaccggggggacctggaggcagaggggagaaccggccgtccgcgccgcagcacagccgctgggagcgcctcagaccccgcgcggggcgccggctccatggcgaccgggctcggggagccggtctatggactttccgaagacgagggagagtcccgtattctcagagtaaaagttgtttctggaattgatctcgccaaaaaggacatctttggagccagtgatccgtatgtgaaactttcattgtacgtagcggatgagaatagagaacttgctttggtccagacaaaaacaattaaaaagacactgaacccaaaatggaatgaagaattttatttcagggtaaacccatctaatcacagactcctatttgaagtatttgacgaaaatagactgacacgagacgacttcctgggccaggtggacgtgccccttagtcaccttccgacagaagatccaaccatggagcgaccctatacatttaaggactttctcctcagaccaagaagtcataagtctcgagttaagggatttttgcgattgaaaatggcctatatgccaaaaaatggaggtcaagatgaagaaaacagtgaccagagggatgacatggagcatggatgggaagttgttgactcaaatgactcggcttctcagcaccaagaggaacttcctcctcctcctctgcctcccgggtgggaagaaaaagtggacaatttaggccgaacttactatgtcaaccacaacaaccggaccactcagtggcacagaccaagcctgatggacgtgtcctcggagtcggacaataacatcagacagatcaaccaggaggcagcacaccggcgcttccgctcccgcaggcacatcagcgaagacttggagcccgagccctcggagggcggggatgtccccgagccttgggagaccatttcagaggaagtgaatatcgctggagactctctcggtctggctctgcccccaccaccggcctccccaggatctcggaccagccctcaggagctgtcagaggaactaagcagaaggcttcagatcactccagactccaatggggaacagttcagctctttgattcaaagagaaccctcctcaaggttgaggtcatgcagtgtcaccgacgcagttgcagaacagggccatctaccaccgccatcagtggcctatgtacataccacgccgggtctgccttcaggctgggaagaaagaaaagatgctaaggggcgcacatactatgtcaatcataacaatcgaaccacaacttggactcgacctatcatgcagcttgcagaagatggtgcgtccggatcagccacaaacagtaacaaccatctaatcgagcctcagatccgccggcctcgtagcctcagctcgccaacagtaactttatctgccccgctggagggtgccaaggactcacccgtacgtcgggctgtgaaagacaccctttccaacccacagtccccacagccatcaccttacaactcccccaaaccacaacacaaagtcacacagagcttcttgccacccggctgggaaatgaggatagcgccaaacggccggcccttcttcattgatcataacacaaagactacaacctgggaagatccacgtttgaaatttccagtacatatgcggtcaaagacatctttaaaccccaatgaccttggcccccttcctcctggctgggaagaaagaattcacttggatggccgaacgttttatattgatcataatagcaaaattactcagtgggaagacccaagactgcagaacccagctattactggtccggctgtcccttactccagagaatttaagcagaaatatgactacttcaggaagaaattaaagaaacctgctgatatccccaataggtttgaaatgaaacttcacagaaataacatatttgaagagtcctatcggagaattatgtccgtgaaaagaccagatgtcctaaaagctagactgtggattgagtttgaatcagagaaaggtcttgactatgggggtgtggccagagaatggttcttcttactgtccaaagagatgttcaacccctactacggcctctttgagtactctgccacggacaactacacccttcagatcaaccctaattcaggcctctgtaatgaggatcatttgtcctacttcacttttattggaagagttgctggtctggccgtatttcatgggaagctcttagatggtttcttcattagaccattttacaagatgatgttgggaaagcagataaccctgaatgacatggaatctgtggatagtgaatattacaactctttgaaatggatcctggagaatgaccctactgagctggacctcatgttctgcatagacgaagaaaactttggacagacatatcaagtggatttgaagcccaatgggtcagaaataatggtcacaaatgaaaacaaaagggaatatatcgacttagtcatccagtggagatttgtgaacagggtccagaagcagatgaacgccttcttggagggattcacagaactacttcctattgatttgattaaaatttttgatgaaaatgagctggagttgctcatgtgcggcctcggtgatgtggatgtgaatgactggagacagcattctatttacaagaacggctactgcccaaaccaccccgtcattcagtggttctggaaggctgtgctactcatggacgccgaaaagcgtatccggttactgcagtttgtcacagggacatcgcgagtacctatgaatggatttgccgaactttatggttccaatggtcctcagctgtttacaatagagcaatggggcagtcctgagaaactgcccagagctcacacatgctttaatcgccttgacttacctccatatgaaacctttgaagatttacgagagaaacttctcatggccgtggaaaatgctcaaggatttgaaggggtggattaagcaccctgtgcctcgggggtggttgttcttcaagcaagttctgcttgcacttttgcatttgcctaacagacttttgcagaggcgatggcagagagcagctgcaggcatggtccctggagccgagccttcaccacgcactcgtccaagttcggatgcgggaacctggtcccagcttgagttcctgcctttcccaccacaaattatcaactggttgatgtgtacactaattacatttcaggaggacttaatgctatttatgttgtgcctctgcaggcaaagcccttaataaatattttacatcctttctaatgacaatgaatggaattaatcactcaacaggtatagtattacgactcatgtttactttttaaaatgatttagaccgattttcagattttatttcgttatgattaaagatgtctcatgtacttggaaaagtgagcattttttttttttttgtatttcactttcataccaggcttaatgtcaatgacatttttatttttgaagtactctgacacctccaccctctactttattagaattggaaggcaaatttttgtccaaaaacctacagacaagtactttgagagaatttccaatataatattagacataatgataattttttccatactcagaatgaaaaactggatattacgtttttgttttggggtttttttgtacaaatttagctaatagctacaggctgagagaattgtaacatagcatgacaaattttgtgttgacttgaaaggaatcacaccattattccttagaagtaattacatgtgttctaacacatttgagacagggttggactcccatttctcatccgagaaattacttaacccttcctggcgctgtacagtcatcttttattctatttcctctttgctgtttgtagtagagacattttgaatgaaacttggcactgcttgattcaaaactgtggaaaccagatctgtttagtctcctgtttgtatgcgtttgctaatggtagctaaataaccagtttttgttgtaaatgcaccaattctgaaggcactttatgtactacatggaggtcatatctggttttgtttttatttttttatcatgaacattaaatgtgatgatgatttcttttccctgcacacatctttccggtgcaatatctatcaattgtgaatctggctgctggtgtataaaaacctggatgtaaagctgagcctacagacctgtcctcaccaactgttttgtgatttctactcaactacaaagatttatttaatgtactcttaatctaactgagttttgttaccaatgacctgttgcatgcttcaataccgtgtactgcctgagttgtgcctcttgtgtgctagattaaaagtgagacagagacttgacttgatcctctgagctcaagctattgagctggtagtggcagaggactgagggtacctgcacagtttgattcttttccacgtgtaagtctccattgcagaattgtcgtgctttgagaaaacacctgaggcagtgtgggagttgaacgaccctgctgtcctttttaacctgtgttgtcctagaccctgtcggggcagtcaggggacactagagatttgatctcatgcgagtcatcaataggacaaaaaagttgtggtttggggaggtctgtttgttacataaaaaggacctttcggtgtaagaaattgccgtttttaccctgccctggctggcatgtgagaagccatggaaggttgtggttgtaaatgagttgtctaaaggggtgcagaggcctgaggtttctaaaagaaggtagatttctacagagctgagtgttggttcctttttcttattggttgaaaattacctggtagtgatcagaaaacttagatgctatgtaactaaaaaaaaaaaaaaaaaaaaaaaaaaaaaaaaaaaaattcccgctcatgagttttgactattggtgagatgttttccgctacagttaacatgacaaatgtctcagtggcaaaaatcccctttttgtaagcccccatagtctagaggcagttttctttttaagaatcatgccagagcctgagtcgagcagtatgctttcttggtttttgagagtaattgtgtaattgtagagggagaaatccaattctaacctaagaactgggattcttctgtcatcttgtaaaccgtatattgaaaaaaacagaatgtcactaaatgcatattaagtcaagtattggaaagtataaaagaaaaatcattctgacaatttctaagccagaagcaaacaagaattactgaaatctaccccatgaatacttggaaggcagtaattgtgagtgacacctcagttcatcaaccccttaataatatcagcttaattttaatgacaactaaatatgctgaagtgaggatttagtattttttaaaaaagcaaaacaaggttcagtagtcctcagcaattctccaagtttctctctttgcctaaaatggtcatagatcttgatttctctgaatcgtgatgaccacacccagtcatcttcacagcataattgcaggtggcagtaaagagagtgtgctgggtaaggagcagttgctgggtcattccttgggccccgacctgcccggggagtagccctgggggagagagggcagtgttgcctatcccagaggtcccagcagtcacactgctctgcaggccgggctctctttatagccagagaaatcaccttaatgcagtctctttagttgtctgctgaagctgtagttattatgggccacttacatgaggctgagaagtacgtgccggagctcacacactgcctgttgcggttctcttaacatcagttatcacagctgcctgtgggtcccgggtatttccattcctgccccttgttggcccgaggaaggatgtggaaagagcacctggtgggatgaaggtccaacagcctgtgcctctccactgctggccctggagccggcagcagtgaggcattcattgtctgtgttgcggtgtattcccagcttcagtgctcttttcctttttgcctgaaatgtttatgcttctctgcagccagtcctctaacaaatctcaagaacaaaggtaagacacttggtttttgtttccaggacccttcagaaggtgacatcagatattccctaaattcagacaatgagggatacagagcgacttggcatgtattatttctcccatgtaaggacaaagggacagattattattgttatttctgagacagagtcttgctctgtagctcaggctggagtgcagtggctcaatctcagctcaccacaacctctgcctcctggcttcaagcgattcttctgcctcagcctccccgaatagttgggattacaggcacccaccaccacgcctggctaatttttgtatttttagtagagatggtttcaccatgctggccaggctggtcttgaactcctgacctcaggtgatcctcccgcctcagccttccaaagtgctgggattacaagcatgagccaccgcacccggcctcacagtgacagattctgagaaacagcatgcaaaacatttgaaccattttctacatctcccattgttgcatagagagtgtgcaccgctgctatcttgccagatccacactggtcctcccgaaagccaggttcatacacagcaactttttaattattctaacagttacccattaacagtcgactcctgtatttctgagagtcttgtactcacctctgaaatttaaaaacgtataaagagagcctgggttaatcagttctgcagcccctacgtgacactgtgctagttctccttcttctgtctcctccttaccctggccctgcacccctgtacttaagagggagaggtgggaggtgctgtctggtatcatttgctgcctcgccagtagagggtgccgctgtgcagggtaactgcccgcctgctcccttcctgacctcccctgaccccgaagatcactacctctgtcattcaggcattggggtacatcctgataagtcgtgtcagaactgccaatttcaggactgagatgtgtttttaaaaaacaaatccttataaactccactttgtactttagattttaaaactggggaaaaatgtgatattctttggaccacttttttaatttatataagccttaatgaacagtgtctatacatttgcatacacacacccccaccccagagtgttctcagtatgtcagagaaagtgccacagcattaggacgggagcttggagaacgttttctagaaaagggttagcttcctgttggcatgaaattttccaagcaaacctcattaaacatctgttgtttgttaaagatgttccactgaaagcaacgcatgtttcaaaggcacgtctttccgttcgttggttttctgtgtgtaaggagtagcattgctgttggcgcctaacctcgcgtgcactgcattctcaaccccgtaccagtgcatcatcagaagccttcctcgtgaccataactctgtgtctgcagatatgtgttcccgtgtaagccagttttccccttttactcagactgatttcacctagattgtcacggtttccttcatgttaactttgcgtgactttgttcttcctttactactctgtatgtaatatatatacatatatacgtacatatgctgtccaaatatatttgtatatatttgtatagcatttttacacctttattgagtaatctggtttcgaaaggaggtgagagtttagtcccttctgcagttttctccaagctgtgtcctgtgaatttcaacccttggagcctaagaaaaccctaggaagatgatgttaatttgctgtcatttcctaattcaggatctatcatcaaatgaaacatgaaaaaaacagtgacttttaaggtgaaaagagtttcaagcattccaaataaattatcaatgtttcataactttttattataaacccacctcctaataggaagccaagtactatttgatacagtggtaaaaaccaaactaccttgaatttttttaaggcaacttatgaataatgctcattttcacagtcagaatagctttaaaatatggttgaatttgatacacacaggaagttttcttgaagaacaatcctttcgcttttcttttttcttgagagatctaaagagaaactgtagattgttttcctgacagcaaaagactaatgtgacaaaatgaagtcattgtaaagaagcgatgcaacttgtcaaatatttaataaagaattatggaagctggaacattttctac

SEQ ID NO: 185677 - DNA, 2868 bp, Artificial Sequence
  derived and/or modified sequence
atggccacagggcttggtgagcctgtctacggactatctgaagacgaaggggaatctcgaatcctgcgcgttaaggtggtcagtggcatcgaccttgctaagaaggacatttttggcgcaagcgatccctacgtgaaactgtctttgtatgtcgccgatgagaacagagaattggctctcgtgcagacgaaaacgatcaagaaaacccttaatcccaaatggaacgaagaattctatttccgcgttaacccctctaaccatcgactgctgttcgaagtgtttgatgaaaaccggctcactagggatgatttccttggtcaagtggatgttccactgtcccaccttcccacagaggacccaactatggagaggccctatactttcaaagacttccttctccgcccacggagccacaagagtcgggtgaaaggctttctccggctcaaaatggcctacatgccgaagaacggcggtcaggatgaggaaaatagcgatcagcgcgacgacatggagcacggctgggaagtcgtcgatagtaacgactccgcttcacagcaccaggaagaactgccacccccaccgctgcccccaggctgggaggagaaggtggataacctggggcgtacctactacgtgaatcataataatcgcaccactcagtggcacaggcctagcctgatggacgtgagctccgagtccgataataacataagacagatcaatcaggaagcagcccaccgcagatttaggtctaggagacacatcagtgaggatttggagcccgagccgtctgaaggaggtgatgttcccgaaccttgggaaacgatttcagaggaagtgaacatcgccggagactccctcggcttagctttgcccccacctccggctagtcctggatccagaaccagtccgcaggaactaagcgaggagctgtcccggagattgcaaattactccagattctaacggtgaacagttctcttcacttattcagcgagaaccgtctagtcgactcagatcatgttccgtgactgacgccgttgcagagcagggccatctgccaccccctagtgttgcatatgtgcatacgactcccggattaccgtccgggtgggaggaacggaaagatgccaaaggccgtacctactatgttaatcataataaccggaccacaacatggacacgaccgatcatgcaactggcagaggatggggcttctggatccgctacaaattccaataaccatttaatcgaacctcagatccgcaggccacggtctctcagctcccccactgtgactctcagcgcccctctggaaggggcaaaggacagccctgtgagacgcgcagtgaaggatacactcagcaatccacagtcgccccagccttctccatacaatagccccaagcctcagcataaagtaacccagagtttcctccctccaggatgggagatgaggattgcaccaaacggacgccctttctttatcgaccataacacaaagacaacgacgtgggaggaccccagactgaagtttccagtgcatatgaggagtaagacaagcctcaatccaaatgatttggggccacttcctcctggttgggaagaaaggatacatttggatgggagaacattctacatagaccacaactcaaaaataacccagtgggaagacccgcgtctgcagaacccagccattaccggtcctgccgtcccctatagcagggagttcaaacaaaaatacgattactttagaaagaaactgaagaagcccgcagatatccctaatcgctttgaaatgaagctgcacagaaataatatctttgaggaatcatacagacgcattatgtccgttaaaaggcccgatgtgctcaaagcccgtctttggatcgaattcgagtccgagaaaggtctggattatggaggtgtcgccagagaatggttctttttattatcaaaagaaatgtttaacccttattacggcttgttcgaatacagcgcgaccgataactataccctccagataaatccaaacagtggcctttgcaatgaagaccacctctcttatttcacgtttatagggcgtgtggccggtcttgcagtgtttcatgggaaacttctcgacgggttttttatacgtccattctataagatgatgctggggaaacagattacacttaatgacatggagtcggttgactcagagtactataattccctcaagtggatcctggaaaacgaccctaccgagctggacctcatgttttgcatagacgaagaaaattttgggcagacatatcaggtcgacttaaaacccaatggatcagagattatggttacgaatgaaaataagcgggagtacatcgatctggtgattcagtggcgtttcgtgaatcgcgtacagaaacaaatgaacgcgttcttagaggggtttacagaactacttcctattgacctcatcaagatcttcgacgaaaacgagctagaactcctgatgtgtggactaggcgatgtagacgtgaatgactggcggcagcacagcatatacaaaaacgggtattgccctaaccatccggtcatccaatggttttggaaggccgtgctgctaatggacgcagaaaagagaatcaggctactccagttcgtgacaggtacaagtagagtacctatgaatggttttgctgaactgtatggcagcaatggaccacaactgttcacgatagaacagtggggaagccccgagaaacttcccagggcccacacttgttttaaccggctagatttgcctccgtacgaaacttttgaggatctccgggagaagctactcatggcggtggaaaatgcccagggatttgagggtgtagattag

SEQ ID NO: 185678 - DNA, 2868 bp, Artificial Sequence
  derived and/or modified sequence
atggccaccggcctgggcgagcccgtgtacggcctgagcgaggacgagggcgagagcagaatcctgagagtgaaggtggtgagcggcatcgacctggccaagaaggacatcttcggcgccagcgacccctacgtgaagctgagcctgtacgtggccgacgagaacagagagctggccctggtgcagaccaagaccatcaagaagaccctgaaccccaagtggaacgaggagttctacttcagagtgaaccccagcaaccacagactgctgttcgaggtgttcgacgagaacagactgaccagagacgacttcctgggccaggtggacgtgcccctgagccacctgcccaccgaggaccccaccatggagagaccctacaccttcaaggacttcctgctgagacccagaagccacaagagcagagtgaagggcttcctgagactgaagatggcctacatgcccaagaacggcggccaggacgaggagaacagcgaccagagagacgacatggagcacggctgggaggtggtggacagcaacgacagcgccagccagcaccaggaggagctgccccccccccccctgccccccggctgggaggagaaggtggacaacctgggcagaacctactacgtgaaccacaacaacagaaccacccagtggcacagacccagcctgatggacgtgagcagcgagagcgacaacaacatcagacagatcaaccaggaggccgcccacagaagattcagaagcagaagacacatcagcgaggacctggagcccgagcccagcgagggcggcgacgtgcccgagccctgggagaccatcagcgaggaggtgaacatcgccggcgacagcctgggcctggccctgccccccccccccgccagccccggcagcagaaccagcccccaggagctgagcgaggagctgagcagaagactgcagatcacccccgacagcaacggcgagcagttcagcagcctgatccagagagagcccagcagcagactgagaagctgcagcgtgaccgacgccgtggccgagcagggccacctgcccccccccagcgtggcctacgtgcacaccacccccggcctgcccagcggctgggaggagagaaaggacgccaagggcagaacctactacgtgaaccacaacaacagaaccaccacctggaccagacccatcatgcagctggccgaggacggcgccagcggcagcgccaccaacagcaacaaccacctgatcgagccccagatcagaagacccagaagcctgagcagccccaccgtgaccctgagcgcccccctggagggcgccaaggacagccccgtgagaagagccgtgaaggacaccctgagcaacccccagagcccccagcccagcccctacaacagccccaagccccagcacaaggtgacccagagcttcctgccccccggctgggagatgagaatcgcccccaacggcagacccttcttcatcgaccacaacaccaagaccaccacctgggaggaccccagactgaagttccccgtgcacatgagaagcaagaccagcctgaaccccaacgacctgggccccctgccccccggctgggaggagagaatccacctggacggcagaaccttctacatcgaccacaacagcaagatcacccagtgggaggaccccagactgcagaaccccgccatcaccggccccgccgtgccctacagcagagagttcaagcagaagtacgactacttcagaaagaagctgaagaagcccgccgacatccccaacagattcgagatgaagctgcacagaaacaacatcttcgaggagagctacagaagaatcatgagcgtgaagagacccgacgtgctgaaggccagactgtggatcgagttcgagagcgagaagggcctggactacggcggcgtggccagagagtggttcttcctgctgagcaaggagatgttcaacccctactacggcctgttcgagtacagcgccaccgacaactacaccctgcagatcaaccccaacagcggcctgtgcaacgaggaccacctgagctacttcaccttcatcggcagagtggccggcctggccgtgttccacggcaagctgctggacggcttcttcatcagacccttctacaagatgatgctgggcaagcagatcaccctgaacgacatggagagcgtggacagcgagtactacaacagcctgaagtggatcctggagaacgaccccaccgagctggacctgatgttctgcatcgacgaggagaacttcggccagacctaccaggtggacctgaagcccaacggcagcgagatcatggtgaccaacgagaacaagagagagtacatcgacctggtgatccagtggagattcgtgaacagagtgcagaagcagatgaacgccttcctggagggcttcaccgagctgctgcccatcgacctgatcaagatcttcgacgagaacgagctggagctgctgatgtgcggcctgggcgacgtggacgtgaacgactggagacagcacagcatctacaagaacggctactgccccaaccaccccgtgatccagtggttctggaaggccgtgctgctgatggacgccgagaagagaatcagactgctgcagttcgtgaccggcaccagcagagtgcccatgaacggcttcgccgagctgtacggcagcaacggcccccagctgttcaccatcgagcagtggggcagccccgagaagctgcccagagcccacacctgcttcaacagactggacctgcccccctacgagaccttcgaggacctgagagagaagctgctgatggccgtggagaacgcccagggcttcgagggcgtggactag

SEQ ID NO: 185679 - protein, 1247 aa, Artificial Sequence
  derived and/or modified sequence
MEDAGAAGPGPEPEPEPEPEPEPAPEPEPEPKPGAGTSEAFSRLWTDVMGILDGSLGNIDDLAQQYADYYNTCFSDVCERMEELRKRRVSQDLEVEKPDASPTSLQLRSQIEESLGFCSAVSTPEVERKNPLHKSNSEDSSVGKGDWKKKNKYFWQNFRKNQKGIMRQTSKGEDVGYVASEITMSDEERIQLMMMVKEKMITIEEALARLKEYEAQHRQSAALDPADWPDGSYPTFDGSSNCNSREQSDDETEESVKFKRLHKLVNSTRRVRKKLIRVEEMKKPSTEGGEEHVFENSPVLDERSALYSGVHKKPLFFDGSPEKPPEDDSDSLTTSPSSSSLDTWGAGRKLVKTFSKGESRGLIKPPKKMGTFFSYPEEEKAQKVSRSLTEGEMKKGLGSLSHGRTCSFGGFDLTNRSLHVGSNNSDPMGKEGDFVYKEVIKSPTASRISLGKKVKSVKETMRKRMSKKYSSSVSEQDSGLDGMPGSPPPSQPDPEHLDKPKLKAGGSVESLRSSLSGQSSMSGQTVSTTDSSTSNRESVKSEDGDDEEPPYRGPFCGRARVHTDFTPSPYDTDSLKLKKGDIIDIISKPPMGTWMGLLNNKVGTFKFIYVDVLSEDEEKPKRPTRRRRKGRPPQPKSVEDLLDRINLKEHMPTFLFNGYEDLDTFKLLEEEDLDELNIRDPEHRAVLLTAVELLQEYDSNSDQSGSQEKLLVDSQGLSGCSPRDSGCYESSENLENGKTRKASLLSAKSSTEPSLKSFSRNQLGNYPTLPLMKSGDALKQGQEEGRLGGGLAPDTSKSCDPPGVTGLNKNRRSLPVSICRSCETLEGPQTVDTWPRSHSLDDLQVEPGAEQDVPTEVTEPPPQIVPEVPQKTTASSTKAQPLEQDSAVDNALLLTQSKRFSEPQKLTTKKLEGSIAASGRGLSPPQCLPRNYDAQPPGAKHGLARTPLEGHRKGHEFEGTHHPLGTKEGVDAEQRMQPKIPSQPPPVPAKKSRERLANGLHPVPMGPSGALPSPDAPCLPVKRGSPASPTSPSDCPPALAPRPLSGQAPGSPPSTRPPPWLSELPENTSLQEHGVKLGPALTRKVSCARGVDLETLTENKLHAEGIDLTEEPYSDKHGRCGIPEALVQRYAEDLDQPERDVAANMDQIRVKQLRKQHRMAIPSGGLTEICRKPVSPGCISSVSDWLISIGLPMYAGTLSTAGFSTLSQVPSLSHTCLQEAGITEERHIRKLLSAARLFKLPPGPEAM

SEQ ID NO: 185680 - DNA, 3744 bp, Artificial Sequence
  derived and/or modified sequence
atggaggacgccggcgccgccggccccggccccgagcccgagcccgagcccgagcccgagcccgagcccgcccccgagcccgagcccgagcccaagcccggcgccggcaccagcgaggccttcagcagactgtggaccgacgtgatgggcatcctggacggcagcctgggcaacatcgacgacctggcccagcagtacgccgactactacaacacctgcttcagcgacgtgtgcgagagaatggaggagctgagaaagagaagagtgagccaggacctggaggtggagaagcccgacgccagccccaccagcctgcagctgagaagccagatcgaggagagcctgggcttctgcagcgccgtgagcacccccgaggtggagagaaagaaccccctgcacaagagcaacagcgaggacagcagcgtgggcaagggcgactggaagaagaagaacaagtacttctggcagaacttcagaaagaaccagaagggcatcatgagacagaccagcaagggcgaggacgtgggctacgtggccagcgagatcaccatgagcgacgaggagagaatccagctgatgatgatggtgaaggagaagatgatcaccatcgaggaggccctggccagactgaaggagtacgaggcccagcacagacagagcgccgccctggaccccgccgactggcccgacggcagctaccccaccttcgacggcagcagcaactgcaacagcagagagcagagcgacgacgagaccgaggagagcgtgaagttcaagagactgcacaagctggtgaacagcaccagaagagtgagaaagaagctgatcagagtggaggagatgaagaagcccagcaccgagggcggcgaggagcacgtgttcgagaacagccccgtgctggacgagagaagcgccctgtacagcggcgtgcacaagaagcccctgttcttcgacggcagccccgagaagccccccgaggacgacagcgacagcctgaccaccagccccagcagcagcagcctggacacctggggcgccggcagaaagctggtgaagaccttcagcaagggcgagagcagaggcctgatcaagccccccaagaagatgggcaccttcttcagctaccccgaggaggagaaggcccagaaggtgagcagaagcctgaccgagggcgagatgaagaagggcctgggcagcctgagccacggcagaacctgcagcttcggcggcttcgacctgaccaacagaagcctgcacgtgggcagcaacaacagcgaccccatgggcaaggagggcgacttcgtgtacaaggaggtgatcaagagccccaccgccagcagaatcagcctgggcaagaaggtgaagagcgtgaaggagaccatgagaaagagaatgagcaagaagtacagcagcagcgtgagcgagcaggacagcggcctggacggcatgcccggcagccccccccccagccagcccgaccccgagcacctggacaagcccaagctgaaggccggcggcagcgtggagagcctgagaagcagcctgagcggccagagcagcatgagcggccagaccgtgagcaccaccgacagcagcaccagcaacagagagagcgtgaagagcgaggacggcgacgacgaggagcccccctacagaggccccttctgcggcagagccagagtgcacaccgacttcacccccagcccctacgacaccgacagcctgaagctgaagaagggcgacatcatcgacatcatcagcaagccccccatgggcacctggatgggcctgctgaacaacaaggtgggcaccttcaagttcatctacgtggacgtgctgagcgaggacgaggagaagcccaagagacccaccagaagaagaagaaagggcagacccccccagcccaagagcgtggaggacctgctggacagaatcaacctgaaggagcacatgcccaccttcctgttcaacggctacgaggacctggacaccttcaagctgctggaggaggaggacctggacgagctgaacatcagagaccccgagcacagagccgtgctgctgaccgccgtggagctgctgcaggagtacgacagcaacagcgaccagagcggcagccaggagaagctgctggtggacagccagggcctgagcggctgcagccccagagacagcggctgctacgagagcagcgagaacctggagaacggcaagaccagaaaggccagcctgctgagcgccaagagcagcaccgagcccagcctgaagagcttcagcagaaaccagctgggcaactaccccaccctgcccctgatgaagagcggcgacgccctgaagcagggccaggaggagggcagactgggcggcggcctggcccccgacaccagcaagagctgcgacccccccggcgtgaccggcctgaacaagaacagaagaagcctgcccgtgagcatctgcagaagctgcgagaccctggagggcccccagaccgtggacacctggcccagaagccacagcctggacgacctgcaggtggagcccggcgccgagcaggacgtgcccaccgaggtgaccgagccccccccccagatcgtgcccgaggtgccccagaagaccaccgccagcagcaccaaggcccagcccctggagcaggacagcgccgtggacaacgccctgctgctgacccagagcaagagattcagcgagccccagaagctgaccaccaagaagctggagggcagcatcgccgccagcggcagaggcctgagccccccccagtgcctgcccagaaactacgacgcccagccccccggcgccaagcacggcctggccagaacccccctggagggccacagaaagggccacgagttcgagggcacccaccaccccctgggcaccaaggagggcgtggacgccgagcagagaatgcagcccaagatccccagccagcccccccccgtgcccgccaagaagagcagagagagactggccaacggcctgcaccccgtgcccatgggccccagcggcgccctgcccagccccgacgccccctgcctgcccgtgaagagaggcagccccgccagccccaccagccccagcgactgcccccccgccctggcccccagacccctgagcggccaggcccccggcagcccccccagcaccagaccccccccctggctgagcgagctgcccgagaacaccagcctgcaggagcacggcgtgaagctgggccccgccctgaccagaaaggtgagctgcgccagaggcgtggacctggagaccctgaccgagaacaagctgcacgccgagggcatcgacctgaccgaggagccctacagcgacaagcacggcagatgcggcatccccgaggccctggtgcagagatacgccgaggacctggaccagcccgagagagacgtggccgccaacatggaccagatcagagtgaagcagctgagaaagcagcacagaatggccatccccagcggcggcctgaccgagatctgcagaaagcccgtgagccccggctgcatcagcagcgtgagcgactggctgatcagcatcggcctgcccatgtacgccggcaccctgagcaccgccggcttcagcaccctgagccaggtgcccagcctgagccacacctgcctgcaggaggccggcatcaccgaggagagacacatcagaaagctgctgagcgccgccagactgttcaagctgccccccggccccgaggccatgtag

SEQ ID NO: 185681 - DNA, 1974 bp, Artificial Sequence
  derived and/or modified sequence
atgggcacctggatgggcctgctgaacaacaaggtgggcaccttcaagttcatctacgtggacgtgctgagcgaggacgaggagaagcccaagagacccaccagaagaagaagaaagggcagacccccccagcccaagagcgtggaggacctgctggacagaatcaacctgaaggagcacatgcccaccttcctgttcaacggctacgaggacctggacaccttcaagctgctggaggaggaggacctggacgagctgaacatcagagaccccgagcacagagccgtgctgctgaccgccgtggagctgctgcaggagtacgacagcaacagcgaccagagcggcagccaggagaagctgctggtggacagccagggcctgagcggctgcagccccagagacagcggctgctacgagagcagcgagaacctggagaacggcaagaccagaaaggccagcctgctgagcgccaagagcagcaccgagcccagcctgaagagcttcagcagaaaccagctgggcaactaccccaccctgcccctgatgaagagcggcgacgccctgaagcagggccaggaggagggcagactgggcggcggcctggcccccgacaccagcaagagctgcgacccccccggcgtgaccggcctgaacaagaacagaagaagcctgcccgtgagcatctgcagaagctgcgagaccctggagggcccccagaccgtggacacctggcccagaagccacagcctggacgacctgcaggtggagcccggcgccgagcaggacgtgcccaccgaggtgaccgagccccccccccagatcgtgcccgaggtgccccagaagaccaccgccagcagcaccaaggcccagcccctggagcaggacagcgccgtggacaacgccctgctgctgacccagagcaagagattcagcgagccccagaagctgaccaccaagaagctggagggcagcatcgccgccagcggcagaggcctgagccccccccagtgcctgcccagaaactacgacgcccagccccccggcgccaagcacggcctggccagaacccccctggagggccacagaaagggccacgagttcgagggcacccaccaccccctgggcaccaaggagggcgtggacgccgagcagagaatgcagcccaagatccccagccagcccccccccgtgcccgccaagaagagcagagagagactggccaacggcctgcaccccgtgcccatgggccccagcggcgccctgcccagccccgacgccccctgcctgcccgtgaagagaggcagccccgccagccccaccagccccagcgactgcccccccgccctggcccccagacccctgagcggccaggcccccggcagcccccccagcaccagaccccccccctggctgagcgagctgcccgagaacaccagcctgcaggagcacggcgtgaagctgggccccgccctgaccagaaaggtgagctgcgccagaggcgtggacctggagaccctgaccgagaacaagctgcacgccgagggcatcgacctgaccgaggagccctacagcgacaagcacggcagatgcggcatccccgaggccctggtgcagagatacgccgaggacctggaccagcccgagagagacgtggccgccaacatggaccagatcagagtgaagcagctgagaaagcagcacagaatggccatccccagcggcggcctgaccgagatctgcagaaagcccgtgagccccggctgcatcagcagcgtgagcgactggctgatcagcatcggcctgcccatgtacgccggcaccctgagcaccgccggcttcagcaccctgagccaggtgcccagcctgagccacacctgcctgcaggaggccggcatcaccgaggagagacacatcagaaagctgctgagcgccgccagactgttcaagctgccccccggccccgaggccatgtag

SEQ ID NO: 185682 - DNA, 3744 bp, Artificial Sequence
  derived and/or modified sequence
atggaggacgctggggccgccggccctggaccagagcccgagcctgagccagagccagaaccagagccggccccggaacctgaaccggagcccaagccaggggccggtacgagcgaggccttttcacgactttggaccgacgtcatgggcattctggatggcagcctcggcaacatcgacgacctcgcgcaacagtacgcggattattataacacatgctttagcgatgtgtgcgaacggatggaagagttacgcaagcggagggtcagccaggatctcgaagtggaaaaacctgacgcctcccccactagcctgcaactgcggtcccagattgaggagagtcttggcttctgcagtgcagtgtcaactcctgaggtagagcgtaaaaatcccctgcacaagagcaactcggaagactccagcgtgggcaagggagactggaagaagaagaataaatacttctggcagaacttccgcaagaaccaaaaaggcattatgaggcagacttcaaaaggggaagatgttggttatgtcgcttccgaaataaccatgtccgacgaggagcggatacagctgatgatgatggtgaaggaaaagatgatcaccattgaggaagcacttgctcggttgaaagaatatgaagcccagcaccgacagagtgccgcactggatcctgccgactggccagacgggtcctacccgactttcgacgggtccagtaattgtaacagccgcgagcaaagtgacgacgagaccgaggaatctgtgaaattcaaacggcttcacaaacttgtgaacagcacccggagggtgcggaaaaagctgatccgggtggaagaaatgaagaaaccctcaaccgaagggggggaggagcatgtgtttgagaattctcctgtgctcgatgagaggtcagcactgtattcaggggtgcataaaaaacctctttttttcgacgggtcccccgaaaagcctcctgaggatgacagcgatagcttgactacttcaccctcgtcttcttcactggatacctggggcgcgggtcgcaaactcgtcaagaccttctccaagggggagagccgaggcttaattaagccaccaaaaaagatgggaacctttttcagttatcctgaagaggagaaggcccagaaggtgtccagaagcttgaccgagggggaaatgaagaagggacttggcagcctcagtcacggacggacatgttccttcggggggtttgatctgacaaatcgatcattacatgtcgggtctaataactcagaccccatgggaaaggagggtgatttcgtctataaagaagtgattaagagtcccacggccagccgcatttcgctgggcaagaaggtgaaatcagttaaggaaaccatgcgcaaaaggatgagtaaaaagtactctagctcagtatctgagcaggattccggcctcgatggtatgccagggagccctcctccttctcagccagatcctgaacatctggataagccgaagcttaaggccgggggatccgtggagtccctcaggagcagcctttccggacaatcgagcatgtcgggacaaacagtctcaacaaccgattcaagcacaagcaatcgagagtcagtcaaatccgaggacggtgacgacgaagagccaccctatagaggacctttttgcggcagggcacgggtacacaccgatttcaccccctcaccatacgacacggatagcctgaagttgaagaaaggcgacatcatcgacattatcagtaaacccccaatgggaacatggatgggactattaaacaacaaagtgggaacatttaaatttatatacgtggatgttctgagcgaagatgaagaaaagcctaaacgtcccactaggcgcaggcgcaagggcaggcccccacagcccaaatctgtcgaagatctcctcgatagaattaacctcaaggaacatatgcctacttttctgttcaacggttatgaagacctggataccttcaagcttctggaggaggaggatctcgacgagctgaacattcgcgaccctgagcatagggctgtgttgttgacggccgtggaactcttgcaagagtacgacagtaactctgatcagtccgggtcccaggagaaacttctcgtcgactcacaaggcttgtcggggtgctctcccagggactcaggatgttatgaaagctcagaaaatttagagaatggcaagactagaaaggcttcgctcctgtccgctaagagctcaacagaaccttcacttaagtcttttagtaggaatcagcttggaaactaccccacacttcctctgatgaagtccggggacgcgctcaaacaagggcaggaagagggccggttgggaggggggctcgcccctgacacaagtaagagctgcgacccccctggggtaactgggctgaataaaaacaggagatcactcccggtgtctatttgccggtcttgtgagacactggagggtccacagactgtggatacctggcctcggagtcattcactggatgatttacaggtggaaccaggggccgaacaggacgtccctaccgaagtaactgaaccgccgccgcaaattgtgcccgaagtgccacagaaaaccacagcgagtagcactaaggctcagcccctggaacaggattctgcagtggacaacgccctcctgctgacacagtctaagcgattcagcgagcctcagaaactcaccacaaaaaagctggaaggctccatcgctgcctcggggcgtgggctgtctcctcctcagtgcctgcccaggaattatgatgctcagccaccaggtgccaagcacggactggcgcgtactccccttgaaggtcaccggaaagggcatgaatttgaggggactcaccacccactcggtaccaaggagggcgtggacgcggagcagagaatgcaacccaaaatcccttctcagccccctcctgtcccagcgaagaagtcccgcgaacgcctggccaatggcctgcaccccgtccccatgggaccttcgggcgccctcccatcaccagatgctccttgtttgcccgtcaaaaggggatctccagcctctcctacttcgcccagcgattgcccccccgcgcttgccccacgcccgttgtccggacaagcacccggctcaccaccatccacgagacctccaccttggctgtccgaattgcccgagaatacttcattgcaggagcatggcgtgaaactcgggcccgcactcacccggaaagtgagctgtgccagaggtgtcgacctggagacactgacagagaataaactgcatgctgagggtatcgatttaaccgaagaaccctattcggataagcacgggcgctgcggaatccccgaggccctggtgcagagatacgccgaggatctcgaccagccagaaagagatgtggccgctaacatggaccagatcagggtaaaacaactgcggaaacaacatagaatggccatcccaagcggagggcttaccgaaatctgtcggaaacctgtgagcccaggttgtatctcatcagtgtccgactggctcataagcattggtttgcctatgtatgccgggacattgtctacagcaggctttagtactctctcgcaggttccttcactgtcgcatacctgccttcaggaagcaggcatcactgaggaaagacatatccgcaagttgctatctgccgcgcgacttttcaagctgccgcctggtcctgaggcaatgtag

SEQ ID NO: 185683 - DNA, 1974 bp, Artificial Sequence
  derived and/or modified sequence
atgggcacctggatgggactgctgaacaacaaagttggcacattcaaatttatttatgttgatgtgctttccgaagatgaggaaaaaccgaagagaccgaccaggcgtagaaggaaggggcgacccccacagcctaagtccgtggaggatcttctggacaggatcaatctcaaagagcatatgcccacattcttgttcaatgggtacgaggacctcgacacatttaaactccttgaagaggaggatctggacgaattgaacattcgggatccggagcaccgagctgtcctgctgactgccgtagagctgctgcaggagtatgattcaaacagcgatcagagcggtagccaagagaaacttttagtggacagccagggactctcgggatgctcccccagagatagcggctgctatgagtcctccgaaaaccttgagaatggcaagactaggaaagctagtctgctgtcagctaaatcaagtaccgagccatcactgaaatctttcagtagaaatcaactcggaaattaccccaccctgcccctgatgaagtccggggatgcacttaaacagggacaggaggaggggcggctgggaggtggcctagcccccgacactagcaagagttgtgatcctcccggcgtgacggggctcaataagaatcgccgctcactgcccgtaagtatatgtcgatcgtgcgaaacgctcgagggcccccaaacagtggatacttggccccgctcacattccctcgatgacctgcaggtggagcccggtgcagagcaggacgtgcccactgaggtcaccgagccccctccacagatcgtaccagaggtccctcagaagaccacagcgagcagcaccaaggcgcaaccactggagcaagactcagccgtggacaatgccctacttctgacccagtccaaacggttttcagagccccagaagttaacgacaaaaaagctggaggggtccatcgctgcctcaggaagaggtctaagccctccacagtgcctccctaggaattacgatgcacagccaccaggggccaagcacgggctggctaggacccccctggaaggtcacaggaagggtcacgagtttgaaggtacacatcatccgctgggaacaaaagagggagttgacgctgagcagcgaatgcagccaaaaatcccatcacagccgcctccagtcccggcaaaaaagtctagagaacgcctggccaatgggctgcatccagtgccaatgggacccagcggagcactccctagtccagatgctccatgccttccggtaaagcgcggcagccccgcttcaccaaccagccccagcgattgtcctcccgctctggcccctagaccattatctgggcaggccccgggatctccccccagcacacggccccccccctggctgtcagagttgcccgagaacaccagcttgcaggaacacggtgtgaaactgggacccgccttgaccagaaaggtatcctgcgctagaggagtcgatttagagaccctgacagagaataaactgcacgccgaaggcattgatctgaccgaggagccctatagtgacaagcatggaagatgcgggatcccagaggcattagtgcagcgttatgccgaggatctggaccaaccagagcgagacgtggccgctaatatggatcaaattagagtgaaacagttgaggaaacagcacaggatggcgatcccttctggaggactgacagagatctgtcgcaaacctgtttctccaggctgtatctcatctgtcagtgactggttgatctcaataggactgccaatgtacgccggaaccttatcaaccgcagggtttagcacattgagccaggtgcctagcttaagccacacctgcctccaggaggctggcattacagaggagcggcacatacgtaagcttctttcagctgccagactcttcaagcttccacccggtcctgaagcaatgtag

SEQ ID NO: 185684 - DNA, 3744 bp, Artificial Sequence
  derived and/or modified sequence
atggaggatgctggagctgctggccctggccctgagcctgagcctgagcctgagcctgagcctgagcccgcccctgagcctgagcctgagcccaagccaggagctggcaccagcgaggccttcagccggctgtggacagatgtgatgggcatcctggatggcagcctgggcaacattgatgacctggcccagcagtatgctgactactacaacacctgcttcagtgatgtgtgtgagaggatggaggagctgaggaagagaagagtgtcccaggacctggaggtggagaagccagatgccagccccaccagcctgcagctgcggagccagatcgaggagagcctgggcttctgcagcgctgtgtccaccccagaggtggagaggaagaaccccctgcacaagagcaacagcgaggacagctctgtgggcaagggggactggaagaagaagaacaagtacttctggcagaacttcaggaagaaccagaagggcatcatgaggcagaccagcaaaggagaagatgtgggctacgtggccagcgagatcaccatgtctgatgaggagcgcatccagctgatgatgatggtgaaggagaagatgatcaccatcgaggaggccctggcccggctgaaggagtatgaggcccagcaccggcagagcgctgccctggaccctgctgactggccagatggcagctaccccacctttgatggcagcagcaactgcaacagccgggagcagagtgatgatgaaacagaggagagcgtgaagttcaagaggctgcacaagctggtgaacagcaccaggagagtgaggaagaagctgatccgggtggaggagatgaagaagcccagcacagagggcggggaggagcacgtgtttgagaacagccctgtgctggatgagaggtctgccctgtacagcggcgtgcacaagaagcccctcttctttgatggcagccctgagaagcccccagaagatgacagcgacagcctgaccaccagccccagcagcagcagcctggacacctggggcgccggcaggaagctggtgaagaccttcagcaagggggagagccggggcctcatcaagccacccaagaagatgggcaccttcttctcctacccagaggaggagaaggcccagaaggtgagccgcagcctgacagaaggagagatgaagaagggcctgggcagcctgagccacggccgcacctgcagctttggaggctttgacctgaccaacagaagcctgcacgtgggcagcaacaacagcgaccccatgggcaaggagggggactttgtgtacaaggaggtgatcaagagccccacagccagccgcatcagcctgggcaagaaggtgaagtctgtgaaggagaccatgaggaagaggatgagcaagaagtacagcagctctgtgtctgagcaggacagcggcctggatggcatgcctggcagccccccacccagccagcctgaccctgagcacctggacaagcccaagctgaaggccggcggctctgtggagagcctgcggagcagcctgagcggccagagctccatgagcggccagacagtgtccaccacagacagcagcaccagcaaccgggagagcgtgaagtcagaagatggagatgatgaggagcccccctaccggggccccttctgtggccgggcccgggtgcacacagacttcacccccagcccctatgacacagacagcctgaagctgaagaagggggacatcatcgacatcatcagcaagccacccatgggcacctggatgggcctgctgaacaacaaggtgggcaccttcaagttcatctacgtggatgtgctgtctgaagatgaggagaagcccaagaggcccaccaggagaagaaggaagggccggcccccccagcccaagtctgtggaggacctgctggaccgcatcaacctgaaggagcacatgcccaccttcctgttcaacggctatgaggacctggacaccttcaagctgctggaggaggaggacctggatgagctgaacatccgggaccctgagcacagagctgtgctgctgacagctgtggagctgctgcaggagtatgacagcaacagcgaccagagcggcagccaggagaagctgctggtggacagccagggcctgagcggctgcagcccccgggacagcggctgctatgagagcagcgagaacctggagaatggcaagaccaggaaggccagcctgctgagcgccaagagcagcacagagcccagcctgaagagcttcagcaggaaccagctgggcaactaccccaccctgcccctgatgaagtctggagatgccctgaagcagggccaggaggagggccgcctgggcggcggcctggccccagacaccagcaagagctgtgaccccccaggagtgacaggcctgaacaagaacagaagaagcctgcctgtgtccatctgccgcagctgtgagaccctggagggcccccagacagtggacacctggcccaggagccacagcctggatgacctgcaggtggagcctggagctgagcaggatgtgcccacagaggtgacagagcccccaccccagatcgtgcctgaggtgccccagaagaccacagccagcagcaccaaggcccagcccctggagcaggacagcgctgtggacaatgccctgctgctgacccagagcaagcgcttcagcgagccccagaagctgaccaccaagaagctggagggcagcattgctgccagcggccggggcctgagccccccccagtgcctgcccaggaactatgatgcccagcccccaggggccaagcacggcctggcccggacccccctggagggccacaggaaaggacatgaatttgagggcacccaccaccccctgggcaccaaggagggcgtggatgctgagcagaggatgcagcccaagatccccagccagcccccacctgtgcctgccaagaagagccgggagcggctggccaacggcctgcaccctgtgcccatgggccccagcggggccctgcccagcccagatgccccctgcctgcctgtgaagaggggcagccctgccagccccaccagccccagcgactgccccccagccctggccccccggcccctgagcggccaggcccctggcagcccccccagcacccggcccccaccctggctgtctgagctgcctgagaacaccagcctgcaggagcacggcgtgaagctgggccctgccctgaccaggaaggtgtcctgtgcccggggcgtggacctggagaccctgacagagaacaagctgcatgctgagggcatcgacctgacagaggagccctacagcgacaagcacggccgctgtggcatccctgaggccctggtgcagagatatgcagaggacctggaccagcctgagagagatgtggccgccaacatggaccagatccgggtgaagcagctgaggaagcagcacaggatggccatccccagcggcggcctgacagagatctgcaggaagcctgtgtccccaggctgcatcagctctgtgtctgactggctgatcagcatcggcctgcccatgtatgccggcaccctgagcacagctggcttcagcaccctgagccaggtgcccagcctgagccacacctgcctgcaggaggccggcatcacagaggagcggcacatcaggaagctgctgtctgctgcccggctcttcaagctgcccccaggccctgaggccatgtag

SEQ ID NO: 185685 - DNA, 1974 bp, Artificial Sequence
  derived and/or modified sequence
atgggcacctggatgggcctgctgaacaacaaggtgggcaccttcaagttcatctacgtggatgtgctgtctgaagatgaggagaagcccaagaggcccaccaggagaagaaggaagggccggcccccccagcccaagtctgtggaggacctgctggaccgcatcaacctgaaggagcacatgcccaccttcctgttcaacggctatgaggacctggacaccttcaagctgctggaggaggaggacctggatgagctgaacatccgggaccctgagcacagagctgtgctgctgacagctgtggagctgctgcaggagtatgacagcaacagcgaccagagcggcagccaggagaagctgctggtggacagccagggcctgagcggctgcagcccccgggacagcggctgctatgagagcagcgagaacctggagaatggcaagaccaggaaggccagcctgctgagcgccaagagcagcacagagcccagcctgaagagcttcagcaggaaccagctgggcaactaccccaccctgcccctgatgaagtctggagatgccctgaagcagggccaggaggagggccgcctgggcggcggcctggccccagacaccagcaagagctgtgaccccccaggagtgacaggcctgaacaagaacagaagaagcctgcctgtgtccatctgccgcagctgtgagaccctggagggcccccagacagtggacacctggcccaggagccacagcctggatgacctgcaggtggagcctggagctgagcaggatgtgcccacagaggtgacagagcccccaccccagatcgtgcctgaggtgccccagaagaccacagccagcagcaccaaggcccagcccctggagcaggacagcgctgtggacaatgccctgctgctgacccagagcaagcgcttcagcgagccccagaagctgaccaccaagaagctggagggcagcattgctgccagcggccggggcctgagccccccccagtgcctgcccaggaactatgatgcccagcccccaggggccaagcacggcctggcccggacccccctggagggccacaggaaaggacatgaatttgagggcacccaccaccccctgggcaccaaggagggcgtggatgctgagcagaggatgcagcccaagatccccagccagcccccacctgtgcctgccaagaagagccgggagcggctggccaacggcctgcaccctgtgcccatgggccccagcggggccctgcccagcccagatgccccctgcctgcctgtgaagaggggcagccctgccagccccaccagccccagcgactgccccccagccctggccccccggcccctgagcggccaggcccctggcagcccccccagcacccggcccccaccctggctgtctgagctgcctgagaacaccagcctgcaggagcacggcgtgaagctgggccctgccctgaccaggaaggtgtcctgtgcccggggcgtggacctggagaccctgacagagaacaagctgcatgctgagggcatcgacctgacagaggagccctacagcgacaagcacggccgctgtggcatccctgaggccctggtgcagagatatgcagaggacctggaccagcctgagagagatgtggccgccaacatggaccagatccgggtgaagcagctgaggaagcagcacaggatggccatccccagcggcggcctgacagagatctgcaggaagcctgtgtccccaggctgcatcagctctgtgtctgactggctgatcagcatcggcctgcccatgtatgccggcaccctgagcacagctggcttcagcaccctgagccaggtgcccagcctgagccacacctgcctgcaggaggccggcatcacagaggagcggcacatcaggaagctgctgtctgctgcccggctcttcaagctgcccccaggccctgaggccatgtag

SEQ ID NO: 185686 - DNA, 3744 bp, Artificial Sequence
  derived and/or modified sequence
atggaggacgccggcgccgccggccccggccccgagcccgagcccgaacccgaacctgagcctgagcctgcaccagaacctgaaccggagccaaaacctggcgcaggaacttctgaagcctttagtcgtctgtggactgatgtgatgggcatactagacgggtccctgggtaacatcgacgacctggctcaacaatatgccgactactacaacacatgtttttctgatgtttgcgagaggatggaggaactgcggaaacgacgggttagccaggatctcgaggtggagaaaccggatgcatcacccacttccttacagctgcggtcccagatcgaggaatccctgggcttttgctctgcagtttctaccccggaagtggagcggaagaatccccttcataaaagtaatagcgaagattcttctgtagggaaaggtgactggaagaaaaagaacaaatacttctggcagaatttcaggaagaatcagaagggcataatgagacagacgagtaagggcgaggacgtaggatacgttgctagcgagattacaatgtcggacgaagaacggattcaactgatgatgatggtgaaggaaaaaatgatcaccattgaggaagccctagcaagactgaaagaatacgaggcccaacatcggcagtctgccgcactcgaccctgccgattggccggacggctcgtatccgacgtttgatggatccagcaactgcaactcccgcgaacagtccgacgatgagactgaagaatcagtgaaattcaaaaggcttcacaagcttgttaatagcaccagacgggtgcgaaaaaaactcatacgggttgaggaaatgaagaaacccagcacggagggaggggaagagcacgtgttcgagaatagtcctgtgctggatgagcgttctgctctctactctggtgttcataagaaacccctatttttcgacggctcaccggaaaaacctccagaagacgactctgactcccttaccacttccccaagttcgagctccctggacacttggggcgcgggacgaaaactggtaaaaacttttagtaagggagagtcaagggggctcataaaaccccccaagaaaatgggaacttttttcagctatccagaggaggaaaaggcacagaaggtgtcaaggagcctgactgagggggagatgaagaagggtctgggcagcttgagtcatggtcgcacatgttcatttggcggatttgacctgacaaataggtcattgcatgtggggagtaataactcggatcccatgggcaaagagggtgactttgtttacaaggaagtaatcaaaagccccaccgcaagccgtataagtttgggtaagaaagtgaagagcgttaaagagacaatgagaaaaaggatgtcaaaaaaatactcctcttctgtctccgaacaggatagcgggttagatggaatgccaggttccccgccaccgtcccaacccgatcctgaacatctagataaaccgaaactgaaagccgggggctctgtggagagcctacgctcatcgctctcaggccagtcatcgatgtccggacagacagtatctaccaccgattcttccacttctaacagggaatccgttaagtcggaggatggagatgatgaagaacccccgtatagggggccattttgtggtcgcgcccgggtacacacagacttcaccccttcaccgtatgatacggacagcctgaaactgaaaaagggcgacatcatcgacataatctctaaaccacccatggggacctggatgggactactcaacaacaaggtggggactttcaagttcatatatgtcgatgtcttaagcgaggatgaggagaaaccgaagagacctactcgacgaaggcgaaagggccggcctccccagccgaaatctgtagaggacctattggacagaatcaaccttaaggagcacatgccaacatttctgtttaatgggtacgaggacttagatactttcaaactgctggaagaggaagacctggacgaacttaatatacgggaccctgagcaccgagcagttttattgactgccgtcgaactcttgcaggagtatgacagcaattctgaccagtctggatctcaggaaaagctcctggtagactcccagggcctttccgggtgcagcccaagagactccggctgctatgaatcaagcgagaacctggaaaatggcaagacacgcaaggcctctctgttatccgctaagtccagtaccgaaccctctctgaaaagtttttcacggaatcaacttggtaattatcccaccctcccactgatgaaatcaggggacgccctcaagcagggacaagaggaggggcgcctgggcggcggtctggcgcctgacacgtcgaaatcctgtgatccaccaggcgttactggtctcaacaagaacagaaggagccttccagtgagcatttgtcggtcctgtgaaaccctcgaaggtccacaaacagtggatacctggccacggagccacagtctcgacgatctgcaagtggagccaggagccgaacaggacgtgccaacagaagttacagagcccccacctcaaattgtgcctgaggtccctcagaagactaccgcaagctcgacaaaggcgcagccacttgagcaggattctgctgtggataacgccctactcctgacccagtcaaaaaggttcagtgaacctcagaagctcaccacaaagaaacttgagggttccatcgccgccagcggaagaggtttgtcacccccccaatgcctccccaggaactatgatgcacagccgccaggtgccaaacatggcctggccaggactcccttggaggggcatcggaagggccacgagttcgaaggcactcaccatccactggggacaaaggaaggcgttgacgcggagcagcgaatgcagcctaagattcccagtcagccacctcccgtgccagccaagaaatccagagagcgactggcaaatgggttgcacccagtacccatggggccatcaggagccctgcctagtcccgacgccccctgcctgcccgtgaagcgggggtctccagcttccccaacttctccatcagactgcccaccggcactggcccccagacccctgtccggccaggcccccggttccccaccctctacccgaccgcccccatggctcagcgagttgccagagaacacgtcactgcaggagcacggagtgaagctagggcccgcgctgacacgcaaggtgagctgcgccaggggggtggacttggaaactctgaccgagaataagctccatgctgaagggatcgatttgaccgaagaaccttactccgacaagcatggccgctgtggaattcctgaagccctcgtgcaacgctacgcagaagacctcgaccagcccgagagagatgtcgctgcgaacatggaccagataagggtcaagcagctccgcaaacagcaccgcatggccattccaagtggcggcctcaccgagatttgtaggaagccggtttcacccgggtgcatcagctccgtgtccgactggctgatctccatcggccttccaatgtacgctgggactctctcaacggccggattctcaactctcagtcaagtgcccagcctgtcccacacttgtctccaggaagctggtattaccgaggagcgccacataagaaaacttctttcagcagcccgcttgtttaagttgccccccggcccagaggccatgtag

SEQ ID NO: 185687 - DNA, 1974 bp, Artificial Sequence
  derived and/or modified sequence
atgggcacctggatgggcctgctgaacaacaaggtgggcaccttcaaattcatatatgtcgacgtgctgtcagaagacgaggagaaaccaaaaaggccgacccggaggcgacgcaagggtagacccccccagcctaaaagcgtcgaagacctcctcgacagaatcaatcttaaagagcacatgcccactttcctctttaacggatatgaagacctcgatactttcaagctgcttgaagaggaggatctcgacgagctgaacatccgggatcctgaacatcgcgccgtgctattgaccgccgttgagctgcttcaggagtacgattcaaactccgaccagtccggatctcaggaaaaacttctggtggacagtcagggcctcagcggctgcagccctagggactcagggtgctatgaaagctcagagaaccttgagaatgggaagacgcggaaagcctccctgctgtctgctaagtctagcaccgagcctagcttaaagtcttttagccgaaatcagctgggaaactaccccaccttacctctgatgaagtccggagatgctctgaaacaggggcaagaggaggggcgcctgggaggtggccttgcgcctgacacttccaagtcatgtgacccccctggagtcacagggctgaataaaaatcgccggagtctgccagtctctatctgtagaagctgcgaaactctggagggaccccagacagtagatacgtggccaaggagccacagcctcgacgatctacaggtggagccaggcgccgagcaggacgttcccacagaggtgaccgaaccgcccccccagatcgtgccagaagtgccacaaaaaaccaccgcaagtagcacaaaggcacagcccctcgaacaagattctgctgtggacaatgctcttctcctgacccaaagtaagagattctcagagccccagaagctgacaacaaaaaagctcgaaggctcaatagcagcgagcggcagaggactgagtccacctcagtgcttacccaggaattacgatgcccagccgcctggcgccaaacacggcttggcccggactccacttgaggggcataggaaaggtcacgaattcgaggggacgcatcaccccttaggtacgaaggagggagtggatgccgagcaaaggatgcaaccaaaaatcccatcgcagcctccgcccgttcccgcaaagaagtcccgcgagcgcctggccaatgggctgcaccctgtccccatggggcccagcggagcattgccgtctccggacgctccttgcctgcctgtgaagcgtgggtccccagcctctcctacttcccctagcgactgtcctcctgctctggccccacgtcccttgagcgggcaggccccaggaagccctcctagcacccggccccctccatggttgtcggagcttcccgagaacacctctctgcaggaacacggcgttaaacttggtccagcattgactaggaaagtgtcttgcgcaaggggagttgacctggagaccctcaccgagaataagctgcatgccgaaggcattgatttaaccgaggagccatactccgacaaacacggacggtgcggaatccccgaggctctggttcagcggtatgcagaggacctggatcagcctgagcgggatgtggctgctaatatggaccagattcgggtgaagcagttgcgcaagcagcacagaatggctatcccatccggagggttgacggagatctgccgtaaacccgtgagcccaggttgtatttctagtgttagtgactggctaatctctattgggctgccgatgtacgccggtacactgagcacagccggatttagtaccttatcccaggtccctagcttgtcacacacatgtctccaagaggcgggcatcacggaagagaggcacattaggaaactattgtcagctgctcggctctttaagctgccaccagggcctgaggccatgtag

SEQ ID NO: 185688 - DNA, 3744 bp, Artificial Sequence
  derived and/or modified sequence
atggaggatgccggtgcagcgggaccagggcctgagcccgaacccgagcccgagcccgagccagagcccgcacctgagcctgaacctgaacccaaaccgggagctgggacaagcgaggcttttagccggctctggaccgatgttatgggaattttggacggatccctggggaatattgatgatttggctcaacaatacgcagactactataatacatgcttttccgacgtttgtgagaggatggaggagctgcgcaagagacgagtttctcaggacctggaggttgaaaagccagacgcctcccccacttcattgcagctccgctcccaaatcgaggaaagccttggcttttgtagtgctgtcagtacccccgaggtcgagcgtaagaatcccctacacaaatccaatagtgaagattctagtgtgggtaaaggcgattggaaaaagaagaacaagtacttctggcagaatttcagaaaaaaccagaaaggcattatgcgccagaccagcaagggagaagatgtcgggtacgtcgcgagtgagatcaccatgtccgatgaggagaggatccagctcatgatgatggtgaaggaaaagatgatcacgattgaggaggcgctggccaggttaaaggaatacgaggcccagcaccggcaatcggcggcattagacccagctgactggccggacggttcttacccaacatttgacggtagctcaaactgtaatagccgagagcagagcgatgacgagaccgaggagtcagttaagttcaagaggttgcacaaactggttaatagtacccgcagggtccgaaagaaactcatacgcgttgaggagatgaagaagcccagcaccgaaggtggtgaggaacacgtgtttgagaacagcccagtgctcgacgaaagatcagccctgtacagcggtgtgcacaaaaagccacttttcttcgacggcagtccagaaaagccacccgaggatgactccgattcccttacaacatctccttcctcctctagcctggatacgtggggcgcaggcagaaagcttgttaaaaccttcagtaagggtgaatcaagaggactcatcaagccccctaaaaaaatgggtactttcttcagctatcctgaggaggagaaagcacagaaagtgtcacgctccttaacggagggggaaatgaaaaaggggctggggtctttaagccacggccgtacatgttcgtttggaggcttcgatttgaccaatagaagcttgcacgttggatctaacaactcggatcctatggggaaagaaggggatttcgtgtacaaggaagtcatcaaaagccccacggccagccggatctccctgggtaagaaggtgaaatccgtgaaggagacgatgagaaaacgaatgagcaagaagtacagcagttctgtgagcgaacaagacagcggcctggacggtatgcccggttcacctccaccgtcacagcccgacccagagcacctcgacaagccaaaactcaaggccggtggcagcgtagagagcctccggtcaagcctttcaggacaaagtagtatgagtggacaaacagtgtcaaccacggactcatccactagtaacagagaaagcgtgaaatctgaggatggtgacgatgaggaacccccatataggggtcccttttgtggcagggctagagtgcatacagacttcactccgagtccctacgacacagatagcctgaaattgaagaaaggtgatataattgacataataagtaagcctcctatgggaacctggatgggactgctgaacaataaggtgggcacctttaaattcatctacgtagacgtgttaagcgaggatgaggagaagcccaaacgtcctacccggcgacgtaggaagggacggcctcctcagccaaaatccgttgaggatttactcgaccgcattaacctaaaagagcatatgcctactttcctgtttaacggctacgaggatttggacacatttaagctactcgaggaggaggacctggatgaactgaacatcagggatcccgagcatagggctgttctcctgaccgcagtggaactgcttcaagagtatgacagtaacagcgaccagtctggttcccaagagaagctgttagtagactcacagggactgagtggctgctcacccagagatagtggctgctacgaatcaagcgagaatctggagaatggcaagacacgcaaggcctctctgctcagcgccaagagctccaccgagccctctctgaagtctttttctcggaaccaactggggaattaccccaccctcccacttatgaaatccggagacgccttaaaacagggccaggaggaaggcaggctgggtggcggactggcacctgacacaagcaaaagttgcgacccaccaggagttaccggcctcaataagaataggcgctccctgccagtcagtatttgtcgtagttgcgaaaccctggaggggccacagaccgtggatacgtggcctaggtctcactctctcgacgatctgcaggtggaacccggagccgaacaggacgtgccaacagaagtgactgaaccacccccacagatcgtgcccgaggtgccccagaagaccacagcgagctccacaaaagcgcagccacttgaacaggatagtgcagtggataatgccttattactgacccagagcaagcgtttttccgagcctcagaaactgaccaccaaaaagttagaagggagcatagcagctagcggcagaggactgagcccccctcagtgcttacccaggaactacgatgctcagccacccggtgccaaacatggcctcgcgcgtacacccttagagggccaccgcaaggggcacgagtttgaaggaacccatcatcctctggggacaaaagagggagtggacgccgaacaacgaatgcagccgaaaatccccagccaacccccacctgttccagcaaaaaaatctagggagcgtctggccaatggacttcaccccgtgccaatgggcccttctggtgccctaccctctcctgatgcaccatgcttacccgtaaaacgcggaagcccagcatctccaacatctcccagcgactgcccacctgcgcttgccccaagaccgctgtccggacaggccccaggctctcctccttctacccgtcctcctccctggctcagcgaactcccagagaacacttccctgcaggagcacggcgttaagttagggcctgctctcacccggaaggtctcctgtgcaagaggcgtcgacctagagaccctgacagaaaacaagttgcacgccgagggtattgatctaactgaagagccgtactcagacaagcacggcaggtgcggcatcccggaggccttggtgcagcggtacgcagaagatttggatcagccggaacgggatgtggctgcaaatatggatcagatcagggttaagcagctacgcaaacagcacaggatggctattccttccggtggcctcaccgaaatttgtcgcaagcccgtctcgccgggttgcatcagtagcgtgagcgactggctcattagcattggtttgcccatgtacgctggcacccttagcacagctggcttttccacattgagccaagtcccctctctttcccacacatgcctgcaggaagccggtattaccgaggagagacacatccggaagttgttgagcgctgccaggctcttcaagctgccccctggacccgaggccatgtag

SEQ ID NO: 185689 - DNA, 1974 bp, Artificial Sequence
  derived and/or modified sequence
atgggaacctggatgggactgttgaataacaaggttggcaccttcaaattcatttacgttgatgtgctatccgaggatgaggaaaaaccaaagcggccaacaagacggagacggaagggtagaccaccccaacccaaatccgtcgaagaccttctggatcgtattaatctaaaggaacatatgccaacatttcttttcaatggttacgaagatctagacacctttaagttactcgaagaagaggatctggatgaactcaatatcagagaccctgagcatcgtgcggtcttgctgactgccgtcgaactgctgcaggaatacgactccaatagtgatcaatctggttcccaggagaaactcctcgtggacagtcaggggctctctggctgcagccctcgcgattccggttgctacgagtcatctgagaatttagaaaatggcaaaaccaggaaggcatccctcctatcggccaaatcttctaccgaaccttccttaaaaagtttttcacggaatcaacttggcaattatcctacattacccctcatgaagagtggagacgccctgaaacaaggccaggaagaaggaaggttgggaggcggattggctccggataccagtaagtcctgcgatcctcctggggtcacaggacttaataagaataggaggagtctgcccgtgagcatctgtcgctcctgcgagacattggagggccctcagaccgtggatacttggcctagaagccatagcttggacgatcttcaggtagagccaggagccgagcaggatgtgccaactgaggtcacagaacccccacctcagatcgtgccagaggtgccgcagaagactaccgcatcctctactaaggctcaaccactcgagcaggatagtgccgtggataatgcccttctgctcactcagtctaagaggtttagtgagccacagaaactgactactaagaagctagaggggtctatcgccgcttccggtcggggtctgtctccaccgcagtgcctgcccaggaactatgatgcccaacccccaggggcaaagcacggactggccagaaccccactcgagggccacagaaagggacatgagttcgagggcacccatcaccctttaggaacaaaggaaggcgtggatgccgagcaaaggatgcagcccaaaattccctcccagccaccccctgtgccagcaaagaagtctagagagcgactggctaacggcctgcacccagtccccatgggtccttcaggcgctcttcccagccccgatgctccttgtctccccgttaaaagaggctcacccgcttctcccaccagcccctccgattgtcctcccgctcttgcaccacgtcccctctccggacaggctccagggtccccgccatccactaggccgccaccatggttaagcgaattaccagagaatacttccttacaagaacatggcgtgaagttgggacctgcattgacccggaaggtgtcctgcgctagaggagtcgatttggagacactcacagagaataaattgcacgcagagggtatagaccttacggaagagccttattccgacaagcacggccgatgtggaatccccgaagctctggtccaaaggtacgccgaagacctcgaccaacccgaacgcgacgtggctgcgaacatggaccaaatccgggtgaaacagctgcgtaagcaacaccgaatggcaataccttctggaggactgacagagatctgtcgtaagcctgtttctccaggatgtattagctcagtgtccgattggctgatctcaatcgggctgcctatgtatgctggcacgctgagcacagcgggttttagcactcttagccaggttcctagcctgtcacacacatgtcttcaagaggccggaatcaccgaggaaagacacatccggaagctgctgtcagccgctagactatttaaactacctcccggaccagaggcaatgtag

SEQ ID NO: 185690 - DNA, 7711 bp, Artificial Sequence
  derived and/or modified sequence
attttgaagagaggggtcccggggagctccctccaagatctagaggctccgcggccacccctgccgggtcctgccaagacttgctagaaggaacgagtcgcgtgccttagttagttggttcccgtcacaggaagaaacgcctttgcagtgggtttaattgcttctgggccgagcgaattccccgccgtacaactcagtggtgcggactttgcctcctgctaccctgttgctgcgccgagcggggtgggaaagtttctggagttgtcagtcgcgcagcccgtggccacctagacccgaggtgcgggcgcctgcgaagggcccccgcggggtggccggggccgccggggcatgcagcgcgggggcgcggctcggtgacgccgcgggcggggacccggcatccgggcaggctgcgcgcgggtgcggggcgagggcgccgcggggactgggacgcacggcccgcgcgcgggacacggccatggaggacgcgggagcagctggcccggggccggagcctgagcccgagcccgagccggagcccgagcccgcgccggagccggaaccggagcccaagccgggtgctggcacatccgaggcgttctcccgactctggaccgacgtgatgggtatcctggacggttcactgggaaacatcgatgacctggcgcagcagtatgcagattattacaacacctgtttctccgacgtgtgcgagaggatggaggagctgcggaaacggcgggtttcccaggacctggaagtggagaaacccgatgctagccccacgtcacttcagctgcggtcccagatcgaagagtcgcttggcttctgtagcgccgtgtcaaccccagaagtggaaagaaagaaccctcttcataaatcaaactcagaagacagctctgtaggaaaaggagactggaagaagaaaaataagtatttctggcagaacttccgaaagaaccagaaaggaataatgagacagacttcaaaaggagaagacgttggttatgttgccagtgaaataacgatgagcgatgaggagcggattcagctaatgatgatggtcaaagaaaagatgatcacaattgaggaagcacttgctaggctcaaggaatacgaggcccagcaccggcagtcggctgccctggaccctgctgactggccagatggttcttacccaacgtttgatggctcatcaaactgcaattcaagagaacaatcggatgatgagactgaggagtcggtgaagtttaagaggttacacaagctggtaaactccactcgcagagtcagaaagaaactaattagggtggaagaaatgaaaaaacccagcactgaaggtggggaggagcacgtgtttgagaattcgccggtcctggatgaacggtccgccctctactctggcgtgcacaagaagccccttttctttgatggctctcctgagaaacctcccgaagatgactcagactctctcaccacgtctccatcctccagcagcctggacacctggggggctggccggaagttggtcaaaaccttcagcaaaggagagagccggggcctgattaagccccccaagaagatggggacattcttctcctacccagaagaagaaaaggcccagaaagtgtcccgctccctcaccgagggggagatgaagaagggtctcgggtccctaagccacgggagaacctgcagttttggaggatttgacttgacgaatcgctctctgcacgttggcagtaataattctgacccaatgggtaaagaaggagactttgtgtacaaagaagtcatcaaatcacctactgcctctcgcatctctcttgggaaaaaggtgaaatcagtgaaagagacgatgagaaagagaatgtctaaaaaatacagcagctctgtctctgagcaggactcgggccttgatggaatgcctggctcccctccgccttcacagcccgaccccgaacacttggacaagcccaagctcaaggccgggggttctgtagaaagtcttcgcagttctctcagtgggcagagctccatgagcggtcaaacagtgagcaccactgattcctcaaccagcaaccgggaaagcgtcaagtcggaagatggggatgacgaagagccgccttaccgaggcccgttctgcgggcgtgccagggtgcacaccgacttcacccccagtccctatgacacagactcactcaagctcaagaaaggagatatcatcgatataatcagcaagccacccatggggacctggatgggcctgctgaacaacaaagtcggcacgttcaagttcatctacgtggacgtgctcagtgaagacgaggagaaacccaaacgccccaccaggaggcgtcggaaaggacgaccaccccagcccaagtctgtggaggatctcctggatcggattaacctaaaagagcacatgcccactttcctgttcaatggatatgaagatttggacacctttaagctgctggaggaggaagacttggatgagttaaatatcagggacccggaacacagagctgttctcttgacagcagtggagctgttacaagagtatgacagtaacagcgaccagtcaggatcccaggagaagctgctcgttgacagccagggcctgagtggatgctcaccccgagactcaggatgctacgaaagcagtgagaacctggaaaacggcaagactcggaaagctagcctcctatctgccaagtcatccaccgagcccagcttgaagtcttttagcagaaaccagttgggcaattacccaacattgcctttaatgaaatcaggggatgcactgaagcagggacaggaggagggcaggctgggtggtggccttgccccagacacgtccaagagctgtgacccacctggtgtgactggtttgaataaaaaccgaagaagcctcccagtttccatctgccggagctgtgagaccctggagggcccccagactgtggacacttggccccgatcccattccctggatgaccttcaagtggagcctggtgctgagcaagacgtgcctaccgaggtgacagaaccgccccctcagattgtacctgaagtgccacagaagacgaccgcctcttccacgaaggcccagcccctggagcaagactctgctgtcgacaatgcattgctactgacccaaagcaagagattttctgaacctcagaaattgacaactaagaaactggagggctcaatcgcagcctctggtcgcggcctgtcaccccctcagtgtttgcccagaaactatgatgctcagcctcctggagctaaacacggtttagcaaggacgcctctggagggccacagaaaaggacacgagtttgaaggaacacaccatcccctgggcaccaaagaaggggtagatgctgagcagagaatgcagcccaaaattccatcacagcctccacctgttcctgccaaaaagagcagagaacgccttgctaacggactccaccctgttcccatgggccccagtggggccctccccagtcccgatgcgccatgcctgccagtgaaaaggggcagccccgccagccccaccagccctagcgactgtcccccagcactggctcccaggcctctctcagggcaggcgcctggcagcccaccaagcacaaggccgcccccctggctctcagagctccccgagaacacaagcctccaggagcacggtgtgaagctgggcccggctttgaccaggaaggtctcctgtgcccggggagtggatctagaaacgctcactgaaaacaagctgcacgctgaaggcatcgatctcacggaggagccgtattctgataagcatggccgctgtgggattcctgaagccctggtgcagagatacgcagaggacttggatcagcccgagcgggacgtcgccgccaacatggaccagatccgggtgaagcagcttcggaagcagcaccgcatggcgattccaagtggtggactcacggaaatctgccgaaagcccgtctctcctgggtgcatttcgtctgtgtcagattggctcatttccatcggtctgcccatgtacgccggcaccctctccaccgcgggcttcagcacactgagccaagtgccttctctgtctcacacttgccttcaggaggccggcatcacagaggagagacacataagaaagctcctatctgcagccagactcttcaaactgccgccaggccctgaggccatgtagccaggcccggaatgggcctctctggacaagagccaccctttcactgtgcatatgatgctgatgcaattcctccatcatctctggacgtgcagaccagatccagaagaaaggcctggcgtgtggccaaacagcgtgaaaccttggcacaggactgaggatcctctcctccagaaaagccccctcgaggaaataaattagtgcggttctctttgacccccaaagacaagacaagcacttatttttattttcagaagacaaaagaaccaagatgccaactggctgcgaatgctctatctccagtctgtctctgtgtactggtagaggctgggaggagtagggggcagcctgttccatttctgatagtgcccttgctcttctgtctgtcatcttgcaggatgcccgagggccagatgggcttagctaggccaaagtaacagactcaagagttattgtacattactgaccacgctcatttgttcaaaagttagaacatctggctgcaccaggaaaaaaaaaaaaaaaaagtcctgttcttctttagataaacaagagacattttcataattgctttctagcaatcagcttttatttgccttaatataagcttttaagcagttatctaactagtgtccacaaccctgtaaccatacttccacatcttcagcttaggcagacatcgaacctctctgggatgtttccagcaaaagtgagcttttctaatcgtctcattgtaacatggcttattttgtagaggtattcatcagccacacacttcatgttggtttttggtttttaagctaactacaaatctagtaaaaagctatctgaaattcacaaatatcatgtgtgtgcgtgcgtgcgtgcgcgtgtgtgtctgtattcatagtgactgcttttggttttaaccagtttagtatcgttactgtgtggatcgtcgcgctgcagtattgacttggaatcctgaccatgtccatcccaaaattcagtcctcagttaacggatcatgtttgcaaaaggtcactgtgaggctgcatatttcagaaagatgtccttaataagggaagtcatgtataagatgttttctaaaagacttttcagtattacaactaatactattattatccttctttttttatttagataattcttttaatttaaacaaaggttcactatggaaccagacaaatctcattagccatgtgttaagtatttgctactttaaattgttttacaactgatttcagcacattctatccttttttttttttgaaatggagtttcgctcttgtcacccaggctggagtgcaatggcacgatcttggctcactgcaacctcagtctcccaggttcaagtgattctcctgccttagcctcccgagtagctgggattataggcacccaccaccacgcccagctaatttttgtattattagtagagacagggtttcaccatgttggccaggctggtctcaaactcaactcctgacctcaggtggtccacccgcctcagcctcccaaagtgctgggattacaggtgtgagccaccgcacctggcctctgtcctcttttagtctagtgtctggttttctagcaaacagtaaatttaaacaagtaaactattatggtttccattgcttacaaaatgattttcctttacattcttatcatgaacactattttaagcatcaaatgcaatcatctaaaatataaaggtcaatcatttataatagaaacaccttgaccacaagcccttgattgaacattttataatatttcatctacttattaaaacaaataatttcccttgggttggaggggaagtgatttcataaattaattagaaagccatctttagcatattgcttatgtctggatccatgtttctgaggaaaaagacattctcaggtgatgtatttttttcatgcattagtatgcatttttaaaaaataatgcatgtttctttaataattaattttcatcttctataagatgccatgtgaagaagttgtggaaatgtagaataaaaagctaaagctgccaaatttctgttgaactcttaaaaacagctcatgtttgtttgtcctctcgggttgtggcctagcctatttgcaatgtaatgaagctgcagggttcttgtatagctaaagcgttcaatgcatttcacgtgctgtggtggatgtgggtgctgtagacaggcttcttctcttcctgctctcaaaatacctcggcttgacatttggacagatcctgtcattgtttaagctgagcaaaaaaccacacaaaagttgtgtaagagatgagataacaaaggagcgagagaaatctcatgtgaatttccaagttttaattcgttctccatgaaggattttcatttcagtgaaagtcgcagcagaagagggaactttctggagtttttgagaatgccaaaccacatttttatcacacttctttggaaatcaatgcctttgcatagaaaatcaaattcagggaccacaaagaattttcagtgggaatgtctagtctgaggggtctgaggttgtttttactttattgtgttgtttaaatattttaaaaatatctttagcgtttggtcttttttttttctgtaaacatttaatttggtctgagaaaagctgaatgtttgggtgtgacgtttgactgaggtggattggggctgcctgtggacattagtgaacaggtggtaggcttcaggaatatccagttttaatcagttgcatttggtacagaattttgagtaatggtgaaaattgttgtctttggaaagcacaaaagaaacctggaaaggcagttcggctcaggtagctacacataacattgtgtatgattttcacttcaaagctgtctggaaggaaatgcagtcagctccagctagtactatttatgtacccagataactaagatattgtttcatggccttgccttagtcagaggcccttttctctgtcctgaacccccaggtatgggtgaaattggaaattactaatctattggaaatcagttcctgacatagtaaagtttgctttcataactgcagcaaaaaaggtcaacttgccaagtcactgctgccatgtgtgtactgtattattttcagaaaaaaatataatagtctgagtccaagttatcttgatttaaaattgatagagaaaagaaactgtcgagcaagttatataacaactaacaacattgcactttctgtatatgaaatcaatatttaaataacttatttttctccattgctgttcttaaaaacattgtaagtagctgtaatataccagtaccaatatgttcttgcaattgcttcagcccaagaaagctgtgtattgttttaaaaattgtaaaaattattgtgatgattcatttagcataaagagaggtggacggaagggttttcctatgtatcaaaacttgtctataattatgtcatctatgtacctagaaaaaagtaaataaatttcttcagttgaatatgcc

SEQ ID NO: 185691 - DNA, 5075 bp, Artificial Sequence
  derived and/or modified sequence
agtggcttttactagaaaaacaacagtgaatttgaatcaagttctgcaaatacagaaatcactaagatataagcagttccgtgaagtttgcaaccacctaaaaggataataaagttttcattctttataacatcagcattgttcctactgaaattaaaaagtgtggtcaaacacagtcactgaatcaaccgttttctttctgggcaaatgtggcatcttcattcactgagagaaaagggtcaccatgaattaacttgggcagttcgatgggaaagttaccagcgtttttggctaggatggggaagcggtgagtgagtaattctcttggcctgattggacaactgtaaacataaccttctccccccctcttctcagcgatttaaagctaaacaaaatgaaagtctgtttgaaaagcttgctgttggtgtcagagccgtgggatttcaaacctgggttttcaggatgcctgagtacatggatcctctaacacatatcccttcattatctctactgaatgtagctgatgttaggggaagttctgtgctggagacagggaatctcacagcactggactcatggagggtttttcttttgttttttaggctttttaaaaaaaatggttggtttttgcatgttaaggggattctagacctctggggtaggcagagttccagtggcctgtgaaagggaaaaatgagtgaagtttccttacgacatgactcatgtgtttttttctcatcatttctcgttttctactttcatcctgtccacgtatttgtgattcagagatgtcctgcaaacggggactgctgggttggtgcactgccggctggcttaagcataactgaagtttttctgccctaccctcttttccacagagaacctgcagttttggaggatttgacttgacgaatcgctctctgcacgttggcagtaataattctgacccaatgggtaaagaaggagactttgtgtacaaagaagtcatcaaatcacctactgcctctcgcatctctcttgggaaaaaggtgaaatcagtgaaagagacgatgagaaagagaatgtctaaaaaatacagcagctctgtctctgagcaggcggtcaaacagtgagcaccactgattcctcaaccagcaaccgggaaagcgtcaagtcggaagatggggatgacgaagagccgccttaccgaggcccgttctgcgggcgtgccagggtgcacaccgacttcacccccagtccctatgacacagactcactcaagctcaagaaaggagatatcatcgatataatcagcaagccacccatggggacctggatgggcctgctgaacaacaaagtcggcacgttcaagttcatctacgtggacgtgctcagtgaagacgaggagaaacccaaacgccccaccaggaggcgtcggaaaggacgaccaccccagcccaagtctgtggaggatctcctggatcggattaacctaaaagagcacatgcccactttcctgttcaatggatatgaagatttggacacctttaagctgctggaggaggaagacttggatgagttaaatatcagggacccggaacacagagctgttctcttgacagcagtggagctgttacaagagtatgacagtaacagcgaccagtcaggatcccaggagaagctgctcgttgacagccagggcctgagtggatgctcaccccgagactcaggatgctacgaaagcagtgagaacctggaaaacggcaagactcggaaagctagcctcctatctgccaagtcatccaccgagcccagcttgaagtcttttagcagaaaccagttgggcaattacccaacattgcctttaatgaaatcaggggatgcactgaagcagggacaggaggagggcaggctgggtggtggccttgccccagacacgtccaagagctgtgacccacctggtgtgactggtttgaataaaaaccgaagaagcctcccagtttccatctgccggagctgtgagaccctggagggcccccagactgtggacacttggccccgatcccattccctggatgaccttcaagtggagcctggtgctgagcaagacgtgcctaccgaggtgacagaaccgccccctcagattgtacctgaagtgccacagaagacgaccgcctcttccacgaaggcccagcccctggagcaagactctgctgtcgacaatgcattgctactgacccaaagcaagagattttctgaacctcagaaattgacaactaagaaactggagggctcaatcgcagcctctggtcgcggcctgtcaccccctcagtgtttgcccagaaactatgatgctcagcctcctggagctaaacacggtttagcaaggacgcctctggagggccacagaaaaggacacgagtttgaaggaacacaccatcccctgggcaccaaagaaggggtagatgctgagcagagaatgcagcccaaaattccatcacagcctccacctgttcctgccaaaaagagcagagaacgccttgctaacggactccaccctgttcccatgggccccagtggggccctccccagtcccgatgcgccatgcctgccagtgaaaaggggcagccccgccagccccaccagccctagcgactgtcccccagcactggctcccaggcctctctcagggcaggcgcctggcagcccaccaagcacaaggccgcccccctggctctcagagctccccgagaacacaagcctccaggagcacggtgtgaagctgggcccggctttgaccaggaaggtctcctgtgcccggggagtggatctagaaacgctcactgaaaacaagctgcacgctgaaggcatcgatctcacggaggagccgtattctgataagcatggccgctgtgggattcctgaagccctggtgcagagatacgcagaggacttggatcagcccgagcgggacgtcgccgccaacatggaccagatccgggtgaagcagcttcggaagcagcaccgcatggcgattccaagtggtggactcacggaaatctgccgaaagcccgtctctcctgggtgcatttcgtctgtgtcagattggctcatttccatcggtctgcccatgtacgccggcaccctctccaccgcgggcttcagcacactgagccaagtgccttctctgtctcacacttgccttcaggaggccggcatcacagaggagagacacataagaaagctcctatctgcagccagactcttcaaactgccgccaggccctgaggccatgtagccaggcccggaatgggcctctctggacaagagccaccctttcactgtgcatatgatgctgatgcaattcctccatcatctctggacgtgcagaccagatccagaagaaaggcctggcgtgtggccaaacagcgtgaaaccttggcacaggactgaggatcctctcctccagaaaagccccctcgaggaaataaattagtgcggttctctttgacccccaaagacaagacaagcacttatttttattttcagaagacaaaagaaccaagatgccaactggctgcgaatgctctatctccagtctgtctctgtgtactggtagaggctgggaggagtagggggcagcctgttccatttctgatagtgcccttgctcttctgtctgtcatcttgcaggatgcccgagggccagatgggcttagctaggccaaagtaacagactcaagagttattgtacattactgaccacgctcatttgttcaaaagttagaacatctggctgcaccaggaaaaaaaaaaaaaaaaagtcctgttcttctttagataaacaagagacattttcataattgctttctagcaatcagcttttatttgccttaatataagcttttaagcagttatctaactagtgtccacaaccctgtaaccatacttccacatcttcagcttaggcagacatcgaacctctctgggatgtttccagcaaaagtgagcttttctaatcgtctcattgtaacatggcttattttgtagaggtattcatcagccacacacttcatgttggtttttggtttttaagctaactacaaatctagtaaaaagctatctgaaattcacaaatatcatgtgtgtgcgtgcgtgcgtgcgcgtgtgtgtctgtattcatagtgactgcttttggttttaaccagtttagtatcgttactgtgtggatcgtcgcgctgcagtattgacttggaatcctgaccatgtccatcccaaaattcagtcctcagttaacggatcatgtttgcaaaaggtcactgtgaggctgcatatttcagaaagatgtccttaataagggaagtcatgtataagatgttttctaaaagacttttcagtattacaactaatactattattatccttctttttttatttagataattcttttaatttaaacaaaggttcactatggaaggaaatgcagtcagctccagctagtactatttatgtacccagataactaagatattgtttcatggccttgccttagtcagaggcccttttctctgtcctgaacccccaggtatgggtgaaattggaaattactaatctattggaaatcagttcctgacatagtaaagtttgctttcataactgcagcaaaaaaggtcaacttgccaagtcactgctgccatgtgtgtactgtattattttcagaaaaaaatataatagtctgagtccaagttatcttgatttaaaattgatagagaaaagaaactgtcgagcaagttatataacaactaacaacattgcactttctgtatatgaaatcaatatttaaataacttatttttctccattgctgttcttaaaaacattgtaagtagctgtaatataccagtaccaatatgttcttgcaattgcttcagcccaagaaagctgtgtattgttttaaaaattgtaaaaattattgtgatgattcatttagcataaagagaggtggacggaagggttttcctatgtatcaaaacttgtctataattatgtcatctatgtacctagaaaaaagtaaataaatttcttcagttgaatatg

SEQ ID NO: 185692 - protein, 1538 aa, Artificial Sequence
  derived and/or modified sequence
MEPRMESCLAQVLQKDVGKRLQVGQELIDYFSDKQKSADLEHDQTMLDKLVDGLATSWVNSSNYKVVLLGMDILSALVTRLQDRFKAQIGTVLPSLIDRLGDAKDSVREQDQTLLLKIMDQAANPQYVWDRMLGGFKHKNFRTREGICLCLIATLNASGAQTLTLSKIVPHICNLLGDPNSQVRDAAINSLVEIYRHVGERVRADLSKKGLPQSRLNVIFTKFDEVQKSGNMIQSANDKNFDDEDSVDGNRPSSASSTSSKAPPSSRRNVGMGTTRRLGSSTLGSKSSAAKEGAGAVDEEDFIKAFDDVPVVQIYSSRDLEESINKIREILSDDKHDWEQRVNALKKIRSLLLAGAAEYDNFFQHLRLLDGAFKLSAKDLRSQVVREACITLGHLSSVLGNKFDHGAEAIMPTIFNLIPNSAKIMATSGVVAVRLIIRHTHIPRLIPVITSNCTSKSVAVRRRCFEFLDLLLQEWQTHSLERHISVLAETIKKGIHDADSEARIEARKCYWGFHSHFSREAEHLYHTLESSYQKALQSHLKNSDSIVSLPQSDRSSSSSQESLNRPLSAKRSPTGSTTSRASTVSTKSVSTTGSLQRSRSDIDVNAAASAKSKVSSSSGTTPFSSAAALPPGSYASLGRIRTRRQSSGSATNVASTPDNRGRSRAKVVSQSQRSRSANPAGAGSRSSSPGKLLGSGYGGLTGGSSRGPPVTPSSEKRSKIPRSQGCSRETSPNRIGLARSSRIPRPSMSQGCSRDTSRESSRDTSPARGFPPLDRFGLGQPGRIPGSVNAMRVLSTSTDLEAAVADALKKPVRRRYEPYGMYSDDDANSDASSVCSERSYGSRNGGIPHYLRQTEDVAEVLNHCASSNWSERKEGLLGLQNLLKSQRTLSRVELKRLCEIFTRMFADPHSKRVFSMFLETLVDFIIIHKDDLQDWLFVLLTQLLKKMGADLLGSVQAKVQKALDVTRDSFPFDQQFNILMRFIVDQTQTPNLKVKVAILKYIESLARQMDPTDFVNSSETRLAVSRIITWTTEPKSSDVRKAAQIVLISLFELNTPEFTMLLGALPKTFQDGATKLLHNHLKNSSNTSVGSPSNTIGRTPSRHTSSRTSPLTSPTNCSHGGLSPSRLWGWSADGLAKHPPPFSQPNSIPTAPSHKALRRSYSPSMLDYDTENLNSEEIYSSLRGVTEAIEKFSFRSQEDLNEPIKRDGKKECDIVSRDGGAASPATEGRGGSEVEGGRTALDNKTSLLNTQPPRAFPGPRARDYNPYPYSDAINTYDKTALKEAVFDDDMEQLRDVPIDHSDLVADLLKELSNHNERVEERKGALLELLKITREDSLGVWEEHFKTILLLLLETLGDKDHSIRALALRVLREILRNQPARFKNYAELTIMKTLEAHKDSHKEVVRAAEEAASTLASSIHPEQCIKVLCPIIQTADYPINLAAIKMQTKVVERIAKESLLQLLVDIIPGLLQGYDNTESSVRKASVFCLVAIYSVIGEDLKPHLAQLTGSKMKLLNLYIKRAQTTNSNSSSSSDVSTHS

SEQ ID NO: 185693 - DNA, 4617 bp, Artificial Sequence
  derived and/or modified sequence
atggaaccccgcatggaaagttgcctggcccaggttctgcaaaaagacgtgggcaaaaggctccaggtaggccaggaactaatagattacttctccgataagcagaaatccgcagaccttgagcacgaccagactatgctcgacaagcttgttgatggcttagctacgtcatgggtcaacagctcgaattacaaagtggtgctgttgggtatggacatcctgagtgcactggtgaccaggctccaggacaggttcaaggcccagatcgggacagtgctgccctcactgatcgacaggctgggggatgcaaaggattccgtcagggagcaagaccagacgcttttacttaaaataatggatcaagctgccaacccgcagtatgtatgggatagaatgctggggggatttaagcataagaattttaggactcgggaaggcatctgtctttgtctgatagcaaccctgaatgccagcggcgcacagaccctaactctctctaagattgtccctcatatatgcaatctgctcggagatcccaatagccaggtccgcgatgccgccatcaacagtctggtggagatctatagacacgtgggagaacgtgttcgggctgacctgtcaaaaaagggactcccccagtcgcgtctgaacgtgatattcacaaagtttgatgaggttcagaagtccggaaacatgattcagagtgctaacgacaagaatttcgatgatgaggattcagtggatgggaataggccgagcagcgcatcatccacctctagtaaagccccaccttcttctcgcaggaacgtgggcatgggtacaactcgacggctcggcagctccaccctggggagcaagagtagcgccgccaaggagggcgcaggagcggtggacgaggaagactttataaaggccttcgacgacgtccccgtagtacaaatttatagctcacgagacttggaagaaagtattaacaagattcgggaaatcctaagcgacgataaacacgattgggagcagcgagtaaatgcactcaagaaaattaggtcccttctgctggcgggagccgccgaatatgacaatttcttccagcacctcaggctcctcgacggagccttcaaactcagcgctaaggatttgaggtcccaggtcgtccgggaggcctgcattacactgggccacctgtcctcagtgctcggaaacaaatttgatcacggcgccgaagcgattatgccaacaatatttaacttgatccccaatagcgctaaaataatggccacatccggggtggtggccgtacgcctgattattcgtcatacacatataccaaggctgattcctgtcatcactagcaattgcacgtcaaagtctgtcgcagtgagacgccgatgctttgagttcctcgacctgctgcttcaggagtggcagacacacagcttagagcgccatatcagtgtcctggcggaaaccatcaagaagggtattcacgacgcagattctgaagcaagaatcgaggccagaaagtgctactggggttttcacagccatttttctagagaagccgagcacttgtaccacacgttggaatcttcgtaccaaaaggcattacaaagccatttaaaaaattcagattccatcgtgtcattgccgcaatctgacaggtctagctctagcagtcaggaatctttaaacaggcccctctctgcaaaacggtcacccacaggatcaacgacttcacgggcttccaccgtgagtacgaaatcagtctctacaacggggagtctgcagaggagcaggtccgatatagatgtgaacgctgccgctagtgccaaatccaaggtatcttcaagctcaggaacaacccccttctcttctgcggcagctctgcctcccggctcttatgcttctctcggacgcatcagaaccaggagacagtctagcggctcagccactaacgtggccagtactccggacaatcgtggacggtctcgcgcaaaagtggtgtcgcagagtcagcgaagtagaagtgccaatcccgcaggagccggttccagaagttcctcaccggggaagctgctcggttcagggtatggggggctgacaggcgggtccagccggggtcctccagtgacaccttcctctgagaaacggtccaaaattccccggtcacaaggatgtagccgggagacatccccaaaccggatcggtctggcaagaagctccaggatcccaaggcccagcatgagccagggttgttcaagggacacgtcgcgcgagtccagcagggatacaagccctgcccgtggattcccccccctggatagattcggtcttgggcaacccggtcggatccccggaagcgtgaacgccatgcgcgtgctttccacctctactgacctggaggcggctgtggcagatgcattgaaaaagccagtcaggcggagatacgagccatacgggatgtattctgatgacgacgccaatagtgatgcctcctcagtgtgctcggagcgcagctacggatcacggaatgggggtattccacactacctacggcagactgaggatgtcgctgaggttctaaatcactgtgctagttcgaactggtcggaacgtaaagaagggcttcttggcctgcagaacctgctgaaatctcagagaacactttcaagggtcgagttaaagcgactttgcgagatttttactcgcatgttcgcagacccacactctaagagggtctttagtatgtttctcgaaacccttgtcgacttcattattatacataaggatgaccttcaggattggttgttcgttcttctcacccagctcctaaagaaaatgggggctgatctgcttggcagcgtgcaggcgaaggttcagaaggcattagacgtcacccgtgactcattcccgttcgaccagcagtttaacatattgatgcgcttcatcgtagaccagactcagacgcctaacctgaaggtgaaagtggccatcctcaagtacatcgaatcacttgctagacagatggatcccacagattttgtcaattccagcgagaccagactggccgtctccaggattatcacgtggacaacggaacctaagagttctgacgtccggaaggcggcccagattgtgctcatttccctgttcgaattaaacacaccagaattcacaatgctgcttggggcattgcctaaaacctttcaggatggcgctactaagttgttacacaatcacctgaagaatagtagtaatacatcagtgggatcgccatcaaatacaatcggaaggacaccatctagacatacttcaagccgcacatcccctcttacttccccaactaattgtagtcacggtgggcttagcccatccagactctggggttggtcggcggacggtctcgccaagcatcccccgcccttctcccagcccaacagcatccctactgcaccatcccacaaagccttgcgacgctcctatagccctagtatgctagattacgatacagagaacctcaatagtgaggaaatatacagcagtctgcgtggcgtaactgaggctatcgagaaattcagttttcgcagtcaggaagatctgaatgaacctattaagcgggacggcaaaaaagagtgcgatattgtttctagggacggtggcgctgcctcccctgcgacagaaggccgcggagggtcagaggtcgaggggggaagaacggctctggacaacaaaacctcactgttaaacacacaacccccccgggcttttcctggacctagagcacgggactacaatccctacccatacagcgacgccattaatacgtacgacaaaaccgcccttaaagaagctgtctttgatgacgatatggagcagctccgggatgtgcccattgaccactccgacttggtggcagacttgcttaaggagctgtctaaccataacgaaagagtagaagagcggaagggggccctgttggaactgctgaaaattactcgcgaagatagtctcggcgtgtgggaggagcacttcaaaaccatcctcctcctactgctggaaacacttggcgataaggatcactccattagagctctggcactgcgagtgctgcgcgagatccttcgcaatcagcctgcccggtttaagaactatgcggaacttaccattatgaagactttagaggcgcataaagatagccacaaagaggtggtgcgggctgccgaagaagctgccagcaccctggcaagttccattcaccccgaacagtgtatcaaggtgctgtgtcccataatccagaccgcagactaccccatcaatctcgccgctatcaagatgcagacaaaagttgtcgagaggatcgccaaagaatcccttttgcagctcctggtcgacattatccctggccttctccagggttatgataacaccgagtcctccgtgagaaaagcttctgttttttgtctggtcgctatttactctgtcatcggtgaggatctgaaaccacacctggcacaattaaccggctccaagatgaagctgctgaacctctacataaaacgagcgcagaccacaaactcaaatagcagttcttcctcggacgtctccacacacagttag

SEQ ID NO: 185694 - DNA, 4617 bp, Artificial Sequence
  derived and/or modified sequence
atggagcccaggatggagagctgcctggcccaggtgctgcagaaggatgtgggcaagaggctgcaggtgggccaggagctgattgactacttcagtgacaagcagaagtctgctgacctggagcatgaccagaccatgctggacaagctggtggatggcctggccacctcctgggtgaacagcagcaactacaaggtggtgctgctgggcatggacatcctgagcgccctggtgacccggctgcaggaccgcttcaaggcccagattggaacagtgctgcccagcctgattgaccggctgggagatgccaaggacagcgtgcgggagcaggaccagaccctgctgctgaagatcatggaccaggccgccaacccccagtatgtgtgggacaggatgctgggcggcttcaagcacaagaacttccgcacccgggagggcatctgcctgtgcctgattgccaccctgaatgccagcggggcccagaccctgaccctgagcaagatcgtgccccacatctgcaacctgctgggggaccccaacagccaggtgagagatgctgccatcaacagcctggtggagatctacagacatgtgggggagcgggtgcgggctgacctgagcaagaagggcctgccccagagccggctgaatgtcatcttcaccaagtttgatgaggtgcagaagagcggcaacatgatccagagcgccaatgacaagaactttgatgatgaggacagcgtggatggcaaccggcccagcagcgccagcagcaccagcagcaaggccccacccagcagcagaagaaatgtgggcatgggcaccacccggcggctgggcagcagcaccctgggcagcaagagcagcgctgccaaggagggcgctggagctgtggatgaggaggacttcatcaaggcctttgatgatgtgcctgtggtgcagatctacagcagccgggacctggaggagagcatcaacaagatccgggagatcctgagtgatgacaagcatgactgggagcagagggtgaatgccctgaagaagatccgcagcctgctgctggccggggctgctgaatatgacaacttcttccagcacctgcggctgctggatggagccttcaagctgagcgccaaggacctgcggagccaggtggtgcgggaggcctgcatcaccctgggccacctgagctctgtgctgggcaacaagtttgaccatggagctgaggccatcatgcccaccatcttcaacctgatccccaacagcgccaagatcatggccaccagcggcgtggtggccgtgcggctcatcatccgccacacccacatccccaggctcatccctgtgatcaccagcaactgcaccagcaagtctgtggccgtgagaagacgctgctttgagttcctggacctgctgctgcaggagtggcagacccacagcctggagcggcacatctctgtgctggccgagaccatcaagaagggcatccatgatgctgacagcgaggcccgcatcgaggccaggaagtgctactggggcttccacagccacttcagccgggaggccgagcacctgtaccacaccctggagagcagctaccagaaggccctgcagagccacctgaagaacagcgacagcatcgtgtccctgccccagagcgacaggagcagcagcagcagccaggagagcctgaaccggcccctgagcgccaagaggagccccaccggcagcaccaccagccgggccagcacagtgtccaccaagtctgtgtccaccaccggcagcctgcagaggagcagaagtgacattgatgtgaatgctgctgccagcgccaagagcaaggtgagcagcagcagcggcaccacccccttcagcagcgctgctgccctgcccccaggcagctatgccagcctgggccgcatccgcacccggcggcagagcagcggcagcgccaccaacgtggccagcaccccagacaacagaggccgcagccgggccaaggtggtgtcccagagccagaggagccgcagcgccaacccagctggggccggcagccgcagcagcagccctgggaagctgctgggcagcggctatggaggcctgactggaggcagcagccggggcccccctgtgacccccagcagcgagaagaggagcaagatccccaggagccagggctgcagccgggagaccagccccaacagaattggcctggcccggagcagccgcatcccccggcccagcatgagccagggctgcagccgggacaccagccgggagagcagccgggacaccagccctgcccggggcttcccccccctggaccgcttcggcctgggccagcccggccgcatccctggctctgtgaatgccatgagggtgctgagcaccagcacagacctggaggccgctgtggctgatgccctgaagaagcctgtgagaagaagatatgagccctacggcatgtacagtgatgatgatgccaacagtgatgccagctctgtgtgcagcgagaggagctatggcagcagaaatggaggcatcccccactacctgcggcagacagaagatgtggccgaggtgctgaaccactgtgccagcagcaactggagcgagaggaaggagggcctgctgggcctgcagaacctgctgaagagccagaggaccctgagccgggtggagctgaagaggctgtgtgagatcttcaccaggatgtttgctgacccccacagcaagagggtcttctccatgttcctggagaccctggtggacttcatcatcatccacaaggatgacctgcaggactggctgtttgtgctgctgacccagctgctgaagaagatgggcgctgacctgctgggctctgtgcaggccaaggtgcagaaggccctggatgtgacccgggacagcttcccctttgaccagcagttcaacatcctgatgaggttcatcgtggaccagacccagacccccaacctgaaggtgaaggtggccatcctgaagtacatcgagagcctggcccggcagatggaccccacagactttgtgaacagcagcgagacccggctggccgtgagccgcatcatcacctggaccacagagcccaagagcagtgatgtgaggaaggccgcccagatcgtgctgatcagcctgtttgagctgaacaccccagagttcaccatgctgctgggcgccctgcccaagaccttccaggatggagccaccaagctgctgcacaaccacctgaagaacagcagcaacacctctgtgggcagccccagcaacaccatcggccgcacccccagccgccacaccagcagcaggaccagccccctgaccagccccaccaactgcagccatggaggcctgagccccagccggctgtggggctggagcgcagatggcctggccaagcaccccccacccttcagccagcccaacagcatccccacagcccccagccacaaggccctgcggcgcagctacagccccagcatgctggactatgacacagagaacctgaacagcgaggagatctacagcagcctgcggggcgtgacagaggccatcgagaagttctccttccgcagccaggaggacctgaatgagcccatcaagagagatggcaagaaggaatgtgacatcgtgtccagagatggaggagctgccagccctgccacagagggccggggcggcagcgaggtggagggcggccgcacagccctggacaacaagaccagcctgctgaacacccagcccccccgggccttccctggcccccgggcccgggactacaacccctacccctacagtgatgccatcaacacctatgacaagacagccctgaaggaggccgtgtttgatgatgacatggagcagctgagagatgtgcccatcgaccacagcgacctggtggccgacctgctgaaggagctgagcaaccacaatgaaagagtggaggagaggaagggggccctgctggagctgctgaagatcacccgggaggacagcctgggcgtgtgggaggagcacttcaagaccatcctgctgctgctgctggagaccctgggggacaaggaccacagcatccgggccctggccctgcgggtgctgcgggagatcctgaggaaccagcctgcccgcttcaagaactatgcagagctgaccatcatgaagaccctggaggcccacaaggacagccacaaggaggtggtgcgggctgctgaggaggccgccagcaccctggccagcagcatccaccctgagcagtgcatcaaggtgctgtgccccatcatccagacagctgactaccccatcaacctggccgccatcaagatgcagaccaaggtggtggagagaattgccaaggagagcctgctgcagctgctggtggacatcatccctggcctgctgcagggctatgacaacacagagagctctgtgaggaaggccagcgtcttctgcctggtggccatctacagcgtgattggagaggacctgaagccccacctggcccagctgaccggcagcaagatgaagctgctgaacctgtacatcaagagggcccagaccaccaacagcaacagcagcagcagcagtgatgtgtccacccacagctag

SEQ ID NO: 185695 - DNA, 4617 bp, Artificial Sequence
  derived and/or modified sequence
atggagccccggatggagagctgcctggcccaggtgctgcagaaggatgttggaaaaagactccaggtcggacaggagttaattgactatttctcggacaaacaaaagtccgcagacctggagcacgatcaaactatgttggataaactggtggatggacttgccacatcatgggtgaattcttctaattataaagtcgttctccttggcatggatatcctgagcgccctggtgacccgactgcaagatagattcaaagcacaaatcggaactgtcctgccttccctgatcgaccgtctgggcgacgccaaagattcagtgcgagaacaggatcagacactgttgctgaagattatggatcaggctgcaaacccccagtacgtctgggatcgcatgctcggaggctttaagcacaaaaatttccgcacaagagagggtatctgtttgtgtctcattgccacgctcaacgcttccggggcccaaactcttaccctgagtaagatcgtgccccacatctgcaatctgttaggggaccccaatagccaggttcgtgacgctgctatcaacagcttggtcgagatctaccggcatgtgggcgaacgagttcgtgccgacctgtccaagaaagggctcccgcaatcacgcctgaatgtaatttttaccaaattcgacgaggtgcaaaaatccggcaatatgattcagtctgccaacgataaaaatttcgatgatgaggactctgtggacggtaacaggccctcctccgcctccagtacctcttccaaagctcccccctcttctcggcggaacgtcggaatgggtactaccagacgcttaggcagctcaaccctcggtagcaaaagcagtgctgctaaggagggggctggcgccgtggatgaagaggactttattaaggcttttgatgacgtacccgtggtgcagatttattcatctagagatcttgaggagtctatcaacaaaatccgcgaaatcttatcggacgataagcatgattgggaacaacgggtcaatgcactaaagaaaatacggagtctgctcctggccggcgccgcagagtatgacaattttttccagcatttgcggctgttggatggtgctttcaagctgtccgcaaaggacctgcggtcacaggtcgttcgggaggcatgcattacgctgggtcatcttagcagtgtgctgggaaacaaattcgatcacggagctgaagccatcatgcccacaattttcaatctcatcccaaactcagctaaaatcatggccaccagcggtgttgtcgcagtgcggctgatcatccggcacacgcatattcctcgcctgattcccgtgattacttccaactgcacgagcaagtccgtggccgtgaggaggaggtgttttgaatttctggaccttctactgcaggagtggcagacacatagtttggagcggcacatctccgtgttggcagaaacgatcaagaaaggaatacacgacgccgactccgaagctcgaattgaggctaggaagtgttactgggggtttcactctcatttttccagagaggctgagcatctctaccacacactggaatcttcttatcagaaagccctgcagagtcacctcaagaactcagatagcatcgttagcctaccccagtcagataggtcctcttcatcttcccaagagtctctgaatcgacccctgagcgccaagagatctccgaccggcagtaccacatcccgtgccagtaccgttagtaccaagtcagtttccacgacaggctccctccaacggtcccgatcggatatcgatgtgaatgccgcagcgagcgccaagtcaaaagtgtcttcttccagcggtactacacccttcagttctgccgctgcattgccacccggcagttacgcgagcttgggaaggatccgtactcggaggcagtcttcaggaagtgccaccaacgtcgctagtacccctgataatcgtggcagatctcgtgctaaggtagtttcacagagccagaggtccagatctgccaaccccgcgggggcggggtctcggagcagctctcccggcaaactgctgggctcaggctatggaggcctgacagggggttcatctcgggggcctcccgtgacacccagctcagagaaacgttcgaagatcccccgatcccagggttgtagccgcgagacttcgcctaatcggatcggcctggcaagatctagccgaatacctcgccccagcatgtcccagggatgttcaagggatactagcagggagtccagccgtgacactagccctgcaaggggattccctcctttggataggtttggcttagggcagcccgggcgcatccccgggtccgttaacgctatgagagtcctcagtacgtccaccgatttggaagccgctgtggcagatgccctgaaaaaacctgttcggaggaggtacgaaccctacggcatgtactccgacgatgatgctaactcggacgcatcaagtgtctgttctgagcgctcttatgggtcccgcaatggtggtattccccattacctccggcagaccgaggatgtggctgaagtgctgaaccactgcgcctcttccaattggtccgaaagaaaagaaggcttgttaggtctccagaacctactgaagagtcagagaactctatcccgcgtggagctgaagaggctgtgcgaaattttcacccgtatgtttgcagatccccactccaagagagtgttttccatgtttttagaaacgcttgtggactttattatcatccataaggacgacctgcaagattggctgttcgtgttgttgacacagctgcttaaaaaaatgggagctgacctcctggggagcgtccaagctaaggtacagaaggctctggatgttacccgcgattccttcccttttgaccagcagttcaacatcctcatgcgtttcattgtggatcagacccaaactcccaacctcaaggtgaaggttgccatactgaagtatatagagtccctcgcacgccagatggaccctaccgactttgtgaattctagcgaaacgcgcctggccgtgtcgagaataatcacctggacaaccgagccaaagagttccgatgtgcgcaaagccgcccagattgtgttgatttccctattcgagttgaacacaccggaattcactatgctactcggagctctgcccaaaacattccaggacggggccactaagttgctgcataatcacttgaaaaactccagtaatacctccgtcggtagtccgagtaatacaatcggtagaactccctcccgtcatacaagctccaggaccagccctctgacttcccctacgaattgctcccacgggggtctcagccctagccgcttatggggatggagcgccgacggtttggctaagcaccctcccccattctctcaacccaactctatcccaactgcgccttctcataaggcccttagacgaagctatagtccctctatgctggattatgataccgagaacctgaactcagaggaaatttactcaagccttcggggagtgaccgaagccatcgagaagttttcatttcggagccaggaggacttgaacgagcctatcaaacgggatggaaaaaaagagtgcgatatcgtctcccgcgacggaggagcggcatccccagcgacggaaggccgcgggggaagtgaagtggagggaggccggactgctctggacaataagacgtctttgctgaacactcaacctccacgagccttccctggcccacgagcccgggattacaatccatacccttattcggatgccatcaatacatacgataaaactgccctaaaggaggcggtttttgatgacgacatggagcagttaagagatgttcccattgaccacagtgatttggtagcagatcttcttaaagaacttagcaatcacaatgagcgagtagaggaacggaagggcgccctcttggaattgctgaagattactcgagaggattctctcggagtttgggaggagcacttcaagaccatcctgctcttactgcttgagaccctgggggataaagaccactctattcgagccctggcccttagggtgctaagagaaatactacggaaccagcctgcccggttcaagaattatgccgagttaacaattatgaagacactggaggcccacaaggacagccacaaggaagttgtaagggccgctgaggaggctgccagcacccttgcaagctccatccatcctgagcagtgcatcaaagtgctctgtcctatcattcaaactgccgattatcctatcaacctggcggcgatcaaaatgcagactaaggtggtggagcggatcgccaaggagtcactgctacagctgctcgtggacatcattccaggacttctgcaaggttacgacaataccgagtccagcgtaagaaaggccagcgtgttctgcctggtggcaatttactctgtgatcggcgaggacctgaagccacatctcgcccaactgacagggtccaaaatgaaactgctgaatttatacataaaaagagcccagaccaccaacagcaatagctcctcaagttccgacgtttccacacactcctag

SEQ ID NO: 185696 - DNA, 4617 bp, Artificial Sequence
  derived and/or modified sequence
atggaaccaaggatggaatcatgcctcgctcaggtcctgcagaaggatgtcggcaaaagactgcaagtggggcaagagctaatcgactatttttcggacaaacagaagtctgcagatctggagcacgaccaaaccatgcttgataagctcgtggacgggctggccacctcgtgggtcaattctagcaattacaaggttgttcttcttggcatggatattctttccgccctcgtgacgcgcctgcaggatcgcttcaaagcccagatcggcactgtgttaccctctcttatcgatcggcttggagatgcaaaagactccgtccgtgaacaggatcagaccttgctactcaagataatggaccaggcagctaatccacagtacgtgtgggaccggatgctgggcggttttaaacataagaattttaggacaagagagggaatttgtctctgcctcatagccaccttaaacgcctctggggctcagactttgaccctgagtaaaatcgttccccatatttgcaacctcctgggtgatcccaacagccaggtgcgagatgccgcaattaacagcctggtcgagatttatagacacgtcggggaacgggttcgcgcagacttgtctaagaagggcttacctcagagtagactaaacgtgatcttcacaaaatttgacgaagtgcagaaatccggcaacatgattcagtccgctaacgataaaaattttgatgacgaagatagcgtcgatggcaacaggccctcttcggcgtcaagcaccagctccaaggctccaccttcatctcggagaaacgtgggcatggggaccactcgcagactcgggtcaagtaccctcggatcgaaatcctccgctgctaaagaaggggcaggagcggtggacgaagaagacttcatcaaggcctttgatgacgtgccagtcgttcagatttacagcagccgagacttagaggaaagcattaacaaaatacgtgagatactgtccgacgacaaacatgactgggagcagcgggtgaatgctctcaaaaagatacggtcattgctgttagcaggggcagccgagtacgacaattttttccagcatctgcggttactggacggcgcatttaaactttcagcaaaagacctacgttcacaggtggtccgagaggcctgcataactttaggacacctgtcttctgtgctaggcaacaaattcgaccatggtgctgaggccataatgccaacaatattcaatctcatccctaattccgccaagatcatggctacctccggggtcgtggccgtgagactgatcatcagacacacacacatccctcggcttattccggtgatcacctcaaattgtacaagcaagtccgtggccgtgcgacgacggtgctttgaattcctggacttactgttgcaggagtggcagacccactctctggaacgtcatatcagcgtcctggctgagacaatcaagaagggaatccacgacgcggactctgaggcacggattgaggcgagaaaatgctattggggcttccattcccacttcagccgagaagccgaacacctgtatcataccctcgaatcttcataccaaaaagctctgcagtctcatttgaagaactctgatagtattgtgtcgctccctcagtccgacagaagctcctcgtcttcgcaggagtcacttaaccgcccattgagcgccaagaggtctcccacaggctcgacaacgtcccgggcatccactgtgagcactaaaagcgtgagcaccacgggctctctgcagcggagcagatctgatattgacgtgaacgctgctgcgagcgcaaaatctaaggtgtctagctcgtctgggacaaccccattctccagtgccgctgccttaccccctggttcctacgctagcttgggccgaatcaggacacggcgtcagagctccgggagcgctacaaacgtggccagcaccccggacaaccgaggacggtctcgtgcaaaggtggtctcacagagccagcgctccagatcagccaatccggcaggagctgggtcccgttcatcaagtcctggcaaactgctaggtagtggatacggcggtctgacaggcggatctagcagaggcccacccgtcacaccgtcttctgaaaagcgctccaagatccccaggtcccagggatgcagtcgcgagacctcgcccaaccgcattggtctcgctaggtccagtaggatccctcgaccttcgatgagccagggatgctccagggacacctctagggagtcctccagagacactagccccgctcggggatttccaccacttgaccggttcgggctggggcagccaggaagaatcccaggatcagtgaacgcaatgagagttctctccacatcaaccgacctggaggcagccgtcgccgacgccctgaagaagccggttagacggaggtacgaaccctatgggatgtatagcgatgatgacgccaattccgacgcttcctccgtttgtagtgagcgatcctacggtagtaggaacggtggtatcccacattatctgcgacaaacagaagacgtggctgaggttttgaaccactgcgcttcttctaactggagcgagaggaaagaggggctgctgggcctgcagaatttgctgaaaagccagagaaccctcagcagggtagagctgaaacggctctgtgagatcttcacaagaatgtttgcagatccgcacagtaagcgtgtgttcagcatgttcctcgagacactagtggactttatcatcatacataaggatgatttgcaggactggctattcgtcctcctgacccagctgctgaaaaaaatgggagccgacctgttaggctcagtgcaggccaaggtgcagaaagcactggacgtcaccagagacagctttcctttcgaccagcagtttaatatcctgatgaggttcatcgtcgaccagacacagactccgaatctgaaagtgaaggtggcgattctgaagtatatcgaaagcttggccaggcagatggaccctaccgactttgtgaactcttccgagacaaggctcgccgtcagccggatcatcacttggacaactgagccgaagtcaagtgacgtgcgcaaggctgcccaaatcgttctcataagtttattcgagttaaacacaccagagttcacgatgctgctgggcgcattacctaagacatttcaggatggcgctacaaagttgctgcataatcatctcaaaaatagctctaacacaagcgttggatctccatccaatacgatcgggagaacaccttcaaggcatacatcctccaggacaagtccactgaccagccctacaaactgttcccatggcggactgagccctagcagactgtgggggtggtctgctgacgggctcgctaaacaccccccacccttctctcaacctaactcaattcctacagcaccttcccataaggcactgaggagatcctactccccttccatgctggactacgataccgagaacttgaattccgaagagatctatagcagtcttaggggggtcacagaagccatcgaaaaattttcgtttcgtagccaagaggacctgaatgaacccataaaacgggatggcaaaaaagagtgcgacatcgtgagtcgcgatgggggagctgcatctccggcaactgaaggaagaggaggttccgaggtggaaggaggcagaactgccctagataataagactagcttgctgaacacccaaccccctcgtgcgttcccaggccctcgtgccagggactacaatccatacccttactccgatgcaattaacacctacgataagaccgcactgaaggaagcggtttttgatgacgacatggaacagttgcgagacgtaccgatcgatcattctgacctcgtcgctgatcttctaaaagaactgagtaatcacaacgaaagggtggaggaacgaaaaggagctctgctggaactgctgaaaatcacgcgcgaagactcactgggggtgtgggaagagcacttcaaaacaatcctgctgctgcttcttgagactctgggcgataaagaccacagtatacgggctcttgccctaagagtgttgagagagatcctcagaaatcaacctgcccgtttcaagaactatgcggaacttactatcatgaaaactttggaagcccacaaagacagtcacaaagaagttgtccgggctgccgaggaagctgcttctactctggctagttcaatccatcccgagcaatgcattaaggtcctttgccccatcattcagacagccgattatcccattaacctggctgctataaagatgcagactaaagttgtggagcgaattgccaaagaatcactcttacagctgttggtggatatcatcccaggactgcttcagggatacgacaatacggagagttccgtacggaaggcgagcgtgttttgtctggttgccatatattccgttatcggcgaggacttgaagccccaccttgcccagctgaccgggtcgaagatgaaactccttaatctgtatataaagcgggcacagactactaactccaattcatcgagttcctcagatgtcagcacacattcctat

SEQ ID NO: 185697 - DNA, 8090 bp, Artificial Sequence
  derived and/or modified sequence
tttttttttttttaatccccgcaccaagcgcttaacctcattggggtggaggagaaggcggcggctctctggtccgcagcggcaacagtaacgaaaaacagggctaatggactgctgaattatgaagtatttcagacccagtagtagaacatcactctgccactcactcctttatctcctactagttatttaaattggacttttaatatcctaccagctgctcttcagacacacatggtgcattgttgccattccccagattgcatctttgaaacacaggctcttagtaaccttcagcgaacaaagaggcaacctcccagatacgtctgctgggagggagtcatcgtgactgccctctagcttttgctggatctggatttgaattccactatggagcctcgcatggagtcctgcctggcgcaggtgttgcagaaggatgtggggaaacgattgcaggttggccaagaactgatagactatttctcagacaaacagaagtctgctgaccttgagcatgaccagaccatgttagataaacttgtggatggacttgctacctcttgggtgaactctagcaattacaaggtggttctgctgggcatggacatcctgtccgccctggtgacccggctgcaggatcggttcaaggcgcagatcggcacagtgctgccaagtctaatagacagactaggagatgctaaagactctgtgagggagcaggaccaaactctgctgctaaagatcatggatcaagctgctaatccccagtacgtatgggacagaatgcttggaggcttcaaacacaagaatttccgtactcgagaaggcatctgtctctgccttatagcaacactcaatgcctctggagcacagactttaacactaagcaagattgtgccacatatatgcaacttacttggagatccaaacagccaggttcgagatgcagcaataaacagcttagtggaaatttacagacatgtaggagaacgtgtgagggcagatctcagtaaaaaaggattgccacagtcccggttgaatgtaatttttacaaaatttgatgaagtccagaaatctggaaacatgatacaatctgcaaatgataaaaatttcgacgatgaagattctgtggatggtaacagaccttcctctgctagttctacatcatccaaggctccaccaagttctcggagaaacgttggaatgggaaccacccgccggcttggttcatccacccttggatccaagtcttcagctgcaaaagaaggagctggtgctgttgatgaagaggattttattaaagcatttgatgatgtacctgtagtacagatttattccagccgagaccttgaggaatccataaacaaaattagggaaatattatctgatgacaagcatgattgggagcagagagtaaatgctctaaaaaagattagatctttacttttggctggtgctgctgagtatgataacttctttcaacatttgcgtcttttggatggagcctttaaactctctgctaaggacctgcggtctcaggtagtgcgggaggcttgtatcacgttggggcatctgtcatcagttctggggaataagtttgaccatggagctgaagccattatgccaactatctttaatttaattccaaacagtgccaaaattatggccacatctggtgttgtagctgttaggttaattattcggcacacacacatccctaggttaatacctgtcataacaagcaactgtacctctaagtctgtcgcagttagaaggcgctgttttgaatttttagatttgcttttacaagaatggcagacacattcactagaacgacacatatcagtattagctgaaacaataaagaagggaatacatgatgctgattccgaagcaagaatagaagccagaaaatgttactggggtttccacagtcacttcagcagagaagcagagcacttgtaccacaccttggagtcctcctaccagaaagccctgcagtcccacctgaagaactcagacagcatagtgtctctgcctcagtcagaccgctcatcttccagctctcaagagagtctaaatcgtccgctgtctgccaaaagaagtcctactggaagtaccacatctagagcttctacagttagtaccaaatctgtgtcaacgactgggtccctccagcgatctcgaagtgatattgatgtgaacgcagcagccagtgccaaatccaaagtctcctcatcttcgggcacgacgcctttcagctctgcagcagctttgcctccagggtcatacgcatccttaggtcggatccgcacaagacggcaaagctctgggagtgccaccaacgtcgcctctacacctgataaccggggccgcagtcgcgctaaagtggtttcacagtcccagcgatccagatctgctaatcctgctggtgctggcagccggtcaagttccccaggaaaattgttgggaagtggttatggtggacttactgggggctcctcacgaggcccacctgtgacaccgtcttcagaaaagcgaagcaagattcccaggagccagggatgtagccgggaaacaagtccaaaccgaataggattagcacggagcagccgtatccctcgacccagcatgagtcaggggtgcagccgcgataccagccgtgagagcagccgagatacaagccctgctcggggctttcctccacttgatcggtttgggcttggccagccaggaagaatacctggttctgtgaatgccatgagagttctgagcacaagtacagatcttgaagctgctgttgctgatgctttgaagaagcctgtgaggaggagatatgagccgtatgggatgtattctgacgatgatgccaacagtgatgcctcaagtgtttgctctgagcgctcatatggctccaggaatggtggcattccccattatctgcggcagactgaggatgtagcagaagttctcaaccactgtgctagttcaaactggtcagaaaggaaagaagggcttctgggcctgcagaacttactgaagagccaaagaacactgagtcgagttgaactgaaaaggttgtgtgagatcttcactcggatgtttgctgaccctcatagcaagagagttttcagtatgtttttggagactcttgtggattttataataattcataaggatgatttacaagactggctttttgttcttctcacacaattacttaagaaaatgggagcagatttacttggatctgtgcaagcaaaagttcaaaaggctctagatgtcacaagggactcctttccatttgatcaacaatttaacattttgatgagatttattgtggatcaaactcaaactccaaacctcaaggtcaaagttgcaatcctgaaatacattgagtctctggccagacagatggatccaacagattttgtaaactctagtgagacaaggcttgctgtttctagaatcataacctggacaacagaaccaaagagttcagacgtgagaaaggcagcacagattgtgctaatctctctgtttgaattgaatactcctgaatttaccatgttacttggtgccttgccaaaaacattccaggatggtgccaccaaactcctgcacaaccacctcaagaattccagtaacaccagtgtgggctctccaagcaatacgattggccggacgccctcccgacacaccagcagcaggaccagccccctgacctcacccaccaactgttcccatgggggtctgtctccaagtcggttatggggttggagtgccgacgggttagcgaagcacccacctcccttttctcagcctaactccatccccaccgctccctcccacaaggctctcaggcgctcttactctcccagcatgctggactatgatacagagaacctgaactctgaagaaatctatagttctctacgtggagttacagaagccattgaaaagtttagttttcgaagccaagaagatctgaatgagccaattaaacgagatggcaaaaaggagtgtgatattgtgtcccgcgatgggggcgctgcctcccctgccactgagggccgggggggtagtgaagtagaaggaggccggacagctctggataacaagacctcactactcaacacccagcctccgcgcgccttcccggggccgcgggcgcgagactacaacccgtacccctactcagatgccatcaacacctacgacaagaccgccctgaaagaggctgtgttcgatgacgacatggagcagcttcgagacgtgcccatcgaccattctgacctggtggctgaccttctgaaagagctgtccaaccacaatgagcgagtggaggaacggaagggagccctgctggagctgctcaagatcacgcgggaagacagccttggtgtctgggaggagcacttcaagaccattctgctcctgctgctggagacccttggagacaaagaccattcaattcgagcactggcgttaagagttttgagggaaattctgagaaatcaaccagcaagatttaaaaactacgccgagctgacgattatgaagactctggaagcccacaaagactcccataaggaggtggtgagagcggctgaggaggctgcgtccacactggccagttccatccacccggagcagtgcatcaaggtgctctgccccatcatccagacggccgactaccccatcaaccttgctgccatcaagatgcagaccaaagtcgtcgagaggatcgcaaaggagtcattgctgcagctccttgtcgacatcatcccaggcttgctgcagggttatgacaacaccgaaagtagtgtgcgtaaggccagcgtgttttgcttagtggcaatttattccgtaatcggagaagacctgaaacctcaccttgcacagctcacagggagcaagatgaagctactaaacttatacataaagagggcccagaccaccaacagcaacagcagctcctcctccgatgtctccacgcacagctaatggcagtacctgtctcttgtgtagacctagaagcaatcggtggtgcctctcagagacctttccccacccccttcatcggctgcccagtcagtacaaggaggcccacaaatatttattacaatcagtattttggtcccttccagcttttctgtagaatcttactggtattgaatgtaaaggaagcaaggcctgtattgcagtcttcatacaaaacaaaaggaataagaacagaaaagagccatactgaaacatgtcttgtacagcctgctgagatggcgaaaccctgtgtgtggggtgcagtttttaaaaatcagagcgctctagccactacttggtagaaagtagcattttttttttcagttaataacatatttgggggtggggtggggtgttactttgtgttcttcctccttagcctattttcttgtgcgtatggtctgtgtggggcccctttcacagctgacaccacgaaaggtgatatatctttaagttgtgttctgagacctactaaaaatgggaatcaagtcttggcaagaacagtctgaagatggccttttaacaaacgctgggaattttgcttgtcatatccagactggaggccgactgccctggctttcagcgtagaattgggagtgcaccctgacagtctccttccagctctccctaatcgactccaccgacaaggtccctaccccagagcttccatgcaaaggaattcttcaagtttaaatctggacacaaaaataagataaatgtatggcatcatttagggatgcctgagatggcagttcatgaagcacagaagataaagaagaagtctttcatctttactgctgagatccttgggaacactgttgtcatgggggctctgccaagaccctcatctctgggctacacggtgattcagattgagcaccaacttgtttcctcccctcaaagttctgcctaagccgttcagttctaacatggtctcagttaatctggtaaatggcatctttaccatcttagttctgacttctcagtttaatgtgggattaagagccaagaaaagcctagagagactggatatcacaattttttttaattttataaactgaagtagttccttgaatgtctgttgatgaaatagtcactgtttaaggaaaaaagtaattatgaggtgtagcagattgcagaaaaacaggattagaaacacacttaaaaagaacacacatttagagtctctcttcctcctcagcgaaccactaggccccctttttaaaaacacctttagagcctaattactccaataaaagtaactagaggtttggagtctggttaaataaattctgagtaaaattcttaagccaaatggaaattcttaatgcaatcatgaggacttctattgtctcttactgttgtattagatcctataaattgaactgatttttccataaggaaaatgcttcttttgagattaattctaataacgtatttgctattgcagtgcagagcccactgcaactgctaggactgaaagcagaggctgggtgccagagcacgtgattcttaacatcatttccacagacccctctgccctgaccctctgcattggatgcaggaagctgggaaagactgatgttgatttggaaacatgggctgaaaatgaaggccccatagtgcataggaacagtaaagccagggtgctgacgtgtgtgtgtgtgtgtgtgtgtgtgtgtgtgtgtgtgtggtgttgtgtgtgtttgtgcgtgcaccctacacatgtgtggtacctcactgctgctgtttagggaacttgagggacgcgtttcaaggggttgggtattactgacgagctttggctcaaaatatagcaggaccaggtcttttgttgataagtactgtttgtttattaatatgtcattaatggtatttcttttttacactctacaagtgaattagggagtctcttgttgacccctttgttgcaggaatgtgcgtcgggctaggttatccatgagtttctttattcctaatgcagttagaaagacctttctccttgagctctttgactcccagaaggtaccccagtccccagtgtacttagaaaggatctcgaacattgctggacgtcctcatagtactcacaaagggctagccttgaatgtcactcgcccagtcttcagtctcctgacttagagatacaatcacgtcacaggtctcttggcctcaatctgaaaactgctgccgccgcgccgaggagactcgcatgccgccaccacctcactgggagggcgccgagcccaccgtcgccccctagaccctgacagctgcagctgccttgccttgccgccgcctccctgcagggcccctgttccaatgaaaaacagaacacaaaagagcagagcacctaagcctgtctctgcctccctgtctaccggactggccagggcccaagacccccgctgctccactgcggggctgggcgggctgactccctgcttcctccaagctgctgcctcccctgcagccagggtctgggcagggtgcagccggtcctcggggcacgcagcttccttcaagtacactgtgtgtgcttcccggacctgcggcgatgccacgggcctgccttttctatgcgcctcactagcttaccaccctgtgcaggtaatgcaactgactttgtctcatcagtctttttctttccctgccaccctttatttatcaagcgtaatgttacactttaaaggacagcaaataagaactttgtagaatcccaccaggactttgctaacaataatgtttggaaataaagaagtgctctgaaaaaatatcagccaccaaaatagttatgttggcactgtgttcacacgcatggtccccacacccccaggttgggtgggtttttttgttttttgggtttttttgggggggggggctttttcatgttacatccatatctgtatttatatcttatttgtttcactttcaagtgtatcatggcaaatgtacagatttttttgttaataatgtgctaggatttgctaaaaaagaaaaaaaaaaaacccttttgagtttgccctagaataaatgagacttaattc

SEQ ID NO: 185698 - DNA, 4617 bp, Artificial Sequence
  derived and/or modified sequence
atggagcccagaatggagagctgcctggcccaggtgctgcagaaggacgtgggcaagagactgcaggtgggccaggagctgatcgactacttcagcgacaagcagaagagcgccgacctggagcacgaccagaccatgctggacaagctggtggacggcctggccaccagctgggtgaacagcagcaactacaaggtggtgctgctgggcatggacatcctgagcgccctggtgaccagactgcaggacagattcaaggcccagatcggcaccgtgctgcccagcctgatcgacagactgggcgacgccaaggacagcgtgagagagcaggaccagaccctgctgctgaagatcatggaccaggccgccaacccccagtacgtgtgggacagaatgctgggcggcttcaagcacaagaacttcagaaccagagagggcatctgcctgtgcctgatcgccaccctgaacgccagcggcgcccagaccctgaccctgagcaagatcgtgccccacatctgcaacctgctgggcgaccccaacagccaggtgagagacgccgccatcaacagcctggtggagatctacagacacgtgggcgagagagtgagagccgacctgagcaagaagggcctgccccagagcagactgaacgtgatcttcaccaagttcgacgaggtgcagaagagcggcaacatgatccagagcgccaacgacaagaacttcgacgacgaggacagcgtggacggcaacagacccagcagcgccagcagcaccagcagcaaggccccccccagcagcagaagaaacgtgggcatgggcaccaccagaagactgggcagcagcaccctgggcagcaagagcagcgccgccaaggagggcgccggcgccgtggacgaggaggacttcatcaaggccttcgacgacgtgcccgtggtgcagatctacagcagcagagacctggaggagagcatcaacaagatcagagagatcctgagcgacgacaagcacgactgggagcagagagtgaacgccctgaagaagatcagaagcctgctgctggccggcgccgccgagtacgacaacttcttccagcacctgagactgctggacggcgccttcaagctgagcgccaaggacctgagaagccaggtggtgagagaggcctgcatcaccctgggccacctgagcagcgtgctgggcaacaagttcgaccacggcgccgaggccatcatgcccaccatcttcaacctgatccccaacagcgccaagatcatggccaccagcggcgtggtggccgtgagactgatcatcagacacacccacatccccagactgatccccgtgatcaccagcaactgcaccagcaagagcgtggccgtgagaagaagatgcttcgagttcctggacctgctgctgcaggagtggcagacccacagcctggagagacacatcagcgtgctggccgagaccatcaagaagggcatccacgacgccgacagcgaggccagaatcgaggccagaaagtgctactggggcttccacagccacttcagcagagaggccgagcacctgtaccacaccctggagagcagctaccagaaggccctgcagagccacctgaagaacagcgacagcatcgtgagcctgccccagagcgacagaagcagcagcagcagccaggagagcctgaacagacccctgagcgccaagagaagccccaccggcagcaccaccagcagagccagcaccgtgagcaccaagagcgtgagcaccaccggcagcctgcagagaagcagaagcgacatcgacgtgaacgccgccgccagcgccaagagcaaggtgagcagcagcagcggcaccacccccttcagcagcgccgccgccctgccccccggcagctacgccagcctgggcagaatcagaaccagaagacagagcagcggcagcgccaccaacgtggccagcacccccgacaacagaggcagaagcagagccaaggtggtgagccagagccagagaagcagaagcgccaaccccgccggcgccggcagcagaagcagcagccccggcaagctgctgggcagcggctacggcggcctgaccggcggcagcagcagaggcccccccgtgacccccagcagcgagaagagaagcaagatccccagaagccagggctgcagcagagagaccagccccaacagaatcggcctggccagaagcagcagaatccccagacccagcatgagccagggctgcagcagagacaccagcagagagagcagcagagacaccagccccgccagaggcttcccccccctggacagattcggcctgggccagcccggcagaatccccggcagcgtgaacgccatgagagtgctgagcaccagcaccgacctggaggccgccgtggccgacgccctgaagaagcccgtgagaagaagatacgagccctacggcatgtacagcgacgacgacgccaacagcgacgccagcagcgtgtgcagcgagagaagctacggcagcagaaacggcggcatcccccactacctgagacagaccgaggacgtggccgaggtgctgaaccactgcgccagcagcaactggagcgagagaaaggagggcctgctgggcctgcagaacctgctgaagagccagagaaccctgagcagagtggagctgaagagactgtgcgagatcttcaccagaatgttcgccgacccccacagcaagagagtgttcagcatgttcctggagaccctggtggacttcatcatcatccacaaggacgacctgcaggactggctgttcgtgctgctgacccagctgctgaagaagatgggcgccgacctgctgggcagcgtgcaggccaaggtgcagaaggccctggacgtgaccagagacagcttccccttcgaccagcagttcaacatcctgatgagattcatcgtggaccagacccagacccccaacctgaaggtgaaggtggccatcctgaagtacatcgagagcctggccagacagatggaccccaccgacttcgtgaacagcagcgagaccagactggccgtgagcagaatcatcacctggaccaccgagcccaagagcagcgacgtgagaaaggccgcccagatcgtgctgatcagcctgttcgagctgaacacccccgagttcaccatgctgctgggcgccctgcccaagaccttccaggacggcgccaccaagctgctgcacaaccacctgaagaacagcagcaacaccagcgtgggcagccccagcaacaccatcggcagaacccccagcagacacaccagcagcagaaccagccccctgaccagccccaccaactgcagccacggcggcctgagccccagcagactgtggggctggagcgccgacggcctggccaagcaccccccccccttcagccagcccaacagcatccccaccgcccccagccacaaggccctgagaagaagctacagccccagcatgctggactacgacaccgagaacctgaacagcgaggagatctacagcagcctgagaggcgtgaccgaggccatcgagaagttcagcttcagaagccaggaggacctgaacgagcccatcaagagagacggcaagaaggagtgcgacatcgtgagcagagacggcggcgccgccagccccgccaccgagggcagaggcggcagcgaggtggagggcggcagaaccgccctggacaacaagaccagcctgctgaacacccagccccccagagccttccccggccccagagccagagactacaacccctacccctacagcgacgccatcaacacctacgacaagaccgccctgaaggaggccgtgttcgacgacgacatggagcagctgagagacgtgcccatcgaccacagcgacctggtggccgacctgctgaaggagctgagcaaccacaacgagagagtggaggagagaaagggcgccctgctggagctgctgaagatcaccagagaggacagcctgggcgtgtgggaggagcacttcaagaccatcctgctgctgctgctggagaccctgggcgacaaggaccacagcatcagagccctggccctgagagtgctgagagagatcctgagaaaccagcccgccagattcaagaactacgccgagctgaccatcatgaagaccctggaggcccacaaggacagccacaaggaggtggtgagagccgccgaggaggccgccagcaccctggccagcagcatccaccccgagcagtgcatcaaggtgctgtgccccatcatccagaccgccgactaccccatcaacctggccgccatcaagatgcagaccaaggtggtggagagaatcgccaaggagagcctgctgcagctgctggtggacatcatccccggcctgctgcagggctacgacaacaccgagagcagcgtgagaaaggccagcgtgttctgcctggtggccatctacagcgtgatcggcgaggacctgaagccccacctggcccagctgaccggcagcaagatgaagctgctgaacctgtacatcaagagagcccagaccaccaacagcaacagcagcagcagcagcgacgtgagcacccacagctag

SEQ ID NO: 185699 - protein, 1490 aa, Artificial Sequence
  derived and/or modified sequence
MAGNSLVLPIVLWGRKAPTHCISAVLLTDDGATIVTGCHDGQICLWDLSVELQINPRALLFGHTASITCLSKACASSDKQYIVSASESGEMCLWDVSDGRCIEFTKLACTHTGIQFYQFSVGNQREGRLLCHGHYPEILVVDATSLEVLYSLVSKISPDWISSMSIIRSHRTQEDTVVALSVTGILKVWIVTSEISDMQDTEPIFEEESKPIYCQNCQSISFCAFTQRSLLVVCSKYWRVFDAGDYSLLCSGPSENGQTWTGGDFVSSDKVIIWTENGQSYIYKLPASCLPASDSFRSDVGKAVENLIPPVQHILLDRKDKELLICPPVTRFFYGCREYFHKLLIQGDSSGRLNIWNISDTADKQGSEEGLAMTTSISLQEAFDKLNPCPAGIIDQLSVIPNSNEPLKVTASVYIPAHGRLVCGREDGSIVIVPATQTAIVQLLQGEHMLRRGWPPHRTLRGHRNKVTCLLYPHQVSARYDQRYLISGGVDFSVIIWDIFSGEMKHIFCVHGGEITQLLVPPENCSARVQHCICSVASDHSVGLLSLREKKCIMLASRHLFPIQVIKWRPSDDYLVVGCSDGSVYVWQMDTGALDRCVMGITAVEILNACDEAVPAAVDSLSHPAVNLKQAMTRRSLAALKNMAHHKLQTLATNLLASEASDKGNLPKYSHNSLMVQAIKTNLTDPDIHVLFFDVEALIIQLLTEEASRPNTALISPENLQKASGSSDKGGSFLTGKRAAVLFQQVKETIKENIKEHLLDDEEEDEEIMRQRREESDPEYRSSKSKPLTLLEYNLTMDTAKLFMSCLHAWGLNEVLDEVCLDRLGMLKPHCTVSFGLLSRGGHMSLMLPGYNQPACKLSHGKTEVGRKLPASEGVGKGTYGVSRAVTTQHLLSIISLANTLMSMTNATFIGDHMKKGPTRPPRPSTPDLSKARGSPPTSSNIVQGQIKQVAAPVVSARSDADHSGSDPPSAPALHTCFLVNEGWSQLAAMHCVMLPDLLGLDKFRPPLLEMLARRWQDRCLEVREAAQALLLAELRRIEQAGRKEAIDAWAPYLPQYIDHVISPGVTSEAAQTITTAPDASGPEAKVQEEEHDLVDDDITTGCLSSVPQMKKISTSYEERRKQATAIVLLGVIGAEFGAEIEPPKLLTRPRSSSQIPEGFGLTSGGSNYSLARHTCKALTFLLLQPPSPKLPPHSTIRRTAIDLIGRGFTVWEPYMDVSAVLMGLLELCADAEKQLANITMGLPLSPAADSARSARHALSLIATARPPAFITTIAKEVHRHTALAANTQSQQNMHTTTLARAKGEILRVIEILIEKMPTDVVDLLVEVMDIIMYCLEGSLVKKKGLQECFPAICRFYMVSYYERNHRIAVGARHGSVALYDIRTGKCQTIHGHKGPITAVAFAPDGRYLATYSNTDSHISFWQMNTSLLGSIGMLNSAPQLRCIKTYQVPPVQPASPGSHNALKLARLIWTSNRNVILMAHDGKEHRFMV

SEQ ID NO: 185700 - DNA, 4473 bp, Artificial Sequence
  derived and/or modified sequence
atggccggcaacagcctggtgctgcccatcgtgctgtggggcagaaaggcccccacccactgcatcagcgccgtgctgctgaccgacgacggcgccaccatcgtgaccggctgccacgacggccagatctgcctgtgggacctgagcgtggagctgcagatcaaccccagagccctgctgttcggccacaccgccagcatcacctgcctgagcaaggcctgcgccagcagcgacaagcagtacatcgtgagcgccagcgagagcggcgagatgtgcctgtgggacgtgagcgacggcagatgcatcgagttcaccaagctggcctgcacccacaccggcatccagttctaccagttcagcgtgggcaaccagagagagggcagactgctgtgccacggccactaccccgagatcctggtggtggacgccaccagcctggaggtgctgtacagcctggtgagcaagatcagccccgactggatcagcagcatgagcatcatcagaagccacagaacccaggaggacaccgtggtggccctgagcgtgaccggcatcctgaaggtgtggatcgtgaccagcgagatcagcgacatgcaggacaccgagcccatcttcgaggaggagagcaagcccatctactgccagaactgccagagcatcagcttctgcgccttcacccagagaagcctgctggtggtgtgcagcaagtactggagagtgttcgacgccggcgactacagcctgctgtgcagcggccccagcgagaacggccagacctggaccggcggcgacttcgtgagcagcgacaaggtgatcatctggaccgagaacggccagagctacatctacaagctgcccgccagctgcctgcccgccagcgacagcttcagaagcgacgtgggcaaggccgtggagaacctgatcccccccgtgcagcacatcctgctggacagaaaggacaaggagctgctgatctgcccccccgtgaccagattcttctacggctgcagagagtacttccacaagctgctgatccagggcgacagcagcggcagactgaacatctggaacatcagcgacaccgccgacaagcagggcagcgaggagggcctggccatgaccaccagcatcagcctgcaggaggccttcgacaagctgaacccctgccccgccggcatcatcgaccagctgagcgtgatccccaacagcaacgagcccctgaaggtgaccgccagcgtgtacatccccgcccacggcagactggtgtgcggcagagaggacggcagcatcgtgatcgtgcccgccacccagaccgccatcgtgcagctgctgcagggcgagcacatgctgagaagaggctggcccccccacagaaccctgagaggccacagaaacaaggtgacctgcctgctgtacccccaccaggtgagcgccagatacgaccagagatacctgatcagcggcggcgtggacttcagcgtgatcatctgggacatcttcagcggcgagatgaagcacatcttctgcgtgcacggcggcgagatcacccagctgctggtgccccccgagaactgcagcgccagagtgcagcactgcatctgcagcgtggccagcgaccacagcgtgggcctgctgagcctgagagagaagaagtgcatcatgctggccagcagacacctgttccccatccaggtgatcaagtggagacccagcgacgactacctggtggtgggctgcagcgacggcagcgtgtacgtgtggcagatggacaccggcgccctggacagatgcgtgatgggcatcaccgccgtggagatcctgaacgcctgcgacgaggccgtgcccgccgccgtggacagcctgagccaccccgccgtgaacctgaagcaggccatgaccagaagaagcctggccgccctgaagaacatggcccaccacaagctgcagaccctggccaccaacctgctggccagcgaggccagcgacaagggcaacctgcccaagtacagccacaacagcctgatggtgcaggccatcaagaccaacctgaccgaccccgacatccacgtgctgttcttcgacgtggaggccctgatcatccagctgctgaccgaggaggccagcagacccaacaccgccctgatcagccccgagaacctgcagaaggccagcggcagcagcgacaagggcggcagcttcctgaccggcaagagagccgccgtgctgttccagcaggtgaaggagaccatcaaggagaacatcaaggagcacctgctggacgacgaggaggaggacgaggagatcatgagacagagaagagaggagagcgaccccgagtacagaagcagcaagagcaagcccctgaccctgctggagtacaacctgaccatggacaccgccaagctgttcatgagctgcctgcacgcctggggcctgaacgaggtgctggacgaggtgtgcctggacagactgggcatgctgaagccccactgcaccgtgagcttcggcctgctgagcagaggcggccacatgagcctgatgctgcccggctacaaccagcccgcctgcaagctgagccacggcaagaccgaggtgggcagaaagctgcccgccagcgagggcgtgggcaagggcacctacggcgtgagcagagccgtgaccacccagcacctgctgagcatcatcagcctggccaacaccctgatgagcatgaccaacgccaccttcatcggcgaccacatgaagaagggccccaccagaccccccagacccagcacccccgacctgagcaaggccagaggcagcccccccaccagcagcaacatcgtgcagggccagatcaagcaggtggccgcccccgtggtgagcgccagaagcgacgccgaccacagcggcagcgacccccccagcgcccccgccctgcacacctgcttcctggtgaacgagggctggagccagctggccgccatgcactgcgtgatgctgcccgacctgctgggcctggacaagttcagaccccccctgctggagatgctggccagaagatggcaggacagatgcctggaggtgagagaggccgcccaggccctgctgctggccgagctgagaagaatcgagcaggccggcagaaaggaggccatcgacgcctgggccccctacctgccccagtacatcgaccacgtgatcagccccggcgtgaccagcgaggccgcccagaccatcaccaccgcccccgacgccagcggccccgaggccaaggtgcaggaggaggagcacgacctggtggacgacgacatcaccaccggctgcctgagcagcgtgccccagatgaagaagatcagcaccagctacgaggagagaagaaagcaggccaccgccatcgtgctgctgggcgtgatcggcgccgagttcggcgccgagatcgagccccccaagctgctgaccagacccagaagcagcagccagatccccgagggcttcggcctgaccagcggcggcagcaactacagcctggccagacacacctgcaaggccctgaccttcctgctgctgcagccccccagccccaagctgcccccccacagcaccatcagaagaaccgccatcgacctgatcggcagaggcttcaccgtgtgggagccctacatggacgtgagcgccgtgctgatgggcctgctggagctgtgcgccgacgccgagaagcagctggccaacatcaccatgggcctgcccctgagccccgccgccgacagcgccagaagcgccagacacgccctgagcctgatcgccaccgccagaccccccgccttcatcaccaccatcgccaaggaggtgcacagacacaccgccctggccgccaacacccagagccagcagaacatgcacaccaccaccctggccagagccaagggcgagatcctgagagtgatcgagatcctgatcgagaagatgcccaccgacgtggtggacctgctggtggaggtgatggacatcatcatgtactgcctggagggcagcctggtgaagaagaagggcctgcaggagtgcttccccgccatctgcagattctacatggtgagctactacgagagaaaccacagaatcgccgtgggcgccagacacggcagcgtggccctgtacgacatcagaaccggcaagtgccagaccatccacggccacaagggccccatcaccgccgtggccttcgcccccgacggcagatacctggccacctacagcaacaccgacagccacatcagcttctggcagatgaacaccagcctgctgggcagcatcggcatgctgaacagcgccccccagctgagatgcatcaagacctaccaggtgccccccgtgcagcccgccagccccggcagccacaacgccctgaagctggccagactgatctggaccagcaacagaaacgtgatcctgatggcccacgacggcaaggagcacagattcatggtgtag

SEQ ID NO: 185701 - DNA, 2448 bp, Artificial Sequence
  derived and/or modified sequence
atggccggcaacagcctggtgctgcccatcgtgctgtggggcagaaaggcccccacccactgcatcagcgccgtgctgctgaccgacgacggcgccaccatcgtgaccggctgccacgacggccagatctgcctgtgggacctgagcgtggagctgcagatcaaccccagagccctgctgttcggccacaccgccgtgctgttccagcaggtgaaggagaccatcaaggagaacatcaaggagcacctgctggacgacgaggaggaggacgaggagatcatgagacagagaagagaggagagcgaccccgagtacagaagcagcaagagcaagcccctgaccctgctggagtacaacctgaccatggacaccgccaagctgttcatgagctgcctgcacgcctggggcctgaacgaggtgctggacgaggtgtgcctggacagactgggcatgctgaagccccactgcaccgtgagcttcggcctgctgagcagaggcggccacatgagcctgatgctgcccggctacaaccagcccgcctgcaagctgagccacggcaagaccgaggtgggcagaaagctgcccgccagcgagggcgtgggcaagggcacctacggcgtgagcagagccgtgaccacccagcacctgctgagcatcatcagcctggccaacaccctgatgagcatgaccaacgccaccttcatcggcgaccacatgaagaagggccccaccagaccccccagacccagcacccccgacctgagcaaggccagaggcagcccccccaccagcagcaacatcgtgcagggccagatcaagcaggtggccgcccccgtggtgagcgccagaagcgacgccgaccacagcggcagcgacccccccagcgcccccgccctgcacacctgcttcctggtgaacgagggctggagccagctggccgccatgcactgcgtgatgctgcccgacctgctgggcctggacaagttcagaccccccctgctggagatgctggccagaagatggcaggacagatgcctggaggtgagagaggccgcccaggccctgctgctggccgagctgagaagaatcgagcaggccggcagaaaggaggccatcgacgcctgggccccctacctgccccagtacatcgaccacgtgatcagccccggcgtgaccagcgaggccgcccagaccatcaccaccgcccccgacgccagcggccccgaggccaaggtgcaggaggaggagcacgacctggtggacgacgacatcaccaccggctgcctgagcagcgtgccccagatgaagaagatcagcaccagctacgaggagagaagaaagcaggccaccgccatcgtgctgctgggcgtgatcggcgccgagttcggcgccgagatcgagccccccaagctgctgaccagacccagaagcagcagccagatccccgagggcttcggcctgaccagcggcggcagcaactacagcctggccagacacacctgcaaggccctgaccttcctgctgctgcagccccccagccccaagctgcccccccacagcaccatcagaagaaccgccatcgacctgatcggcagaggcttcaccgtgtgggagccctacatggacgtgagcgccgtgctgatgggcctgctggagctgtgcgccgacgccgagaagcagctggccaacatcaccatgggcctgcccctgagccccgccgccgacagcgccagaagcgccagacacgccctgagcctgatcgccaccgccagaccccccgccttcatcaccaccatcgccaaggaggtgcacagacacaccgccctggccgccaacacccagagccagcagaacatgcacaccaccaccctggccagagccaagggcgagatcctgagagtgatcgagatcctgatcgagaagatgcccaccgacgtggtggacctgctggtggaggtgatggacatcatcatgtactgcctggagggcagcctggtgaagaagaagggcctgcaggagtgcttccccgccatctgcagattctacatggtgagctactacgagagaaaccacagaatcgccgtgggcgccagacacggcagcgtggccctgtacgacatcagaaccggcaagtgccagaccatccacggccacaagggccccatcaccgccgtggccttcgcccccgacggcagatacctggccacctacagcaacaccgacagccacatcagcttctggcagatgaacaccagcctgctgggcagcatcggcatgctgaacagcgccccccagctgagatgcatcaagacctaccaggtgccccccgtgcagcccgccagccccggcagccacaacgccctgaagctggccagactgatctggaccagcaacagaaacgtgatcctgatggcccacgacggcaaggagcacagattcatggtgtag

SEQ ID NO: 185702 - DNA, 4473 bp, Artificial Sequence
  derived and/or modified sequence
atggccggtaattctcttgttctgccaatcgtgctgtggggacggaaggcccctacccactgtatctctgccgtgttgctcactgatgatggggcgaccatcgtcacggggtgccatgacggacagatttgcctctgggatttaagtgttgaactccagatcaaccccagggcactgttattcggccacacagcttctatcacatgcttgagtaaggcatgcgcgtcgtcagacaaacagtatatcgtgtcggcctctgagagcggcgagatgtgcctgtgggacgtgagcgatgggcgctgcatagaattcaccaagctggcctgcacgcacactggcattcagttctaccagttctctgtgggtaaccagcgcgagggacgccttttgtgccacggtcattatcccgaaatccttgtcgtcgacgccaccagtctggaagttttatacagcttagtctccaaaatatccccagactggatctcgtccatgagcatcataaggtctcataggacccaagaggacaccgtggtggctctgtcagtaacaggaatcctgaaagtgtggatcgtgaccagcgagatcagtgatatgcaggataccgagcccattttcgaagaggagtccaagcctatctactgtcagaactgccaatcaatttcattctgtgctttcacccaacgctcactgctcgtggtgtgcagcaagtattggcgggtctttgatgccggagattacagcctgctgtgttcaggcccctccgagaacggacaaacctggacgggcggtgatttcgtgagttcagacaaagttataatctggacagagaacggacagagttatatctacaagctgccagcctcttgtctaccagcttccgactcatttaggtctgatgtcgggaaggccgtggagaacctgattccccctgtccagcacattctgctggatcggaaagacaaggaactgctgatatgtccgccggtgacccgatttttctatggctgccgagagtattttcacaagcttctgattcaaggggattcttcaggccggctgaacatctggaacatttctgatacagctgataaacagggttcagaagaaggcctggccatgacaacctccatatccctccaggaagcctttgacaaactcaacccttgtccagctggcattatcgatcaactgtctgtaatccctaactccaacgagccactcaaagtgacagctagcgtgtacataccagctcatggcagactggtctgtggccgcgaggatggatccatcgtgattgtaccagcgacacagacagcaatcgtgcagcttttacaaggtgagcacatgctgcggcggggttggccaccgcaccggaccctcagggggcataggaacaaagtgacgtgcctcctctacccccaccaggttagtgctcggtacgatcagcgctatttgatctccggaggcgtggattttagtgttattatttgggatatattcagcggcgagatgaagcatattttttgcgtgcacggcggcgagattacccagttgctagtgccaccggaaaactgttctgccagggtgcaacactgcatatgtagcgtcgcatctgaccactctgtgggactcttgtcccttagggagaagaaatgtatcatgctcgcaagtcggcatctcttccccatccaggtcattaagtggagaccgtccgatgattatctggtggtgggttgttctgacggcagtgtgtatgtatggcaaatggatacaggagccctcgaccgatgtgtgatgggcatcacagctgtggaaatactcaacgcttgcgatgaggctgtgcctgctgctgtcgattccctgtcacatccagcagtgaacctcaaacaagctatgactcggcgcagcctggctgccctcaaaaacatggcacatcacaaactgcagacactggccacaaacctgctggcaagtgaagccagcgataaaggtaacttgccaaaatacagtcataattctcttatggtgcaggccatcaagacgaatctcacagatcctgatatccacgtcctattctttgacgtggaagccttaataattcagttgttgacagaagaagcctcccgtccgaatacagctcttatctctcccgagaatctccaaaaagcttccggaagcagcgacaagggtggctcatttctgacaggtaagagagctgcagtactctttcaacaggtgaaggagaccattaaggaaaacataaaggaacatttgttagatgacgaggaggaagacgaagaaattatgaggcaacgcagagaggaaagtgacccggaataccggtccagtaagtcaaagccattgacgctgttggagtataacctgacgatggataccgccaagctctttatgtcctgtctacacgcatggggactgaatgaggttctggatgaggtctgtctggatcggctaggtatgctgaagccgcactgcactgtttcgttcggtctgctgtccagaggaggccacatgtccctcatgttaccaggctacaatcagcctgcttgcaagttaagccatgggaaaactgaagtcgggcgcaagttgccagcaagtgaaggtgtcggcaaggggacttatggcgtgtcaagagctgtaactacacagcacttgctgtcgattatttcactcgcaaatactctgatgtccatgactaatgctacattcatcggggatcatatgaaaaaaggtcccaccagacctcctagaccttcaacacccgatctgagcaaggcacgggggtccccccccacgagtagtaatatagtgcaaggccagatcaagcaggtggcagcccctgtggtgtccgcacgttctgacgctgaccatagtggaagtgaccctccgtcggcccctgctctgcacacctgtttcttggtgaatgaggggtggagtcaactggctgccatgcactgtgtgatgctgcccgatctgctaggcctggacaagtttaggccgccgctactcgagatgcttgcccggaggtggcaggaccgctgtctcgaagttagggaggccgcccaggctctgctcctcgctgagctgcgacgcattgaacaggctggacgaaaggaggcaattgacgcgtgggctccgtatttgccccagtacattgaccacgtgatatcaccaggtgtaactagcgaggcggctcagacaataactaccgcacccgatgcctccggcccggaggccaaagtgcaagaggaagagcacgatctcgtcgacgatgacatcaccaccgggtgtctatcaagtgtacctcagatgaaaaaaatttctacatcatatgaagaacgacgtaaacaggctaccgcaatcgtgttattaggcgtgattggggcggagtttggagccgagatcgaaccccccaagttattaacaagaccgcggtcgtcctctcagatccccgagggcttcggcttgacgagtggaggatcgaattatagcttggcccgacacacatgcaaggctctaaccttcctattgcttcagcccccttcccccaagctgcccccccacagcacaatccgtcggacagctatcgatcttattgggcgcggatttacagtgtgggaaccctatatggatgtgagcgctgtgctgatggggctgctcgagctgtgtgccgatgccgagaaacagttagccaacattacaatgggattgccgctctcccctgccgcggactctgcgcggtccgccagacacgcacttagtttgatcgccaccgccagaccaccagccttcattacgacaatagccaaggaggtccacagacacaccgccttagccgctaatactcagagccagcagaacatgcatacaacaactctggcgcgggctaagggggaaatcctgagagtgatagagatactaatcgaaaaaatgcccactgacgtggtggatctcttggttgaggtaatggatatcatcatgtactgtctcgagggaagcctggttaaaaagaagggccttcaggagtgctttcctgcgatctgtcggttctatatggtttcctattacgagagaaaccatagaatagccgtgggggccaggcatggatcggtggccttatacgacatcagaacgggtaaatgccagactatccacgggcataaaggacctataaccgcggtggcctttgcacctgatggccgataccttgccacctactcaaacaccgattcacatatctcattttggcagatgaacaccagtttgttgggtagcattgggatgctgaacagcgctcctcagttacggtgtattaagacctatcaggttccccctgtgcaacctgcatcccccggctcacataatgccttgaaactcgctcgattgatttggacttctaatagaaatgtaatcctcatggctcatgacggcaaggagcatcgcttcatggtgtag

SEQ ID NO: 185703 - DNA, 2448 bp, Artificial Sequence
  derived and/or modified sequence
atggccgggaacagcctcgttttaccaattgtgctgtgggggcgaaaagctccgactcattgcataagcgctgtactactaactgatgacggagctacaattgtcaccgggtgtcacgatggacagatctgtctctgggacctgtccgttgagttacagataaatccaagggctctcctgttcgggcatacagctgtgcttttccagcaggtgaaggagacaatcaaggaaaacattaaggaacacctgctggacgatgaggaggaggacgaggagattatgcgacagagaagggaagaaagtgacccagagtacaggtctagcaaaagcaaaccgcttaccctgttagaatacaacttaactatggatacagccaagctgttcatgtcatgcttacatgcatgggggctgaatgaggtgttggacgaggtctgtctggaccggctgggcatgttaaagccccactgcactgtttccttcggactcctaagcagaggcggccatatgagtctgatgcttcccggctataaccagcctgcctgtaaactttcacatgggaagacagaggtagggaggaaacttccagctagcgaaggggttggaaagggaacatacggagttagcagagccgtgacaactcaacatctgctttctatcatcagcctggccaacacacttatgtctatgacaaatgccacctttatcggtgaccacatgaaaaagggacccacccggccgcccaggccttcgaccccagatctcagcaaggcaagagggagcccccccacttcgagcaacatagtacaagggcagattaagcaggttgccgcccctgtagttagcgctcgctccgatgctgaccatagtggcagtgacccaccgagtgcgcccgcgctgcatacttgctttctggtgaacgagggctggtcccaattagcagccatgcactgcgtaatgctgccagacctcctgggattggataaatttcgtccccctctgctggagatgttagcccggcgctggcaagatcggtgtctggaggtacgcgaggcagcgcaagccctgttactcgccgagctgagacggattgagcaggctggtaggaaggaggccatcgatgcttgggctccctatcttccccagtatatcgatcatgttatttcccccggagttacctcagaagccgcgcaaacaatcacgacagcgcccgatgctagtggaccggaggctaaagtacaggaagaagaacacgatcttgtcgatgacgacataaccacgggatgtttatcctccgtcccacagatgaaaaaaattagtactagctacgaagagaggcgtaagcaggccactgccattgtgcttctcggtgtgatcggagccgagtttggggctgagatcgaaccccctaaactgttaacccggcctcggtcatcatctcagattccagagggctttggactcacatctggtggttccaactacagccttgcacgccatacctgcaaagcactcacttttcttttgcttcagccaccaagtcctaagctgcctccgcacagcaccatcaggcgcaccgccatcgacttaattggtagagggttcacagtatgggagccctatatggatgtttcagcggttttgatggggctgcttgagctctgtgccgacgccgagaaacagctcgctaacataactatgggcctcccgttgtcaccggctgcagattctgcacgttcagctaggcacgcgttgagtctcattgcgacagccagaccaccggcttttattacaactatcgccaaggaggtgcatcggcataccgcgctggctgcgaacacccaatcccagcagaacatgcatacaaccactctcgcgcgggccaagggagaaatcctgcgcgtgattgagatactgatcgagaagatgcctactgacgtcgtagatttgctagtggaggttatggacatcatcatgtactgcttggaagggtcactggttaagaagaaggggctccaggaatgcttcccagctatatgcagattttacatggtctcctattacgagagaaatcatcgaattgctgttggcgcccggcatggcagtgtggccctgtatgacattcggacaggcaaatgccagacaatccatgggcacaagggccccatcaccgctgttgcctttgcaccggacggacgctacctggcaacatacagcaacacggattcacatattagcttttggcagatgaacacttctttgttaggtagtatcggaatgctgaattctgcacctcagttgagatgtattaagacttaccaggtccctccggtccaacccgccagccccggctcacataacgctctgaagctcgccaggcttatctggactagcaataggaatgtgatcctgatggcccacgatggaaaagagcaccgcttcatggtgtag

SEQ ID NO: 185704 - DNA, 4473 bp, Artificial Sequence
  derived and/or modified sequence
atggccggcaacagcctggtgctgcccatcgtgctgtggggcaggaaggcccccacccactgcatctctgctgtgctgctgacagatgatggagccaccatcgtgacaggctgccatgatggccagatctgcctgtgggacctgtctgtggagctgcagatcaacccccgggccctgctgtttggccacacagccagcatcacctgcctgagcaaggcctgtgccagcagtgacaagcagtacatcgtgtctgccagcgagagcggggagatgtgcctgtgggatgtgtctgatggccgctgcatcgagttcaccaagctggcctgcacccacacaggcatccagttctaccagttctctgtgggcaaccagcgggagggccgcctgctgtgccacggccactacccagagatcctggtggtggatgccaccagcctggaggtgctgtacagcctggtgtccaagatcagcccagactggatcagctccatgagcatcatccgcagccacaggacccaggaggacacagtggtggccctgtctgtgacaggcatcctgaaggtgtggatcgtgaccagcgagatcagtgacatgcaggacacagagcccatctttgaggaggagagcaagcccatctactgccagaactgccagagcatctccttctgtgccttcacccagaggagcctgctggtggtgtgcagcaagtactggagggtgtttgatgctggggactacagcctgctgtgcagcggccccagtgaaaatggccagacctggacaggaggagactttgtgtccagtgacaaggtgatcatctggacagaaaatggccagagctacatctacaagctgcctgccagctgcctgcctgccagtgacagcttcagaagtgatgtgggcaaggctgtggagaacctgatcccccctgtgcagcacatcctgctggacaggaaggacaaggagctgctgatctgcccccctgtgacccgcttcttctacggctgccgggagtacttccacaagctgctgatccagggcgacagcagcggccgcctgaacatctggaacatcagtgacacagctgacaagcagggcagcgaggagggcctggccatgaccaccagcatcagcctgcaggaggcctttgacaagctgaacccctgcccagctggcatcatcgaccagctgagcgtcatccccaacagcaatgagcccctgaaggtgacagcctctgtgtacatcccagcccacggccgcctggtgtgtggccgggaggatggcagcatcgtcatcgtgcctgccacccagacagccatcgtgcagctgctgcagggcgagcacatgctgcggcggggctggccaccccacaggaccctgcggggccacaggaacaaggtgacctgcctgctgtacccccaccaggtgtctgcccgctatgaccagcgctacctgatctctggaggagtggacttcagcgtcatcatctgggacatcttctctggagagatgaagcacatcttctgtgtgcatggaggagagatcacccagctgctggtgcccccagagaactgcagcgcccgggtgcagcactgcatctgcagcgtggccagtgaccacagcgtgggcctgctgagcctgcgggagaagaagtgcatcatgctggccagccgccacctgttccccatccaggtgatcaagtggaggcccagtgatgactacctggtggtgggctgcagtgatggctctgtgtatgtgtggcagatggacacaggagccctggacagatgtgtgatgggcatcacagctgtggagatcctgaatgcctgtgatgaagctgtgcctgctgctgtggacagcctgagccaccctgctgtgaacctgaagcaggccatgacccggcgcagcctggccgccctgaagaacatggcccaccacaagctgcagaccctggccaccaacctgctggccagcgaggccagtgacaagggcaacctgcccaagtacagccacaacagcctgatggtgcaggccatcaagaccaacctgacagatcctgacatccacgtgctcttctttgatgtggaggccctgatcatccagctgctgacagaggaggccagccggcccaacacagccctgatcagccctgagaacctgcagaaggccagcggcagcagtgacaagggcggcagcttcctgaccgggaagagagctgctgtgctcttccagcaggtgaaggagaccatcaaggagaacatcaaggagcacctgctggatgatgaggaggaggatgaggagatcatgaggcagaggcgggaggagagtgaccctgagtaccgcagcagcaagagcaagcccctgaccctgctggagtacaacctgaccatggacacagccaagctgttcatgagctgcctgcacgcctggggcctgaatgaggtgctggatgaggtgtgcctggaccggctgggcatgctgaagccccactgcaccgtgtcctttggcctgctgagcagaggaggccacatgagcctgatgctgcccggctacaaccagcctgcctgcaagctgagccacggcaagacagaggtgggcaggaagctgcctgccagcgagggcgtgggcaagggcacctacggcgtgtccagagctgtgaccacccagcacctgctgagcatcatcagcctggccaacaccctgatgtccatgaccaatgccaccttcatcggggaccacatgaagaagggccccaccaggcctccccggcccagcaccccagacctgagcaaggcccggggcagcccccccaccagcagcaacatcgtgcagggccagatcaagcaggtggccgcccctgtggtgtctgcccggagtgatgctgaccacagcggcagtgacccccccagcgccccagccctgcacacctgcttcctggtgaatgaaggctggagccagctggccgccatgcactgtgtgatgctgcctgacctgctgggcctggacaagttccggccccccctgctggagatgctggcccggcgctggcaggaccgctgcctggaggtgcgggaggccgcccaggccctgctgctggccgagctgcggcgcatcgagcaggccggcaggaaggaggccattgatgcctgggccccctacctgccccagtacatcgaccacgtgatcagccctggggtgaccagcgaggccgcccagaccatcaccacagccccagatgccagcggccctgaggccaaggtgcaggaggaggagcatgacctggtggatgatgacatcaccaccggctgcctgagctctgtgccccagatgaagaagatcagcaccagctatgaggagaggaggaagcaggccacagccatcgtgctgctgggcgtgattggagctgagtttggagctgagattgagccccccaagctgctgacccggcccaggagcagcagccagatccctgagggcttcggcctgaccagcggcggcagcaactacagcctggcccggcacacctgcaaggccctgaccttcctgctgctgcagccccccagccccaagctgcccccccacagcaccatccggaggacagccatcgacctgattggccggggcttcaccgtgtgggagccctacatggatgtgtctgctgtgctgatgggcctgctggagctgtgtgctgatgctgagaagcagctggccaacatcaccatgggcctgcccctgagccctgctgctgacagcgcccggagcgcccggcatgccctgagcctcatcgccacagcccggcccccagccttcatcaccaccatcgccaaggaggtgcaccgccacacagccctggccgccaacacccagagccagcagaacatgcacaccaccaccctggcccgggccaagggggagatcctgcgggtcatcgagatcctgattgagaagatgcccacagatgtggtggacctgctggtggaggtgatggacatcatcatgtactgcctggagggcagcctggtgaagaagaagggcctgcaggagtgcttccctgccatctgccgcttctacatggtgtcctactatgaaagaaaccacagaattgctgtgggcgcccggcacggctctgtggccctgtatgacatcagaacaggcaagtgccagaccatccacggccacaagggccccatcacagctgtggcctttgccccagatggccgctacctggccacctacagcaacacagacagccacatctccttctggcagatgaacaccagcctgctgggcagcatcggcatgctgaacagcgccccccagctgcgctgcatcaagacctaccaggtgccccctgtgcagcctgccagccctggcagccacaatgccctgaagctggcccggctcatctggaccagcaacagaaatgtcatcctgatggcccatgatggcaaggagcaccgcttcatggtgtag

SEQ ID NO: 185705 - DNA, 2448 bp, Artificial Sequence
  derived and/or modified sequence
atggccggcaacagcctggtgctgcccatcgtgctgtggggcaggaaggcccccacccactgcatctctgctgtgctgctgacagatgatggagccaccatcgtgacaggctgccatgatggccagatctgcctgtgggacctgtctgtggagctgcagatcaacccccgggccctgctgtttggccacacagctgtgctcttccagcaggtgaaggagaccatcaaggagaacatcaaggagcacctgctggatgatgaggaggaggatgaggagatcatgaggcagaggcgggaggagagtgaccctgagtaccgcagcagcaagagcaagcccctgaccctgctggagtacaacctgaccatggacacagccaagctgttcatgagctgcctgcacgcctggggcctgaatgaggtgctggatgaggtgtgcctggaccggctgggcatgctgaagccccactgcaccgtgtcctttggcctgctgagccggggcggccacatgagcctgatgctgcccggctacaaccagcctgcctgcaagctgagccacggcaagacagaggtgggcaggaagctgcctgccagcgagggcgtgggcaagggcacctatggagtgtccagagctgtgaccacccagcacctgctgagcatcatcagcctggccaacaccctgatgtccatgaccaatgccaccttcatcggggaccacatgaagaagggccccacccggcccccccggcccagcaccccagacctgagcaaggcccggggcagcccccccaccagcagcaacatcgtgcagggccagatcaagcaggtggccgcccctgtggtgtctgcccggagtgatgctgaccacagcggcagtgaccccccatctgccccagccctgcacacctgcttcctggtgaatgaaggctggagccagctggccgccatgcactgtgtgatgctgcctgacctgctgggcctggacaagttccggccccccctgctggagatgctggcccggcgctggcaggaccgctgcctggaggtgcgggaggccgcccaggccctgctgctggccgagctgcggagaattgagcaggccggcaggaaggaggccattgatgcctgggccccctacctgccccagtacatcgaccacgtgatcagccctggggtgaccagcgaggccgcccagaccatcaccacagccccagatgccagcggccctgaggccaaggtgcaggaggaggagcatgacctggtggatgatgacatcaccaccggctgcctgagctctgtgccccagatgaagaagatcagcaccagctatgaggagaggaggaagcaggccacagccatcgtgctgctgggcgtcatcggggctgagtttggagctgagattgagccccccaagctgctgacccggcccaggagcagcagccagatccctgagggcttcggcctgaccagcggcggcagcaactacagcctggcccggcacacctgcaaggccctgaccttcctgctgctgcagccccccagccccaagctgcccccccacagcaccatcagaagaacagccatcgacctgattggccggggcttcaccgtgtgggagccctacatggatgtgtctgctgtgctgatgggcctgctggagctgtgtgctgatgctgagaagcagctggccaacatcaccatgggcctgcccctgagccctgctgctgacagcgcccggagcgcccggcatgccctgagcctgattgccacagcccggcccccagccttcatcaccaccatcgccaaggaggtgcaccgccacacagccctggccgccaacacccagagccagcagaacatgcacaccaccaccctggcccgggccaagggggagatcctgcgggtgattgagatcctgattgagaagatgcccacagatgtggtggacctgctggtggaggtgatggacatcatcatgtactgcctggagggcagcctggtgaagaagaagggcctgcaggagtgcttccctgccatctgccgcttctacatggtgtcctactatgaaagaaaccacagaattgctgtgggcgcccggcacggctctgtggccctgtatgacatcagaacaggcaagtgccagaccatccacggccacaagggccccatcacagctgtggcctttgccccagatggccgctacctggccacctacagcaacacagacagccacatctccttctggcagatgaacaccagcctgctgggcagcatcggcatgctgaacagcgccccccagctgcgctgcatcaagacctaccaggtgccccctgtgcagcctgccagccctggcagccacaatgccctgaagctggcccggctcatctggaccagcaacagaaatgtcatcctgatggcccatgatggcaaggagcaccgcttcatggtgtag

SEQ ID NO: 185706 - DNA, 4473 bp, Artificial Sequence
  derived and/or modified sequence
atggccggcaacagcctggtgctgcccatcgtgctgtggggccggaaagcccccacccactgtatctctgccgtgttgttgacggacgatggcgccaccatcgtgacaggctgccacgatgggcaaatttgcctttgggatctgagcgtggagctgcagatcaacccaagagcattacttttcggacacactgcatccatcacctgcttgagcaaagcctgcgcctcatcagacaagcagtacatcgtcagcgccagcgagagtggtgagatgtgcctttgggacgtttctgacggaagatgtattgagtttacgaaacttgcatgcacccacaccgggatccaattttatcagttttccgtcggtaaccagcgggagggaaggctgctttgccatggacactaccccgaaatcctcgtcgtggatgccacaagccttgaggtcctctactcgcttgtgagtaagatctctcccgattggatttctagcatgtctatcataaggagccataggacccaagaagatactgtcgtcgccctgtctgtgaccggcatcctgaaagtttggatcgtcacaagcgaaatttccgatatgcaggatactgaacccattttcgaagaggaaagcaagccaatctactgtcagaattgccagagcatcagtttttgcgcctttactcaacgcagcctcttggtcgtgtgttctaaatattggagagtatttgacgccggggactatagtttgctctgttcaggaccttcagagaatgggcaaacttggacaggtggcgacttcgtaagctctgacaaagtgatcatctggaccgagaatggacagagttacatctataagttgcctgcatcgtgtctacccgccagcgactccttcaggtcagatgtgggaaaggcagtggaaaatctgattcctccagtccagcacatcctgctcgatcgaaaggacaaggagttgttaatttgcccccccgtgactaggtttttctatgggtgtcgggagtactttcataagctgcttatccagggagattcatctgggcgcctcaacatttggaacataagcgacaccgcagacaagcagggctcggaggagggcctggcaatgacaacctcaatctccctgcaggaggcctttgacaagttgaatccatgccctgcgggcatcatcgaccaactgtctgtgatccctaactccaacgagcctctgaaggtgaccgcctcagtatatattccagcacatgggcgcctggtctgcgggagagaggatggaagcatcgtgatcgtgcctgctacacagacagccatcgtccagcttctacagggggagcacatgctgcgccgcggatggccccctcaccggacactccgcggacaccgcaataaggttacttgcctgctctatcctcatcaagtctctgcccggtatgaccaaaggtatctgatcagcggaggcgtcgacttttcagtaattatctgggacatattttccggggagatgaaacacatcttttgcgtccatggcggagaaataacgcagttgttggtgccaccagagaattgcagcgcgcgggtccagcactgtatctgctcagttgcttctgaccattccgtcggcttgctcagcctgagggagaaaaaatgcatcatgctggctagtaggcacttgtttcccatacaggtcattaagtggcgcccaagcgatgactacctggtggtcggctgttccgatgggagcgtatatgtgtggcagatggacaccggagctctagatagatgtgtgatggggatcacggcggtggaaatcctcaatgcctgtgacgaagcagtccccgctgctgtggattcactgagccacccggcggtcaatctgaagcaggcaatgactcggcgcagtctggccgcacttaagaatatggcccaccacaaactgcagaccttggctaccaacctacttgcgtcagaagcgtcggataagggcaacctccccaaatactcccataacagcttgatggtgcaggctatcaagaccaatctgacggatcccgatatccacgtcctgttctttgacgtggaggccttaattattcagctcctgactgaagaagcatcccggcctaatactgctctgatatcccctgaaaatctgcagaaagcatcagggagctctgacaaaggggggtcctttctcacaggcaaaagagccgccgtactcttccagcaagttaaagagactatcaaagagaacattaaggaacatctcttagacgatgaggaagaagacgaggaaattatgcgccagaggagggaagaatctgatccagagtaccggagctccaaaagcaagcccttaactttgctagaatacaacttgactatggacaccgcgaagctgtttatgagttgtctgcacgcctgggggctgaatgaggtattagatgaggtttgtctggataggttgggtatgctgaaacctcactgcacggtgagctttggacttctttctcgaggtggtcatatgtccctgatgctgccaggatacaatcagccagcgtgcaagctgtctcacggtaagaccgaagtcggccgcaaacttccagcatctgaaggagttggaaaaggtacttacggggtaagccgagccgtcaccacgcaacatctcctcagcattatcagtttggcaaatacactgatgtccatgaccaacgccacattcatcggagaccatatgaagaaagggccaactcgacccccacggccctctacacccgacttatctaaagcccgcggcagcccacccacctcctctaacatcgtacagggccagattaagcaggtagcggcccccgtcgtaagtgcccgctccgacgcagaccactccgggtctgaccctccaagcgctccagctctacacacctgttttcttgttaacgagggttggtcccagctcgcagcaatgcattgtgtcatgctcccggatttgctcggacttgataagtttcgaccacctctcctggaaatgcttgctcgccggtggcaggatcgctgcctagaggtccgggaggcagcgcaggccttattgttggcagagcttcgaagaatcgagcaagccggccgaaaagaagcaatcgatgcctgggctccctacctgccccaatatatcgaccatgttatttctcctggcgtcacctccgaagctgcacaaaccatcactactgccccagatgcttccggaccagaggccaaagtgcaggaggaggaacatgacctggtagatgatgacattactactggatgcctgtcttcagttccccaaatgaaaaaaattagcacctcatacgaggaacggcggaaacaggctacagcaatcgtgttactgggcgtaataggcgcagagttcggagccgagatcgagcccccaaaactgctgacacgtccaagaagtagtagccaaatccctgaaggctttgggttgacctcagggggatctaactattctttggcgcgacacacttgtaaagcactgacatttctcctcctccagccaccctcccctaagctcccacctcacagcactatcagaaggaccgccatcgatttgatcggccggggcttcacagtgtgggaaccttatatggacgtcagcgccgtgctaatgggattgctggaattatgtgccgatgccgaaaaacagttagccaacatcactatggggcttccccttagtccggccgccgattccgccagatccgcacggcatgcattgtccctgatcgcaactgctcggcctccagcctttattacaaccattgccaaggaggttcaccggcatactgctctggcagccaacactcaatctcagcagaacatgcacacgactaccctggcccgggccaagggggaaatactgcgagttatagaaattttgatcgagaaaatgccaactgatgtggttgaccttctggtggaggtcatggacataatcatgtactgtctagaaggttcgctcgtcaagaaaaagggcctgcaggagtgcttccctgcaatctgccgcttctacatggtttcttattatgagagaaaccaccggatcgccgtgggtgccaggcacggcagtgtggcactgtatgacatcaggactggaaaatgtcaaaccatacacgggcataagggtccaataacagccgtggcattcgcccccgacggacgctacctcgccacatactctaacacagactcccatatttctttttggcaaatgaacaccagcctattaggatcaatagggatgctgaattcggccccccagctaaggtgcatcaagacctaccaggtcccccctgtgcagcccgctagtcccgggagtcacaacgcactgaagttggcacgcttgatttggactagcaaccgcaacgttatccttatggctcacgacggaaaggagcacaggtttatggtgtag

SEQ ID NO: 185707 - DNA, 2448 bp, Artificial Sequence
  derived and/or modified sequence
atggccggcaacagcctggtgctgcccatcgtgctgtggggccggaaggctcctacacactgcatctccgcagtcctgcttactgatgacggggcaactatagtgactggctgtcatgatggccagatctgtttatgggacctgagcgttgagctgcagataaacccaagagctctgcttttcggacataccgccgtgctttttcagcaggtaaaggagacgattaaggaaaatataaaggagcatctcctggatgatgaagaagaggatgaagaaatcatgagacagagacgggaagagtctgatcccgaatacaggtcttctaaatctaagcccctgacactcttggaatataatctgacaatggacactgccaaattattcatgtcgtgtctccacgcttggggcttgaacgaggtcctagacgaagtctgcttagatcgtctaggaatgcttaagcctcactgtaccgtaagcttcggcctgctaagtaggggaggccacatgtcactgatgctgcccgggtacaaccagcccgcatgcaaattgtcccatggcaagaccgaggttggaagaaagttaccggcttcagaaggggtagggaaaggcacatacggggtcagtcgagcagtgactactcagcacttgttgtccattatcagcctcgctaacacgctgatgtccatgaccaacgcaaccttcattggtgaccacatgaaaaaaggacccacccggccaccgcgcccttcaacccctgatttgtcaaaggctcgcgggtctcctcccacatcatcgaacatcgttcagggccagattaaacaggtggctgccccagtagtgagcgcacggagcgacgccgaccactccggaagcgacccgcccagcgctcccgccctgcacacatgtttcttggttaatgaggggtggtctcagctagcagctatgcactgtgttatgctacctgacctgcttggtctagacaagtttagaccaccacttcttgaaatgttagcacgcaggtggcaggacagatgcctcgaggtgcgggaggctgctcaggctctgctgctagctgagctccgccgaatcgaacaggctgggcgcaaggaagctattgacgcctgggctccgtatctgccacagtatatcgaccacgtcatatctcccggggtcaccagcgaggctgcacaaaccataacgaccgcacccgacgcaagtggtcctgaagctaaggtgcaggaggaggaacacgacttggtggatgatgatatcaccactggctgtctttccagtgtcccgcagatgaagaaaatttccactagttatgaggaaaggcgtaaacaggctaccgctattgttctcctgggcgtcattggtgccgaattcggtgcggaaatcgagccaccaaagttgcttactcgacctcgaagctcatcacaaatcccggagggctttggcctcacttcgggcggatctaactattctctggctcggcatacttgcaaagcgctgactttcctgctgctacaacctccttcacccaagcttccaccgcatagcaccattcgccgcaccgctatcgaccttatcggaaggggctttactgtgtgggaaccttatatggatgtgagtgccgtgttaatgggtttgttagagctctgtgccgatgctgaaaaacagctggcaaacattacaatgggtctgcctctcagtcctgcggcggatagcgcccgcagcgcaaggcacgcgctgtccctcatagctaccgcacggcctccagccttcatcaccaccattgctaaggaggtacatagacatacagctctcgcggccaacacacagagccagcaaaatatgcacactacgacgctcgctcgcgccaaaggggaaatcctgagggtcattgagattttaattgaaaaaatgccaaccgatgtcgtggacttacttgttgaggtcatggacatcatcatgtactgcctcgaaggtagccttgtgaagaagaaaggtctgcaggagtgctttccagctatctgccggttttatatggtgtcatactacgagaggaatcaccggatcgctgtgggggcgcgccatgggtccgtggcgctctacgatatccggacaggaaagtgccagactattcacggacacaagggccccattacagctgtggcgtttgcacccgatggacgctacctagccacatactccaatactgatagccatatcagtttctggcaaatgaatacgagcctcttaggaagcatcggtatgctcaactcagcaccacaactgagatgcattaagacctatcaggttcctcctgtacagcctgcaagcccaggaagccataatgccctcaagctagccagacttatatggacaagcaaccggaacgtcattctcatggctcacgatggcaaagagcaccggttcatggtgtag

SEQ ID NO: 185708 - DNA, 4473 bp, Artificial Sequence
  derived and/or modified sequence
atggcaggcaattcattggtgctgcctatcgtcctttggggtagaaaagcccctacccattgcattagtgcagtgctgctgactgacgatggagctaccatagtcacaggttgtcatgacgggcagatctgtctatgggatttatcggtggaactgcagatcaaccccagagctctccttttcggtcatacggcctctataacctgtttatctaaagcttgtgcctcttccgacaagcagtacatcgtttcagccagcgaatccggcgaaatgtgcctctgggacgtatccgacggtcggtgtattgagtttacaaagcttgcttgcacacacacaggtatacaattttatcagttcagcgttggaaaccaacgcgagggtcggcttctgtgtcatggtcattatcccgaaatcctggtcgtggacgctactagcctggaagtgctgtattctctcgttagcaaaattagtcccgattggattagcagtatgtcaataatccgttcacatcggacccaggaagataccgtcgtggccctcagcgtcactgggattctgaaggtgtggatcgttactagcgagatttctgatatgcaggatactgagccaattttcgaggaagagtccaagccaatctattgccagaattgccagtccatctctttctgcgcctttacacaacgtagcctgctggtggtatgttccaagtattggcgggtgttcgatgcaggggattattccctcctgtgcagcggtcctagcgaaaatgggcagacttggaccggcggagactttgtgtcaagcgacaaagtcatcatatggacagaaaacgggcagagctacatctacaaactgcctgcatcctgcctgcctgcgtccgatagttttcggagtgacgtgggtaaagcagtggaaaatctgataccacccgtgcaacatatccttctcgatcgcaaggataaagagctgctgatctgtcctcctgtcacacgttttttctacggttgcagagaatatttccacaagctcctgatacagggcgatagctcaggccgtctcaatatttggaatattagtgacaccgccgacaagcaaggctctgaggaaggtttggctatgactactagcatttcactgcaggaagccttcgataagcttaacccctgtcctgctgggatcatcgaccagttgtccgtcatcccaaatagcaacgagcccttgaaagtgacggcgagcgtgtacattcccgctcatggtcgcctcgtctgtggtagagaggacggatctatcgtgattgttccggctacgcagacggccatcgtgcagctactgcagggcgagcatatgctgcgaaggggctggcctccccataggaccctccggggacatagaaacaaagtaacttgtctactgtacccacatcaggtcagtgcgcgatatgaccaaaggtatctcatctcgggcggtgttgacttttctgtaatcatttgggacatcttttcaggcgaaatgaagcatatcttttgcgtccacgggggtgaaatcacgcagctcctcgtccctcctgagaattgctctgcccgagtgcagcattgcatctgttctgtggccagcgatcattcggtgggactcctgagcctgcgcgagaaaaaatgtattatgctcgcctcccgtcatctgtttcctatccaggtgatcaagtggcggccaagtgatgactacttggtcgtcggatgttctgacggatcagtttacgtatggcagatggacactggcgctctggaccgctgcgtcatggggataactgctgtcgagatcctcaacgcatgcgacgaggccgttccagcagccgttgacagtctgagccaccccgcagtgaatttaaaacaggcgatgaccagacggagccttgcggcattaaagaatatggcccatcataaactgcagacactggccacaaatctgcttgcatccgaagccagtgataagggaaaccttcccaaatacagccacaacagtttgatggttcaagcgatcaagaccaatctgaccgatcccgatatacacgttctcttctttgatgttgaggcacttataatccagctgctgacggaggaagcatcaaggcctaataccgccctgatcagccccgaaaatctacagaaggctagcgggagctctgacaaagggggaagctttctgactggcaagagagccgctgtattattccagcaggtgaaggaaactatcaaggaaaatataaaagagcacctgcttgatgacgaggaagaggacgaggagatcatgcgccaacggagggaagagagcgatcctgagtataggagttctaagagcaagccactgacactactcgaatataaccttactatggacaccgcaaagctcttcatgtcctgcctccacgcctggggcctgaacgaagtcctggatgaggtctgtcttgatcgcctgggcatgttaaagccacactgtaccgtgagtttcggattgctcagcagaggtggccacatgtctctgatgcttccgggatacaaccagcccgcttgtaagttatcccacgggaaaacagaggtcggcagaaaactacctgcatctgagggagtcggcaagggtacctacggggtctcgagagcagtgactacccagcacctgctgagcatcatctcacttgccaataccctaatgtctatgacgaacgcaacctttatcggcgaccatatgaagaaaggtccgacccggccaccacggcctagcacaccggacctctctaaggccagggggtcgccgcctactagttccaacatcgtgcagggacagataaaacaggtcgctgctccagtggttagcgccagatctgatgctgaccacagtggaagcgatcctccctcggcccctgcgctgcacacgtgttttctcgtgaatgagggctggagccagcttgcagcgatgcactgcgtgatgttgcctgacttgctgggactggacaagttcaggcccccactgcttgagatgctggcccgacgctggcaggacagatgtctcgaggtgcgggaggctgcccaggcactgctgctcgcagagttgcgacgtattgaacaggctggacggaaagaggccattgatgcttgggctccgtacttgcctcagtacattgaccacgtcataagcccaggcgtgacctccgaggccgctcagacaattactacggctcctgacgcaagcgggcctgaggccaaggtccaggaagaggagcatgacctcgttgacgacgatatcacaactggctgcctgtcttcggtgccgcagatgaagaaaatttccactagctatgaggaacgcaggaagcaggccaccgccatcgtgctgttgggggtcatcggagccgaattcggcgcagaaatcgaacctccgaaactgctgactcgccctaggagctcctcacagattccagaggggtttgggttgacatctggaggctccaattatagcttggctaggcatacctgtaaggcactgacattcctgctcctgcagcccccatcccccaaattgcccccacactctactataagacggacagcaattgaccttatcggcagaggcttcaccgtgtgggaaccatacatggatgtgagcgccgtgttaatgggtctcctggaattgtgtgccgatgcagaaaaacaactggcaaacattacaatgggactgcccctctctccagccgctgacagcgctcggtctgcaaggcatgcactctcgctgatcgcaactgctcggccaccggcttttattactactatcgccaaggaagtgcacagacacacggcattggctgcaaacacacagtcacagcaaaatatgcacacaacaaccttggcacgcgcaaaaggtgaaatcctgagagtaattgagatcctcatcgagaaaatgcctactgacgtcgttgatctcttggtcgaagttatggacatcatcatgtattgtctcgagggcagcctggttaagaagaagggcctgcaggagtgtttcccggcaatttgcaggttttatatggtatcttactacgaacgcaatcaccgcattgcggtgggcgctagacacggctccgttgcattgtatgatatacgaacagggaagtgtcagacgattcacgggcacaagggacccatcactgctgtggcctttgctcctgatggtagatacttggctacgtactcgaataccgattcccacatatctttctggcaaatgaatacttccttgctcggaagtatcggaatgctcaacagcgccccacagttacggtgcataaagacctatcaggtgccccctgtgcagcccgcaagccctggaagccacaacgctctcaaactagccaggctaatttggacctccaaccgtaatgtgattcttatggctcacgatgggaaggaacatcggtttatggtgtac

SEQ ID NO: 185709 - DNA, 2448 bp, Artificial Sequence
  derived and/or modified sequence
atggccggaaactcgcttgtgctaccgatcgttctttggggtcggaaggctccaacccattgcattagcgcagtgctcttgacagatgacggggctacaattgtcacaggatgtcacgatggacagatctgcttgtgggatctgtccgtggaattgcagatcaaccctcgcgctctgttgttcggacacacagccgtgcttttccaacaagtgaaggagaccattaaggagaatattaaagagcacctgcttgacgacgaagaggaggatgaggagattatgcggcaacgcagggaggagtccgatccggagtatcggtcttcaaaaagcaagcccttaaccctcctggagtacaatctgacgatggatacagctaagctctttatgagttgcctgcacgcttggggtcttaacgaagtgttggacgaggtgtgccttgatcggctgggtatgcttaagcctcattgcactgtctctttcgggcttctctcacgtggcggacatatgagccttatgctgcctggctataaccagccagcctgtaaactttcccacggaaaaaccgaggttggaagaaagcttcctgctagcgagggggtgggcaagggtacttacggggtgtcaagggcagtaactactcagcacctcctttccattatctctctggccaacactctaatgagtatgacaaatgccacatttatcggtgaccacatgaaaaaaggacctactcgcccacctcggcctagcacccccgatctgagcaaggcaagagggtcccctcccacaagttcaaacatcgtgcagggccaaatcaaacaggttgccgcacctgtagttagcgcgagatccgatgccgaccacagcggatccgaccctcctagtgctccagctcttcatacctgcttcctggttaatgaaggttggtcccagttggctgccatgcattgcgtcatgctgccagacctccttggcctggataagttccgaccgccattgttggagatgctagccagacgctggcaggatcggtgtcttgaggtgagggaagcagcccaggccctgctgctggctgagttaagaaggattgagcaggctggccgtaaggaagctatcgatgcctgggctccttatctgccacagtacatcgaccacgtcatctctccaggtgtaacctcagaagccgctcaaacaattacaacagcacctgatgcaagtggtccagaagccaaagtacaagaggaggaacatgacttagtggacgacgacatcacaacgggctgtctgtccagcgtgcctcagatgaaaaagataagcacttcttatgaggaacgccgaaagcaggcaacagctatcgtcctcctgggggttataggagccgagttcggcgcagaaatcgaacctcctaaactccttactcgtccgaggtccagctcccagattcctgaaggatttggccttaccagcggtgggtcaaactactccctcgcaaggcatacttgcaaagcactgacctttctgttgctgcagcccccatcgcccaagctaccccctcattcgaccattagacggaccgcaatagatctgattggcagaggctttactgtatgggaaccctacatggacgtcagcgccgtgctgatgggactcctcgagctgtgtgccgatgcagagaagcagttggcaaatatcaccatggggctgccccttagtcctgcagcggactcggccaggagcgccagacatgctctgtccctgattgccactgcccgaccaccagcctttattactactattgccaaagaggtgcaccgccatactgcgttggccgcaaacacacaatctcaacagaatatgcatactaccactttggcgagagcaaaaggagaaattcttagagtaattgagatcctgatcgagaagatgcctaccgatgtggtggacttacttgtagaggttatggacattatcatgtactgtctcgaggggtccctggtgaaaaagaagggattgcaggagtgctttcctgcaatatgcaggttctatatggtttcttattacgagcggaaccataggattgctgtcggggcacggcatggctctgtagctctctatgacatcagaaccggaaaatgccagactattcacgggcacaagggccctattacggccgtcgcgtttgcgccagacgggcgatacctggctacatactctaacaccgactcccatatctcattctggcagatgaatacaagtcttctgggatctataggaatgttgaacagcgcccctcagctgagatgcatcaaaacctaccaagtgcctcctgtgcagccagcctctccaggttcccacaatgcccttaagctggccagactgatttggacaagcaatcgcaacgtcatattgatggcccatgatggcaaagaacaccggtttatggtttag

SEQ ID NO: 185710 - DNA, 9074 bp, Artificial Sequence
  derived and/or modified sequence
ggcggcaccggcaccttgcagtatcactggggagacggcggctgtatagcgcttgccgccccacggattatcccagcaggatctacgcaccccgcatcctccgtagttccgccctatccttgtcctccttggctggggcgcccaccggcggtctgataggctacatcgcggcatgagatgaagctgtgacaggtttgaaaacacaaacacaatggcaggaaacagccttgttctacccattgttctttggggtcgaaaagcgcccacacattgcatctcagccgtacttttaacagatgatggggccacgatcgtaacaggatgtcacgacggacaaatatgtctctgggatctttcagtagaactgcaaattaatcctcgagcactgttgtttggtcatacagcatcaatcacttgtttgtctaaagcttgtgcttccagtgacaaacagtatattgtgagtgcatctgaaagtggagagatgtgcctctgggatgtgagtgatggcagatgtattgaatttacaaaattagcttgcacacatactggcatacagttctaccagttctctgttgggaatcagcgagaaggaaggcttttatgccacggacattaccctgaaatccttgttgtggatgctaccagccttgaagtattatactccttagtatcaaagatatcaccagactggattagctccatgagtattattcgatcccaccgaacacaagaggacacagtggtagcactctcggtgactggcatcctgaaggtctggattgttacctcggaaataagtgacatgcaggatactgagccaatatttgaggaggaatccaaaccaatttattgtcagaattgccaaagcatctctttttgtgcatttacacaaaggtcacttttggttgtgtgttccaaatattggagggtgttcgatgccggagactattccttgttgtgttcaggtcctagtgaaaatggacagacatggaccgggggggactttgtctcatcagataaagtcatcatttggacagaaaatgggcaaagttatatttacaaactacctgccagttgccttccagctagtgattcattccgcagtgatgtggggaaggcagttgaaaatttaattcctcctgtacaacatatcctcttggatcgaaaagataaagagttgctaatttgtcctcctgttactcggttcttctatggatgcagagaatatttccataaactgttaattcagggtgattcttctggaaggttgaatatttggaacatatcagacacagctgataaacagggaagtgaagaagggctggcaatgacaacttctattagtttgcaagaggcatttgataaactgaatccttgtcctgctggaattatagatcagctgagtgtgattcccaatagtaatgaacctcttaaagtaactgcaagtgtgtacataccagcacatggacgacttgtttgtggtcgtgaagatggaagcatagttattgtacctgccacacagacggccatagtacagctgttgcaaggggaacacatgctcagaagaggttggccacctcacagaacactccgtggtcatcggaacaaagtcacatgtttgctatatcctcatcaggtctcagctcggtatgatcaaagatacctgatatctggaggtgtggatttttcagtcataatttgggacatattttctggagaaatgaaacatatcttctgtgttcatggtggtgagattactcaacttctagttccacctgaaaactgtagtgcaagagtacagcactgcatctgctctgtagccagtgaccactcagtaggacttctaagtttgcgagagaaaaaatgcataatgttggcatctcgtcacctttttcctattcaagtaatcaaatggaggccttctgatgattacctggtggtggggtgttcagatggttctgtgtacgtctggcaaatggatactggtgcattggatcgttgtgtgatggggataacagcagttgagattctaaacgcttgtgatgaagctgttcctgctgctgttgattcacttagtcatccagcagtcaacctaaaacaagctatgacgagacgtagtcttgctgctcttaaaaatatggcccatcataagctacaaacccttgcaactaacctcttggcttctgaggcatctgacaagggaaatttacctaaatattctcataactccctgatggttcaagcaataaagacaaacctaacagacccggacatacatgtgctattctttgatgtggaagcgttgattattcaactcctgactgaagaagcctctaggccgaatactgctcttatttccccagagaatttgcaaaaagcatctggcagttcagacaaagggggctcttttttaactggaaaacgagcagcagttctcttccaacaagtgaaagaaacgatcaaagagaacatcaaggaacacctccttgatgatgaagaggaggatgaggagataatgaggcagagaagggaagaaagtgatcctgaatatcggtccagcaaatcaaagccattgaccctattagaatataatttaactatggacactgcaaagctgtttatgtcctgccttcacgcctggggtttgaatgaagtactggatgaagtttgcctggatcgccttggaatgctgaaaccccactgcaccgtatcgtttggcctcttgtcaagaggaggccatatgtcactgatgctgccgggttataatcagcctgcttgtaaactgtcacatgggaaaacagaagtaggaaggaagctgccagcgtctgagggagtaggaaagggaacttacggagtgtcccgtgccgtcaccacacagcatctcctgtctatcatttctttggcaaatactttaatgagtatgaccaatgcaacttttattggtgatcatatgaagaagggtcctaccaggccacctagaccaagcaccccagacctttctaaggcaaggggttcccctccaacttccagtaatattgtgcaaggacagattaaacaagttgctgcacctgtcgtttccgctcggtctgatgctgatcactctggctctgaccctccttctgctcctgctttacatacctgtttcttagtaaatgaaggttggagtcagttagctgctatgcactgtgttatgctgccagacctactgggattggataaatttaggcctccccttctggagatgctggcccgaagatggcaagatcgatgcttggaggtgagagaagccgcgcaggccctgcttctggcggaactgagaagaattgagcaggcaggcaggaaggaagccattgatgcctgggctccttacttacctcagtacatagaccacgtcatatcacctggagtcacatcagaagccgcgcagactatcaccacggctcctgatgcctcagggcctgaagcaaaagtccaggaggaagagcatgaccttgttgacgatgacatcaccactggttgcttatcaagtgtcccacaaatgaaaaaaatttctacatcttacgaggaaagacggaagcaagctaccgctattgttttacttggagtaataggagctgaatttggtgctgaaattgaacctcctaaactattgaccagacctcgaagctctagccaaattcctgagggattcgggttgactagtggtggatccaactactcgctggccagacatacttgcaaggcactgacgtttcttctgctacagcctccaagccccaaacttcctccacacagcactatccgaagaacagccattgatctgattggacgtgggttcactgtttgggagccttacatggatgtgtccgctgttctgatggggcttctcgaactttgtgccgatgccgagaaacaacttgccaacatcacaatggggttgcctctgagcccagcagctgactcggcccgctctgcgaggcatgccctctcgctcattgccaccgccagaccacccgccttcatcaccaccatagccaaagaggtacacagacatacggctcttgcagcaaatacccaatcacagcagaatatgcacacaacaactcttgcacgagctaaaggggaaattttgagagtcattgaaattcttattgaaaagatgcccacagatgttgtggatcttctcgtggaggttatggacatcattatgtactgccttgaaggatctttagttaaaaagaaaggtcttcaagaatgtttcccagccatctgcaggttctacatggtcagctattatgagcggaatcacagaatagcagttggagctcgccatggttcagtggccctgtacgacatccggactggaaaatgtcagacaatccatggacacaagggaccaatcactgcagtggcttttgctcctgatggaagatatcttgccacctactcaaacactgacagccacatttctttttggcagatgaacacgtcactgctgggaagcatcggcatgctgaactcggcacctcagctgcgctgcattaaaacctaccaggtgccccctgtgcagcccgcgtcccccggctcccacaatgccctcaagctggcccggctcatctggacttccaaccgcaacgtcatcctcatggcccatgacgggaaggagcaccgcttcatggtctaatgctgctgcctgccgccgtgactgcgttttagttctctaaattatccaagccgatgttgctctgtccttcctcacaccagattgttcccaggggcctgcccaccccagtgccatccagtggcacggccgggtcttgtcacttgtgcatgcttctcaggggcagaacccgctcgtgccatctgtcgattcagaggcacgcacacatgctctgcaggatgtggccatcctgtcaccaggtagtttttccctgccagagatggcaggggaaagccagtggttcctgggaacgctcttgttgcttggtgcaacagaagcacaaaaatcaataaacactgtgattgcactcccagcccagatcagcatttttagccatctcaaccgcacctctgaagtgctgcttgaatctggccgttctgacactgggtgttgaggtcatgtggcagtcctcacgattgaaattattgccctttgaattacctaaaatattgtttaccaaaaagattctgtgtttacatgttcttttcttctggtgattgctaggaaattactcaatccaatttcctagggtttagctaccaccttctttatcaacagctaaccaatttgagattcatgattaattatgtacacaaaaatattttccttgtagaaaatagttttccagacacttagccttctgaagtgctcatctcttgcttaaatgatagtctatttagtagtttaaaataaaaataatcactccctatgatctagttaatgtaattatccagtcactgtaactaatctcttgaagggacttttgtgataaagagccaagttcagaagcatagcgtgtaccgaaaatgaagactctcctatctactgctacagatcctgttgaagaaagagcttacccctttcccccggaaaacttgcaatcctgtagttcccatatgtgtggcatatgtcagttatgaaattattataattcagccttcaaactactactgatcaactaaaggaaagctaataaggtatttcttttaaacaagtattctggaaaagtaataactatggcacaaatgttcaggagtgtatataaaaatatgtgggctctcgatttatttgagcaaacattgcaatgagggtgttcattatgcttctaagtaagctttaactagaccactttcttcttatgtcagattgtgctggttctagctcataataatgaaaaaaatagaattatattttgtatgaattgtttctaacaaaccttgatctgtatatacttgtgaggggttgtttggttgcctaattgttgattggttggttagttgggcaaaatcatttattacatgcaaaaatagaaaattatttgttaaattcagagaaaatatgtgaagtttacaaaggaaccaaaatgataatgggagaatttagtcttaaaagtttaggttgtcagagtttatctgatatacaaaaaagtaggatcaaagtctaggaacaaacattggttatttcactgaaacagatttttaaagagcatattaagaaattaagaccattagatcatctctttcataatgatatgatgttatttccattgacggcaaatctatactgttccttggttttagagttgggtattctttcaaaagtgaatttaggcacatgcatgtacattgtatttataaagattatatatgtagtttccaaggaagaaacaaagacctatacagtttagactttatttgtttggtgaacgtgctgttgtgtttggcatagctagagaaatgtaaggtaaaaggctcactttgttttccagtgggtccagagtcttctctatacccaacatatgtttactttatgaacttaaatggaaattaatttattgtagactacatctctatttggaatgatgaggtaaatgtataccttagcattttctttaacaaaaatgttctgtgtgtcaggaaagaggtgtgagagtggtaggcagcctgccgcaaacacacggatggctccccccgccacgaaggttgagaacaaagccagggggcccagaggagcaatagccctgggccacaagcgtgggtaggcctttcacgtattccgtctgcacaggcaaccaaggccagtagaaagctatggctgcaaaaccctggggtggacgatgtttgatgattagacggtcatctctaactactaaactaatatctgcattcttgttaacataaatctctccttggctattttaatagccacagtcccaaacttcatcccagcttagatttctcagcactgaggtaaactctgcattgtcatcccagcgtacacctttaatgttttattgatttcactggcactgtatttggacctgtccttgtatatgtagagacatatgtggcttcattggtaatttacaagcaaaagatgacatgacgtgacacctgtatgaaaatgtgatgattgaactccctgtgtacagcgagtgaattaaaatgtctgcctctccagacatttcttaatgattccacttaatagactctatgtgtgctgaatgttcctgtgtacatatgtgtgttaaataaaacaattgtattgaagactgtttttctcacaatattaccttttccagtgttcactcatcttaaacatcctcagttgaaatccgtatgctccgctagccctgctgcttctaatcattcatttccctggagagctggcttgggaaaggcaacttattcccagaggacagtagagcagaagtgcagaggtaagctctccctccagaaactcactggcactctctgtggtttgggaaaggcgttgcatgcctgttgctttatctctactctacatgctcccaaatagactggtaatggcaccaaatcatatcttgtcagattggatggcatgggttggctgcctctcgggagctaggctgagatcatcaagttcattgcatttcacgctcagtttggagtcgaatttgaatccctcaggtaaagggtataattggttttcagaaaaatcaagaataataaaataggtccttactgctcatagagggttatgtgtaagtagtgaatgtacttcttgtctcttaattatttcagataagaacacaaaagcttgatttgagtcaatcatcgtgtaacagtataattttctgtaagaattcggtgaacattccaggagtggtctgaggcatcttgggccctattaaatgcccactgtgggccccaggaaatgttttaacatctcatgacttaaatgtattcttatagggaaaataggggcagtaacagttctatatgatcagcgatcacataaactgatcaaatgtggaaaggcgtgacgttaataggaaggtaaagccaagcagtgctgggtgaactttcacctttcaccccttcggctgactgacagagcccagtgttgaagaaaatcaatactttggagccaggagggaaatacttccaccctctaactagagaatgtgttttgacaaggccaagataatccaagctgcacaggagaaagagaaaagaagactcatttttaaagcctgacacttcaaggtgtttttgtgcaatggtttagagatcgtcaatacatacaaataccaaaggtcaaaaagaaaagccagaagaatttcaaaaattagatgttcagttctttttgctgtttaaaaaaaaaaaaaaaaggactacagagagttttgtgcttgtaattgtccttttaatgaactaagctcacaattgtgtgaccattgaggtgatcatccctctttaatcaaaacttacatttttgtagcagcagaacgatgaatattgaatgctcaaaaagcattcagacttcctgcttctgtacaccttttggctacagattgttttgttttgttttgttttgtttttttgagtggttacattgttttgtgctaacatctcagaatttggttttgcaattcatgttgattctgccataatggcattgtaaatcctggatcctccttcacattcagttcaatcctttgcatgagaaaagagttcttgtacctagaacttaattttttttctagtttcccaagtccctttaagcaaattacttatgaagatattctaattaatgtctctctgagtgagaggtttatgcacctctaggaagatggtaaacaattcattcttaccagcaagattagagccattcattctgtagacaaatacctccatcaagtggatatagattctttgctttcctactgataagaaaactaagaagccagtggtgcccatacctgccagacaagctcagaaggacaaaggagtcttaagtatctaaagtacatcatcaggcctgctgtaaacatgtgctaattaaagagtattaaaaatatagtgaaaatata

SEQ ID NO: 185711 - DNA, 5257 bp, Artificial Sequence
  derived and/or modified sequence
ggcggcaccggcaccttgcagtatcactggggagacggcggctgtatagcgcttgccgccccacggattatcccagcaggatctacgcaccccgcatcctccgtagttccgccctatccttgtcctccttggctggggcgcccaccggcggtctgataggctacatcgcggcatgagatgaagctgtgacaggtttgaaaacacaaacacaatggcaggaaacagccttgttctacccattgttctttggggtcgaaaagcgcccacacattgcatctcagccgtacttttaacagatgatggggccacgatcgtaacaggatgtcacgacggacaaatatgtctctgggatctttcagtagaactgcaaattaatcctcgagcactgttgtttggtcatacagcagttctcttccaacaagtgaaagaaacgatcaaagagaacatcaaggaacacctccttgatgatgaagaggaggatgaggagataatgaggcagagaagggaagaaagtgatcctgaatatcggtccagcaaatcaaagccattgaccctattagaatataatttaactatggacactgcaaagctgtttatgtcctgccttcacgcctggggtttgaatgaagtactggatgaagtttgcctggatcgccttggaatgctgaaaccccactgcaccgtatcgtttggcctcttgtcaagaggaggccatatgtcactgatgctgccgggttataatcagcctgcttgtaaactgtcacatgggaaaacagaagtaggaaggaagctgccagcgtctgagggagtaggaaagggaacttacggagtgtcccgtgccgtcaccacacagcatctcctgtctatcatttctttggcaaatactttaatgagtatgaccaatgcaacttttattggtgatcatatgaagaagggtcctaccaggccacctagaccaagcaccccagacctttctaaggcaaggggttcccctccaacttccagtaatattgtgcaaggacagattaaacaagttgctgcacctgtcgtttccgctcggtctgatgctgatcactctggctctgaccctccttctgctcctgctttacatacctgtttcttagtaaatgaaggttggagtcagttagctgctatgcactgtgttatgctgccagacctactgggattggataaatttaggcctccccttctggagatgctggcccgaagatggcaagatcgatgcttggaggtgagagaagccgcgcaggccctgcttctggcggaactgagaagaattgagcaggcaggcaggaaggaagccattgatgcctgggctccttacttacctcagtacatagaccacgtcatatcacctggagtcacatcagaagccgcgcagactatcaccacggctcctgatgcctcagggcctgaagcaaaagtccaggaggaagagcatgaccttgttgacgatgacatcaccactggttgcttatcaagtgtcccacaaatgaaaaaaatttctacatcttacgaggaaagacggaagcaagctaccgctattgttttacttggagtaataggagctgaatttggtgctgaaattgaacctcctaaactattgaccagacctcgaagctctagccaaattcctgagggattcgggttgactagtggtggatccaactactcgctggccagacatacttgcaaggcactgacgtttcttctgctacagcctccaagccccaaacttcctccacacagcactatccgaagaacagccattgatctgattggacgtgggttcactgtttgggagccttacatggatgtgtccgctgttctgatggggcttctcgaactttgtgccgatgccgagaaacaacttgccaacatcacaatggggttgcctctgagcccagcagctgactcggcccgctctgcgaggcatgccctctcgctcattgccaccgccagaccacccgccttcatcaccaccatagccaaagaggtacacagacatacggctcttgcagcaaatacccaatcacagcagaatatgcacacaacaactcttgcacgagctaaaggggaaattttgagagtcattgaaattcttattgaaaagatgcccacagatgttgtggatcttctcgtggaggttatggacatcattatgtactgccttgaaggatctttagttaaaaagaaaggtcttcaagaatgtttcccagccatctgcaggttctacatggtcagctattatgagcggaatcacagaatagcagttggagctcgccatggttcagtggccctgtacgacatccggactggaaaatgtcagacaatccatggacacaagggaccaatcactgcagtggcttttgctcctgatggaagatatcttgccacctactcaaacactgacagccacatttctttttggcagatgaacacgtcactgctgggaagcatcggcatgctgaactcggcacctcagctgcgctgcattaaaacctaccaggtgccccctgtgcagcccgcgtcccccggctcccacaatgccctcaagctggcccggctcatctggacttccaaccgcaacgtcatcctcatggcccatgacgggaaggagcaccgcttcatggtctaatgctgctgcctgccgccgtgactgcgttttagttctctaaattatccaagccgatgttgctctgtccttcctcacaccagattgttcccaggggcctgcccaccccagtgccatccagtggcacggccgggtcttgtcacttgtgcatgcttctcaggggcagaacccgctcgtgccatctgtcgattcagaggcacgcacacatgctctgcaggatgtggccatcctgtcaccaggtagtttttccctgccagagatggcaggggaaagccagtggttcctgggaacgctcttgttgcttggtgcaacagaagcacaaaaatcaataaacactgtgattgcactcccagcccagatcagcatttttagccatctcaaccgcacctctgaagtgctgcttgaatctggccgttctgacactgggtgttgaggtcatgtggcagtcctcacgattgaaattattgccctttgaattacctaaaatattgtttaccaaaaagattctgtgtttacatgttcttttcttctggtgattgctaggaaattactcaatccaatttcctagggtttagctaccaccttctttatcaacagctaaccaatttgagattcatgattaattatgtacacaaaaatattttccttgtagaaaatagttttccagacacttagccttctgaagtgctcatctcttgcttaaatgatagtctatttagtagtttaaaataaaaataatcactccctatgatctagttaatgtaattatccagtcactgtaactaatctcttgaagggacttttgtgataaagagccaagttcagaagcatagcgtgtaccgaaaatgaagactctcctatctactgctacagatcctgttgaagaaagagcttacccctttcccccggaaaacttgcaatcctgtagttcccatatgtgtggcatatgtcagttatgaaattattataattcagccttcaaactactactgatcaactaaaggaaagctaataaggtatttcttttaaacaagtattctggaaaagtaataactatggcacaaatgttcaggagtgtatataaaaatatgtgggctctcgatttatttgagcaaacattgcaatgagggtgttcattatgcttctaagtaagctttaactagaccactttcttcttatgtcagattgtgctggttctagctcataataatgaaaaaaatagaattatattttgtatgaattgtttctaacaaaccttgatctgtatatacttgtgaggggttgtttggttgcctaattgttgattggttggttagttgggcaaaatcatttattacatgcaaaaatagaaaattatttgttaaattcagagaaaatatgtgaagtttacaaaggaaccaaaatgataatgggagaatttagtcttaaaagtttaggttgtcagagtttatctgatatacaaaaaagtaggatcaaagtctaggaacaaacattggttatttcactgaaacagatttttaaagagcatattaagaaattaagaccattagatcatctctttcataatgatatgatgttatttccattgacggcaaatctatactgttccttggttttagagttgggtattctttcaaaagtgaatttaggcacatgcatgtacattgtatttataaagattatatatgtagtttccaaggaagaaacaaagacctatacagtttagactttatttgtttggtgaacgtgctgttgtgtttggcatagctagagaaatgtaaggtaaaaggctcactttgttttccagtgggtccagagtcttctctatacccaacatatgtttactttatgaacttaaatggaaattaatttattgtagactacatctctatttggaatgatgaggtaaatgtataccttagcattttctttaacaaaaatgttctgtgtgtcaggaaagaggtgtgagagtggtaggcagcctgccgcaaacacacggatggctccccccgccacgaaggttgagaacaaagccagggggcccagaggagcaatagccctgggccacaagcgtgggtaggcctttcacgtattccgtctgcacaggcaaccaaggccagtagaaagctatggctgcaaaaccctggggtggacgatgtttgatgattagacggtcatctctaactactaaactaatatctgcattcttgttaacataaatctctccttggctattttaatagccacagtcccaaacttcatcccagcttagatttctcagcactgaggtaaactctgcattgtcatcccagcgtacacctttaatgttttattgatttcactggcactgtatttggacctgtccttgtatatgtagagacatatgtggcttcattggtaatttacaagcaaaagatgacatgacgtgacacctgtatgaaaatgtgatgattgaactccctgtgtacagcgagtgaattaaaatgtctgcctctccagacatttcttaatgattccacttaatagactctatgtgtgctgaatgttcctgtgtacatatgtgtgttaaataaaacaattgtattgaagactgtttttctc

SEQ ID NO: 185712 - protein, 1253 aa, Artificial Sequence
  derived and/or modified sequence
MLSWRLQTGPEKAELQELNARLYDYVCRVRELERENLLLEEELRGRRGREGLWAEGQARCAEEARSLRQQLDELSWATALAEGERDALRRELRELQRLDAEERAARGRLDAELGAQQRELQEALGARAALEALLGRLQAERRGLDAAHERDVRELRARAASLTMHFRARATGPAAPPPRLREVHDSYALLVAESWRETVQLYEDEVRELEEALRRGQESRLQAEEETRLCAQEAEALRREALGLEQLRARLEDALLRMREEYGIQAEERQRVIDCLEDEKATLTLAMADWLRDYQDLLQVKTGLSLEVATYRALLEGESNPEIVIWAEHVENMPSEFRNKSYHYTDSLLQRENERNLFSRQKAPLASFNHSSALYSNLSGHRGSQTGTSIGGDARRGFLGSGYSSSATTQQENSYGKAVSSQTNVRTFSPTYGLLRNTEAQVKTFPDRPKAGDTREVPVYIGEDSTIARESYRDRRDKVAAGASESTRSNERTVILGKKTEVKATREQERNRPETIRTKPEEKMFDSKEKASEERNLRWEELTKLDKEARQRESQQMKEKAKEKDSPKEKSVREREVPISLEVSQDRRAEVSPKGLQTPVKDAGGGTGREAEARELRFRLGTSDATGSLQGDSMTETVAENIVTSILKQFTQSPETEASADSFPDTKVTYVDRKELPGERKTKTEIVVESKLTEDVDVSDEAGLDYLLSKDIKEVGLKGKSAEQMIGDIINLGLKGREGRAKVVNVEIVEEPVSYVSGEKPEEFSVPFKVEEVEDVSPGPWGLVKEEEGYGESDVTFSVNQHRRTKQPQENTTHVEEVTEAGDSEGEQSYFVSTPDEHPGGHDRDDGSVYGQIHIEEESTIRYSWQDEIVQGTRRRTQKDGAVGEKVVKPLDVPAPSLEGDLGSTHWKEQARSGEFHAEPTVIEKEIKIPHEFHTSMKGISSKEPRQQLVEVIGQLEETLPERMREELSALTREGQGGPGSVSVDVKKVQGAGGSSVTLVAEVNVSQTVDADRLDLEELSKDEASEMEKAVESVVRESLSRQRSPAPGSPDEEGGAEAPAAGIRFRRWATRELYIPSGESEVAGGASHSSGQRTPQGPVSATVEVSSPTGFAQSQVLEDVSQAARHIKLGPSEVWRTERMSYEGPTAEVVEMDVSNVEAIRSRTQEAGALGVSDRGSWRDADSRNDQAVGVSFKASAGEGDQAHREQGKEQAMFDKKVQLQRMVDQRSVISDEKKVALLYLDNEEEENDGHWF

SEQ ID NO: 185713 - protein, 1252 aa, Artificial Sequence
  derived and/or modified sequence
MLSWRLQTGPEKAELQELNARLYDYVCRVRELERENLLLEEELRGRRGREGLWAEGQARCAEEARSLRQQLDELSWATALAEGERDALRRELRELQRLDAEERAARGRLDAELGAQQRELQEALGARAALEALLGRLQAERRGLDAAHERDVRELRARAASLTMHFRARATGPAAPPPRLREVHDSYALLVAESWRETVQLYEDEVRELEEALRRGQESRLQAEEETRLCAQEAALRREALGLEQLRARLEDALLRMREEYGIQAEERQRVIDCLEDEKATLTLAMADWLRDYQDLLQVKTGLSLEVATYRALLEGESNPEIVIWAEHVENMPSEFRNKSYHYTDSLLQRENERNLFSRQKAPLASFNHSSALYSNLSGHRGSQTGTSIGGDARRGFLGSGYSSSATTQQENSYGKAVSSQTNVRTFSPTYGLLRNTEAQVKTFPDRPKAGDTREVPVYIGEDSTIARESYRDRRDKVAAGASESTRSNERTVILGKKTEVKATREQERNRPETIRTKPEEKMFDSKEKASEERNLRWEELTKLDKEARQRESQQMKEKAKEKDSPKEKSVREREVPISLEVSQDRRAEVSPKGLQTPVKDAGGGTGREAEARELRFRLGTSDATGSLQGDSMTETVAENIVTSILKQFTQSPETEASADSFPDTKVTYVDRKELPGERKTKTEIVVESKLTEDVDVSDEAGLDYLLSKDIKEVGLKGKSAEQMIGDIINLGLKGREGRAKVVNVEIVEEPVSYVSGEKPEEFSVPFKVEEVEDVSPGPWGLVKEEEGYGESDVTFSVNQHRRTKQPQENTTHVEEVTEAGDSEGEQSYFVSTPDEHPGGHDRDDGSVYGQIHIEEESTIRYSWQDEIVQGTRRRTQKDGAVGEKVVKPLDVPAPSLEGDLGSTHWKEQARSGEFHAEPTVIEKEIKIPHEFHTSMKGISSKEPRQQLVEVIGQLEETLPERMREELSALTREGQGGPGSVSVDVKKVQGAGGSSVTLVAEVNVSQTVDADRLDLEELSKDEASEMEKAVESVVRESLSRQRSPAPGSPDEEGGAEAPAAGIRFRRWATRELYIPSGESEVAGGASHSSGQRTPQGPVSATVEVSSPTGFAQSQVLEDVSQAARHIKLGPSEVWRTERMSYEGPTAEVVEMDVSNVEAIRSRTQEAGALGVSDRGSWRDADSRNDQAVGVSFKASAGEGDQAHREQGKEQAMFDKKVQLQRMVDQRSVISDEKKVALLYLDNEEEENDGHWF

SEQ ID NO: 185714 - DNA, 3762 bp, Artificial Sequence
  derived and/or modified sequence
atgctgagctggagactgcagaccggccccgagaaggccgagctgcaggagctgaacgccagactgtacgactacgtgtgcagagtgagagagctggagagagagaacctgctgctggaggaggagctgagaggcagaagaggcagagagggcctgtgggccgagggccaggccagatgcgccgaggaggccagaagcctgagacagcagctggacgagctgagctgggccaccgccctggccgagggcgagagagacgccctgagaagagagctgagagagctgcagagactggacgccgaggagagagccgccagaggcagactggacgccgagctgggcgcccagcagagagagctgcaggaggccctgggcgccagagccgccctggaggccctgctgggcagactgcaggccgagagaagaggcctggacgccgcccacgagagagacgtgagagagctgagagccagagccgccagcctgaccatgcacttcagagccagagccaccggccccgccgcccccccccccagactgagagaggtgcacgacagctacgccctgctggtggccgagagctggagagagaccgtgcagctgtacgaggacgaggtgagagagctggaggaggccctgagaagaggccaggagagcagactgcaggccgaggaggagaccagactgtgcgcccaggaggccgaggccctgagaagagaggccctgggcctggagcagctgagagccagactggaggacgccctgctgagaatgagagaggagtacggcatccaggccgaggagagacagagagtgatcgactgcctggaggacgagaaggccaccctgaccctggccatggccgactggctgagagactaccaggacctgctgcaggtgaagaccggcctgagcctggaggtggccacctacagagccctgctggagggcgagagcaaccccgagatcgtgatctgggccgagcacgtggagaacatgcccagcgagttcagaaacaagagctaccactacaccgacagcctgctgcagagagagaacgagagaaacctgttcagcagacagaaggcccccctggccagcttcaaccacagcagcgccctgtacagcaacctgagcggccacagaggcagccagaccggcaccagcatcggcggcgacgccagaagaggcttcctgggcagcggctacagcagcagcgccaccacccagcaggagaacagctacggcaaggccgtgagcagccagaccaacgtgagaaccttcagccccacctacggcctgctgagaaacaccgaggcccaggtgaagaccttccccgacagacccaaggccggcgacaccagagaggtgcccgtgtacatcggcgaggacagcaccatcgccagagagagctacagagacagaagagacaaggtggccgccggcgccagcgagagcaccagaagcaacgagagaaccgtgatcctgggcaagaagaccgaggtgaaggccaccagagagcaggagagaaacagacccgagaccatcagaaccaagcccgaggagaagatgttcgacagcaaggagaaggccagcgaggagagaaacctgagatgggaggagctgaccaagctggacaaggaggccagacagagagagagccagcagatgaaggagaaggccaaggagaaggacagccccaaggagaagagcgtgagagagagagaggtgcccatcagcctggaggtgagccaggacagaagagccgaggtgagccccaagggcctgcagacccccgtgaaggacgccggcggcggcaccggcagagaggccgaggccagagagctgagattcagactgggcaccagcgacgccaccggcagcctgcagggcgacagcatgaccgagaccgtggccgagaacatcgtgaccagcatcctgaagcagttcacccagagccccgagaccgaggccagcgccgacagcttccccgacaccaaggtgacctacgtggacagaaaggagctgcccggcgagagaaagaccaagaccgagatcgtggtggagagcaagctgaccgaggacgtggacgtgagcgacgaggccggcctggactacctgctgagcaaggacatcaaggaggtgggcctgaagggcaagagcgccgagcagatgatcggcgacatcatcaacctgggcctgaagggcagagagggcagagccaaggtggtgaacgtggagatcgtggaggagcccgtgagctacgtgagcggcgagaagcccgaggagttcagcgtgcccttcaaggtggaggaggtggaggacgtgagccccggcccctggggcctggtgaaggaggaggagggctacggcgagagcgacgtgaccttcagcgtgaaccagcacagaagaaccaagcagccccaggagaacaccacccacgtggaggaggtgaccgaggccggcgacagcgagggcgagcagagctacttcgtgagcacccccgacgagcaccccggcggccacgacagagacgacggcagcgtgtacggccagatccacatcgaggaggagagcaccatcagatacagctggcaggacgagatcgtgcagggcaccagaagaagaacccagaaggacggcgccgtgggcgagaaggtggtgaagcccctggacgtgcccgcccccagcctggagggcgacctgggcagcacccactggaaggagcaggccagaagcggcgagttccacgccgagcccaccgtgatcgagaaggagatcaagatcccccacgagttccacaccagcatgaagggcatcagcagcaaggagcccagacagcagctggtggaggtgatcggccagctggaggagaccctgcccgagagaatgagagaggagctgagcgccctgaccagagagggccagggcggccccggcagcgtgagcgtggacgtgaagaaggtgcagggcgccggcggcagcagcgtgaccctggtggccgaggtgaacgtgagccagaccgtggacgccgacagactggacctggaggagctgagcaaggacgaggccagcgagatggagaaggccgtggagagcgtggtgagagagagcctgagcagacagagaagccccgcccccggcagccccgacgaggagggcggcgccgaggcccccgccgccggcatcagattcagaagatgggccaccagagagctgtacatccccagcggcgagagcgaggtggccggcggcgccagccacagcagcggccagagaaccccccagggccccgtgagcgccaccgtggaggtgagcagccccaccggcttcgcccagagccaggtgctggaggacgtgagccaggccgccagacacatcaagctgggccccagcgaggtgtggagaaccgagagaatgagctacgagggccccaccgccgaggtggtggagatggacgtgagcaacgtggaggccatcagaagcagaacccaggaggccggcgccctgggcgtgagcgacagaggcagctggagagacgccgacagcagaaacgaccaggccgtgggcgtgagcttcaaggccagcgccggcgagggcgaccaggcccacagagagcagggcaaggagcaggccatgttcgacaagaaggtgcagctgcagagaatggtggaccagagaagcgtgatcagcgacgagaagaaggtggccctgctgtacctggacaacgaggaggaggagaacgacggccactggttctag

SEQ ID NO: 185715 - DNA, 3759 bp, Artificial Sequence
  derived and/or modified sequence
atgctgagctggagactgcagaccggccccgagaaggccgagctgcaggagctgaacgccagactgtacgactacgtgtgcagagtgagagagctggagagagagaacctgctgctggaggaggagctgagaggcagaagaggcagagagggcctgtgggccgagggccaggccagatgcgccgaggaggccagaagcctgagacagcagctggacgagctgagctgggccaccgccctggccgagggcgagagagacgccctgagaagagagctgagagagctgcagagactggacgccgaggagagagccgccagaggcagactggacgccgagctgggcgcccagcagagagagctgcaggaggccctgggcgccagagccgccctggaggccctgctgggcagactgcaggccgagagaagaggcctggacgccgcccacgagagagacgtgagagagctgagagccagagccgccagcctgaccatgcacttcagagccagagccaccggccccgccgcccccccccccagactgagagaggtgcacgacagctacgccctgctggtggccgagagctggagagagaccgtgcagctgtacgaggacgaggtgagagagctggaggaggccctgagaagaggccaggagagcagactgcaggccgaggaggagaccagactgtgcgcccaggaggccgccctgagaagagaggccctgggcctggagcagctgagagccagactggaggacgccctgctgagaatgagagaggagtacggcatccaggccgaggagagacagagagtgatcgactgcctggaggacgagaaggccaccctgaccctggccatggccgactggctgagagactaccaggacctgctgcaggtgaagaccggcctgagcctggaggtggccacctacagagccctgctggagggcgagagcaaccccgagatcgtgatctgggccgagcacgtggagaacatgcccagcgagttcagaaacaagagctaccactacaccgacagcctgctgcagagagagaacgagagaaacctgttcagcagacagaaggcccccctggccagcttcaaccacagcagcgccctgtacagcaacctgagcggccacagaggcagccagaccggcaccagcatcggcggcgacgccagaagaggcttcctgggcagcggctacagcagcagcgccaccacccagcaggagaacagctacggcaaggccgtgagcagccagaccaacgtgagaaccttcagccccacctacggcctgctgagaaacaccgaggcccaggtgaagaccttccccgacagacccaaggccggcgacaccagagaggtgcccgtgtacatcggcgaggacagcaccatcgccagagagagctacagagacagaagagacaaggtggccgccggcgccagcgagagcaccagaagcaacgagagaaccgtgatcctgggcaagaagaccgaggtgaaggccaccagagagcaggagagaaacagacccgagaccatcagaaccaagcccgaggagaagatgttcgacagcaaggagaaggccagcgaggagagaaacctgagatgggaggagctgaccaagctggacaaggaggccagacagagagagagccagcagatgaaggagaaggccaaggagaaggacagccccaaggagaagagcgtgagagagagagaggtgcccatcagcctggaggtgagccaggacagaagagccgaggtgagccccaagggcctgcagacccccgtgaaggacgccggcggcggcaccggcagagaggccgaggccagagagctgagattcagactgggcaccagcgacgccaccggcagcctgcagggcgacagcatgaccgagaccgtggccgagaacatcgtgaccagcatcctgaagcagttcacccagagccccgagaccgaggccagcgccgacagcttccccgacaccaaggtgacctacgtggacagaaaggagctgcccggcgagagaaagaccaagaccgagatcgtggtggagagcaagctgaccgaggacgtggacgtgagcgacgaggccggcctggactacctgctgagcaaggacatcaaggaggtgggcctgaagggcaagagcgccgagcagatgatcggcgacatcatcaacctgggcctgaagggcagagagggcagagccaaggtggtgaacgtggagatcgtggaggagcccgtgagctacgtgagcggcgagaagcccgaggagttcagcgtgcccttcaaggtggaggaggtggaggacgtgagccccggcccctggggcctggtgaaggaggaggagggctacggcgagagcgacgtgaccttcagcgtgaaccagcacagaagaaccaagcagccccaggagaacaccacccacgtggaggaggtgaccgaggccggcgacagcgagggcgagcagagctacttcgtgagcacccccgacgagcaccccggcggccacgacagagacgacggcagcgtgtacggccagatccacatcgaggaggagagcaccatcagatacagctggcaggacgagatcgtgcagggcaccagaagaagaacccagaaggacggcgccgtgggcgagaaggtggtgaagcccctggacgtgcccgcccccagcctggagggcgacctgggcagcacccactggaaggagcaggccagaagcggcgagttccacgccgagcccaccgtgatcgagaaggagatcaagatcccccacgagttccacaccagcatgaagggcatcagcagcaaggagcccagacagcagctggtggaggtgatcggccagctggaggagaccctgcccgagagaatgagagaggagctgagcgccctgaccagagagggccagggcggccccggcagcgtgagcgtggacgtgaagaaggtgcagggcgccggcggcagcagcgtgaccctggtggccgaggtgaacgtgagccagaccgtggacgccgacagactggacctggaggagctgagcaaggacgaggccagcgagatggagaaggccgtggagagcgtggtgagagagagcctgagcagacagagaagccccgcccccggcagccccgacgaggagggcggcgccgaggcccccgccgccggcatcagattcagaagatgggccaccagagagctgtacatccccagcggcgagagcgaggtggccggcggcgccagccacagcagcggccagagaaccccccagggccccgtgagcgccaccgtggaggtgagcagccccaccggcttcgcccagagccaggtgctggaggacgtgagccaggccgccagacacatcaagctgggccccagcgaggtgtggagaaccgagagaatgagctacgagggccccaccgccgaggtggtggagatggacgtgagcaacgtggaggccatcagaagcagaacccaggaggccggcgccctgggcgtgagcgacagaggcagctggagagacgccgacagcagaaacgaccaggccgtgggcgtgagcttcaaggccagcgccggcgagggcgaccaggcccacagagagcagggcaaggagcaggccatgttcgacaagaaggtgcagctgcagagaatggtggaccagagaagcgtgatcagcgacgagaagaaggtggccctgctgtacctggacaacgaggaggaggagaacgacggccactggttctag

SEQ ID NO: 185716 - DNA, 3762 bp, Artificial Sequence
  derived and/or modified sequence
atgctctcttggagactgcagaccggtccggagaaagctgagctacaggaactaaatgcccgactatacgactacgtgtgtcgcgtgcgcgagttggagcgggagaacctcctgttagaagaagagttacgcggacgtcgaggtcgggaagggctgtgggccgaggggcaggcaaggtgtgctgaggaagcccgatcgctgaggcagcagttagatgagctgagttgggcaaccgctctagccgaaggcgagcgcgacgcgctcaggcgggagcttcgggaactccagagactggacgccgaggagagggccgccagggggcgcctggacgccgagctcggcgcgcaacagcgtgagctgcaggaagccctgggggctcgggccgcactggaagccttacttggtcggcttcaggctgagcgtagagggctcgatgcagcccatgagcgtgatgtgagggaacttcgagccagagctgcctctttaacaatgcattttcgcgcccgggccactgggccagccgcacctccaccgaggctgagggaggtacacgattcatatgctctcctggtggcagagagctggagagagaccgtgcagctgtacgaggacgaagtcagggaactggaggaagcactacgcaggggacaggagtcgcgcttgcaggccgaggaagagacccgcctctgtgcccaggaggccgaagcactgcgtagggaggccttgggtctcgagcagctccgagccagactcgaagacgccctgctgaggatgcgggaggaatacggaatccaagccgaggagcgccagcgagtgattgactgcctggaggatgagaaagctaccttgacgctcgccatggctgactggctgagggactaccaggatctgctccaggtaaaaacaggcctgtcacttgaagtggccacataccgggcacttctggaaggcgaatctaaccccgaaatcgtgatatgggctgagcatgtggagaacatgcctagtgaattcaggaataaaagctaccattacacagacagtcttcttcagagggaaaatgagaggaatctgtttagcagacagaaggcgcctctggcgtccttcaaccactcctcagccctgtatagtaatctgagcggccaccgcggctcccagacaggaacttcgattgggggcgacgcacgacggggatttctgggttctggctattccagcagcgccaccacccagcaagagaacagctacgggaaagccgtgtcctcccagacaaatgtgaggacgttctcgccgacctacggcctcctgcggaacactgaagcacaggtgaaaaccttcccagacagacctaaggcaggggatactcgggaggtcccagtctatatcggagaagatagtactattgcgagggaaagctacagagacaggagggataaggtggccgcaggagcctcagagtccacacgtagcaacgaacgtaccgttatcctggggaagaagaccgaggttaaagccacaagggaacaggagagaaataggcccgagacgatcagaactaagcccgaggagaaaatgtttgattcaaaggagaaggcctcagaagaaaggaacttacggtgggaagagctcaccaaattagacaaggaagcacgccaacgggaatcccagcagatgaaggagaaagccaaggaaaaggattctccaaaggagaaaagcgtccgagaacgcgaggtacccatttccctggaagtgagccaggatcgtagggctgaggtcagccccaaagggttacagaccccagtgaaggacgctggaggagggaccggtagggaggccgaagctagggaactgcggttccggctgggcaccagcgatgcaacagggtcactgcaaggcgattctatgaccgagaccgtagcagagaatatcgtgacctcgattctcaagcagttcacccagagtcccgagactgaagcctccgcagactcctttccagacacaaaggtaacatatgtagacaggaaagagctacctggcgagaggaagaccaagacggagatcgtcgtagagtccaaactgacggaggacgtagatgtgagcgatgaggccgggttggattacctgctgagcaaggacattaaagaagtaggtctgaaagggaagtccgcagagcagatgattggggacataatcaacctgggcctcaaaggaagagaagggagggcgaaggtggtcaacgttgaaatcgtggaagaacctgtcagctatgtttccggagagaagccagaggagttttccgtgcctttcaaggtggaggaggttgaggacgtaagccccggtccatggggtcttgttaaagaagaggagggatacggtgaatccgacgtgaccttctcagttaaccagcaccgccgtacgaaacagccccaggaaaatactacgcatgtggaagaggtgaccgaagccggcgatagcgagggcgaacaatcctatttcgttagtacacctgacgagcaccccggcgggcacgacagggacgatggttccgtgtatggtcagattcacatcgaggaggagagtacaatcaggtactcgtggcaggatgaaattgtgcaggggacccgaagacgaactcagaaagacggcgccgtgggcgaaaaggttgttaagccgttagacgtgccagcgccgtccctggagggagacctagggagcacacactggaaggagcaggcccgctcaggagagtttcacgcggagcccaccgtgattgagaaggaaattaaaatcccccatgagttccatacgtctatgaaggggatctcttccaaggaaccaaggcagcagctcgtggaggttatcggccagctggaggaaactctcccagagagaatgcgtgaggagttaagcgccttgacacgggaagggcagggcggacccggttcagtgtcggtggatgtgaagaaagtgcaaggtgcaggagggtcctccgtgactctggtcgcagaggtaaatgtttctcagactgtggatgctgatcgactggaccttgaagaactctctaaagacgaagcgtctgagatggaaaaggccgtcgagtctgtggtacgcgagtcactttctcgccaacgatctccagcccctggttcacctgacgaggaagggggagcagaggctcccgcagctggaatcaggttccgacggtgggcgacccgcgaactatacattcccagtggcgagtctgaggtcgccggcggcgcatcacattcgagtggccagcggactcctcagggtccggtaagcgcgaccgtggaagtgtccagtcccaccgggttcgcccagtctcaggtcctagaggatgtgtcgcaagcagccaggcacataaaattaggtccgtccgaggtgtggagaactgagaggatgtcatatgagggaccaacagcagaagtggtggaaatggacgttagcaacgtcgaagcgatccgttcaagaacacaggaggccggtgccctaggggtttctgatcgggggtcttggcgggacgccgattcaaggaatgatcaggcagtgggtgtctctttcaaggcaagcgcaggagagggcgaccaagcgcaccgagagcaagggaaggagcaggctatgtttgataagaaggtacagctacaaagaatggtagaccagaggtctgtgatttccgacgagaaaaaggtcgccctcctgtacctggacaacgaggaagaggagaatgatggccattggttttag

SEQ ID NO: 185717 - DNA, 3759 bp, Artificial Sequence
  derived and/or modified sequence
atgctgtcatggcgactgcaaacaggacctgagaaggccgaactgcaagagctcaacgcacggctttatgactacgtgtgccgtgtgagggagctcgagagagaaaatttgctgttagaagaagagctgagagggcgccgcggcagagagggcctgtgggctgagggccaagcgcgctgcgcggaggaggcaaggagcttgcgccagcagttggatgagctctcctgggccactgctctggccgagggagagcgcgatgccctgcgccgggagctgagggagctccagcgactcgacgccgaggaaagagctgcccgtgggaggctggatgcggagctcggagcccagcaacgagagttgcaggaggctcttggagcacgcgcagcccttgaggccctgttaggtcgattgcaagccgaacgtcgaggattggatgcagcccatgagcgcgatgtgcgcgaacttcgggccagagcagcatctctcacaatgcatttccgcgccagggcaacaggcccagcagcgccccccccgaggctgcgtgaagtgcatgactcatacgctctgctggtcgccgaatcctggcgtgaaactgtccagctctacgaggatgaagtccgcgaactcgaggaagcactcaggcgcggtcaggaaagtcgcctgcaggccgaggaagagactcgactgtgcgcccaggaggccgcattgcgccgggaggcactgggactagagcagctgcgtgcgaggcttgaggacgccctcttgcgcatgcgggaagagtacggcattcaagcggaggagcggcagagggtgatcgattgccttgaggacgaaaaagctacattaacgctggccatggcggattggctcagggattaccaggacctgttgcaggtcaagacaggactaagtctggaggtagccacataccgtgcactcctagagggggagagcaacccggaaattgtgatttgggcagagcacgtagaaaacatgccctcagaatttcgcaataagtcttatcactataccgactccctcttgcagagggagaacgaacgcaatttattttccagacagaaggcccctctagctagcttcaatcacagtagtgccctctactcaaatctctccggccaccggggctctcagactggtacctcaataggtggcgacgcccggcgaggatttctagggagcggatacagcagctccgctacaacccagcaggagaattcgtacggcaaggccgtgagctctcagaccaacgtgagaacattctcgcctacatacgggctcctgcgtaatacggaagctcaggtcaagacctttccagaccgacctaaggcaggcgacacacgggaggtgcctgtttatatcggcgaggatagcaccatcgctcgcgaatcgtatcgtgataggcgcgacaaagtagccgcaggtgcctctgaatccaccaggtccaatgagcggaccgtgatattaggaaagaagacagaggtgaaagccactagggagcaagagcgtaaccgcccagagaccatacggactaagcccgaggagaaaatgtttgacagcaaggaaaaggcatccgaagaacggaacctgcgctgggaggagttaaccaagctggataaggaggcgaggcagcgggagagtcaacagatgaaggaaaaggcaaaagaaaaggattctcccaaggagaagagcgtgagggagagggaggtgccgatctcactagaagtgagccaagatagaagagcggaagtctctccaaagggcctccagacccctgtgaaggatgccggtggtggcaccggccgagaagcagaggcccgagagctccgattcagactgggcacttcagacgctaccggctccctgcaaggagactcgatgacagagaccgtcgctgaaaacatagtcaccagtatcttgaaacaattcactcagagccctgagactgaggccagcgctgacagcttcccagacactaaggtgacttatgtggatcgcaaggagctgccaggcgagcgcaaaaccaagactgaaatcgtggtggaaagcaaactgaccgaagatgttgacgtgagtgacgaagccggcctggactacctgctgtccaaagatattaaagaggtaggcctgaaagggaagtcggccgaacagatgatcggcgatattattaatctaggtctaaaaggtcgcgagggacgagcaaaagtggtgaacgtagagattgtagaggaaccagtgagctacgtcagcggtgagaaacccgaggaattcagcgttcccttcaaggtcgaagaggtggaggacgtatcacccggtccctggggactggtgaaagaagaggagggatatggcgaaagcgacgttacttttagcgtcaatcagcaccggcggactaagcaaccccaggaaaacactacacacgtcgaggaagtcactgaggcaggtgattccgagggggagcaaagctactttgtttctacacctgatgagcaccctggcggtcacgacagggacgatggatccgtctatggccagatacacatagaggaagagagcactatcaggtattcctggcaggatgagattgtgcagggaacaagacgccgcacgcagaaggatggggcagtaggagagaaagtagtaaagcccttggacgtgcctgcccccagcttagagggcgacctcggcagcactcattggaaagaacaggccagatcaggcgagtttcatgccgagcccaccgtgatcgaaaaagagattaagatcccccacgaattccacacctcgatgaaaggtatttcttccaaggaaccgcgccagcaattggtggaagtgatcggccagctggaggagacgctccctgagcggatgcgcgaagagctgtccgccctgacacgagagggccaagggggacccggaagtgtgtctgtagatgtgaaaaaggtgcagggtgccggtggatccagcgtgacccttgtcgcagaagtcaatgtgagccagactgtggacgctgaccggttagaccttgaggagctgtccaaagatgaggcctcagagatggaaaaggctgtagaatcggtcgttagggaatctctctcgcggcagcggtcacccgcacctgggtcccctgacgaagagggcggagcagaggcacctgcagccggaatcaggttccgccgctgggccacgagggagctctacattccatcaggggaatccgaggtggctggaggtgcgtctcacagctcaggacagcgtacaccgcagggcccagtgtctgcgacagtggaagtgtcctctccaactgggtttgcccagagccaggtattggaggatgtgtcacaggctgcaaggcatattaaactggggccctcagaggtttggaggaccgagaggatgtcctatgaaggtcccaccgccgaggtggtggagatggacgttagtaacgtggaggcgattcgctcgaggactcaggaggctggagccttaggggtctcggacagaggctcatggcgtgatgcagacagtagaaacgatcaagctgtgggggtcagcttcaaggcttctgccggagagggggaccaggcccacagggagcaaggaaaggaacaggcgatgttcgataagaaagtccagctccagcgtatggtcgatcagcgctccgtgatctccgatgaaaaaaaggtggctttgctgtatttggacaatgaggaagaagagaacgatgggcattggttctag

SEQ ID NO: 185718 - DNA, 3762 bp, Artificial Sequence
  derived and/or modified sequence
atgctgtcctggaggctgcagacaggccctgagaaggccgagctgcaggagctgaatgcccggctgtatgactatgtgtgccgggtgcgggagctggagcgggagaacctgctgctggaggaggagctgcggggccggcggggccgggagggcctgtgggccgagggccaggcccgctgtgccgaggaggcccggagcctgcggcagcagctggatgagctgtcctgggccacagccctggccgagggggagagagatgccctgcggcgggagctgcgggagctgcagaggctggatgctgaggagcgggccgcccggggccgcctggatgctgagctgggcgcccagcagcgggagctgcaggaggccctgggcgcccgggccgccctggaggccctgctgggccgcctgcaggccgagcggcggggcctggatgctgcccacgagagagatgtgcgggagctgcgggcccgggccgccagcctgaccatgcacttccgggcccgggccactggacctgctgcccccccaccccggctgcgggaggtgcatgacagctatgccctgctggtggccgagagctggagggagaccgtgcagctgtatgaagatgaggtgcgggagctggaggaggccctgcggcggggccaggagagccggctgcaggccgaggaggagacccggctgtgtgcccaggaggccgaggccctgcggcgggaggccctgggcctggagcagctgcgggcccggctggaggatgccctgctgaggatgagggaggagtatggcatccaggccgaggagcggcagagggtgattgactgcctggaggatgagaaggccaccctgaccctggccatggctgactggctgcgggactaccaggacctgctgcaggtgaagacaggcctgagcctggaggtggccacctaccgggccctgctggagggggagagcaaccctgagatcgtcatctgggccgagcacgtggagaacatgcccagcgagttcaggaacaagagctaccactacacagacagcctgctgcagcgggagaatgaaagaaacctcttcagccggcagaaggcccccctggccagcttcaaccacagcagcgccctgtacagcaacctgagcggccaccggggcagccagacaggcaccagcattggaggagatgcccggcggggcttcctgggcagcggctacagcagcagcgccaccacccagcaggagaacagctatggcaaggctgtgagcagccagaccaacgtgaggaccttcagccccacctacggcctgctgaggaacacagaggcccaggtgaagaccttcccagaccggcccaaggccggggacacccgggaggtgcctgtgtacatcggggaggacagcaccatcgcccgggagagctacagagacagaagagacaaggtggccgccggggccagcgagagcaccaggagcaatgaaagaactgtcatcctgggcaagaagacagaggtgaaggccacccgggagcaggagaggaacagacctgagaccatccgcaccaagccagaggagaagatgtttgacagcaaggagaaggccagcgaggagaggaacctgcgctgggaggagctgaccaagctggacaaggaggcccggcagcgggagagccagcagatgaaggagaaggccaaggagaaggacagccccaaggagaagtctgtgcgggagcgggaggtgcccatcagcctggaggtgtcccaggacagaagagctgaggtgagccccaagggcctgcagacccctgtgaaggatgctgggggcggcaccggccgggaggccgaggcccgggagctgcgcttccggctgggcaccagtgatgccaccggcagcctgcagggcgacagcatgacagaaacagtggccgagaacatcgtgaccagcatcctgaagcagttcacccagagccctgagacagaggccagcgctgacagcttcccagacaccaaggtgacctacgtggacaggaaggagctgcctggagagaggaagaccaagacagagatcgtggtggagagcaagctgacagaagatgtggatgtgtctgatgaggccggcctggactacctgctgagcaaggacatcaaggaggtgggcctgaagggcaagtctgctgagcagatgattggagacatcatcaacctgggcctgaagggccgggagggccgggccaaggtggtgaatgtggagatcgtggaggagcctgtgtcctatgtgtctggagagaagccagaggagttctctgtgcccttcaaggtggaggaggtggaggatgtgtccccaggcccctggggcctggtgaaggaggaggagggctacggggagagtgatgtgaccttctctgtgaaccagcacaggaggaccaagcagccccaggagaacaccacccacgtggaggaggtgacagaagctggggacagcgagggggagcagagctactttgtgtccaccccagatgagcaccctgggggccatgacagagatgatggctctgtgtatggccagatccacatcgaggaggagagcaccatccgctacagctggcaggatgaaattgtgcagggcaccaggaggaggacccagaaggatggagctgtgggggagaaggtggtgaagcccctggatgtgcctgcccccagcctggagggggacctgggcagcacccactggaaggagcaggcccggtctggagagttccacgccgagcccaccgtgattgagaaggagatcaagatcccccatgagttccacacctccatgaagggcatcagcagcaaggagccccggcagcagctggtggaggtgattggccagctggaggagaccctgcctgagaggatgagggaggagctgagcgccctgacccgggagggccagggcggccctggctctgtgtctgtggatgtgaagaaggtgcagggcgctgggggcagctctgtgaccctggtggccgaggtgaatgtgtcccagacagtggatgctgaccggctggacctggaggagctgagcaaggatgaggccagcgagatggagaaggctgtggagagcgtggtgcgggagagcctgagccggcagaggagccctgcccctggcagcccagatgaggagggcggcgctgaggccccagctgctggcatccgcttccgccgctgggccacccgggagctgtacatccccagcggggagagcgaggtggccggcggggccagccacagcagcggccagaggaccccccagggccctgtgtctgccaccgtggaggtgagcagccccactggatttgcccagagccaggtgctggaggatgtgtcccaggccgcccggcacatcaagctgggccccagcgaggtgtggaggacagagaggatgtcctatgagggccccacagctgaggtggtggagatggatgtgtccaatgtggaggccatccgcagcaggacccaggaggccggggccctgggcgtgtctgaccggggctcctggagagatgctgacagcagaaatgaccaggccgtgggcgtgtccttcaaggccagcgctggggagggggaccaggcccaccgggagcagggcaaggagcaggccatgtttgacaagaaggtgcagctgcagaggatggtggaccagaggagcgtcatcagtgatgagaagaaggtggccctgctgtacctggacaatgaggaggaggagaatgatggccactggttctag

SEQ ID NO: 185719 - DNA, 3759 bp, Artificial Sequence
  derived and/or modified sequence
atgctgtcctggaggctgcagacaggccctgagaaggccgagctgcaggagctgaatgcccggctgtatgactatgtgtgccgggtgcgggagctggagcgggagaacctgctgctggaggaggagctgcggggccggcggggccgggagggcctgtgggccgagggccaggcccgctgtgccgaggaggcccggagcctgcggcagcagctggatgagctgtcctgggccacagccctggccgagggggagagagatgccctgcggcgggagctgcgggagctgcagaggctggatgctgaggagcgggccgcccggggccgcctggatgctgagctgggcgcccagcagcgggagctgcaggaggccctgggcgcccgggccgccctggaggccctgctgggccgcctgcaggccgagcggcggggcctggatgctgcccacgagagagatgtgcgggagctgcgggcccgggccgccagcctgaccatgcacttccgggcccgggccactggacctgctgcccccccaccccggctgcgggaggtgcatgacagctatgccctgctggtggccgagagctggagggagaccgtgcagctgtatgaagatgaggtgcgggagctggaggaggccctgcggcggggccaggagagccggctgcaggccgaggaggagacccggctgtgtgcccaggaggccgccctgcggcgggaggccctgggcctggagcagctgcgggcccggctggaggatgccctgctgaggatgagggaggagtatggcatccaggccgaggagcggcagagggtcatcgactgcctggaggatgagaaggccaccctgaccctggccatggctgactggctgcgggactaccaggacctgctgcaggtgaagacaggcctgagcctggaggtggccacctaccgggccctgctggagggggagagcaaccctgagatcgtcatctgggccgagcacgtggagaacatgcccagcgagttcaggaacaagagctaccactacacagacagcctgctgcagagagaaaatgaaagaaacctcttcagccggcagaaggcccccctggccagcttcaaccacagcagcgccctgtacagcaacctgagcggccaccggggcagccagacaggcaccagcattggaggagatgcccggcggggcttcctgggcagcggctacagcagcagcgccaccacccagcaggagaacagctatggcaaggctgtgagcagccagaccaacgtgaggaccttcagccccacctacggcctgctgaggaacacagaggcccaggtgaagaccttcccagaccggcccaaggccggggacacccgggaggtgcctgtgtacatcggggaggacagcaccatcgcccgggagagctacagagaccggcgggacaaggtggccgccggggccagcgagagcaccaggagcaatgaaagaactgtcatcctgggcaagaagacagaggtgaaggccacccgggagcaggagaggaacagacctgagaccatccgcaccaagccagaggagaagatgtttgacagcaaggagaaggccagcgaggagaggaacctgcgctgggaggagctgaccaagctggacaaggaggcccggcagcgggagagccagcagatgaaggagaaggccaaggagaaggacagccccaaggagaagtctgtgcgggagcgggaggtgcccatcagcctggaggtgtcccaggaccggcgggcagaggtgagccccaagggcctgcagacccctgtgaaggatgctgggggcggcaccggccgggaggccgaggcccgggagctgcgcttccggctgggcaccagtgatgccaccggcagcctgcagggcgacagcatgacagagaccgtggctgaaaatattgtgaccagcatcctgaagcagttcacccagagccctgagacagaggccagcgctgacagcttcccagacaccaaggtgacctacgtggacaggaaggagctgcccggggagaggaagaccaagacagaaattgtggtggagagcaagctgacagaagatgtggatgtgtctgatgaagctggcctggactacctgctgagcaaggacatcaaggaggtgggcctgaagggcaagtctgctgagcagatgattggagacatcatcaacctgggcctgaagggccgggagggccgggccaaggtggtgaatgtggagatcgtggaggagcctgtgtcctatgtgtctggagagaagccagaggagttctctgtgcccttcaaggtggaggaggtggaggatgtgtccccaggcccctggggcctggtgaaggaggaggagggctatggagagagtgatgtgaccttctctgtgaaccagcacaggaggaccaagcagccccaggagaacaccacccacgtggaggaggtgacagaggccggggacagcgagggggagcagagctactttgtgtccaccccagatgagcaccctgggggccatgacagagatgatggctctgtgtatggccagatccacatcgaggaggagagcaccatccgctacagctggcaggatgagatcgtgcagggcaccaggaggaggacccagaaggatggagctgtgggggagaaggtggtgaagcccctggatgtgcctgcccccagcctggagggggacctgggcagcacccactggaaggagcaggcccggagcggggagttccacgccgagcccaccgtcatcgagaaggagatcaagatcccccatgagttccacacctccatgaagggcatcagcagcaaggagccccggcagcagctggtggaggtgattggccagctggaggagaccctgcctgagaggatgagggaggagctgagcgccctgacccgggagggccagggcggccctggctctgtgtctgtggatgtgaagaaggtgcagggcgccggcggcagctctgtgaccctggtggccgaggtgaatgtgtcccagacagtggatgctgaccggctggacctggaggagctgagcaaggatgaggccagcgagatggagaaggctgtggagagcgtggtgcgggagagcctgagccggcagaggagccctgcccctggcagcccagatgaggagggcggcgctgaggccccagctgctggcatccgcttccgccgctgggccacccgggagctgtacatccccagcggggagagcgaggtggccggcggggccagccacagcagcggccagaggaccccccagggccctgtgtctgccaccgtggaggtgagcagccccaccggctttgcccagagccaggtgctggaggatgtgtcccaggccgcccggcacatcaagctgggccccagcgaggtgtggaggacagagaggatgtcctatgagggccccacagctgaggtggtggagatggatgtgtccaatgtggaggccatccgcagcaggacccaggaggccggggccctgggcgtgtctgaccggggctcctggagagatgctgacagcagaaatgaccaggccgtgggcgtgtccttcaaggccagcgctggggagggggaccaggcccaccgggagcagggcaaggagcaggccatgtttgacaagaaggtgcagctgcagaggatggtggaccagaggagcgtcatcagtgatgagaagaaggtggccctgctgtacctggacaatgaggaggaggagaatgatggccactggttctag

SEQ ID NO: 185720 - DNA, 3762 bp, Artificial Sequence
  derived and/or modified sequence
atgctgagctggcggctgcagaccggccccgagaaggccgagctgcaggagttgaacgctcgactttacgactacgtgtgtagggttagagaactggaaagagaaaacctgttgctggaggaggagcttagaggtcggcggggcagggagggactgtgggccgaaggccaagcccgatgtgccgaggaggcgcgcagcctcaggcagcagctggacgagctcagctgggctaccgccctggcagaaggtgagcgggacgccctgcggagggagctgcgcgaactccaacggctcgatgccgaggagcgagcagctagaggtagactggacgctgagctgggggcacagcagcgggagctgcaggaagcactgggtgcccgagcggcactggaagccctcctgggcagactccaagctgagaggcggggtctagacgccgctcatgagagagacgtgagggaactgagggcccgggcagcatccctaacaatgcatttccgggcccgtgccaccgggcccgccgcaccaccaccgcgcctgagggaggtgcatgatagctacgccctgttagtggccgagtcctggagggaaaccgtgcaattatacgaggacgaggtcagggagctagaggaggcacttagacggggtcaagagtcccgcctgcaggccgaggaagaaaccagactatgtgctcaggaagcagaggccctgagacgggaggcgctgggattggaacaactgcgcgcccgcctggaggacgccctgctgaggatgcgcgaggagtatggaatccaggcagaggaaagacagcgggtcatagactgcctggaggatgagaaggcgacacttaccctggccatggcagattggctacgagattatcaagacttgctacaggttaagacaggtctgagcctcgaagtggctacctaccgtgccctgctggaaggggaatctaaccccgagatagtcatctgggccgagcatgtcgagaatatgccaagcgagttccgcaacaaaagttatcattacacggatagtctcctgcagcgagaaaatgaaagaaacctgttcagcagacaaaaggcccctctcgcctcttttaatcacagctctgcactctactccaatctgtctgggcatagagggagccagacaggcacctcaatcggcggggacgcccgaagaggttttcttggtagcggttatagtagctctgccacaacccagcaggagaatagctacgggaaagctgtctccagccaaaccaatgtgagaacattctcgcccacttacggcttactgagaaacactgaagcccaggtgaaaacctttcccgacaggccgaaggcaggtgacactcgtgaagtcccagtgtacataggagaggattctaccatcgctcgcgagtcataccgagaccgaagggacaaagtcgcagctggggccagcgagtctacgcgcagcaatgaacggaccgtaatcctaggtaaaaagaccgaagtgaaagccacccgtgaacaggagcgcaatcggccagagactatacggaccaagcccgaagagaaaatgtttgattcaaaagagaaggcctctgaggaacgaaatttgcggtgggaagagctgacaaagctggacaaagaggctcgtcaaagggagtcccagcaaatgaaggagaaggctaaggaaaaggatagccctaaagaaaagagcgtaagggaacgtgaagtaccaatctcccttgaggtatcacaggataggagggccgaagtgtcccctaaagggctgcagacgcccgtcaaggacgctggagggggtaccggaagggaggctgaggcccgggagcttcggttccgcctgggcactagcgacgccacgggctccctccagggtgacagtatgaccgagactgtcgctgaaaacatcgttactagtatattgaagcagtttacccagtcaccagagactgaagctagcgctgattcctttcccgacactaaggttacctacgtggaccgtaaggagctgccgggagagaggaagaccaagaccgagatagtcgtcgagtccaagctcacagaagacgtggacgtcagcgatgaggcaggcttagactacttgctgtccaaggatattaaagaggtcggtttgaaaggaaaaagcgcagaacagatgataggcgacattatcaacctggggctcaaggggagggagggaagagctaaggtcgttaacgtcgagattgtggaagagcccgtctcctatgtgagtggcgaaaaacctgaagaatttagtgtgccatttaaggtggaggaggtggaggatgtgtcccccgggccgtggggattggtgaaagaagaagaaggatatggggaaagcgacgtcacttttagtgtgaatcaacacagaagaactaagcagccacaggagaataccactcatgtcgaagaagtcaccgaggctggagactcggagggtgaacagtcttactttgtgtctacccctgacgagcaccccgggggacatgatcgtgacgacggctctgtttatgggcagatccacatcgaggaggagagtactattcggtactcttggcaggacgagattgtgcagggcacgcgcaggagaacccaaaaggacggcgccgtcggagagaaggtggtgaaacctctggacgtcccggctccttctctggaaggggatcttggtagtacacactggaaagaacaggccagatcaggcgagtttcacgccgagcccactgtcatagagaaagagattaaaattccccacgagtttcatacttcaatgaaagggatctcatccaaagagccccgacagcagctggtggaggtcataggacaactcgaggagactttacccgagagaatgagggaagagttaagtgctttaacacgggaaggtcagggtggaccggggtccgtatcagtagacgtgaaaaaagtgcagggcgccggggggtctagtgtgacgctggtggctgaggttaatgtgagccagactgttgatgcagataggctggaccttgaggaattgtcaaaggacgaggcttcggagatggagaaagccgtcgagtccgtggtcagagaatccttgtctaggcagcggtctccagctccaggctctcctgacgaagaaggcggtgccgaggctcccgctgcaggaatccgcttccgccgatgggcgacccgcgagctttacatcccatccggcgagtctgaggtggccggcggtgccagccacagttctggccagaggacaccccagggacctgtcagcgctaccgtcgaagtgagtagccctaccggtttcgcccagagtcaggtcctcgaggacgtgagccaggctgcccgacatatcaagttaggaccctcggaggtgtggagaacggagcgcatgagttatgagggcccaacagccgaggtagtagaaatggacgtctccaacgtggaggctatccgttcacgcacccaggaggcaggcgcgctgggcgtgagtgacagggggtcctggcgagatgcagactccaggaacgaccaggccgtcggagtatctttcaaggcctcagctggcgaaggcgaccaagcacatagggaacaggggaaggagcaggccatgttcgacaagaaggtgcaactgcagcggatggtggatcagaggtccgtgatttctgacgaaaagaaagtggccctgctttacctcgacaacgaggaggaggagaatgatggccattggttctag

SEQ ID NO: 185721 - DNA, 3759 bp, Artificial Sequence
  derived and/or modified sequence
atgctgagctggcggctgcagaccggccccgagaaggccgagctgcaagagctgaatgcacggctctacgactatgtgtgtagagtgagggaacttgagcgggaaaatctgttactggaagaggaactgcgcggccgacgtgggcgggaaggtctgtgggctgaaggacaagctcgttgcgctgaggaggcgcgttctcttagacagcagctggatgagcttagctgggccacggccttagccgagggagaacgagatgccctgcgacgcgagttgagagaactgcagcggctggacgccgaagagcgcgctgcaaggggacgcctggatgctgaactgggagcccaacagagggaattgcaggaggccctgggggcccgcgcggctctcgaagcccttctcgggcgactccaagcagagagacgaggacttgatgctgcgcatgagcgtgacgtcagagagcttagggctcgtgctgcctccctgacaatgcactttagagcgagagcaactggccccgcggcgccccccccaagactacgagaagtgcatgactcctacgctctgctagtcgccgaatcatggcgggagactgttcaactgtacgaggatgaggtgagagaactggaggaggccttgcgtcgcgggcaggaatccagactccaagcagaggaggagactaggctgtgcgctcaagaagcggcattgcggcgggaggccttgggtctggaacagctgcgcgcccggctggaggatgcattgcttcgcatgcgcgaagagtacgggattcaggcggaagagcgccaacgagtgatcgattgtctggaggacgagaaggctactttaacccttgctatggcggactggctgcgcgactaccaggacctgttacaggtgaagacaggcctaagcctcgaagtagcaacttaccgggcgctgttagagggtgagtcaaaccccgagattgtgatttgggccgagcatgtggagaatatgccatccgagttccggaacaaaagttatcactatacagattccctgttgcagcgcgagaacgaacggaacttgttcagccgtcagaaagcgcccctggcttctttcaatcacagttccgccctctattctaacctgtcaggtcatcgaggcagccagacgggtacttccattgggggggatgcccgcaggggttttctggggtcggggtacagttccagcgccacaacacagcaggaaaactcctacggtaaggctgtatcaagtcagactaacgttcggacattcagcccgacttatggactgctccgcaataccgaagctcaggttaagacctttccagatagacctaaagccggtgacactcgagaagtgcccgtctatataggcgaggattccactatcgctagggaaagttaccgggaccggcgagacaaggtcgcggcgggcgcaagtgagagtactcgctcaaacgagcgtaccgtgatattaggtaaaaagaccgaagtgaaggctacccgggagcaggaaagaaaccggcccgagacaataaggacaaagccagaggagaagatgtttgatagtaaagagaaggcttccgaagagaggaatcttagatgggaagaactaacgaagctggacaaggaagcccgtcagcgagaatcacagcaaatgaaggaaaaggcaaaggaaaaggactctccgaaggagaagtcagttcgggaaagggaggtgcccatctcactcgaggtgagccaggacaggcgcgccgaagtgtctccaaaagggctgcaaacgccagtaaaggatgcgggaggtgggaccgggagggaagccgaggcccgagagttgcgcttcaggttgggcacctccgacgccacaggatctctccagggagatagcatgaccgagacagtggccgagaatattgtcacctcgatcctgaagcagttcacgcagtcacctgaaaccgaagcctccgccgattcctttcctgacacaaaggtgacttatgtggaccgcaaggagctgccaggcgaacggaaaacaaagactgagattgtagtcgaaagtaagctcactgaggatgtggacgtgtctgacgaggccggcctagactatttgctgtctaaagacataaaggaggtgggcctcaagggaaagtctgccgaacagatgatcggagatatcatcaacctgggactcaaaggaagagagggccgcgccaaggtcgtaaatgtggaaatcgtcgaggagcccgtatcttatgtctctggggaaaagcctgaggagttctccgtcccattcaaggtggaggaggtggaggatgtatccccagggccctggggacttgttaaggaggaggagggctacggagagtccgacgtaacattttccgtgaaccagcacagaaggactaaacagcctcaggagaataccacgcatgtggaggaagttactgaggccggggatagtgaaggagagcagagctatttcgtcagcacaccagacgaacatcctggagggcacgacagggatgatgggtccgtctatggacaaatccacatcgaagaggagagtaccatacgctactcatggcaggacgagatcgttcaaggcacccgcagacgaacacaaaaagatggcgctgtgggtgaaaaggtggtgaaaccactggatgtccccgccccaagcttagagggagacctgggctccacccattggaaggaacaagcgcggtccggcgaattccatgctgagcctacagtgatagagaaagagatcaagattccccatgaattccatacctcaatgaagggcatttcctcgaaagaaccacgccagcagttggtggaggttatcggacagttagaggagactttgccagagcgcatgagagaggagctctcggccctgacacgcgagggtcagggtggcccaggaagcgtgtccgtggacgtcaagaaagtgcaaggcgcaggaggtagtagcgtgacgttagtggctgaagtcaacgtgagccagactgtagacgcagatcgactagacttagaagagctctcaaaggacgaagcatctgagatggaaaaggcagttgaaagtgtagtgcgtgagagcctcagtaggcaacgatcccctgctcctggtagccccgatgaggagggaggggccgaagcacccgctgctgggatccgcttcaggagatgggccactcgggaactgtatattccaagcggtgaatctgaagtcgccggaggagccagccactccagtgggcagcgaacaccacagggcccagtttccgctaccgtcgaagtctcctctccgaccggattcgcccagtctcaggtactggaggacgtgagtcaagctgcacgccatattaaacttggaccctctgaagtgtggaggacagagcggatgtcatacgagggcccgaccgccgaagttgtagaaatggatgtgagtaacgtagaagccatacgctcccggactcaggaggctggcgccctgggtgtgagcgatcgtgggtcttggagggatgcagactcaagaaacgatcaggccgtgggtgtcagcttcaaagccagcgcaggtgagggggaccaggcacatcgagaacaggggaaggagcaggcaatgttcgacaagaaagttcagctccagaggatggtggatcaacgctcagttattagtgatgagaagaaggtggcgctactatatctggataacgaagaggaggagaacgatggccactggttttag

SEQ ID NO: 185722 - DNA, 3762 bp, Artificial Sequence
  derived and/or modified sequence
atgctgtcttggcgcctccagacaggacctgaaaaagccgagttgcaggagctgaacgccagactttacgactacgtgtgtagagttcgggagctcgaaagggagaacttacttcttgaagaggagctcagggggagacgcggaagagaaggcctctgggccgagggtcaggcaagatgtgccgaggaggctcggtctctgaggcagcagctcgatgaactttcctgggccactgctctggctgaaggggaacgggacgcgcttcggcgagaattgagggaacttcaaaggctggatgctgaagagagggccgctcgaggaagactcgacgcggagttaggagcccagcagcgcgaactgcaggaggcccttggggcacgagccgctcttgaagcactcctggggcgactccaggcggaacggagagggctcgatgctgcgcacgaaagggatgtgcgggagttacgggctcgtgcagcctctctaaccatgcactttagagccagggccaccggacccgcagcccctcctcctagactgcgcgaggtgcacgactcctatgcccttctagtcgcagaatcttggagggagacagtccagctctacgaggacgaggtgagggagctcgaagaggccttgagacgaggccaggagtcaaggttacaggccgaagaggagacccggctgtgcgctcaagaagccgaagcgctgcggagggaagcgctcgggcttgagcagctccgagcccgtctggaagatgctctactcagaatgcgcgaagaatacgggatccaagcagaggaacgtcagcgggttattgattgcttagaggacgaaaaagcaacgctgaccctcgctatggcagattggctaagagactatcaggacctgctgcaggtgaagaccggcctcagcctggaggtcgctacataccgcgctctcctggagggtgagtcgaacccggagattgttatctgggccgaacatgtcgagaatatgccttccgagtttaggaataaatcctaccactacaccgatagcctcctgcagcgcgaaaacgaacgcaatcttttctcccgacaaaaagcccctctggcaagctttaatcacagtagcgctttgtatagcaaccttagtgggcatcgtgggtcacagaccggtacaagcataggcggagatgcacgcagaggattccttggttcaggctacagttcatctgcgacgacccagcaggaaaattcctacgggaaagcagtgagctcccagaccaacgttagaacatttagcccgacctatgggctgctcaggaataccgaagcgcaggtgaaaacgtttccagaccgcccaaaggccggagacacccgtgaagtgccagtctatataggcgaggattctaccattgcccgagagagttaccgggaccgcagagacaaagtcgcggctggagcgtccgaaagcacacgatccaatgaaaggaccgtcatcctgggaaagaagacggaggtgaaagcaacaagggaacaggaacggaataggcctgaaaccatcaggacgaagccagaagagaagatgtttgactctaaagagaaagccagtgaagaacgtaatctccgctgggaggaacttacaaagctcgataaggaggccaggcaacgcgaaagccagcaaatgaaagaaaaagccaaggagaaggatagtcctaaggagaaatccgtgcgcgaaagggaagtccctatctcactggaggtttcacaggacagacgcgcagaggtcagtccaaagggcctgcagacacctgttaaggacgctggcggagggacaggtcgggaggcggaggcaagagagctgaggttccggcttggaacctcagacgccactggtagcttgcagggagattctatgaccgagactgtcgctgaaaacatagtgacatccattttgaagcagttcacacagtcccccgagactgaggctagcgcggattccttccctgacacaaaagttacttacgtggaccgaaaagagctgcccggagaacggaagaccaagactgaaatcgtggtagaaagtaaacttactgaggatgttgacgtgtcggatgaagccggtctcgattatttgctctcgaaagatatcaaagaagttggactaaaggggaaatctgccgagcagatgattggagacatcataaacttgggactcaagggacgtgaaggtagagcaaaggtggttaatgttgagattgttgaggagcctgtcagctacgtgtccggcgaaaaacctgaggagtttagcgtaccgtttaaagtggaggaagtcgaggacgtcagcccaggcccttggggattggtcaaagaggaagagggatatggggagtcagacgtgacattctccgtgaaccagcacagacgcacgaaacaaccgcaggaaaacactactcatgttgaggaggtgacagaggctggagattctgagggggaacagtcatatttcgtgtctaccccagacgagcatcctggcggacacgaccgcgacgacggctccgtgtacggccaaatccacatcgaagaagagtcaaccatccgctattcttggcaggatgaaatagtccaggggactagacggagaactcaaaaggacggagcggtgggtgaaaaagtggtcaaacccctggatgtccccgcaccatcgttggagggggatctgggcagtacccactggaaggaacaggccagatctggtgaatttcatgcggagccaaccgtaatcgagaaagagatcaaaatccctcacgagtttcacacatcaatgaaggggatcagctcgaaggaaccccgtcagcagttggtggaggttataggacagctcgaagaaaccctgcctgaacggatgagggaggaattgtccgccctgacccgggaaggccaaggtggccctgggtctgtgtcagttgatgtcaagaaggtgcagggggcaggaggatcctctgtcaccctcgtggccgaagtcaatgtctcccagaccgtcgatgcagataggctggacctcgaagaactctctaaggacgaagcatccgagatggaaaaagcagtcgagagcgtcgttagggaaagtctcagccgtcagagatcccccgctccaggatctccagatgaggagggaggcgctgaagctcctgccgctggaattagatttcgcaggtgggcaaccagagagttgtatatcccgtccggggagtccgaggtggctggaggagcgtctcattcctcaggccagcgcacaccccagggccctgtcagcgccaccgtggaagtgagtagcccaacggggttcgcccaaagccaggtgctggaggacgtgagccaggccgctcgccatatcaagctcggacctagcgaggtctggaggactgagcgaatgagctatgaaggacccaccgcggaggtcgtcgagatggacgtgagcaatgtggaagccatccgctcaaggactcaggaggccggagctctgggagtttctgacagggggtcttggcgagatgccgactcccgaaatgatcaggccgttggcgtgagctttaaggcatctgccggtgaaggggaccaggctcacagggagcagggcaaagagcaggctatgtttgacaaaaaggtccagctccagcggatggtggaccagcggtctgtaatctctgatgagaagaaagtggcgctgctatacctcgataacgaggaagaggaaaacgatggacactggttttag

SEQ ID NO: 185723 - DNA, 3759 bp, Artificial Sequence
  derived and/or modified sequence
atgttaagctggcgcctgcagactggtcccgagaaggccgagctacaagaactgaatgctaggttatatgactatgtttgtagagtacgggaattggaacgagaaaacctgctgctagaagaagagctgcgagggaggagaggcagagagggactctgggcggagggtcaggccaggtgcgccgaggaggctcgcagcctcaggcagcagctggatgagctctcgtgggccactgccctggctgaaggcgaacgcgatgccctgcggagggaactgagagaactgcaaaggttggacgctgaagagcgagctgcaaggggcagactggatgcagagttgggcgcacagcagagagaactgcaagaagcactcggtgctcgggctgcgttagaagcactgctgggcagattgcaggccgaaagaagagggctggacgcggctcatgagcgggatgtgagagagctgagagcccgagcggcatcactgaccatgcacttccgcgctcgtgccacagggccagctgcccctccccctagactcagggaggtccatgacagctatgcattattggtggcagaatcgtggcgggagacagtgcagctttacgaagacgaggtacgtgaactcgaagaagcacttcgacgaggccaggaaagtaggcttcaggctgaagaagagaccaggctatgcgcccaagaggccgctctacgcagggaagctctgggcctagaacagttacgggcaagactcgaggacgcactgctgcggatgagggaagagtacgggatccaggcagaggaacgccagcgagtgattgattgcctcgaagacgagaaggctaccctcacactcgcaatggcagactggctcagagattaccaagatctgctacaagttaagacaggactgtccttagaagtcgccacctatcgagcactactcgagggcgaaagtaaccctgagatcgtcatttgggctgaacatgtggagaatatgccctccgaatttcgaaacaaaagctatcattacactgattccctgctacagcgagaaaacgagcgcaatttattttctagacaaaaggcccctttggcctcttttaaccactccagtgctctgtactctaacctgtccggccaccggggatcccagacaggaacctccattggcggtgacgcaagacgcggtttcttgggctctgggtactccagtagtgccacaactcagcaggaaaattcctatggcaaagcggtgagcagccagaccaacgtgcggacattctctcccacctacggcttgctgcgcaacacggaggcccaggtaaagaccttcccagataggccgaaggccggtgacactagggaggtccctgtctatatcggcgaggacagtactattgcacgagagtcctatcgcgataggcgggataaggtagccgctggtgccagcgaatctacacgatccaatgaaagaactgtgattcttggaaagaaaacggaggtaaaagccacccgagagcaggagcgaaataggcccgagaccattagaaccaagccagaagaaaagatgttcgactctaaggagaaggcctcggaggaaagaaatttgcggtgggaggagcttacaaagctggacaaggaggccagacagagggagtcccaacagatgaaggaaaaggccaaagagaaagatagtccgaaggagaaatctgtcagggagcgtgaagtccccataagtctcgaggtctcgcaagacagaagagcggaggtcagccctaagggtttacaaacccctgtgaaggatgcagggggagggaccggacgcgaggccgaggcgagggagttgagatttcggttgggtacatctgatgccacgggctccctccaaggggactccatgaccgagaccgtcgcggaaaacatcgtgacgagcattttgaagcagttcacccagtcgccagaaacggaggcctctgctgactctttcccagatacaaaagtcacgtacgtggaccgcaaagagctcccaggtgagaggaagactaagacagagattgtggtcgaatctaaattaactgaagatgttgatgtatcagacgaggcgggacttgactacctcctgagcaaggacattaaagaagtaggactcaaaggaaagagcgctgaacagatgataggagatatcatcaacctcgggttgaagggccgagagggaagagcgaaggtcgtgaacgtcgaaatcgtggaagagcctgtgagctatgtctcaggcgagaagcccgaagaatttagcgtaccttttaaagtggaggaggtggaagacgtttcccctggaccatggggcctggtaaaggaggaagaggggtacggcgagtccgatgtcacctttagcgtaaaccagcatcgtcgaactaaacagccacaggaaaatacaactcacgtcgaagaggtgaccgaagccggagactctgagggggagcaaagctacttcgtttcaacgcctgatgagcacccagggggtcacgacagagatgatgggagcgtgtacggacagatccacattgaggaagaaagcacaatccggtacagttggcaagatgaaattgttcagggtacccgcaggagaactcagaaggatggggcagtcggggagaaggtggtaaagcctctggatgtccccgctcctagcctggagggcgaccttggctccacgcattggaaagaacaggccagatcaggcgaatttcacgccgagcccacagtgatcgagaaggaaattaaaatcccccacgaattccacacaagcatgaaaggcatttcttcaaaagagccccgacagcaactcgtcgaggtgatcggtcaactggaggaaacgctgcctgagcggatgagggaagagctcagcgccctgacaagagaaggtcaaggaggtccaggctctgtgtcagtcgacgttaagaaagtccagggagctggaggctcttctgtgacactggtggcagaggtgaacgtatctcagactgtcgatgccgatcgtcttgatctggaggagctcagtaaagatgaagcatcagagatggaaaaagcagtcgagagcgtggtaagggaatcattgtctcgacaaagatcccccgctcctggctctcctgatgaggaaggaggagccgaagcgcctgccgctggtatacgctttcgcaggtgggccacccgggagctgtatattcctagcggtgagtcagaggtggctggcggagcttcccatagttcgggacaacgcactccacaaggacccgtttcagcaacagtggaagtgtccagtcccacaggcttcgcccagagtcaggtcctcgaggacgtgtctcaggccgctagacatattaaactcggcccatcagaggtttggcgtacagagcgcatgtcatacgaggggccaaccgcagaggtggtagaaatggatgtgagcaatgtcgaagccatcagatctcgcacccaagaggctggcgctctgggggtctccgaccgaggatcctggagggacgcagactccaggaatgatcaggctgtgggagtgtcatttaaagcttctgctggagagggcgaccaagcacacagagaacagggaaaggaacaagctatgttcgataaaaaggttcagctgcagaggatggtggaccagaggagcgtcatcagtgacgagaaaaaggtggctctactgtaccttgataatgaagaagaagaaaacgatggccattggttctag

SEQ ID NO: 185724 - DNA, 6389 bp, Artificial Sequence
  derived and/or modified sequence
agtctgcgggcctccggggcagcggcgaggccggagcgtcgcggcggagaggacgagaccgggacaagaccagggcaggagggagccggccagccgcgagaaccccgcacgcccggcaagatgctgtcctggcggctgcagacgggccccgagaaggccgagctccaggagctcaacgcccggctctatgactacgtgtgtcgggtgcgggagctggagcgcgaaaacctactcctggaggaggagctgcgcggccggcgcgggcgagagggcctgtgggccgaggggcaggcccgctgcgccgaggaggcgcgcagcttgcggcagcagctggacgagctgagctgggccactgcgctggcggagggcgagcgggacgctctgcggcgcgagctgcgggagctgcagcgcctggatgcggaggagcgcgccgcccgcggccgcctggacgccgagctgggtgcgcagcagcgcgagctgcaggaggcgctgggcgcgcgcgccgccctcgaggcgctgctgggccggctgcaggccgagcgccgaggcctcgacgcggcccacgaacgcgacgtgagggagctgcgcgcgcgcgccgccagccttaccatgcatttccgcgcccgcgccaccggccccgccgcgccgccgccacgcctgcgggaggtgcacgacagctacgcactgctggtggccgagtcgtggcgggagacggtgcagctgtacgaggacgaggtgcgcgagctggaggaggcgctgcggcgcggccaggagagcagactccaggcggaggaagagacgcggctgtgcgcgcaggaggcagaggcgctgcggcgcgaggcgctcgggttggagcagctgcgcgcgcggctggaggacgcgctgctgcggatgcgcgaggagtacgggatacaggccgaggagcggcagagagtgattgactgcctggaggatgagaaggcaaccctcaccttggccatggctgactggctgcgggactatcaggacctcctgcaggtgaagaccggcctcagtctggaggtggcgacctaccgggccttattggaaggagaaagtaatccagagatagtgatctgggctgagcacgttgaaaacatgccgtcagaattcagaaacaaatcctatcactataccgactcactactacagagggaaaatgaaaggaatctattttcaaggcagaaagcacctttggcaagtttcaatcacagctcggcactgtattctaacctgtcagggcaccgtggatctcagacgggcacatctattggaggtgatgccagaagaggcttcttgggctcgggatattcttcctcggccactacccagcaggaaaactcatacggaaaagccgtcagcagtcaaaccaacgtcagaactttctctccaacctatggccttttaagaaatactgaggctcaagtgaaaacattccctgacagaccaaaagccggagatacaagggaggtccccgtttacataggtgaagattccacaattgcccgcgagtcgtaccgggatcgccgagacaaggtggcagcaggtgcttcggaaagcacacggtcaaatgagaggaccgtcattctgggaaagaaaacagaagtgaaagccacgagggagcaagaaagaaacagaccagaaaccatccgaacaaagccagaagagaaaatgttcgattctaaagagaaggcttccgaggagagaaacctaagatgggaagaattgacaaagttagataaggaagcgagacagagagaaagccagcagatgaaggagaaggctaaggagaaggactcaccgaaggagaagagcgtgcgagagagagaggtgccgattagtctagaagtatcccaggacagaagagcagaggtgtccccgaaaggtttgcagacgcctgtgaaggatgctggtggtgggaccggtagagaggcagaagcaagagagctacggttcaggttgggcaccagtgatgccactggttctctgcaaggcgattccatgacagaaaccgtagcagaaaacatcgttaccagtatcctgaagcagttcactcagtctccagagacagaagcatctgctgattcttttccagacacaaaagtcacttacgtggacaggaaagagcttcctggggaaaggaaaacaaagactgaaatagttgtggagtctaaactgactgaggatgttgatgtttccgatgaagctggcctggactaccttttaagcaaggatattaaggaagtggggctgaaaggcaagtcagccgagcagatgataggagacatcatcaacctcggcctgaaagggagggaggggagagcaaaggtcgtcaacgtggagatcgtggaggagcccgtgagttatgtcagcggggagaagccggaggagttttccgtcccattcaaagtggaggaggtcgaagatgtgtcgccaggcccctgggggttggttaaggaggaggaaggttatggagaaagcgatgtcacattctcagttaatcagcatcgaaggaccaagcagcctcaggagaacacgactcacgtggaagaagtgacagaggcaggtgattcagagggcgagcagagttattttgtgtccactccagatgaacaccccggggggcacgacagagatgacggctcggtgtacgggcagatccacatcgaggaggaatccaccatcaggtactcttggcaggatgaaatcgtgcaggggactcgaaggaggacacagaaggacggtgcagtgggcgagaaggttgtgaagcccttggatgtcccagcgccctctctggagggggacctgggttccactcactggaaagaacaagctagaagcggtgaatttcatgccgaacccacagtcattgaaaaagaaattaaaataccccacgaattccacacctccatgaagggcatctcctccaaggagccccggcagcagctggtggaggtcatcgggcagctggaggaaacccttcccgagcgcatgagggaggagctgtccgccctcaccagagaggggcagggtgggccggggagcgtttccgtggatgtcaagaaggtccagggtgctggtggcagttccgtgaccctggttgctgaagtcaacgtctcacaaactgtggatgccgatcggttagacctggaggagctgagcaaagatgaggccagtgagatggagaaggctgtggagtcggtggttcgggagagcctgagcaggcaacgcagcccagcgcctggcagcccagatgaggaaggtggagcggaggccccggctgctggcattcgctttaggcgttgggccacccgggagctgtacatcccttcaggcgagagcgaggttgctggtggggcctctcacagctcgggacagcgcactccccagggcccagtgtcggccactgtggaggtcagcagccccacaggctttgcccagtcacaggtgctggaggatgtgagccaggctgcaaggcacataaaactcggcccctctgaagtctggaggactgagcgaatgtcatatgaaggacccactgcagaagtggtggagatggatgtgagtaacgtagaggcgatccgcagccggacacaggaagcgggagctctcggtgtgtctgaccgtggttcctggagagacgcggacagtaggaatgaccaggcagttggtgtgagctttaaggcctctgctggggaaggagaccaggcccacagagaacagggcaaggagcaggccatgtttgataagaaggtgcagctccagagaatggtagaccaaaggtcggtgatttcagatgaaaagaaagttgccctcctctatctagacaatgaggaggaggagaatgatgggcattggttttaataagcagaaacattttgttttaatggcagcctgttggcgacgtgccaacatccaaaggccttaacttattttaagaggccgagggagtctatgaaaatctccccttttttacttttttaaagagtactcccggcatggtcaatttcctttatagttaatccgtaaaggtttccagttaattcatgccttaaaaggcactgcaattttatttttgagttgggacttttacaaaacacttttttccctggagtcttctctccacttctggagatgaatttctatgttttgcacctggtcacagacatggcttgcatctgtttgaaactacaattaattatagatgtcaaaacattaaccagattaaagtaatatatttaagagtaaattttgcttgcatgtgctaatatgaaataacagactaacattttaggggaaaaataaatacaatttagactctaaaaagtcttttcaaaaagaaatgggaaataggcagactgtttatgttaaaaaaattcttgctaaatgatttcatctttaggaaaaaattacttgccatatagagctaaattcatcttaagacttgaatgaattgctttctatgtacagaactttaaacaatatagtatttatggcgaggacagctgtagtctgttgtgatatttcacattctatttgcacaggttccctggcactggtagggtagatgattattgggaatcgcttacagtaccatttcattttttggcactaggtcattaagtagcacacagtctgaatgcccttttctggagtggccagttcctatcagactgtgcagacttgcgcttctctgcaccttatcccttagcacccaaacatttaatttcactggtgggaggtagaccttgaagacaatgaagagaatgccgatactcagactgcagctggaccggcaagctggctgtgtacaggaaaattggaagcacacagtggactgtgcctcttaaagatgcctttcccaaccctccattcatgggatgcaggtctttctgagctcaagggtgaaagatgaatacaataacaaccatgaacccacctcacggaagctttttttgcactttgaacagaagtcattgcagttggggtgttttgtccagggaaacagtttattaaatagaaggatgttttggggaaggaactggatatctctcctgcagcccagcaccgagatacccaggacgggcctggggggcgagaaaggcccccatgctcatgggccgcggagtgtggacctgtagataggcaccaccgagtttaagatactgggatgagcatgcttcattggattcattttattttacacgtcagtattgttttaaagtttctgtctgtaaagtgtagcatcatatataaaaagagtttcgctagcagcgcattttttttagttcaggctagcttctttcacataatgctgtctcagctgtatttccagtaacacagcatcatcgcactgactgtggcgcactggggaataacagtctgagctagcaccaccctcagccaggctacaacgacagcactggagggtcttccctctcagattcacctggaggccctcagacccccagggtgcacgtctccccaggtcctgggagtggctaccgcaggtagtttctggagagcacgttttcttcattgataagtggaggagaaatgcagcacagctttcaagatactattttaaaaacaccatgaatcagatagggaaagaaagttgattggaatagcaagtttaaacctttgttgtccatctgccaaatgaactagtgattgtcagactggtatggaggtgactgctttgtaaggttttgtcgtttctaatacagacagagatgtgctgattttgttttagctgtaacaggtaatggtttttggatagatgattgactggtgagaatttggtcaaggtgacagcctcctgtctgatgacaggacagactggtggtgaggagtctaagtgggctcagtttgatgtcagtgtctgggctcatgacttgtaaatggaagctgatgtgaacaggtaattaatattatgacccacttctatttactttgggaaatatcttggatcttaattatcatctgcaagtttcaagaagtattctgccaaaagtatttacaagtatggactcatgagctattgttggttgctaaatgtgaatcacgcgggagtgagtgtgcccttcacactgtgacattgtgacattgtgacaagctccatgtcctttaaaatcagtcactctgcacacaagagaaatcaacttcgtggttggatggggccggaacacaaccagtctttttgtatttattgttactgagacaaaacagtactcactgagtgtttttcagtttcctactggtggttttgatattgtttgtttaagatgtatatttagaatgacatcatctaagaagctgattttgctaaactcctgttccctacaatgggaaatgtcacaagaatgtgc

SEQ ID NO: 185725 - DNA, 6386 bp, Artificial Sequence
  derived and/or modified sequence
agtctgcgggcctccggggcagcggcgaggccggagcgtcgcggcggagaggacgagaccgggacaagaccagggcaggagggagccggccagccgcgagaaccccgcacgcccggcaagatgctgtcctggcggctgcagacgggccccgagaaggccgagctccaggagctcaacgcccggctctatgactacgtgtgtcgggtgcgggagctggagcgcgaaaacctactcctggaggaggagctgcgcggccggcgcgggcgagagggcctgtgggccgaggggcaggcccgctgcgccgaggaggcgcgcagcttgcggcagcagctggacgagctgagctgggccactgcgctggcggagggcgagcgggacgctctgcggcgcgagctgcgggagctgcagcgcctggatgcggaggagcgcgccgcccgcggccgcctggacgccgagctgggtgcgcagcagcgcgagctgcaggaggcgctgggcgcgcgcgccgccctcgaggcgctgctgggccggctgcaggccgagcgccgaggcctcgacgcggcccacgaacgcgacgtgagggagctgcgcgcgcgcgccgccagccttaccatgcatttccgcgcccgcgccaccggccccgccgcgccgccgccacgcctgcgggaggtgcacgacagctacgcactgctggtggccgagtcgtggcgggagacggtgcagctgtacgaggacgaggtgcgcgagctggaggaggcgctgcggcgcggccaggagagcagactccaggcggaggaagagacgcggctgtgcgcgcaggaggcagcgctgcggcgcgaggcgctcgggttggagcagctgcgcgcgcggctggaggacgcgctgctgcggatgcgcgaggagtacgggatacaggccgaggagcggcagagagtgattgactgcctggaggatgagaaggcaaccctcaccttggccatggctgactggctgcgggactatcaggacctcctgcaggtgaagaccggcctcagtctggaggtggcgacctaccgggccttattggaaggagaaagtaatccagagatagtgatctgggctgagcacgttgaaaacatgccgtcagaattcagaaacaaatcctatcactataccgactcactactacagagggaaaatgaaaggaatctattttcaaggcagaaagcacctttggcaagtttcaatcacagctcggcactgtattctaacctgtcagggcaccgtggatctcagacgggcacatctattggaggtgatgccagaagaggcttcttgggctcgggatattcttcctcggccactacccagcaggaaaactcatacggaaaagccgtcagcagtcaaaccaacgtcagaactttctctccaacctatggccttttaagaaatactgaggctcaagtgaaaacattccctgacagaccaaaagccggagatacaagggaggtccccgtttacataggtgaagattccacaattgcccgcgagtcgtaccgggatcgccgagacaaggtggcagcaggtgcttcggaaagcacacggtcaaatgagaggaccgtcattctgggaaagaaaacagaagtgaaagccacgagggagcaagaaagaaacagaccagaaaccatccgaacaaagccagaagagaaaatgttcgattctaaagagaaggcttccgaggagagaaacctaagatgggaagaattgacaaagttagataaggaagcgagacagagagaaagccagcagatgaaggagaaggctaaggagaaggactcaccgaaggagaagagcgtgcgagagagagaggtgccgattagtctagaagtatcccaggacagaagagcagaggtgtccccgaaaggtttgcagacgcctgtgaaggatgctggtggtgggaccggtagagaggcagaagcaagagagctacggttcaggttgggcaccagtgatgccactggttctctgcaaggcgattccatgacagaaaccgtagcagaaaacatcgttaccagtatcctgaagcagttcactcagtctccagagacagaagcatctgctgattcttttccagacacaaaagtcacttacgtggacaggaaagagcttcctggggaaaggaaaacaaagactgaaatagttgtggagtctaaactgactgaggatgttgatgtttccgatgaagctggcctggactaccttttaagcaaggatattaaggaagtggggctgaaaggcaagtcagccgagcagatgataggagacatcatcaacctcggcctgaaagggagggaggggagagcaaaggtcgtcaacgtggagatcgtggaggagcccgtgagttatgtcagcggggagaagccggaggagttttccgtcccattcaaagtggaggaggtcgaagatgtgtcgccaggcccctgggggttggttaaggaggaggaaggttatggagaaagcgatgtcacattctcagttaatcagcatcgaaggaccaagcagcctcaggagaacacgactcacgtggaagaagtgacagaggcaggtgattcagagggcgagcagagttattttgtgtccactccagatgaacaccccggggggcacgacagagatgacggctcggtgtacgggcagatccacatcgaggaggaatccaccatcaggtactcttggcaggatgaaatcgtgcaggggactcgaaggaggacacagaaggacggtgcagtgggcgagaaggttgtgaagcccttggatgtcccagcgccctctctggagggggacctgggttccactcactggaaagaacaagctagaagcggtgaatttcatgccgaacccacagtcattgaaaaagaaattaaaataccccacgaattccacacctccatgaagggcatctcctccaaggagccccggcagcagctggtggaggtcatcgggcagctggaggaaacccttcccgagcgcatgagggaggagctgtccgccctcaccagagaggggcagggtgggccggggagcgtttccgtggatgtcaagaaggtccagggtgctggtggcagttccgtgaccctggttgctgaagtcaacgtctcacaaactgtggatgccgatcggttagacctggaggagctgagcaaagatgaggccagtgagatggagaaggctgtggagtcggtggttcgggagagcctgagcaggcaacgcagcccagcgcctggcagcccagatgaggaaggtggagcggaggccccggctgctggcattcgctttaggcgttgggccacccgggagctgtacatcccttcaggcgagagcgaggttgctggtggggcctctcacagctcgggacagcgcactccccagggcccagtgtcggccactgtggaggtcagcagccccacaggctttgcccagtcacaggtgctggaggatgtgagccaggctgcaaggcacataaaactcggcccctctgaagtctggaggactgagcgaatgtcatatgaaggacccactgcagaagtggtggagatggatgtgagtaacgtagaggcgatccgcagccggacacaggaagcgggagctctcggtgtgtctgaccgtggttcctggagagacgcggacagtaggaatgaccaggcagttggtgtgagctttaaggcctctgctggggaaggagaccaggcccacagagaacagggcaaggagcaggccatgtttgataagaaggtgcagctccagagaatggtagaccaaaggtcggtgatttcagatgaaaagaaagttgccctcctctatctagacaatgaggaggaggagaatgatgggcattggttttaataagcagaaacattttgttttaatggcagcctgttggcgacgtgccaacatccaaaggccttaacttattttaagaggccgagggagtctatgaaaatctccccttttttacttttttaaagagtactcccggcatggtcaatttcctttatagttaatccgtaaaggtttccagttaattcatgccttaaaaggcactgcaattttatttttgagttgggacttttacaaaacacttttttccctggagtcttctctccacttctggagatgaatttctatgttttgcacctggtcacagacatggcttgcatctgtttgaaactacaattaattatagatgtcaaaacattaaccagattaaagtaatatatttaagagtaaattttgcttgcatgtgctaatatgaaataacagactaacattttaggggaaaaataaatacaatttagactctaaaaagtcttttcaaaaagaaatgggaaataggcagactgtttatgttaaaaaaattcttgctaaatgatttcatctttaggaaaaaattacttgccatatagagctaaattcatcttaagacttgaatgaattgctttctatgtacagaactttaaacaatatagtatttatggcgaggacagctgtagtctgttgtgatatttcacattctatttgcacaggttccctggcactggtagggtagatgattattgggaatcgcttacagtaccatttcattttttggcactaggtcattaagtagcacacagtctgaatgcccttttctggagtggccagttcctatcagactgtgcagacttgcgcttctctgcaccttatcccttagcacccaaacatttaatttcactggtgggaggtagaccttgaagacaatgaagagaatgccgatactcagactgcagctggaccggcaagctggctgtgtacaggaaaattggaagcacacagtggactgtgcctcttaaagatgcctttcccaaccctccattcatgggatgcaggtctttctgagctcaagggtgaaagatgaatacaataacaaccatgaacccacctcacggaagctttttttgcactttgaacagaagtcattgcagttggggtgttttgtccagggaaacagtttattaaatagaaggatgttttggggaaggaactggatatctctcctgcagcccagcaccgagatacccaggacgggcctggggggcgagaaaggcccccatgctcatgggccgcggagtgtggacctgtagataggcaccaccgagtttaagatactgggatgagcatgcttcattggattcattttattttacacgtcagtattgttttaaagtttctgtctgtaaagtgtagcatcatatataaaaagagtttcgctagcagcgcattttttttagttcaggctagcttctttcacataatgctgtctcagctgtatttccagtaacacagcatcatcgcactgactgtggcgcactggggaataacagtctgagctagcaccaccctcagccaggctacaacgacagcactggagggtcttccctctcagattcacctggaggccctcagacccccagggtgcacgtctccccaggtcctgggagtggctaccgcaggtagtttctggagagcacgttttcttcattgataagtggaggagaaatgcagcacagctttcaagatactattttaaaaacaccatgaatcagatagggaaagaaagttgattggaatagcaagtttaaacctttgttgtccatctgccaaatgaactagtgattgtcagactggtatggaggtgactgctttgtaaggttttgtcgtttctaatacagacagagatgtgctgattttgttttagctgtaacaggtaatggtttttggatagatgattgactggtgagaatttggtcaaggtgacagcctcctgtctgatgacaggacagactggtggtgaggagtctaagtgggctcagtttgatgtcagtgtctgggctcatgacttgtaaatggaagctgatgtgaacaggtaattaatattatgacccacttctatttactttgggaaatatcttggatcttaattatcatctgcaagtttcaagaagtattctgccaaaagtatttacaagtatggactcatgagctattgttggttgctaaatgtgaatcacgcgggagtgagtgtgcccttcacactgtgacattgtgacattgtgacaagctccatgtcctttaaaatcagtcactctgcacacaagagaaatcaacttcgtggttggatggggccggaacacaaccagtctttttgtatttattgttactgagacaaaacagtactcactgagtgtttttcagtttcctactggtggttttgatattgtttgtttaagatgtatatttagaatgacatcatctaagaagctgattttgctaaactcctgttccctacaatgggaaatgtcacaagaatgtgc

SEQ ID NO: 185726 - protein, 875 aa, Artificial Sequence
  derived and/or modified sequence
MHDAFEPVPILEKLPLQIDCLAAWEEWLLVGTKQGHLLLYRIRKDVGCNRFEVTLEKSNKNFSKKIQQIHVVSQFKILVSLLENNIYVHDLLTFQQITTVSKAKGASLFTCDLQHTETGEEVLRMCVAVKKKLQLYFWKDREFHELQGDFSVPDVPKSMAWCENSICVGFKRDYYLIRVDGKGSIKELFPTGKQLEPLVAPLADGKVAVGQDDLTVVLNEEGICTQKCALNWTDIPVAMEHQPPYIIAVLPRYVEIRTFEPRLLVQSIELQRPRFITSGGSNIIYVASNHFVWRLIPVPMATQIQQLLQDKQFELALQLAEMKDDSDSEKQQQIHHIKNLYAFNLFCQKRFDESMQVFAKLGTDPTHVMGLYPDLLPTDYRKQLQYPNPLPVLSGAELEKAHLALIDYLTQKRSQLVKKLNDSDHQSSTSPLMEGTPTIKSKKKLLQIIDTTLLKCYLHTNVALVAPLLRLENNHCHIEESEHVLKKAHKYSELIILYEKKGLHEKALQVLVDQSKKANSPLKGHERTVQYLQHLGTENLHLIFSYSVWVLRDFPEDGLKIFTEDLPEVESLPRDRVLGFLIENFKGLAIPYLEHIIHVWEETGSRFHNCLIQLYCEKVQGLMKEYLLSFPAGKTPVPAGEEEGELGEYRQKLLMFLEISSYYDPGRLICDFPFDGLLEERALLLGRMGKHEQALFIYVHILKDTRMAEEYCHKHYDRNKDGNKDVYLSLLRMYLSPPSIHCLGPIKLELLEPKANLQAALQVLELHHSKLDTTKALNLLPANTQINDIRIFLEKVLEENAQKKRFNQVLKNLLHAEFLRVQEERILHQQVKCIITEEKVCMVCKKKIGNSAFARYPNGVVVHYFCSKEVNPADT

SEQ ID NO: 185727 - DNA, 2628 bp, Artificial Sequence
  derived and/or modified sequence
atgcacgacgccttcgagcccgtgcccatcctggagaagctgcccctgcagatcgactgcctggccgcctgggaggagtggctgctggtgggcaccaagcagggccacctgctgctgtacagaatcagaaaggacgtgggctgcaacagattcgaggtgaccctggagaagagcaacaagaacttcagcaagaagatccagcagatccacgtggtgagccagttcaagatcctggtgagcctgctggagaacaacatctacgtgcacgacctgctgaccttccagcagatcaccaccgtgagcaaggccaagggcgccagcctgttcacctgcgacctgcagcacaccgagaccggcgaggaggtgctgagaatgtgcgtggccgtgaagaagaagctgcagctgtacttctggaaggacagagagttccacgagctgcagggcgacttcagcgtgcccgacgtgcccaagagcatggcctggtgcgagaacagcatctgcgtgggcttcaagagagactactacctgatcagagtggacggcaagggcagcatcaaggagctgttccccaccggcaagcagctggagcccctggtggcccccctggccgacggcaaggtggccgtgggccaggacgacctgaccgtggtgctgaacgaggagggcatctgcacccagaagtgcgccctgaactggaccgacatccccgtggccatggagcaccagcccccctacatcatcgccgtgctgcccagatacgtggagatcagaaccttcgagcccagactgctggtgcagagcatcgagctgcagagacccagattcatcaccagcggcggcagcaacatcatctacgtggccagcaaccacttcgtgtggagactgatccccgtgcccatggccacccagatccagcagctgctgcaggacaagcagttcgagctggccctgcagctggccgagatgaaggacgacagcgacagcgagaagcagcagcagatccaccacatcaagaacctgtacgccttcaacctgttctgccagaagagattcgacgagagcatgcaggtgttcgccaagctgggcaccgaccccacccacgtgatgggcctgtaccccgacctgctgcccaccgactacagaaagcagctgcagtaccccaaccccctgcccgtgctgagcggcgccgagctggagaaggcccacctggccctgatcgactacctgacccagaagagaagccagctggtgaagaagctgaacgacagcgaccaccagagcagcaccagccccctgatggagggcacccccaccatcaagagcaagaagaagctgctgcagatcatcgacaccaccctgctgaagtgctacctgcacaccaacgtggccctggtggcccccctgctgagactggagaacaaccactgccacatcgaggagagcgagcacgtgctgaagaaggcccacaagtacagcgagctgatcatcctgtacgagaagaagggcctgcacgagaaggccctgcaggtgctggtggaccagagcaagaaggccaacagccccctgaagggccacgagagaaccgtgcagtacctgcagcacctgggcaccgagaacctgcacctgatcttcagctacagcgtgtgggtgctgagagacttccccgaggacggcctgaagatcttcaccgaggacctgcccgaggtggagagcctgcccagagacagagtgctgggcttcctgatcgagaacttcaagggcctggccatcccctacctggagcacatcatccacgtgtgggaggagaccggcagcagattccacaactgcctgatccagctgtactgcgagaaggtgcagggcctgatgaaggagtacctgctgagcttccccgccggcaagacccccgtgcccgccggcgaggaggagggcgagctgggcgagtacagacagaagctgctgatgttcctggagatcagcagctactacgaccccggcagactgatctgcgacttccccttcgacggcctgctggaggagagagccctgctgctgggcagaatgggcaagcacgagcaggccctgttcatctacgtgcacatcctgaaggacaccagaatggccgaggagtactgccacaagcactacgacagaaacaaggacggcaacaaggacgtgtacctgagcctgctgagaatgtacctgagcccccccagcatccactgcctgggccccatcaagctggagctgctggagcccaaggccaacctgcaggccgccctgcaggtgctggagctgcaccacagcaagctggacaccaccaaggccctgaacctgctgcccgccaacacccagatcaacgacatcagaatcttcctggagaaggtgctggaggagaacgcccagaagaagagattcaaccaggtgctgaagaacctgctgcacgccgagttcctgagagtgcaggaggagagaatcctgcaccagcaggtgaagtgcatcatcaccgaggagaaggtgtgcatggtgtgcaagaagaagatcggcaacagcgccttcgccagataccccaacggcgtggtggtgcactacttctgcagcaaggaggtgaaccccgccgacacctag

SEQ ID NO: 185728 - DNA, 2628 bp, Artificial Sequence
  derived and/or modified sequence
atgcatgatgctttcgaaccagtcccaatcctcgaaaaactgcccctccagatcgactgtctggctgcctgggaagagtggttactggtcgggaccaaacaaggacacctgcttctgtaccgcatacgcaaggacgtgggctgtaaccgcttcgaggtgaccctcgaaaagtcaaacaaaaacttctcaaagaagattcaacaaatccatgtcgtctcacagtttaaaattctagtctcactcctcgaaaacaatatctatgttcatgacctgctgactttccaacagatcacaacagtgtctaaggcaaaaggcgccagtctgtttacttgtgacttacaacatacagagactggagaggaggtcttacgcatgtgcgtggctgttaaaaaaaaactgcagctgtacttctggaaggatagagaattccatgaactgcagggagactttagtgtcccagacgtcccgaaaagtatggcctggtgcgagaattctatttgcgtgggttttaaaagggattactaccttattagagtcgacggcaagggatcaatcaaagaactctttccaacaggtaagcagctcgagcccctggttgcccctttggccgacggtaaggtggccgttggccaggatgatttgacggtggttctgaatgaggaggggatctgcacccagaaatgtgcgttgaactggaccgacattcctgtcgccatggagcatcagcctccatacatcatcgccgtgctccccagatacgtggaaattcggaccttcgagccacgcctactcgtgcaatccattgaattgcaacgcccgcggtttatcacaagtggaggcagtaacataatatacgtcgcatccaatcactttgtttggagactcatcccagtaccgatggctacacaaatccagcagctgcttcaagacaagcagtttgaactggcccttcagctggctgagatgaaagacgattctgactctgagaagcagcagcaaatccaccatattaagaacctttacgcattcaacttgttttgccagaaaagattcgatgagtccatgcaggtgttcgccaaactcggcacagatccaacacacgtgatgggtctctacccggacctgttaccgacagactataggaaacagttgcagtatccgaatccactgccggtgctgtccggcgctgagttggagaaagcccatcttgccctgatagattatctgacccagaagcgctcccaactcgtcaaaaaactgaacgactccgaccatcagagcagcacttcaccattaatggagggaacacctactatcaaatcaaaaaaaaaacttttgcagattatcgataccaccctgctgaaatgctatttacacacaaacgtggctctggtcgcacctctcttgcggttagagaataaccactgccacattgaagaaagtgagcatgttttgaaaaaagcacacaaatactcggaactcatcattctctatgaaaagaaggggttacacgagaaggccctgcaggtgctcgtggaccagagtaagaaagcaaattcacccttgaaaggtcatgaacgaactgtccaatatctgcagcacttaggtacagagaatctgcatctcattttttcatactccgtgtgggtgctcagagactttcccgaggacggcctgaaaattttcactgaggacttacctgaagtggagtcccttccacgggatcgcgtcctgggcttcctcattgaaaacttcaagggtctcgccattccatatctggagcatatcattcacgtgtgggaagagactggctcaagattccacaactgtctgattcagttgtactgcgagaaagtccaagggctgatgaaggaatatctgctcagctttccagctggtaagacccctgtcccagccggggaagaggagggggagctcggcgagtacagacagaagctccttatgtttctcgaaattagcagctactacgacccaggcagattaatttgcgatttcccatttgatgggctgcttgaagagagagcccttctccttgggcgtatgggaaagcacgagcaggccctttttatttatgtgcatatcctaaaagacacaagaatggcggaggagtattgccataagcattatgatcgaaataaggatggcaacaaagacgtatacttgtcattactccgcatgtacctctcaccgccaagtattcactgtctcggacccattaaactcgaacttctggaacctaaagctaacctccaggctgccctacaagtattggagttgcaccatagcaaattggatacgacaaaagctcttaaccttctgccggctaacactcaaataaatgacattaggattttcctggaaaaagtactggaggagaacgcacagaagaaacgatttaatcaggtgctgaagaatctactccacgccgaatttcttcgagtccaggaggagaggatcctccatcagcaggtcaagtgcatcattaccgaggagaaagtgtgcatggtgtgtaagaaaaaaatcggaaacagcgccttcgctagatatcctaacggtgtggttgttcactacttttgttccaaagaagtcaaccctgcagacacctag

SEQ ID NO: 185729 - DNA, 2628 bp, Artificial Sequence
  derived and/or modified sequence
atgcatgatgcctttgagcctgtgcccatcctggagaagctgcccctgcagattgactgcctggccgcctgggaggagtggctgctggtgggcaccaagcagggccacctgctgctgtaccgcatcaggaaggatgtgggctgcaacagatttgaggtgaccctggagaagagcaacaagaacttcagcaagaagatccagcagatccacgtggtgtcccagttcaagatcctggtgtccctgctggagaacaacatctacgtgcatgacctgctgaccttccagcagatcaccaccgtgtccaaggccaagggggccagcctcttcacctgtgacctgcagcacacagagaccggggaggaggtgctgaggatgtgtgtggccgtgaagaagaagctgcagctgtacttctggaaggaccgggagttccacgagctgcagggcgacttctctgtgcctgatgtgcccaagtccatggcctggtgtgaaaattccatctgtgtgggcttcaagagggactactacctgatccgggtggatggcaagggcagcatcaaggagctgttccccaccgggaagcagctggagcccctggtggcccccctggctgatggcaaggtggccgtgggccaggatgacctgactgtggtgctgaatgaggagggcatctgcacccagaagtgtgccctgaactggacagacatccctgtggccatggagcaccagcccccctacatcatcgctgtgctgcccaggtatgtggagatccgcacctttgagccccggctgctggtgcagagcattgagctgcagaggccccgcttcatcaccagcggcggcagcaacatcatctacgtggccagcaaccactttgtgtggaggctcatccctgtgcccatggccacccagatccagcagctgctgcaggacaagcagtttgagctggccctgcagctggccgagatgaaggatgacagcgacagcgagaagcagcagcagatccaccacatcaagaacctgtatgccttcaacctcttctgccagaagagatttgatgagagcatgcaggtgtttgccaagctgggcacagaccccacccacgtgatgggcctgtacccagacctgctgcccacagactacaggaagcagctgcagtaccccaaccccctgcctgtgctgagcggggctgagctggagaaggcccacctggccctgattgactacctgacccagaagaggagccagctggtgaagaagctgaatgacagcgaccaccagagcagcaccagccccctgatggagggcacccccaccatcaagagcaagaagaagctgctgcagatcatcgacaccaccctgctgaagtgctacctgcacaccaacgtggccctggtggcccccctgctgcggctggagaacaaccactgccacatcgaggagagcgagcacgtgctgaagaaggcccacaagtacagcgagctgatcatcctgtatgagaagaagggcctgcacgagaaggccctgcaggtgctggtggaccagagcaagaaggccaacagccccctgaagggccacgagaggacagtgcagtacctgcagcacctgggcacagagaacctgcacctgatcttctcctacagcgtgtgggtgctgcgggacttcccagaagatggcctgaagatcttcacagaggacctgcctgaggtggagagcctgccccgggacagagtgctgggcttcctgattgagaacttcaagggcctggccatcccctacctggagcacatcatccacgtgtgggaggagaccggcagccgcttccacaactgcctgatccagctgtactgtgagaaggtgcagggcctgatgaaggagtacctgctgtccttccctgctgggaagacccctgtgcctgctggggaggaggagggggagctgggggagtaccggcagaagctgctgatgttcctggagatcagcagctactatgaccccggccgcctcatctgtgacttcccctttgatggcctgctggaggagcgggccctgctgctgggccgcatgggcaagcatgagcaggccctcttcatctacgtgcacatcctgaaggacaccaggatggccgaggagtactgccacaagcactatgacaggaacaaggatggcaacaaggatgtgtacctgagcctgctgaggatgtacctgagccccccatccatccactgcctgggccccatcaagctggagctgctggagcccaaggccaacctgcaggccgccctgcaggtgctggagctgcaccacagcaagctggacaccaccaaggccctgaacctgctgcctgccaacacccagatcaatgacatccgcatcttcctggagaaggtgctggaggagaatgcccagaagaagcgcttcaaccaggtgctgaagaacctgctgcacgccgagttcctgcgggtgcaggaggagcgcatcctgcaccagcaggtgaagtgcatcatcacagaggagaaggtgtgcatggtgtgcaagaagaagattggcaacagcgcctttgcccgctaccccaacggggtggtggtgcactacttctgcagcaaggaggtgaacccagctgacacctag

SEQ ID NO: 185730 - DNA, 2628 bp, Artificial Sequence
  derived and/or modified sequence
atgcacgacgccttcgagcccgtgcccatcctggagaagctgcccttgcaaatcgattgtttggccgcctgggaggaatggctactggttgggaccaaacagggtcacctcctactctaccggatcaggaaagatgtcggatgtaataggtttgaagttaccctggaaaagtctaacaagaatttcagcaaaaagatccagcagatccatgtagtctcccagttcaagatcttggtgtccctgctggaaaacaacatttacgttcatgatctcctcacattccagcagatcaccacagtgagtaaggccaagggtgcctcgctctttacttgcgacttacagcatacagagactggcgaagaggtgctgcgcatgtgtgtggccgtgaagaagaaactccagctgtatttctggaaagaccgggagttccacgaactgcagggagacttcagcgtgcccgacgtgccaaagagtatggcctggtgtgaaaacagcatttgcgtgggctttaagagggattactatctaatccgggtggacggaaagggatctatcaaggagctgtttcctaccgggaagcaactcgaacctctggtggcacctcttgcagacggcaaggtagccgtgggccaggatgatttaaccgtggtcctgaacgaggaagggatttgcacgcaaaagtgcgctctcaactggaccgacatccccgtggcaatggaacaccaaccaccttacattattgcggtcctgcctagatatgtagagatcagaacctttgaaccgcgcctcctggttcaatccatcgaactgcaacgccccaggttcataaccagtgggggttcaaatatcatttacgtcgcaagcaaccactttgtttggcgactcattccagtccccatggccacccaaattcagcagctgctccaggacaagcaatttgagctagctctgcaactggccgaaatgaaagacgacagcgactcagagaagcagcaacaaatccaccacatcaagaacctgtacgcatttaatctcttttgccagaagagattcgatgaatctatgcaggtctttgccaaattaggcaccgatccgacccacgttatgggactgtatccggatttgcttcccacagattaccgaaaacaactccagtacccgaaccctctgccggtgctgtctggcgcagaattggagaaggcacatctggccttgattgattatctgactcaaaagcgctctcagttggtgaaaaaactcaatgacagcgaccaccagagctctacatcccctttgatggaggggacacccaccatcaagtctaagaagaaattactgcagattatcgacacgaccctgctgaagtgttacctccataccaatgtggccctcgtggcgccactactgagacttgagaacaaccattgccatatcgaggaatcagagcacgtgctgaagaaggcacataagtacagtgagctgatcattctatatgaaaagaagggcctccacgaaaaagccctccaggttttggttgaccagtcgaagaaggccaactcaccccttaaaggacatgagcgcacagtgcaatatcttcagcacctgggcactgaaaacctgcacctcatattcagctactcagtctgggttctgcgggattttcctgaggatggactgaaaatcttcactgaggatctgcctgaggtggagagtctgcctagagatcgtgtgctgggttttctgatcgaaaacttcaaaggcctggccataccctacctcgagcatattatccacgtatgggaggaaacaggctcacgcttccacaattgccttatccagctgtactgcgaaaaggtgcagggacttatgaaagagtacttactgagcttcccagccggaaaaactcccgtgcctgccggggaggaagaaggagaattaggagagtatcggcagaagctgctgatgttcctcgaaatcagcagctactacgacccagggagacttatctgcgatttccctttcgacggcttactcgaagagcgggcgcttttactggggcgaatgggcaagcacgaacaagccctgttcatatacgtacacatcttaaaggacacccgaatggctgaggagtattgccacaagcactacgatcgtaataaggatgggaataaggatgtttatctgagccttttacggatgtacctgagcccaccttctatacactgcctcgggcccattaagctagagctgttagaacccaaagccaacctgcaggctgcacttcaagttttggagctgcaccattctaaactggatacgaccaaagcactgaacttactcccagcaaacactcaaataaatgatattcggatcttcctcgagaaggtgctggaagagaacgcccagaagaaacgtttcaatcaggtcctgaagaaccttctccacgccgagtttctgagggtccaggaggaacggatccttcatcagcaagtgaaatgtatcatcacggaagagaaggtttgcatggtgtgtaaaaagaaaattggtaacagtgcgttcgctagatacccaaatggggtggttgtgcactacttttgttctaaggaggtgaaccccgccgacacttag

SEQ ID NO: 185731 - DNA, 2628 bp, Artificial Sequence
  derived and/or modified sequence
atgcatgatgcttttgagcctgtcccaattctagaaaaattgcctctgcagattgactgcttagccgcatgggaagagtggttactagtgggcaccaagcaaggccacctactcctctaccgcatcagaaaggacgtcggctgcaatcggtttgaggttacacttgagaaatctaacaaaaacttcagcaaaaagatacagcagattcacgtcgtatcacagtttaagattctcgtttcactgcttgaaaacaatatttacgtgcatgatctacttaccttccaacagatcacaaccgtcagtaaggccaagggcgctagcttgttcacatgcgatctgcagcacacagagacaggagaagaggtcctgagaatgtgtgtggccgtaaagaagaaactgcaactatacttttggaaagatcgggaattccatgaactccagggagacttctcggtgccagatgtgcccaagagcatggcctggtgcgagaatagcatctgcgtagggtttaagagggactattacttgattcgcgtggacggtaagggatcaattaaagagttattcccaacaggaaaacagctggagccgctggtagcgccattggccgacggcaaagtggcagtcggacaagacgacctgactgtcgtactcaatgaagaggggatctgcacccaaaaatgtgccctgaactggaccgacattccggtagccatggagcatcagccaccctatataatagccgtgctaccaagatacgttgagatccggacgttcgaacctaggctgctggtacagtcaattgaactgcagcgcccacgcttcataacctctggaggtagcaacattatttatgtggcatctaaccacttcgtgtggagactgattcctgtgcctatggctactcagatccagcagctgttgcaggataaacagttcgaactggcactgcaactggccgagatgaaggatgattccgacagcgagaagcagcagcagattcaccatataaagaatctgtacgcattcaatctcttttgtcaaaaaagatttgatgagagcatgcaagtattcgctaagttaggtacagatcccacacacgtgatggggctataccccgacctcttgcctacagactatcgcaagcagctccagtacccaaatccactgcctgttctctcgggggctgaactggagaaagcccacctggccctgatagactacctgactcagaaaaggagtcagttggtgaagaagctgaacgattccgatcaccagagcagtacatcccctctaatggaggggacgcctaccatcaaaagtaaaaagaaactgctgcagatcattgacaccaccttgctgaaatgttatttgcatactaatgtggcacttgtcgctccactgctccgcttagaaaacaatcattgtcatattgaggaatctgagcatgtcctgaaaaaagctcataagtacagcgaactgattattctctatgaaaaaaagggcctgcacgagaaagcccttcaggtcctggtcgaccagagcaaaaaagcgaacagccccctgaaaggtcatgagaggacggtgcaatacctgcaacacctaggcacagagaatttgcaccttattttctcttatagcgtgtgggtactgcgggacttccccgaggatgggctgaaaatttttactgaagacctgcccgaagtggaatctctgcccagagacagagtgcttggcttcctgatcgagaactttaagggccttgcaatcccctacttggagcacattattcacgtctgggaagaaactggatccaggttccacaattgccttattcagctgtactgcgagaaggtgcagggactcatgaaagagtatctgttgagctttcccgcaggcaagacacccgtgcctgcaggggaagaggagggcgagctgggcgaatataggcagaagctactgatgttcttagagatttcaagctactacgacccaggccgactaatttgcgacttcccctttgacggcctgttagaggaacgtgcactgctcctggggaggatgggaaagcacgagcaggccctttttatctatgtgcacattctgaaggacacacggatggcagaagaatattgtcataagcattacgaccggaacaaagatggcaataaagacgtttacctgagtctgctccgtatgtatctcagccccccttctatccattgtctgggacctatcaagctcgaactgttggaacctaaggccaaccttcaggcagccttgcaggtgctcgagctgcatcacagcaaattggatactacaaaagctcttaacctgctgccagcgaacactcagattaacgatatcaggatctttctggagaaagtgttggaagaaaatgctcagaagaagaggttcaatcaagttttgaaaaacctgctgcacgcggagttcttgcgcgttcaggaggagaggatactgcaccaacaggtcaagtgtattatcacggaggagaaagtgtgcatggtgtgcaagaaaaagatcgggaactctgcatttgctcgctacccgaatggcgtggtcgtacattatttttgttcaaaagaggtaaatccagctgacacatag

SEQ ID NO: 185732 - DNA, 4844 bp, Artificial Sequence
  derived and/or modified sequence
agcaggaagtccggggttgacgatggctgtgttgttgaagggcctgtagccggggggttcctggccggatcccggtctacccttagcccagactcgttccggaccccagcccggcccggaacactctgggcgagacggcggtggcaactctccccttgccgccatgcacgacgctttcgagccagtgccgatcctagaaaagctgcctctgcaaatcgactgtctggctgcctgggaggaatggcttcttgtgggaaccaaacaaggacatcttcttctctataggattcggaaggacgttggttgcaacagatttgaagtgacactagagaaatccaataagaacttctccaaaaagattcagcagatccatgtggtttcccagtttaagattctggtcagcttgttagaaaataacatttatgtccatgacctattgacatttcaacaaatcactacggtttcaaaggcaaagggagcatcactgtttacttgtgacctccagcacacagagaccggtgaggaggtgttacggatgtgtgtggcagtaaaaaagaagctgcagctctatttctggaaggacagggaatttcatgaattgcagggggactttagtgtgccagatgtgcccaagtccatggcgtggtgtgaaaattctatctgtgtgggtttcaagagagactactacctaataagggtggatggaaaggggtccatcaaagagctctttccaacaggaaaacagctggagcccttagttgcacctctggcagatggaaaagtggctgtgggccaggatgatctcaccgtggtactcaatgaggaagggatctgcacacagaaatgtgccctgaactggacggacataccagtggccatggagcaccagcctccctacatcattgcagtgttgcctcgatatgttgagatccgaacatttgaaccgaggcttctggtccaaagcattgaattgcaaaggccccgtttcattacctcaggaggatcaaacattatctatgtggccagcaatcattttgtttggagactcatccctgtccccatggcaacccaaatccaacaacttctccaggacaagcagtttgaattggctctgcagctcgcagaaatgaaagatgattctgacagtgaaaagcagcaacaaattcatcacatcaagaacttgtatgccttcaacctcttctgccagaagcgttttgatgagtccatgcaggtctttgctaaacttggcacagatcccacccatgtgatgggcctgtaccctgacctgctgcccacagactacagaaagcagttgcagtatcccaacccattgcctgtgctctccggggctgaattggagaaggctcacttagctctgattgactacctgacacagaaacgaagtcaattggtaaagaagctgaatgactctgatcaccagtcaagcacctcaccgctcatggaaggcactcccaccatcaaatccaagaagaagctgctacaaatcatcgacaccaccctgctcaagtgctatctccatacaaatgtggccctggtggcccccttgctacgcctggagaacaatcactgccacatcgaggagagcgagcacgtgctaaagaaggctcacaagtacagtgagcttatcatcctgtatgagaagaaggggctccacgagaaagctctgcaggtgctcgtggaccagtccaagaaagccaactcccctctgaaaggccacgagaggacagtgcagtatctgcagcatctgggcacagaaaacctgcatttgattttctcctactcagtgtgggtgctgagagacttcccagaagatggcctgaagatatttactgaagatctcccggaagtggagtctctgccacgtgatcgagtcctcggcttcttaatagagaattttaagggtctggctattccttatctggaacacatcatccatgtttgggaggagacaggctctcggttccacaactgcctgatccagctatactgtgagaaggtgcaaggtctgatgaaggagtatctcctgtccttccctgcaggcaaaaccccagtcccagctggagaggaagagggtgagctgggagaataccggcaaaagctcctcatgttcttggagatttccagctactatgatccaggccggctcatctgtgattttccctttgatggcctcttagaagaacgagctctcctgttggggcgcatggggaaacatgaacaagctcttttcatttatgtccacatcttgaaggatacaaggatggctgaggagtactgccacaaacactatgaccgaaacaaagatggcaacaaagatgtgtatctgtccctgcttcggatgtacctgtcgccccccagcattcactgcctggggccaatcaagctggaactactggagccaaaagccaacctccaggccgctctgcaggtcctcgagctacaccacagcaaactggacaccaccaaggccctcaaccttctgccagcaaacactcagatcaatgacatacgcatcttcctggaaaaggtcttggaagaaaatgcacaaaagaaacggttcaatcaagtgctcaagaaccttctccatgcagaattcctgagggtccaggaagagcggattttacaccagcaggtgaagtgcatcatcacagaggagaaggtgtgcatggtgtgtaagaagaagattgggaacagtgcatttgcaagataccccaatggagtggtcgtccattacttctgttccaaagaggtaaacccagctgacacttgagcccagcatcctggggatccagcggatggacagcttggctctcccagagaggtgaaggagcacctggccttaggaatcctggctgccaccaccacaaggctccccatttggacattactggctatcttgtgccctggaacaactctgaattaattagactcatggtctggcattgccagctttttaatgggaaaagagattagttataccttataccattatgttgtgggcaattccagagaattcagtacctgcttggtcaggaggatgtgcaccatcttgcctttgcacaccagtcacctgaacaaggaaacttgtcacaagtgtttgtaaccatggggttgttcatcaagggcttttctattaagtacatgacttcacaaggaccgctcagcatggctcactggagagttccatgagagaacagcactcaagcttctggccgcatggacccgatggctcgcattctgtgtagtgttttacgtctccatggtaactgtgccctgcacccctcggtagccgccctgttagttttcagtctccttttctttctcaccatttatcacttccctcactgccctacccaggctttctctcccacttccctgactctgggaataactaatatttaagcaaggtaagatgagaagcaaggggtctcagttctaggaatacagtgctagttgattgtcaggtatgttgtaaatagaccctctttggccatacactccatgcctagatgcctcggagagcatcattctctgcctaggcaaggccctgcatcccttgcctcaggccgggctgagtgtgactgcagctcctgaggatgggcctgccctgtctggggtatgcgtgatccctagatacatgttcccacagaggtgcctgctccgtcttcgctcaccagacactcaggcaggctggcttagtctttgtgcgtggcgattttgtgctctgggccctttctctttttccagccagtttccattcacttgccttacagcctgccctggccgtcactccccagctttgttcagcaatggtgtggttggagagttgtgctgggatagcgcaggaaggtgggtcccggcaacacgcaggggatgagtggacctggaactgacaatggcgtgctgccaagtgttcctgagaggtgtttaggcacagcagaggggacgcggggggcaagaacagcaggacgctggtttaaaaataactcaccgccaaacctgtggagcagtgtggggcatcctgccagaggtgcacaggctggagtttcaggcactgcaggctgatgacacacagggagagtggccctgcctcctgtcctccccggggtttttgcagactcgaagtctcactgcaccagtgtctttgatggtggtgagggtgggtgatggtgcccagcaccaacagttttagtggcctgtccttgacctgccgtggtcctttgtaaactatggctccatgctgtgtgacagatcaacgtgctgatggtaagtagactaggcttccccaggcatgccgtccgtgggggcctgaagagacagtgagtgccattggccccattcgcagatgtgggagactctgctcaggcctgtgaggctgggcagcccttcaccagagttcggaggagcagtgtgtggcgccacgtcccgactggccatacccacacagaagcagtgctgcccggggcctcatctgggccagcttggactctgcttcctccaggagcagcagggaagctctgggccacctccctggatagcaggaacttgacctgccatgtgtgccctgccttcctggccagctgtgcttgttatcttccattctcacaaactgtctttgaagcaatagaataaagaatgtgtgttttctttcctggtatacatacatgatcccatgctcccaagctccattcttccttccctcaactctctgccctccacagagctatggagaaggctggagatgaaagctttgtagtgaggactgataaagatctcatcactgctccttataataaacctaataaagcaagaaaccaagccta

SEQ ID NO: 185733 - protein, 1104 aa, Artificial Sequence
  derived and/or modified sequence
MERSPGEGPSPSPMDQPSAPSDPTDQPPAAHAKPDPGSGGQPAGPGAAGEALAVLTSFGRRLLVLIPVYLAGAVGLSVGFVLFGLALYLGWRRVRDEKERSLRAARQLLDDEEQLTAKTLYMSHRELPAWVSFPDVEKAEWLNKIVAQVWPFLGQYMEKLLAETVAPAVRGSNPHLQTFTFTRVELGEKPLRIIGVKVHPGQRKEQILLDLNISYVGDVQIDVEVKKYFCKAGVKGMQLHGVLRVILEPLIGDLPFVGAVSMFFIRRPTLDINWTGMTNLLDIPGLSSLSDTMIMDSIAAFLVLPNRLLVPLVPDLQDVAQLRSPLPRGIIRIHLLAARGLSSKDKYVKGLIEGKSDPYALVRLGTQTFCSRVIDEELNPQWGETYEVMVHEVPGQEIEVEVFDKDPDKDDFLGRMKLDVGKVLQASVLDDWFPLQGGQGQVHLRLEWLSLLSDAEKLEQVLQWNWGVSSRPDPPSAAILVVYLDRAQDLPLKKGNKEPNPMVQLSIQDVTQESKAVYSTNCPVWEEAFRFFLQDPQSQELDVQVKDDSRALTLGALTLPLARLLTAPELILDQWFQLSSSGPNSRLYMKLVMRILYLDSSEICFPTVPGCPGAWDVDSENPQRGSSVDAPPRPCHTTPDSQFGTEHVLRIHVLEAQDLIAKDRFLGGLVKGKSDPYVKLKLAGRSFRSHVVREDLNPRWNEVFEVIVTSVPGQELEVEVFDKDLDKDDFLGRCKVRLTTVLNSGFLDEWLTLEDVPSGRLHLRLERLTPRPTAAELEEVLQVNSLIQTQKSAELAAALLSIYMERAEDLPLRKGTKHLSPYATLTVGDSSHKTKTISQTSAPVWDESASFLIRKPHTESLELQVRGEGTGVLGSLSLPLSELLVADQLCLDRWFTLSSGQGQVLLRAQLGILVSQHSGVEAHSHSYSHSSSSLSEEPELSGGPPHITSSAPELRQRLTHVDSPLEAPAGPLGQVKLTLWYYSEERKLVSIVHGCRSLRQNGRDPPDPYVSLLLLPDKNRGTKRRTSQKKRTLSPEFNERFEWELPLDEAQRRKLDVSVKSNSSFMSRERELLGKVQLDLAETDLSQGVARWYDLMDNKDKGSS

SEQ ID NO: 185734 - protein, 1058 aa, Artificial Sequence
  derived and/or modified sequence
MERSPGEGPSPSPMDQPSAPSDPTDQPPAAHAKPDPGSGGQPAGPGAAGEALAVLTSFGRRLLVLIPVYLAGAVGLSVGFVLFGLALYLGWRRVRDEKERSLRAARQLLDDEKLLAETVAPAVRGSNPHLQTFTFTRVELGEKPLRIIGVKVHPGQRKEQILLDLNISYVGDVQIDVEVKKYFCKAGVKGMQLHGVLRVILEPLIGDLPFVGAVSMFFIRRPTLDINWTGMTNLLDIPGLSSLSDTMIMDSIAAFLVLPNRLLVPLVPDLQDVAQLRSPLPRGIIRIHLLAARGLSSKDKYVKGLIEGKSDPYALVRLGTQTFCSRVIDEELNPQWGETYEVMVHEVPGQEIEVEVFDKDPDKDDFLGRMKLDVGKVLQASVLDDWFPLQGGQGQVHLRLEWLSLLSDAEKLEQVLQWNWGVSSRPDPPSAAILVVYLDRAQDLPLKKGNKEPNPMVQLSIQDVTQESKAVYSTNCPVWEEAFRFFLQDPQSQELDVQVKDDSRALTLGALTLPLARLLTAPELILDQWFQLSSSGPNSRLYMKLVMRILYLDSSEICFPTVPGCPGAWDVDSENPQRGSSVDAPPRPCHTTPDSQFGTEHVLRIHVLEAQDLIAKDRFLGGLVKGKSDPYVKLKLAGRSFRSHVVREDLNPRWNEVFEVIVTSVPGQELEVEVFDKDLDKDDFLGRCKVRLTTVLNSGFLDEWLTLEDVPSGRLHLRLERLTPRPTAAELEEVLQVNSLIQTQKSAELAAALLSIYMERAEDLPLRKGTKHLSPYATLTVGDSSHKTKTISQTSAPVWDESASFLIRKPHTESLELQVRGEGTGVLGSLSLPLSELLVADQLCLDRWFTLSSGQGQVLLRAQLGILVSQHSGVEAHSHSYSHSSSSLSEEPELSGGPPHITSSAPELRQRLTHVDSPLEAPAGPLGQVKLTLWYYSEERKLVSIVHGCRSLRQNGRDPPDPYVSLLLLPDKNRGTKRRTSQKKRTLSPEFNERFEWELPLDEAQRRKLDVSVKSNSSFMSRERELLGKVQLDLAETDLSQGVARWYDLMDNKDKGSS

SEQ ID NO: 185735 - DNA, 3315 bp, Artificial Sequence
  derived and/or modified sequence
atggagagaagccccggcgagggccccagccccagccccatggaccagcccagcgcccccagcgaccccaccgaccagccccccgccgcccacgccaagcccgaccccggcagcggcggccagcccgccggccccggcgccgccggcgaggccctggccgtgctgaccagcttcggcagaagactgctggtgctgatccccgtgtacctggccggcgccgtgggcctgagcgtgggcttcgtgctgttcggcctggccctgtacctgggctggagaagagtgagagacgagaaggagagaagcctgagagccgccagacagctgctggacgacgaggagcagctgaccgccaagaccctgtacatgagccacagagagctgcccgcctgggtgagcttccccgacgtggagaaggccgagtggctgaacaagatcgtggcccaggtgtggcccttcctgggccagtacatggagaagctgctggccgagaccgtggcccccgccgtgagaggcagcaacccccacctgcagaccttcaccttcaccagagtggagctgggcgagaagcccctgagaatcatcggcgtgaaggtgcaccccggccagagaaaggagcagatcctgctggacctgaacatcagctacgtgggcgacgtgcagatcgacgtggaggtgaagaagtacttctgcaaggccggcgtgaagggcatgcagctgcacggcgtgctgagagtgatcctggagcccctgatcggcgacctgcccttcgtgggcgccgtgagcatgttcttcatcagaagacccaccctggacatcaactggaccggcatgaccaacctgctggacatccccggcctgagcagcctgagcgacaccatgatcatggacagcatcgccgccttcctggtgctgcccaacagactgctggtgcccctggtgcccgacctgcaggacgtggcccagctgagaagccccctgcccagaggcatcatcagaatccacctgctggccgccagaggcctgagcagcaaggacaagtacgtgaagggcctgatcgagggcaagagcgacccctacgccctggtgagactgggcacccagaccttctgcagcagagtgatcgacgaggagctgaacccccagtggggcgagacctacgaggtgatggtgcacgaggtgcccggccaggagatcgaggtggaggtgttcgacaaggaccccgacaaggacgacttcctgggcagaatgaagctggacgtgggcaaggtgctgcaggccagcgtgctggacgactggttccccctgcagggcggccagggccaggtgcacctgagactggagtggctgagcctgctgagcgacgccgagaagctggagcaggtgctgcagtggaactggggcgtgagcagcagacccgacccccccagcgccgccatcctggtggtgtacctggacagagcccaggacctgcccctgaagaagggcaacaaggagcccaaccccatggtgcagctgagcatccaggacgtgacccaggagagcaaggccgtgtacagcaccaactgccccgtgtgggaggaggccttcagattcttcctgcaggacccccagagccaggagctggacgtgcaggtgaaggacgacagcagagccctgaccctgggcgccctgaccctgcccctggccagactgctgaccgcccccgagctgatcctggaccagtggttccagctgagcagcagcggccccaacagcagactgtacatgaagctggtgatgagaatcctgtacctggacagcagcgagatctgcttccccaccgtgcccggctgccccggcgcctgggacgtggacagcgagaacccccagagaggcagcagcgtggacgccccccccagaccctgccacaccacccccgacagccagttcggcaccgagcacgtgctgagaatccacgtgctggaggcccaggacctgatcgccaaggacagattcctgggcggcctggtgaagggcaagagcgacccctacgtgaagctgaagctggccggcagaagcttcagaagccacgtggtgagagaggacctgaaccccagatggaacgaggtgttcgaggtgatcgtgaccagcgtgcccggccaggagctggaggtggaggtgttcgacaaggacctggacaaggacgacttcctgggcagatgcaaggtgagactgaccaccgtgctgaacagcggcttcctggacgagtggctgaccctggaggacgtgcccagcggcagactgcacctgagactggagagactgacccccagacccaccgccgccgagctggaggaggtgctgcaggtgaacagcctgatccagacccagaagagcgccgagctggccgccgccctgctgagcatctacatggagagagccgaggacctgcccctgagaaagggcaccaagcacctgagcccctacgccaccctgaccgtgggcgacagcagccacaagaccaagaccatcagccagaccagcgcccccgtgtgggacgagagcgccagcttcctgatcagaaagccccacaccgagagcctggagctgcaggtgagaggcgagggcaccggcgtgctgggcagcctgagcctgcccctgagcgagctgctggtggccgaccagctgtgcctggacagatggttcaccctgagcagcggccagggccaggtgctgctgagagcccagctgggcatcctggtgagccagcacagcggcgtggaggcccacagccacagctacagccacagcagcagcagcctgagcgaggagcccgagctgagcggcggccccccccacatcaccagcagcgcccccgagctgagacagagactgacccacgtggacagccccctggaggcccccgccggccccctgggccaggtgaagctgaccctgtggtactacagcgaggagagaaagctggtgagcatcgtgcacggctgcagaagcctgagacagaacggcagagacccccccgacccctacgtgagcctgctgctgctgcccgacaagaacagaggcaccaagagaagaaccagccagaagaagagaaccctgagccccgagttcaacgagagattcgagtgggagctgcccctggacgaggcccagagaagaaagctggacgtgagcgtgaagagcaacagcagcttcatgagcagagagagagagctgctgggcaaggtgcagctggacctggccgagaccgacctgagccagggcgtggccagatggtacgacctgatggacaacaaggacaagggcagcagctag

SEQ ID NO: 185736 - DNA, 3177 bp, Artificial Sequence
  derived and/or modified sequence
atggagagaagccccggcgagggccccagccccagccccatggaccagcccagcgcccccagcgaccccaccgaccagccccccgccgcccacgccaagcccgaccccggcagcggcggccagcccgccggccccggcgccgccggcgaggccctggccgtgctgaccagcttcggcagaagactgctggtgctgatccccgtgtacctggccggcgccgtgggcctgagcgtgggcttcgtgctgttcggcctggccctgtacctgggctggagaagagtgagagacgagaaggagagaagcctgagagccgccagacagctgctggacgacgagaagctgctggccgagaccgtggcccccgccgtgagaggcagcaacccccacctgcagaccttcaccttcaccagagtggagctgggcgagaagcccctgagaatcatcggcgtgaaggtgcaccccggccagagaaaggagcagatcctgctggacctgaacatcagctacgtgggcgacgtgcagatcgacgtggaggtgaagaagtacttctgcaaggccggcgtgaagggcatgcagctgcacggcgtgctgagagtgatcctggagcccctgatcggcgacctgcccttcgtgggcgccgtgagcatgttcttcatcagaagacccaccctggacatcaactggaccggcatgaccaacctgctggacatccccggcctgagcagcctgagcgacaccatgatcatggacagcatcgccgccttcctggtgctgcccaacagactgctggtgcccctggtgcccgacctgcaggacgtggcccagctgagaagccccctgcccagaggcatcatcagaatccacctgctggccgccagaggcctgagcagcaaggacaagtacgtgaagggcctgatcgagggcaagagcgacccctacgccctggtgagactgggcacccagaccttctgcagcagagtgatcgacgaggagctgaacccccagtggggcgagacctacgaggtgatggtgcacgaggtgcccggccaggagatcgaggtggaggtgttcgacaaggaccccgacaaggacgacttcctgggcagaatgaagctggacgtgggcaaggtgctgcaggccagcgtgctggacgactggttccccctgcagggcggccagggccaggtgcacctgagactggagtggctgagcctgctgagcgacgccgagaagctggagcaggtgctgcagtggaactggggcgtgagcagcagacccgacccccccagcgccgccatcctggtggtgtacctggacagagcccaggacctgcccctgaagaagggcaacaaggagcccaaccccatggtgcagctgagcatccaggacgtgacccaggagagcaaggccgtgtacagcaccaactgccccgtgtgggaggaggccttcagattcttcctgcaggacccccagagccaggagctggacgtgcaggtgaaggacgacagcagagccctgaccctgggcgccctgaccctgcccctggccagactgctgaccgcccccgagctgatcctggaccagtggttccagctgagcagcagcggccccaacagcagactgtacatgaagctggtgatgagaatcctgtacctggacagcagcgagatctgcttccccaccgtgcccggctgccccggcgcctgggacgtggacagcgagaacccccagagaggcagcagcgtggacgccccccccagaccctgccacaccacccccgacagccagttcggcaccgagcacgtgctgagaatccacgtgctggaggcccaggacctgatcgccaaggacagattcctgggcggcctggtgaagggcaagagcgacccctacgtgaagctgaagctggccggcagaagcttcagaagccacgtggtgagagaggacctgaaccccagatggaacgaggtgttcgaggtgatcgtgaccagcgtgcccggccaggagctggaggtggaggtgttcgacaaggacctggacaaggacgacttcctgggcagatgcaaggtgagactgaccaccgtgctgaacagcggcttcctggacgagtggctgaccctggaggacgtgcccagcggcagactgcacctgagactggagagactgacccccagacccaccgccgccgagctggaggaggtgctgcaggtgaacagcctgatccagacccagaagagcgccgagctggccgccgccctgctgagcatctacatggagagagccgaggacctgcccctgagaaagggcaccaagcacctgagcccctacgccaccctgaccgtgggcgacagcagccacaagaccaagaccatcagccagaccagcgcccccgtgtgggacgagagcgccagcttcctgatcagaaagccccacaccgagagcctggagctgcaggtgagaggcgagggcaccggcgtgctgggcagcctgagcctgcccctgagcgagctgctggtggccgaccagctgtgcctggacagatggttcaccctgagcagcggccagggccaggtgctgctgagagcccagctgggcatcctggtgagccagcacagcggcgtggaggcccacagccacagctacagccacagcagcagcagcctgagcgaggagcccgagctgagcggcggccccccccacatcaccagcagcgcccccgagctgagacagagactgacccacgtggacagccccctggaggcccccgccggccccctgggccaggtgaagctgaccctgtggtactacagcgaggagagaaagctggtgagcatcgtgcacggctgcagaagcctgagacagaacggcagagacccccccgacccctacgtgagcctgctgctgctgcccgacaagaacagaggcaccaagagaagaaccagccagaagaagagaaccctgagccccgagttcaacgagagattcgagtgggagctgcccctggacgaggcccagagaagaaagctggacgtgagcgtgaagagcaacagcagcttcatgagcagagagagagagctgctgggcaaggtgcagctggacctggccgagaccgacctgagccagggcgtggccagatggtacgacctgatggacaacaaggacaagggcagcagctag

SEQ ID NO: 185737 - DNA, 4388 bp, Artificial Sequence
  derived and/or modified sequence
atcttggccttcgggcccaatcagggaggccctacctatccgaaacccggtccgttccccgcggaagaggggtggagtttcaaccttttaactccaccttggtctgtgcagcgcggaccaacccaaatcgccagaaaggaggggcgtggcttgaagtcccctcctccatcccggggatcacgttttgcctgggggagctgatcgcaagactaggcaacctccagccagtccctgggtcgggcggatcctcccagaggtggcacaatggagcgatctccaggagagggccccagccccagccccatggaccagccctctgctccctccgaccccactgaccagccccccgctgctcacgcaaagccagacccaggttctgggggccaacctgctggccctggcgcggcgggtgaggccctggcggtgctgacttcattcgggaggcggttgctggtgctgatacctgtgtatttggccggggcagtgggactcagcgtgggtttcgtgctcttcggcctcgccctctacctgggctggcgccgggtccgcgacgagaaagaacggagccttcgagcagcgaggcagctactggacgacgaggagcagctcactgcgaaaactctctatatgagtcatcgagagctacctgcctgggtcagcttcccagacgtggaaaaggctgaatggctcaataagattgtggcccaggtctggcccttcctgggccagtatatggagaagcttctggctgaaactgtggctccggctgttaggggatctaacccccatctgcaaacatttacatttacacgagtggaactgggtgaaaagccattgcgcatcattggagtcaaggttcacccaggtcagagaaaagagcagatcctgctggacttgaacatcagctatgtaggtgatgtgcagattgatgtggaagtgaagaaatatttttgcaaagcaggagtcaagggcatgcagctacatggcgttttgcgggtgatactggagccactcattggggaccttcccttcgtgggggctgtgtcaatgttcttcatccgacgcccgaccctagacatcaactggacagggatgaccaacctgctggatatcccaggacttagctcactctctgacaccatgatcatggactccattgctgccttcctcgtgttgcccaaccgattactggtgccccttgtgcctgaccttcaagatgtggctcagttgcgttcccctctgcccaggggcattattcgaattcacctgctggctgctcgagggctgagttccaaggacaaatatgtgaagggcctgattgagggcaagtcagacccatatgcacttgtgcgtttgggtacccagacattctgcagtcgtgtcattgatgaagaactcaacccacagtggggagagacttatgaggtgatggtacacgaggtcccagggcaggagattgaagtggaggtgttcgacaaggatccagataaagatgactttctgggcagaatgaagctggatgtagggaaggtgttacaggctagcgttctggatgattggttccctctacaaggtgggcaaggccaagttcacttgaggctagaatggctgtcacttttgtcagatgcagagaaactggagcaggttctacagtggaattggggagtctcctctcgaccagatcccccgtcagctgccatcttagttgtctacctggatcgggcccaggatcttcctctgaagaaggggaacaaggaacccaaccctatggtacaactgtcaattcaggatgtgactcaggagagcaaggctgtctacagtaccaactgcccagtgtgggaggaagcgttccggttcttcctacaagaccctcaaagccaggagctcgatgtgcaagtgaaggatgattccagggccctgactttaggagcactgacgctgcctctggcccgcctgctgactgccccagaactcatcctggaccagtggttccagctcagcagctctggtccaaactccagactctatatgaaactagtcatgaggatcctgtacttggattcatcagaaatatgcttccccacggtgcctggttgtcctggtgcttgggacgtggacagtgagaatccccagagaggcagcagtgtggatgccccacctcgaccctgtcacacgactcctgatagccagtttgggactgagcatgtgcttcggatccatgtattagaggcccaggacctgattgccaaagaccgtttcttggggggactggtgaagggcaagtcagacccctatgtcaaactaaagttggcaggacgaagcttccggagccatgttgttcgggaagatctcaatccccgctggaatgaggtttttgaggtgatcgtcacatcagttccaggccaagagctagaggttgaagtctttgacaaggacttggacaaggatgattttctgggcaggtgtaaagtgcgtctcaccacagtcttaaacagtggcttccttgatgagtggctgaccctggaggatgtcccatctggccgcctgcacttgcgcctggagcgtctcaccccccgtcccactgctgctgagttagaggaggtgctgcaggtgaatagtttgatccagactcagaagagtgcggagctggctgcggccctgctatccatctatatggagcgggcagaggacctcccgctgcgaaaaggcaccaagcacctcagcccttatgctactctcactgtgggagatagttctcataaaaccaagactatttcgcaaacttcagcccctgtctgggatgagagtgcctcctttctcatcaggaaaccacacactgagagcctagagttgcaggttcggggtgagggcactggcgtgctgggctcattatccctgcccctctcagagctcctcgtggctgaccagctctgcttggaccgctggtttacactcagcagtggtcaggggcaggtgctactgagagcacagctagggatcctggtgtcccagcactcgggagtggaagctcatagccacagctacagccacagctcctcatcgctgagtgaagaaccagagctctcggggggaccccctcacatcacctcctcagccccagagctccggcagcgcctaacacatgttgacagtccccttgaggctccagccgggcctctgggccaggtgaaactgactctgtggtactacagtgaagaacgaaagctggtcagcattgttcatggttgccggtcccttcgacagaatggacgtgatcctcctgatccctatgtgtcactgttgctactgccagacaagaaccgaggcaccaagaggaggacctcacagaagaagaggaccctgagtcctgaatttaatgaacggtttgagtgggaactccccctggatgaggcccagagacgaaagctggatgtctctgtcaagtctaattcctccttcatgtcaagagagcgtgagctgctggggaaggtgcagctggacctagctgagacagacctttcccagggtgtagcccggtggtatgacctgatggacaacaaggacaagggcagctcctaggagctggcgagtcccagcctgactgctctgtcttcctgccttcgtctcgctccatcaccgcctcaatgtgatgagcctaaagctagggtccaagggcagagcctgtgcccttcagccctttcacctaacaggcccatattcgggcctttgcctgaccaaagagaagaaccgtatgttccctttactgcacggcctttatccttctgggcccctggggcggggacctgagctggctgtttcctgctttgcctgcacattgttctcccttcctcccaactcctcagggccttctgtatctgtgcctggccagtggcagcactagcagtggtattagcttatgccaaatacagctttggaaggatctttttttctttaactagatggtcaccttcttccctaccacacatgggtgggaaggtggacaggctaacctctccagctgtgagcctcttagactactgcatgtagcaaatgttcagcagctcaggcccccatgtccagttctgtccccactgtcctcaaccctgtcctgaaaattctactgctttgatggctggggccagtctcttgtcactttggaaactgaggacgcgtggattctactcaagcctccaagtagtggcatatcagtcttggagctcctagctggtgatacggagagggctttggaggacttgggacagcagggccaatttttttgcccaagtgcctaggctgctaactcactgactagaacttaatctggtactttacagttttgcaccaactctgccaagccactggatcttacattaaacatcatactcaaa

SEQ ID NO: 185738 - DNA, 4047 bp, Artificial Sequence
  derived and/or modified sequence
aagactaggcaacctccagccagtccctgggtcgggcggatcctcccagaggtggcacaatggagcgatctccaggagagggccccagccccagccccatggaccagccctctgctccctccgaccccactgaccagccccccgctgctcacgcaaagccagacccaggttctgggggccaacctgctggccctggcgcggcgggtgaggccctggcggtgctgacttcattcgggaggcggttgctggtgctgatacctgtgtatttggccggggcagtgggactcagcgtgggtttcgtgctcttcggcctcgccctctacctgggctggcgccgggtccgcgacgagaaagaacggagccttcgagcagcgaggcagctactggacgacgagaagcttctggctgaaactgtggctccggctgttaggggatctaacccccatctgcaaacatttacatttacacgagtggaactgggtgaaaagccattgcgcatcattggagtcaaggttcacccaggtcagagaaaagagcagatcctgctggacttgaacatcagctatgtaggtgatgtgcagattgatgtggaagtgaagaaatatttttgcaaagcaggagtcaagggcatgcagctacatggcgttttgcgggtgatactggagccactcattggggaccttcccttcgtgggggctgtgtcaatgttcttcatccgacgcccgaccctagacatcaactggacagggatgaccaacctgctggatatcccaggacttagctcactctctgacaccatgatcatggactccattgctgccttcctcgtgttgcccaaccgattactggtgccccttgtgcctgaccttcaagatgtggctcagttgcgttcccctctgcccaggggcattattcgaattcacctgctggctgctcgagggctgagttccaaggacaaatatgtgaagggcctgattgagggcaagtcagacccatatgcacttgtgcgtttgggtacccagacattctgcagtcgtgtcattgatgaagaactcaacccacagtggggagagacttatgaggtgatggtacacgaggtcccagggcaggagattgaagtggaggtgttcgacaaggatccagataaagatgactttctgggcagaatgaagctggatgtagggaaggtgttacaggctagcgttctggatgattggttccctctacaaggtgggcaaggccaagttcacttgaggctagaatggctgtcacttttgtcagatgcagagaaactggagcaggttctacagtggaattggggagtctcctctcgaccagatcccccgtcagctgccatcttagttgtctacctggatcgggcccaggatcttcctctgaagaaggggaacaaggaacccaaccctatggtacaactgtcaattcaggatgtgactcaggagagcaaggctgtctacagtaccaactgcccagtgtgggaggaagcgttccggttcttcctacaagaccctcaaagccaggagctcgatgtgcaagtgaaggatgattccagggccctgactttaggagcactgacgctgcctctggcccgcctgctgactgccccagaactcatcctggaccagtggttccagctcagcagctctggtccaaactccagactctatatgaaactagtcatgaggatcctgtacttggattcatcagaaatatgcttccccacggtgcctggttgtcctggtgcttgggacgtggacagtgagaatccccagagaggcagcagtgtggatgccccacctcgaccctgtcacacgactcctgatagccagtttgggactgagcatgtgcttcggatccatgtattagaggcccaggacctgattgccaaagaccgtttcttggggggactggtgaagggcaagtcagacccctatgtcaaactaaagttggcaggacgaagcttccggagccatgttgttcgggaagatctcaatccccgctggaatgaggtttttgaggtgatcgtcacatcagttccaggccaagagctagaggttgaagtctttgacaaggacttggacaaggatgattttctgggcaggtgtaaagtgcgtctcaccacagtcttaaacagtggcttccttgatgagtggctgaccctggaggatgtcccatctggccgcctgcacttgcgcctggagcgtctcaccccccgtcccactgctgctgagttagaggaggtgctgcaggtgaatagtttgatccagactcagaagagtgcggagctggctgcggccctgctatccatctatatggagcgggcagaggacctcccgctgcgaaaaggcaccaagcacctcagcccttatgctactctcactgtgggagatagttctcataaaaccaagactatttcgcaaacttcagcccctgtctgggatgagagtgcctcctttctcatcaggaaaccacacactgagagcctagagttgcaggttcggggtgagggcactggcgtgctgggctcattatccctgcccctctcagagctcctcgtggctgaccagctctgcttggaccgctggtttacactcagcagtggtcaggggcaggtgctactgagagcacagctagggatcctggtgtcccagcactcgggagtggaagctcatagccacagctacagccacagctcctcatcgctgagtgaagaaccagagctctcggggggaccccctcacatcacctcctcagccccagagctccggcagcgcctaacacatgttgacagtccccttgaggctccagccgggcctctgggccaggtgaaactgactctgtggtactacagtgaagaacgaaagctggtcagcattgttcatggttgccggtcccttcgacagaatggacgtgatcctcctgatccctatgtgtcactgttgctactgccagacaagaaccgaggcaccaagaggaggacctcacagaagaagaggaccctgagtcctgaatttaatgaacggtttgagtgggaactccccctggatgaggcccagagacgaaagctggatgtctctgtcaagtctaattcctccttcatgtcaagagagcgtgagctgctggggaaggtgcagctggacctagctgagacagacctttcccagggtgtagcccggtggtatgacctgatggacaacaaggacaagggcagctcctaggagctggcgagtcccagcctgactgctctgtcttcctgccttcgtctcgctccatcaccgcctcaatgtgatgagcctaaagctagggtccaagggcagagcctgtgcccttcagccctttcacctaacaggcccatattcgggcctttgcctgaccaaagagaagaaccgtatgttccctttactgcacggcctttatccttctgggcccctggggcggggacctgagctggctgtttcctgctttgcctgcacattgttctcccttcctcccaactcctcagggccttctgtatctgtgcctggccagtggcagcactagcagtggtattagcttatgccaaatacagctttggaaggatctttttttctttaactagatggtcaccttcttccctaccacacatgggtgggaaggtggacaggctaacctctccagctgtgagcctcttagactactgcatgtagcaaatgttcagcagctcaggcccccatgtccagttctgtccccactgtcctcaaccctgtcctgaaaattctactgctttgatggctggggccagtctcttgtcactttggaaactgaggacgcgtggattctactcaagcctccaagtagtggcatatcagtcttggagctcctagctggtgatacggagagggctttggaggacttgggacagcagggccaatttttttgcccaagtgcctaggctgctaactcactgactagaacttaatctggtactttacagttttgcaccaactctgccaagccactggatcttacattaaacatcatactcaaacc

SEQ ID NO: 185739 - DNA, 3315 bp, Artificial Sequence
  derived and/or modified sequence
atggagcgctctcccggagagggcccgtctccatcacccatggaccagccctccgcaccatccgaccccacggaccagccaccagctgcccacgcgaaaccagatcctgggagtggcgggcaacctgctggacccggcgcagcgggcgaggctctggcggtgctgacgtcatttggacggagactcctggtgctcattccagtataccttgccggcgccgtaggcctttccgtggggtttgtgctgtttggtttagccctgtatctcggctggaggcgggttagagatgaaaaggaacggtcactgagagccgcccgccagcttctggatgacgaggagcagctgaccgctaaaacactgtacatgtctcatcgggaactccctgcatgggtcagttttcccgacgtggagaaggcggagtggttaaataagattgtggctcaagtttggccctttcttgggcagtatatggaaaagttactggccgaaacggtggctccagctgtaagaggtagcaacccgcatcttcagacctttacgttcacaagggtagagctgggagagaaacctctccggatcattggcgtgaaggtgcaccctggtcagaggaaagagcagattcttctcgatctaaatatatcttatgtcggagatgtgcagattgatgtcgaagtcaaaaagtacttctgtaaggccggcgtgaagggtatgcagttgcacggcgtgctgagagtaatactcgaaccactgataggcgacctgcctttcgtaggcgccgttagtatgttcttcatccgcagacccacactggatatcaactggacaggcatgactaatcttctggacatcccaggcctgtcctcattgtccgatacaatgattatggattccatcgccgccttcttggttttaccaaaccgcctgttagtaccactggtgccagacctgcaagacgtggctcagctacgctcacctttaccccgcggcattataagaattcacctcctcgcagctcgaggattatcctcaaaagacaagtacgtgaagggacttatagaaggcaaatcagacccctatgccctggttagactgggaactcaaacgttttgctcccgtgttatcgatgaggaacttaaccctcagtggggtgaaacatacgaggttatggtacacgaggttccggggcaggaaatcgaggtagaagtgttcgataaagaccctgacaaagacgacttcctggggaggatgaagctggacgtgggaaaggtgctccaggccagcgttcttgacgactggttcccccttcaaggggggcagggacaagtacacctgcggctggaatggttatctcttctctctgatgcggaaaagttggaacaggttctccagtggaattggggggtgtcctcacgcccagacccccccagtgccgcaatccttgtggtgtatcttgatagagctcaagatctgccactgaaaaaaggcaacaaggaacctaaccccatggtccagctgtccattcaggacgtaactcaggaatcaaaagccgtctactccaccaactgtccagtttgggaagaggcttttcggttcttcctccaggacccacagtctcaggaactcgacgtgcaggtgaaggatgactcccgggctctgacgctgggcgcactgaccctccctcttgcgcgacttctcactgccccggaattgattctggatcaatggttccagctcagcagctccggtccgaactctcggctttacatgaaattggtgatgcggatcctgtacttagatagttccgagatctgcttcccgactgtgccgggatgccctggtgcttgggatgtggactcggaaaatccccagagaggctcatccgtcgacgcgccccctcggccctgtcacaccactcctgactcccagttcgggacagagcatgtcctccggattcatgtacttgaggcacaggatctcattgcaaaggaccgatttctgggtggcctggtgaagggtaagtctgatccatatgtcaagctgaaattggccggcaggagttttcgttcacacgtcgttcgggaggatctcaaccctcgctggaacgaagtgttcgaggtcatagtgacatccgttcctgggcaggagttggaagtggaggtgttcgataaagatctggacaaagatgattttctaggaaggtgcaaggtacgtctgactaccgtgctcaacagcggcttcctagacgaatggctgacgttggaggatgtgccatcgggcagactccatctgaggcttgagagacttacaccacggccaaccgccgccgagcttgaggaggtgctgcaggttaattctcttatccagacacagaagtccgccgaactggctgccgctcttctatcaatctatatggagagggccgaggacctgcctctgcgcaagggcactaaacacctgtcaccatacgcgactctcacagtgggcgactctagccacaaaaccaaaactatctctcagaccagcgctcccgtgtgggatgaatccgcttcctttttgattcgcaagccgcataccgaaagcctcgagctccaggttaggggggagggcaccggggtactcggctccctgagtctgcctctgtctgagctattggtagctgaccaactgtgtttagatcgatggtttacactctcgtcgggccagggccaggtgctcttacgggcacagttgggaatcctggtctctcagcactcaggtgtggaagctcattcccacagctattcccatagctcttcttctctgtccgaggagccagagttgtccggcggacccccacatattacgagctcagcaccagagctccgccaacggctgacacacgtcgacagcccactagaagctcctgccgggcccctgggccaagtcaaactaaccctctggtattacagtgaggagcgaaagctggtttccatcgtccacggatgccgctctctccgtcagaacgggcgagatccacccgatccgtacgtatcacttttgctcctcccagacaagaatcgagggactaaacggcgtacatctcagaagaagaggacgctgagcccagagttcaacgaacgctttgagtgggagctgccattggacgaagctcagcgaaggaagctggatgtgtccgtcaagtcaaactctagtttcatgtcacgcgagcgtgaacttttgggcaaggtccagctggacctggcagaaaccgatctgagccaaggagtggctcgttggtacgatcttatggacaacaaggacaaggggtctagttag

SEQ ID NO: 185740 - DNA, 3177 bp, Artificial Sequence
  derived and/or modified sequence
atggaacgctcaccaggggaggggccgtcccctagtccaatggatcaaccaagcgccccgtccgaccctacagaccaaccacctgccgcccacgctaaacctgacccgggcagcggaggccaacctgccggtcccggtgctgccggggaggcactggcagtgttaacttcattcggaaggaggcttctggtgctcattccagtttacctggcgggggcagttggtctgtctgtggggtttgtgctcttcggtctggccctttacctcggctggcggcgggtcagagatgagaaggaacggagtctccgggccgcacgtcagttactcgacgacgagaaacttctggcagagaccgtggcccctgccgtgcgcggctccaatccgcacctccagacattcacatttaccagagtggagctgggcgaaaaacccctgcgcatcatcggcgtgaaggtgcatccggggcagaggaaagaacagatcctcctggacctgaacatatcctatgtcggtgacgtacagattgacgttgaggtgaaaaagtacttctgtaaggccggggtgaagggcatgcagctgcacggcgtactgcgcgtgattctggagccccttatcggcgatttgccttttgtgggcgcagtaagtatgttttttattagacggcctacccttgacattaattggacaggcatgacaaacctgctggatattcccggactctcttccttaagtgacacgatgataatggactctattgcagcgttcctggtcctacccaatagactgctggtgccactggtgcctgacctgcaggacgtggcacaactgcgaagtccactgccacgcgggatcatacgcatccacttacttgccgccagaggactgtcctccaaggataagtatgttaaagggttaattgagggtaagtcagacccttacgctctggtgcgcctggggacacagacattctgcagtagagtgatcgacgaggagttgaaccctcagtggggcgaaacgtatgaagtgatggtccacgaagtcccggggcaggagatcgaggtagaggtatttgataaggatccagacaaggatgatttcttaggacgcatgaaactcgatgtcgggaaagtcctgcaggcttccgtgctcgacgactggtttcctcttcaaggaggccaggggcaggtccatctgaggctcgaatggttgtctctactttccgatgctgagaaactagagcaagtcttgcagtggaactggggagtgagtagcagaccagaccctccatccgccgccatcctggtggtgtatctagacagagcccaggacttgcctctgaagaaaggaaacaaggagcctaaccctatggtgcaattatccatccaggatgttacgcaggaaagcaaggccgtgtactcaacaaactgcccagtctgggaggaagcttttcgattttttcttcaggaccctcagagccaggagctggacgttcaagtgaaggatgattcccgcgcccttaccctcggcgctttgactctacccctggccaggctgttgaccgcccctgagctaattctggaccaatggtttcaacttagcagctctggaccaaattctaggctctatatgaaattagtgatgcgtatactgtatctagacagctccgagatttgcttccctactgtacccggctgccccggtgcctgggacgtggatagcgagaatcctcagaggggctcaagtgttgacgctccaccacggccatgtcatactaccccggactcccagttcggcacagagcatgtcttgaggattcatgtactcgaagctcaggacctcatcgcaaaggaccggtttctaggaggcttagtgaaaggaaagagcgacccatatgtcaaactgaaactggccggtagatccttcagatcccatgttgttcgcgaggatttgaatcctcggtggaatgaagtgtttgaggtaattgtgaccagcgtcccggggcaggagctggaggtcgaagtgtttgacaaagacctcgataaggacgacttccttggcagatgtaaagtgcgccttaccaccgtactcaattcagggtttctggacgagtggctgacactggaggacgtcccctctggaagactccatctgcggttggagcgtctgactcctcgcccgacagccgcggagcttgaggaagtgctacaggtgaactctcttattcagactcagaagtcggccgagctggccgcagctcttttgagcatctacatggagagagccgaggacctgcctctccgtaagggaactaaacacctgagtccatatgccacactgaccgtgggggactcatcccacaagactaagacaataagtcaaacatcggctcccgtgtgggatgaatccgcttcgttcctcattcggaagccccacacagagtcgttggaactccaggtgaggggcgagggtaccggagtgctagggtccctgagcctgcccctgtccgagctgttggtcgccgatcagctgtgcctggatcgatggttcaccctttctagtggacagggccaggttcttctaagagcacagttgggaattcttgtatcccagcactcaggcgtcgaagcacacagccacagctactcccacagcagttcaagcctttcagaagagcccgagcttagcggaggtcccccccacatcacctcctccgctccggaactacgccagagactgactcatgtcgattcgccacttgaagctcctgctggaccactggggcaggtgaagctgactctgtggtactatagcgaggaaaggaaactggtctcgatagtgcacggctgccgctcacttcggcagaacgggagggacccccctgatccttatgtgtccctcttacttctgccagataagaatcgaggaacaaagcggaggacgtcccagaaaaagcgaactctctcacctgaattcaacgagcgatttgaatgggagcttcctctggatgaagctcagcgccggaaactggacgtttcagtcaaatcgaacagtagctttatgtcgcgagaaagggaactcctaggaaaagtgcagctggacctggccgagaccgacctctctcagggcgtagctaggtggtacgacttaatggacaataaagacaagggatcgtcatag

SEQ ID NO: 185741 - DNA, 3315 bp, Artificial Sequence
  derived and/or modified sequence
atggagaggagccctggagagggccccagccccagccccatggaccagcccagcgcccccagcgaccccacagaccagcccccagctgcccacgccaagccagaccccggcagcggcggccagcctgctggccctggagctgctggggaggccctggccgtgctgaccagctttggccggcggctgctggtgctgatccctgtgtacctggccggggctgtgggcctgtctgtgggctttgtgctgtttggcctggccctgtacctgggctggaggagagtgagagatgagaaggagaggagcctgcgggccgcccggcagctgctggatgatgaggagcagctgacagccaagaccctgtacatgagccaccgggagctgcctgcctgggtgtccttcccagatgtggagaaggccgagtggctgaacaagatcgtggcccaggtgtggcccttcctgggccagtacatggagaagctgctggccgagaccgtggccccagctgtgcggggcagcaacccccacctgcagaccttcaccttcaccagggtggagctgggggagaagcccctgcgcatcatcggcgtgaaggtgcaccctggccagaggaaggagcagatcctgctggacctgaacatctcctatgtgggagatgtgcagattgatgtggaggtgaagaagtacttctgcaaggccggcgtgaagggcatgcagctgcacggcgtgctgcgggtcatcctggagcccctgattggagacctgccctttgtgggcgctgtgtccatgttcttcatccggcggcccaccctggacatcaactggacaggcatgaccaacctgctggacatccctggcctgagcagcctgagtgacaccatgatcatggacagcattgctgccttcctggtgctgcccaaccggctgctggtgcccctggtgcctgacctgcaggatgtggcccagctgcggagccccctgccccggggcatcatccgcatccacctgctggccgcccggggcctgagcagcaaggacaagtatgtgaagggcctcatcgagggcaagagtgacccctatgccctggtgcggctgggcacccagaccttctgcagccgggtgattgatgaggagctgaacccccagtggggcgagacctatgaggtgatggtgcatgaggtgcccggccaggagattgaggtggaggtgtttgacaaggaccctgacaaggatgacttcctgggccgcatgaagctggatgtgggcaaggtgctgcaggcctctgtgctggatgactggttccccctgcagggcggccagggccaggtgcacctgcggctggagtggctgagcctgctgagtgatgctgagaagctggagcaggtgctgcagtggaactggggcgtgagcagcaggccagacccccccagcgctgccatcctggtggtgtacctggaccgggcccaggacctgcccctgaagaagggcaacaaggagcccaaccccatggtgcagctgagcatccaggatgtgacccaggagagcaaggctgtgtacagcaccaactgccctgtgtgggaggaggccttccgcttcttcctgcaggacccccagagccaggagctggatgtgcaggtgaaggatgacagccgggccctgaccctgggcgccctgaccctgcccctggcccggctgctgacagcccctgagctgatcctggaccagtggttccagctgagcagcagcggccccaacagccggctgtacatgaagctggtgatgaggatcctgtacctggacagcagcgagatctgcttccccaccgtgcccggctgccctggggcctgggatgtggacagcgagaacccccagaggggcagctctgtggatgccccaccccggccctgccacaccaccccagacagccagtttggaacagaacatgtgctgcgcatccacgtgctggaggcccaggacctgattgccaaggaccgcttcctgggcggcctggtgaagggcaagagtgacccctacgtgaagctgaagctggccggccgctccttccgcagccacgtggtgcgggaggacctgaacccccgctggaatgaggtgtttgaggtgattgtgacctctgtgcccggccaggagctggaggtggaggtgtttgacaaggacctggacaaggatgacttcctgggccgctgcaaggtgcggctgaccaccgtgctgaacagcggcttcctggatgagtggctgaccctggaggatgtgcccagcggccgcctgcacctgcggctggagcggctgaccccccggcccacagctgctgagctggaggaggtgctgcaggtgaacagcctcatccagacccagaagtctgctgagctggccgccgccctgctgagcatctacatggagagagctgaggacctgcccctgaggaagggcaccaagcacctgagcccctatgccaccctgactgtgggggacagcagccacaagaccaagaccatcagccagaccagcgcccctgtgtgggatgagagcgccagcttcctgatcaggaagccccacacagagagcctggagctgcaggtgcggggggagggcaccggggtgctgggcagcctgagcctgcccctgtctgagctgctggtggccgaccagctgtgcctggaccgctggttcaccctgagcagcggccagggccaggtgctgctgcgggcccagctgggcatcctggtgtcccagcacagcggcgtggaggcccacagccacagctacagccacagcagcagcagcctgtctgaggagcctgagctgagcggcggccccccccacatcaccagcagcgcccctgagctgcggcagaggctgacccacgtggacagccccctggaggccccagctggccccctgggccaggtgaagctgaccctgtggtactacagcgaggagaggaagctggtgtccatcgtgcacggctgccgcagcctgcggcagaatggccgggaccccccagacccctacgtgtccctgctgctgctgcctgacaagaacagaggcaccaagaggaggaccagccagaagaagaggaccctgagccctgagttcaatgaaagatttgagtgggagctgcccctggatgaggcccagaggaggaagctggatgtgtctgtgaagagcaacagcagcttcatgagccgggagcgggagctgctgggcaaggtgcagctggacctggccgagacagacctgagccagggcgtggcccgctggtatgacctgatggacaacaaggacaagggcagcagctag

SEQ ID NO: 185742 - DNA, 3177 bp, Artificial Sequence
  derived and/or modified sequence
atggagaggagccctggagagggccccagccccagccccatggaccagcccagcgcccccagcgaccccacagaccagcccccagctgcccacgccaagccagaccccggcagcggcggccagcctgctggccctggagctgctggggaggccctggccgtgctgaccagctttggccggcggctgctggtgctgatccctgtgtacctggccggggctgtgggcctgtctgtgggctttgtgctgtttggcctggccctgtacctgggctggaggagagtgagagatgagaaggagaggagcctgcgggccgcccggcagctgctggatgatgagaagctgctggccgagaccgtggccccagctgtgcggggcagcaacccccacctgcagaccttcaccttcaccagggtggagctgggggagaagcccctgcgcatcatcggcgtgaaggtgcaccctggccagaggaaggagcagatcctgctggacctgaacatctcctatgtgggagatgtgcagattgatgtggaggtgaagaagtacttctgcaaggccggcgtgaagggcatgcagctgcacggcgtgctgcgggtcatcctggagcccctgattggagacctgccctttgtgggcgctgtgtccatgttcttcatccggcggcccaccctggacatcaactggacaggcatgaccaacctgctggacatccctggcctgagcagcctgagtgacaccatgatcatggacagcattgctgccttcctggtgctgcccaaccggctgctggtgcccctggtgcctgacctgcaggatgtggcccagctgcggagccccctgccccggggcatcatccgcatccacctgctggccgcccggggcctgagcagcaaggacaagtatgtgaagggcctcatcgagggcaagagtgacccctatgccctggtgcggctgggcacccagaccttctgcagccgggtgattgatgaggagctgaacccccagtggggcgagacctatgaggtgatggtgcatgaggtgcccggccaggagattgaggtggaggtgtttgacaaggaccctgacaaggatgacttcctgggccgcatgaagctggatgtgggcaaggtgctgcaggcctctgtgctggatgactggttccccctgcagggcggccagggccaggtgcacctgcggctggagtggctgagcctgctgagtgatgctgagaagctggagcaggtgctgcagtggaactggggcgtgagcagcaggccagacccccccagcgctgccatcctggtggtgtacctggaccgggcccaggacctgcccctgaagaagggcaacaaggagcccaaccccatggtgcagctgagcatccaggatgtgacccaggagagcaaggctgtgtacagcaccaactgccctgtgtgggaggaggccttccgcttcttcctgcaggacccccagagccaggagctggatgtgcaggtgaaggatgacagccgggccctgaccctgggcgccctgaccctgcccctggcccggctgctgacagcccctgagctgatcctggaccagtggttccagctgagcagcagcggccccaacagccggctgtacatgaagctggtgatgaggatcctgtacctggacagcagcgagatctgcttccccaccgtgcccggctgccctggggcctgggatgtggacagcgagaacccccagaggggcagctctgtggatgccccaccccggccctgccacaccaccccagacagccagtttggaacagaacatgtgctgcgcatccacgtgctggaggcccaggacctgattgccaaggaccgcttcctgggcggcctggtgaagggcaagagtgacccctacgtgaagctgaagctggccggccgctccttccgcagccacgtggtgcgggaggacctgaacccccgctggaatgaggtgtttgaggtgattgtgacctctgtgcccggccaggagctggaggtggaggtgtttgacaaggacctggacaaggatgacttcctgggccgctgcaaggtgcggctgaccaccgtgctgaacagcggcttcctggatgagtggctgaccctggaggatgtgcccagcggccgcctgcacctgcggctggagcggctgaccccccggcccacagctgctgagctggaggaggtgctgcaggtgaacagcctcatccagacccagaagtctgctgagctggccgccgccctgctgagcatctacatggagagagctgaggacctgcccctgaggaagggcaccaagcacctgagcccctatgccaccctgactgtgggggacagcagccacaagaccaagaccatcagccagaccagcgcccctgtgtgggatgagagcgccagcttcctgatcaggaagccccacacagagagcctggagctgcaggtgcggggggagggcaccggggtgctgggcagcctgagcctgcccctgtctgagctgctggtggccgaccagctgtgcctggaccgctggttcaccctgagcagcggccagggccaggtgctgctgcgggcccagctgggcatcctggtgtcccagcacagcggcgtggaggcccacagccacagctacagccacagcagcagcagcctgtctgaggagcctgagctgagcggcggccccccccacatcaccagcagcgcccctgagctgcggcagaggctgacccacgtggacagccccctggaggccccagctggccccctgggccaggtgaagctgaccctgtggtactacagcgaggagaggaagctggtgtccatcgtgcacggctgccgcagcctgcggcagaatggccgggaccccccagacccctacgtgtccctgctgctgctgcctgacaagaacagaggcaccaagaggaggaccagccagaagaagaggaccctgagccctgagttcaatgaaagatttgagtgggagctgcccctggatgaggcccagaggaggaagctggatgtgtctgtgaagagcaacagcagcttcatgagccgggagcgggagctgctgggcaaggtgcagctggacctggccgagacagacctgagccagggcgtggcccgctggtatgacctgatggacaacaaggacaagggcagcagctag

SEQ ID NO: 185743 - DNA, 3315 bp, Artificial Sequence
  derived and/or modified sequence
atggagcggagccccggcgagggccccagccccagccccatggaccagccctcagcaccaagcgaccctacggaccaaccgccagccgctcatgctaagcccgaccctggaagcggggggcagccagcaggaccaggagcagccggcgaggccctggcagtcctcacctcattcggaagacggcttctcgtgttaattcccgtgtacctggctggtgctgtggggctctcagtcggctttgtgctgtttggactggcgctgtacctgggatggagaagggtacgggatgaaaaagaaaggagcctgagagccgcaagacaattgcttgatgacgaggagcagttgacagcaaagactttgtacatgtctcacagagagctcccagcctgggtgtcctttcccgatgtggaaaaggccgaatggctcaacaagatagtggcacaggtctggccctttctgggacaatatatggaaaaattgctcgcagagacagtcgcgcctgccgtgagggggtcgaatcctcatcttcagaccttcactttcacaagggtggaattgggtgagaaaccactccgtatcattggcgtcaaggtccatcccggtcagcggaaggaacagatccttcttgatttaaacatcagttatgtcggagacgttcagatcgatgtggaggtgaagaaatatttttgcaaggcgggcgttaagggtatgcaactccatggcgtgctacgggtaatcttggagccactgatcggcgatctcccctttgtgggtgcagtgtctatgttcttcattcgcaggccaactctggatattaactggactggcatgaccaatctgctagacatcccggggctgtcttcactgtccgataccatgataatggattcaatagccgccttcttagtactgcctaaccgcctactcgtgccgctcgtgcccgatctgcaagatgtggctcagcttaggagccccttgcccagggggatcatacggatccatcttctggctgcgcgaggtctgtcctcaaaggacaagtatgtcaagggactgatcgaaggcaagtctgacccttatgctttagtgaggttggggactcaaactttctgcagccgtgttattgacgaggagctgaatcctcagtggggtgaaacgtatgaggtcatggtccatgaggttccaggccaggaaatcgaggtggaggtgtttgataaggaccccgacaaagacgattttctcggtagaatgaaactggatgtcggaaaagtgctccaggctagtgtgttggacgattggttcccattgcagggcggccagggacaggttcacctgagactcgaatggttgagtcttttgtccgatgcagagaagctggagcaagtactgcagtggaactggggcgtttccagtcgcccagacccgccctccgctgctattttggtggtctatctggatagagctcaggacttgccattaaagaagggcaataaagagcccaatcccatggtgcaattgagtattcaggatgtcacccaggagagtaaggcggtgtattctaccaattgccctgtctgggaggaagcttttaggttcttcttgcaggacccgcaaagccaggagctagatgtgcaggtgaaggatgatagtagggccctgactctgggtgctcttaccctgccgctggccaggcttctcaccgctcctgaactcatcttggaccaatggttccaactgagctcatcaggacctaattctaggctgtatatgaaactggttatgcgaattctgtacttagattctagcgagatctgcttccctaccgtccccggatgtcctggggcctgggatgtcgatagtgaaaacccacagcgcggctcctctgtggacgcacctccgcgaccatgccacacaaccccggacagccagttcgggacagaacatgtgcttaggattcacgtgctggaagcacaggatttgatcgccaaggatagattcctcggaggccttgtgaaaggcaaatcggacccatatgttaaactgaagttggccggccgttcattcagatcacacgtagtacgcgaagatttaaacccacgttggaacgaggtattcgaggtgatagttacctccgtcccagggcaggagttggaggtggaggtatttgacaaggatcttgacaaagacgattttttggggcgttgtaaagtgaggctgaccactgtcttaaactctggcttcctggatgaatggcttaccctcgaagatgtgccctccggtcgcctgcatctcagactggagaggctgaccccccggccaaccgccgctgaacttgaggaggtgttgcaggtcaactccttaatccaaacgcagaaatctgccgagctggctgcggcattgctaagcatatatatggaacgagctgaggatctgcccctgagaaaggggacaaagcacttgtccccatacgctacactgacagtgggcgacagcagccacaaaacaaaaacgatttcacaaacaagcgctcccgtttgggacgaatcagcgagctttctgattcgtaagccccacacagagtccctggagttgcaggtgaggggcgaggggacaggcgtcctgggcagtctcagtcttcccctgtccgagctcctggtcgccgaccagctgtgtcttgatcgatggtttaccctcagttcaggccaaggtcaagtgctgctaagggcgcagctaggtatcttggttagtcagcattccggggtggaagctcactctcactcatacagtcactcctcatccagtctgagcgaggagcccgaactgtcggggggacctccccatatcacttctagtgcccctgagctgcggcaaagattgactcacgtggattccccgctagaagcgcccgccggcccgctggggcaggtgaagctgactctgtggtactattccgaggaaaggaagctagtgtctatcgtgcatggatgtcggtcgttgaggcagaacgggcgcgatccacccgatccctacgtcagcctgttgctcttgccagataagaatcgtgggacaaaaagaagaacaagccagaagaagcggactctgtctccagagttcaacgaacgattcgagtgggaactccctttggacgaggcccaacgtcgaaagcttgatgttagtgtaaagtcaaattcaagttttatgtcacgagagcgggagctgcttggcaaggtgcagctggacctggcagaaacggacctcagccagggcgtggccaggtggtacgacttgatggacaataaggataaaggtagcagctag

SEQ ID NO: 185744 - DNA, 3177 bp, Artificial Sequence
  derived and/or modified sequence
atggagcggagccccggcgagggccccagccccagccccatggaccagccatcagcaccttccgatccgactgatcagccacccgctgcacatgccaagccagaccctggaagcggcggccagcccgcgggccctggcgccgcgggtgaggccctagccgtgctgacgtcgtttggccggaggcttctggttcttatacctgtttatttagcaggcgctgttggactgagtgtgggcttcgtgttattcggtctggccctgtacttgggctggcgaagagtgagagatgaaaaagaacgcagcctgagggcggcgaggcagttgttggatgatgaaaagcttctagcggaaactgtggcccccgctgtcagaggttccaatcctcatctccagacgtttacctttacccgggtcgaactgggagagaagccgctgagaattatcggagtgaaggtgcaccccggccaaaggaaagaacagattctgctcgacctgaatatcagctatgtgggagatgtgcagattgacgtggaggtcaaaaagtatttctgcaaggccggagtaaagggaatgcagctccatggcgttctgcgggtcattttggaacctctgatcggggacctgccctttgtgggagctgtgagtatgttttttattaggagacccaccctggatatcaactggacaggcatgactaatctgctggacatacctggcctgtcgtcgctgtccgacaccatgattatggactcgattgccgctttcctggtcctgccaaataggctcctggtgccactggtgcctgacctacaggacgtcgcacaactgaggtccccgctgccacgcgggattattaggattcatttactggccgctcggggattgagctccaaagataaatacgtgaagggacttattgaagggaagagcgacccctatgccctcgtgcggcttgggacacaaaccttctgtagcagagtgattgacgaggagctgaacccacagtggggcgagacgtatgaagtcatggtgcatgaagtgcccggccaggagatcgaggtggaagttttcgacaaggacccagataaggacgactttctgggacggatgaaactcgatgtgggcaaagttctacaggcctcagtcctggacgattggtttcctttacaggggggtcaggggcaagttcacttgaggcttgagtggttatccctgctatccgatgctgaaaaactcgaacaggtactgcagtggaactggggagtctcttcgaggcccgaccctccctctgcggctattctggtggtgtatctggacagggcccaggacctgccacttaagaaagggaacaaagagcctaaccctatggtccagttatcaatacaggacgtgactcaggaatcaaaagccgtatacagtacaaattgccctgtatgggaggaggcctttcgcttctttctacaggacccacagagtcaggagctcgatgtgcaggtaaaggatgattctagggctttaactctgggcgctctgaccctgcctctggctagacttttaacagctcccgaactcatcctggaccaatggtttcagttgtcttctagtggacctaatagcagactctatatgaaactcgtgatgaggatcttgtatcttgacagttcagagatttgctttccaacggtgccgggctgtccaggagcatgggacgtagattccgagaacccccagcgcggatcaagcgtggacgcccctccaagaccttgtcacaccacccctgactcccaatttgggaccgagcacgtgctccggatccatgtgctcgaagcccaggacctcatcgccaaggacaggtttctgggaggactcgtgaaaggaaagagcgacccctacgtgaaactgaagttggcaggcaggtccttcagaagccacgtcgtcagagaggacctcaatcctcggtggaatgaggtctttgaagtgatcgtcacaagcgtgcctgggcaagagctggaagttgaggtctttgacaaagacctcgataaagacgacttcctgggccggtgtaaggtaaggctgaccactgttctaaacagtggattcctggacgagtggctcaccctggaagatgtaccttctggccgcctgcatctgaggctcgagcggcttactccacgtccaacagctgcggaactggaagaagtcctgcaggtaaactcgctgatacagacccaaaaaagtgcagaactggcggcggcgctcctgtcaatttatatggaacgcgcggaggatcttccactcagaaaggggaccaaacaccttagtccctatgctaccctgacagttggcgattcatctcacaagactaaaacgattagccaaaccagtgccccagtgtgggacgagagtgcctcattccttatccgtaaaccacacaccgagtccttagagctccaggtccgcggtgagggaaccggtgtcctggggagccttagcctgccactgtcagagctgttagtggcagatcagctttgtctggacaggtggttcaccctctccagcggccaaggccaggtgcttttgagagcgcaattgggcatcttggtgtcacaacacagcggcgtcgaagcgcattctcactcatattctcacagctcatctagcctctctgaggagcctgagctcagtggcggaccaccccatatcacatcttccgcccctgagttgcggcagcgtctgacccatgtggactcaccactggaggcacccgcagggcctctcggacaggtgaaattaactctgtggtactactctgaggaacgtaagttagtcagtattgtgcatggctgcaggagtctgagacagaatgggagagaccccccagacccctacgtctcattgctgctgcttcccgataagaaccgaggaacaaaaagaaggacgtcccagaagaagaggaccctttccccagaattcaatgaaagattcgagtgggagctaccccttgacgaggcacaaagacggaaactcgacgttagcgtgaaatccaacagctcctttatgagtcgtgagagggaactcttggggaaagtgcaactcgatctagcagaaacggatctgagtcagggcgtagctaggtggtacgatctcatggataacaaggacaaaggcagttcatag

SEQ ID NO: 185745 - DNA, 3315 bp, Artificial Sequence
  derived and/or modified sequence
atggaaaggtctccaggggaaggcccatccccttcccccatggatcaacccagcgccccttctgatcctaccgaccaaccccctgctgcacatgccaagccagaccctggcagtggagggcagcccgcaggcccaggcgctgcaggcgaggctctggctgtgctgacgtcatttggtcgtcgtcttttagtgcttatacccgtgtacctcgcaggggctgtggggttgtcggtcggcttcgtgctgtttggactggcattatacctgggctggaggagggtccgagacgaaaaggagaggtcactgcgggcagcacgtcagctgcttgacgacgaggagcagcttaccgccaaaaccctgtatatgagtcatcgcgagctgcccgcttgggtttctttccctgacgtcgagaaggccgaatggctgaataagatcgtcgcccaggtctggccattcctaggacagtacatggaaaaactcctggctgagaccgtggcccctgctgtcagaggatctaaccctcatctgcagacctttacttttactcgagtggaactgggggaaaaaccgttacgcataatcggggtcaaagtccaccccggacaaagaaaggagcagattctgctggacttaaacatttcctacgttggggacgtccagattgacgtagaagtcaagaaatatttctgcaaggccggagtcaagggcatgcagctccacggcgttttgagggtaatcttggagccgctaatcggtgacctcccttttgtgggagctgtgagtatgtttttcattaggcgtcccacgctcgatattaactggacaggaatgacaaacttactggacatcccaggactgtcaagtctctcggatacaatgatcatggacagcattgccgctttcttagtgcttcccaaccgactgctcgtgcccctggtgcccgacctgcaggacgtggcgcagctacgaagcccactgcctcgtgggatcataagaatccatcttcttgcggctcgcggtttatcgtccaaagacaagtacgtaaaggggctgattgagggcaagtccgacccttacgcattagtgcgtttgggaacccagacattttgttccagggtgatcgacgaggagttgaatcctcaatggggagagacgtatgaagtgatggtgcatgaagtacccggtcaagaaatagaggttgaggtcttcgataaggaccctgacaaagacgacttccttggacgcatgaaattggacgtaggcaaagttctgcaggccagcgtcttagacgattggtttcctctacaaggcggacagggtcaggtgcatctgcgacttgaatggttgagcctcttgtccgacgccgagaaattggaacaagttctgcagtggaactggggagtgtctagccgaccagaccccccttctgcagctatcttggtggtctatctcgaccgagcccaggacctccctttgaaaaaggggaacaaagagcctaatcctatggtgcagctttccatccaagacgtgacccaggagtcgaaagccgtttacagcacgaactgcccagtttgggaggaggcttttaggtttttcctccaggaccctcagtcacaagaactggacgttcaggtgaaagacgattcccgcgcattaacattgggcgctctgaccctgcctctggccaggttactcacagctcccgagctgattctggatcagtggtttcagttatcctcgagcggccctaacagtcgattatatatgaagcttgtaatgcgtatactctatctcgacagctccgaaatctgtttccccacagtgccaggctgtcccggagcttgggacgtggattccgagaatccacagcgaggctcatcagttgacgcgcctcctaggccctgtcatacaactcccgatagccagttcgggactgagcacgtcctacgcatccacgttctggaagcgcaggacctgatagcaaaggaccgcttcctcggcggtctcgtcaaaggcaaatccgacccatacgttaaattaaaactcgccggtcggagcttccggtcacacgtggtacgtgaagatctaaacccccgttggaacgaagtgttcgaagtgattgtcacatctgtcccagggcaggagctggaagtagaggtgttcgataaagacctggacaaggacgacttcctgggaagatgcaaagtgaggctcactactgtcctgaatagcggatttctggatgaatggttaacactcgaggacgttccaagcggccgactgcatcttagattggagaggctgaccccccgacccactgcagccgaattggaggaagttctgcaggtgaattcgcttatacaaacccagaaatcagccgagctggcagccgcactcctgagtatctatatggaacgtgccgaggacttgcccctgagaaaaggaacaaaacacctatcaccttatgccactctgactgttggcgatagttctcataaaaccaagactatcagtcaaacaagcgcccctgtgtgggatgaatcggcctcctttctcattcggaagcctcacacagaatctctcgaactgcaggtgaggggagagggcaccggtgtcttgggaagtctgtctctcccactgagcgaacttttagttgcagaccaactctgtctggacagatggttcacactgagctccggccagggccaggtcctcctccgggctcagttaggaattttagtgtcacaacatagcggtgtggaggctcactcgcactcctacagccactcttcgagctctttgtccgaggagccagagctgtccggagggccacctcacatcacaagttctgccccagagttaagacagagactgacccatgttgattcacctctggaggcacctgccggacccctcggacaagttaagcttactctgtggtactactccgaggagcggaagctggtgagcattgtccacggatgtcgaagtctgcgacagaacgggcgagatcctcccgacccttacgtgtccctccttcttttgcctgataaaaatagggggacgaaacgtagaacgtctcagaagaaacgcacgctgtcacccgagtttaacgagcgtttcgagtgggagctgccactcgatgaggcacagcgcaggaagctcgatgtgtctgtgaagagcaatagtagtttcatgagtagggaacgagaacttttggggaaggttcagctggatctggctgaaacagacttgtcccaaggggtcgctcggtggtacgatttgatggataacaaggacaaggggtcttcatag

SEQ ID NO: 185746 - DNA, 3177 bp, Artificial Sequence
  derived and/or modified sequence
atggagcgatctcctggggaaggtcctagcccatcacccatggaccagccaagcgccccaagtgatcccacagaccagccgccagctgcccacgcgaaaccagatccagggtccggaggacagcctgccggacccggtgcagccggagaagctttggccgtactcaccagcttcggaaggagattactagtgctgatccccgtgtatctcgccggagctgtcgggctaagcgtcggctttgtgttgttcgggctggctctgtatctggggtggagaagggtgcgagacgaaaaagagaggagtcttagggccgctaggcagttgttggatgacgagaagcttcttgctgaaacagttgcccctgcagtgagaggtagtaaccctcacctccagacatttacatttacccgagtcgagttgggggaaaagcccctgcggatcatcggcgtcaaagtacaccccggacagcgaaaggagcagattctgctggacttaaacatctcttacgtgggcgatgtacagatcgatgtggaggttaagaaatatttctgcaaggccggagttaagggcatgcagcttcacggcgtgcttagggtcatcctggagccactaatcggcgacctccccttcgtgggagccgtttctatgttcttcatcagacggcctacactcgatataaattggacaggcatgacaaatctgctggacattccgggtctgtcctccttgagtgatactatgatcatggattcgatcgccgcatttttagtccttcccaatcgactgctcgtgccattggtccctgatctccaggatgtggcacaactgaggagcccgttaccgagagggatcatccggatacacctcctggcagcaagggggctgtcatccaaggacaaatacgtcaagggcctgattgaaggaaagtctgacccgtacgctctggtcagacttggaacgcaaaccttttgttctagggtgattgacgaagagctgaaccctcagtggggagagacctacgaagtaatggtccacgaagtgcccggacaagagattgaggtcgaagtgttcgataaagatccagataaagacgattttctgggcaggatgaagttggacgttggaaaggttcttcaggctagcgtgcttgatgattggttccctttacagggcggacaaggtcaggtccatctgagactagaatggctgtccctgctgtccgatgcggaaaaacttgaacaggtcttgcaatggaattggggcgtgtcttctcggccagaccctccctctgccgctatcctggttgtgtatttggaccgagcccaggacctaccactaaagaagggcaataaggaacctaaccctatggtgcagctctcaatccaagacgtgacgcaagaatccaaggcagtatattccaccaactgccccgtatgggaagaagccttccgattctttcttcaggacccacagtcgcaggagctggatgtacaggtgaaagacgactccagagctctgaccctgggtgctctcaccttgcctctggccagactcctgaccgccccagagctaatcctggatcagtggttccaactctcttctagcgggccaaatagccggttatacatgaaactggttatgagaatattgtatctcgactcctccgagatttgttttccaactgtgccgggatgtcccggagcttgggacgtggacagcgagaacccacagcggggttccagcgtcgacgccccaccaagaccatgtcatacaaccccagatagccagttcggcacagagcacgttctacgaatacatgtacttgaagcacaggatctgatagcaaaagatcgatttctggggggacttgtgaaaggaaagtcggacccctacgttaagctgaagcttgctggcaggtcatttagatcacatgtcgtgagagaggatctgaatcctagatggaatgaggtatttgaagtgatcgtcaccagcgtgccgggacaggagctggaagttgaggtctttgataaagatctcgataaggacgatttcctgggtaggtgtaaagtaaggctgacgactgtgctgaactcagggtttttggatgaatggttaaccctggaagacgtcccatccggcaggcttcacttgcgcctcgaaagactgacacctcggcctaccgctgccgagctggaggaagttctgcaagtgaatagcctgattcaaactcagaaaagcgccgagctggctgctgctctgctctccatatatatggaaagagctgaagacctccctttacgaaagggtaccaagcacctgtccccctacgccaccctcacagtgggtgacagcagccataaaactaaaaccatctcgcagacaagtgctccagtatgggacgaatcagcctccttcctgatccggaagccccacacggagtccctggagcttcaggtgcgcggtgagggtaccggggttctgggttcccttagcctaccactcagcgaacttctcgtcgccgatcagctttgcctcgacagatggttcactctgagcagtggacagggccaggtgctattgagggcccaactgggcatcttagtttcccagcatagtggtgtcgaagcacactcacactcctacagccactcctcaagttccttatctgaggaacccgaactctccgggggtccgccacacattaccagctctgcacctgagctgcgccaacgcttaacgcacgtggactctccactcgaggcccctgctggacctttagggcaggtaaaacttacactatggtattacagtgaagaaagaaagctcgtgtctattgtccacgggtgcaggtccctgagacagaatggtagggaccccccagacccttatgtatccttattgctcctaccagacaaaaatcgcggtacaaaaaggcgaacctcgcaaaaaaaacgcacattgtcacccgaattcaatgagcgctttgagtgggagcttccgctcgacgaggcacagcgccgaaaacttgatgtatctgtcaagtccaactccagtttcatgtcccgggagcgtgaactgctcggtaaagtccagctggacctggcagagaccgatctatcacagggcgtggcacgctggtatgaccttatggacaacaaggacaagggcagctcctag

SEQ ID NO: 185747 - protein, 964 aa, Artificial Sequence
  derived and/or modified sequence
MDEQSVESIAEVFRCFICMEKLRDARLCPHCSKLCCFSCIRRWLTEQRAQCPHCRAPLQLRELVNCRWAEEVTQQLDTLQLCSLTKHEENEKDKCENHHEKLSVFCWTCKKCICHQCALWGGMHGGHTFKPLAEIYEQHVTKVNEEVAKLRRRLMELISLVQEVERNVEAVRNAKDERVREIRNAVEMMIARLDTQLKNKLITLMGQKTSLTQETELLESLLQEVEHQLRSCSKSELISKSSEILMMFQQVHRKPMASFVTTPVPPDFTSELVPSYDSATFVLENFSTLRQRADPVYSPPLQVSGLCWRLKVYPDGNGVVRGYYLSVFLELSAGLPETSKYEYRVEMVHQSCNDPTKNIIREFASDFEVGECWGYNRFFRLDLLANEGYLNPQNDTVILRFQVRSPTFFQKSRDQHWYITQLEAAQTSYIQQINNLKERLTIELSRTQKSRDLSPPDNHLSPQNDDALETRAKKSACSDMLLEGGPTTASVREAKEDEEDEEKIQNEDYHHELSDGDLDLDLVYEDEVNQLDGSSSSASSTATSNTEENDIDEETMSGENDVEYNNMELEEGELMEDAAAAGPAGSSHGYVGSSSRISRRTHLCSAATSSLLDIDPLILIHLLDLKDRSSIENLWGLQPRPPASLLQPTASYSRKDKDQRKQQAMWRVPSDLKMLKRLKTQMAEVRCMKTDVKNTLSEIKSSSAASGDMQTSLFSADQAALAACGTENSGRLQDLGMELLAKSSVANCYIRNSTNKKSNSPKPARSSVAGSLSLRRAVDPGENSRSKGDCQTLSEGSPGSSQSGSRHSSPRALIHGSIGDILPKTEDRQCKALDSDAVVVAVFSGLPAVEKRRKMVTLGANAKGGHLEGLQMTDLENNSETGELQPVLPEGASAAPEEGMSSDSDIECDTENEEQEEHTSVGGFHDSFMVMTQPPDEDTHSSFPDGEQIGPEDLSFNTDENSGR

SEQ ID NO: 185748 - DNA, 2895 bp, Artificial Sequence
  derived and/or modified sequence
atggacgagcagagcgtggagagcatcgccgaggtgttcagatgcttcatctgcatggagaagctgagagacgccagactgtgcccccactgcagcaagctgtgctgcttcagctgcatcagaagatggctgaccgagcagagagcccagtgcccccactgcagagcccccctgcagctgagagagctggtgaactgcagatgggccgaggaggtgacccagcagctggacaccctgcagctgtgcagcctgaccaagcacgaggagaacgagaaggacaagtgcgagaaccaccacgagaagctgagcgtgttctgctggacctgcaagaagtgcatctgccaccagtgcgccctgtggggcggcatgcacggcggccacaccttcaagcccctggccgagatctacgagcagcacgtgaccaaggtgaacgaggaggtggccaagctgagaagaagactgatggagctgatcagcctggtgcaggaggtggagagaaacgtggaggccgtgagaaacgccaaggacgagagagtgagagagatcagaaacgccgtggagatgatgatcgccagactggacacccagctgaagaacaagctgatcaccctgatgggccagaagaccagcctgacccaggagaccgagctgctggagagcctgctgcaggaggtggagcaccagctgagaagctgcagcaagagcgagctgatcagcaagagcagcgagatcctgatgatgttccagcaggtgcacagaaagcccatggccagcttcgtgaccacccccgtgccccccgacttcaccagcgagctggtgcccagctacgacagcgccaccttcgtgctggagaacttcagcaccctgagacagagagccgaccccgtgtacagcccccccctgcaggtgagcggcctgtgctggagactgaaggtgtaccccgacggcaacggcgtggtgagaggctactacctgagcgtgttcctggagctgagcgccggcctgcccgagaccagcaagtacgagtacagagtggagatggtgcaccagagctgcaacgaccccaccaagaacatcatcagagagttcgccagcgacttcgaggtgggcgagtgctggggctacaacagattcttcagactggacctgctggccaacgagggctacctgaacccccagaacgacaccgtgatcctgagattccaggtgagaagccccaccttcttccagaagagcagagaccagcactggtacatcacccagctggaggccgcccagaccagctacatccagcagatcaacaacctgaaggagagactgaccatcgagctgagcagaacccagaagagcagagacctgagcccccccgacaaccacctgagcccccagaacgacgacgccctggagaccagagccaagaagagcgcctgcagcgacatgctgctggagggcggccccaccaccgccagcgtgagagaggccaaggaggacgaggaggacgaggagaagatccagaacgaggactaccaccacgagctgagcgacggcgacctggacctggacctggtgtacgaggacgaggtgaaccagctggacggcagcagcagcagcgccagcagcaccgccaccagcaacaccgaggagaacgacatcgacgaggagaccatgagcggcgagaacgacgtggagtacaacaacatggagctggaggagggcgagctgatggaggacgccgccgccgccggccccgccggcagcagccacggctacgtgggcagcagcagcagaatcagcagaagaacccacctgtgcagcgccgccaccagcagcctgctggacatcgaccccctgatcctgatccacctgctggacctgaaggacagaagcagcatcgagaacctgtggggcctgcagcccagaccccccgccagcctgctgcagcccaccgccagctacagcagaaaggacaaggaccagagaaagcagcaggccatgtggagagtgcccagcgacctgaagatgctgaagagactgaagacccagatggccgaggtgagatgcatgaagaccgacgtgaagaacaccctgagcgagatcaagagcagcagcgccgccagcggcgacatgcagaccagcctgttcagcgccgaccaggccgccctggccgcctgcggcaccgagaacagcggcagactgcaggacctgggcatggagctgctggccaagagcagcgtggccaactgctacatcagaaacagcaccaacaagaagagcaacagccccaagcccgccagaagcagcgtggccggcagcctgagcctgagaagagccgtggaccccggcgagaacagcagaagcaagggcgactgccagaccctgagcgagggcagccccggcagcagccagagcggcagcagacacagcagccccagagccctgatccacggcagcatcggcgacatcctgcccaagaccgaggacagacagtgcaaggccctggacagcgacgccgtggtggtggccgtgttcagcggcctgcccgccgtggagaagagaagaaagatggtgaccctgggcgccaacgccaagggcggccacctggagggcctgcagatgaccgacctggagaacaacagcgagaccggcgagctgcagcccgtgctgcccgagggcgccagcgccgcccccgaggagggcatgagcagcgacagcgacatcgagtgcgacaccgagaacgaggagcaggaggagcacaccagcgtgggcggcttccacgacagcttcatggtgatgacccagccccccgacgaggacacccacagcagcttccccgacggcgagcagatcggccccgaggacctgagcttcaacaccgacgagaacagcggcagatag

SEQ ID NO: 185749 - DNA, 2895 bp, Artificial Sequence
  derived and/or modified sequence
atggacgagcagtcagtcgagtctatcgccgaggtatttaggtgttttatctgtatggagaaactccgagacgcaaggctgtgcccccactgttcaaaattatgctgttttagctgcatccgaaggtggttaacggagcagcgcgcacaatgccctcattgcagagcccctctgcagctccgtgagttagtaaactgcaggtgggctgaggaggttacccagcaactcgacacgctccagctttgcagcctgacgaaacacgaagagaacgaaaaggataagtgtgagaaccaccatgagaagctgagcgtgttctgctggacctgcaagaaatgtatctgccaccagtgtgctctctggggcggaatgcacggcggtcacacttttaaacccctggcagaaatatatgaacagcatgtgactaaagtcaatgaggaagtggctaaactccggcggaggctgatggaactcatttcattagtccaggaggttgagcgaaatgtcgaggctgtgagaaacgccaaggacgaacgagtgcgggagatccgcaacgctgtggagatgatgattgctcgactcgatacccagctcaaaaataagctgattactctgatggggcagaaaaccagtctcactcaggaaacagagctgctcgagtcattattgcaggaagtggaacatcagctgaggtcctgctcgaagtcagagttaatttccaaatcttcagagatcttaatgatgtttcagcaggtccatcgcaagcccatggccagctttgtcaccactccggtgcctcccgatttcacgtcagagttggtgccctcttatgactcagccaccttcgtgttggagaatttctctactctgcgacaacgggcagatccagtttacagcccaccactacaggtcagtggactgtgctggaggctaaaggtgtaccctgacggtaatggtgttgtgagaggatactaccttagtgttttcctggaactgtccgctggtcttcctgaaacatcgaaatatgagtatcgagtcgaaatggttcatcagagctgtaatgatcctaccaagaatatcattagggaattcgcatcagacttcgaggtgggtgagtgttggggttataatcggttctttcgtctcgacctgttagctaacgagggctacttgaatccccagaacgacactgttatcttgcgctttcaagtccgcagtccaacatttttccagaagtcgagggaccagcattggtatattacgcagctggaggcagcccaaaccagctacattcagcaaatcaataacttaaaggagagactaactattgagctgagtaggacccagaagagcagagatctgagcccacctgacaaccaccttagcccccagaacgatgacgccctggagacgagagcaaagaagagcgcctgtagcgatatgctgctcgaaggcggacccaccacggcgagcgtgcgcgaagctaaggaggatgaggaggacgaagagaaaattcagaacgaagattaccaccatgaactgtcagatggcgacctagatctggatttggtgtatgaagatgaagtgaaccagcttgacggctcctcttcttcagcttcaagcacagccacctctaatacagaagagaacgatatcgatgaagagacaatgtctggcgagaacgatgttgagtacaacaacatggaactagaggaaggagaactcatggaagacgccgcagccgctggacccgccggatcgtcgcatggctacgtcggcagtagcagtcgcatctctcgtcgcacacacctgtgcagtgccgctacgtcaagtctgctggatatagacccacttatcttgattcaccttctggatttaaaggatagatcgtctatcgagaacctgtggggcctccagccccgcccacctgcgtcccttctgcagcctaccgcatcctatagccggaaagacaaagaccagcgaaaacagcaggccatgtggcgagtccctagtgatcttaaaatgctcaagcgtctcaagacacagatggctgaagtcaggtgcatgaagaccgatgtgaagaacacccttagtgagataaaaagcagttctgcagccagcggtgatatgcagacatcgcttttttctgcagatcaggctgccctggccgcttgcgggacagaaaacagtgggagactgcaggacctgggaatggagctgctcgccaagagcagcgtcgctaactgttatatcaggaacagtaccaataagaaaagcaattctcctaagccggctcggagctcggttgcaggctccctgtctctgcgccgggccgtcgaccccggagagaactcgcgctctaagggtgactgccagacattgtctgaagggagtccagggtcctcccagagcggctctagacattcatctcctcgagcactcatccacgggagcatcggggacatcctgcccaaaaccgaggaccgccagtgcaaagccctcgactctgacgctgtggtagtagctgttttcagtggcctacccgcagtcgaaaagagaaggaagatggttacccttggcgctaacgcaaagggcgggcaccttgaggggcttcagatgacagatctcgaaaataacagcgagaccggggaactgcaaccggtgctgcccgaaggtgcctctgccgcccctgaggagggaatgtcctcagactccgacatagaatgtgacaccgaaaatgaggagcaggaggaacatacatcagtcgggggctttcacgactctttcatggtgatgactcagccacctgatgaagacacccacagttcttttcctgacggcgagcagattggccctgaagacttgtcatttaatactgacgagaactctggacggtag

SEQ ID NO: 185750 - DNA, 2895 bp, Artificial Sequence
  derived and/or modified sequence
atggacgaacagagcgttgagtcgattgcggaggtgtttagatgtttcatttgcatggaaaagttgcgagacgctcggctgtgtccccattgttcgaaattgtgctgcttcagctgcatacgcagatggcttacagaacagcgtgcccagtgcccccattgccgggcccccctgcagctccgggagcttgtgaattgcaggtgggcggaggaggtgacacaacagctggatactctgcagctctgttccctgaccaagcatgaggaaaacgaaaaggataaatgcgagaatcatcacgaaaaactctccgtcttctgttggacatgcaaaaaatgtatatgccatcagtgtgccttgtgggggggcatgcatggaggtcacaccttcaaacccttagctgagatctatgagcagcacgtcactaaagttaacgaagaggtcgcaaaactcaggaggcggctcatggaactcatcagcctagtgcaggaggtcgagagaaacgtggaggcagtgagaaatgctaaagacgagagagtgcgtgagattcgcaatgcagtagagatgatgatcgcacgcctggatactcaactgaagaataaactgattacgctgatggggcagaaaacaagcctgactcaggagaccgaacttcttgagtcattgttgcaggaagtagaacatcaattacgcagctgcagcaaatccgaattgatcagcaaaagctccgaaatcctgatgatgttccagcaggtacatagaaagccaatggcctcttttgttactacccctgtgccccctgattttacctccgagctggtgccctcttacgactctgccacattcgtgcttgaaaacttcagcacactcaggcagagggccgatcctgtgtattccccaccccttcaagtctctgggctgtgttggcggttaaaggtgtatccggatgggaatggcgtggtcaggggctactacctgtcggtgttcctggagttgagcgccgggctccccgaaacttctaaatacgaataccgcgttgagatggtgcaccagtcctgcaacgaccctacaaagaacataattcgagaattcgcctctgactttgaggtcggagagtgttggggttataacagattttttcgactggacctcctcgccaatgaaggatatctgaacccacaaaatgatactgttatacttcgattccaggtacggtcgccgactttctttcagaaatcgcgcgaccaacattggtatatcactcaactcgaagctgcacagacaagctatatccagcagatcaataatttgaaagagaggcttacaatcgagctgtcgcgcacccagaagtctagggatctaagcccccctgataaccatttatctccccagaacgatgacgccctggaaacacgggcaaagaagtcggcatgcagtgatatgttgctggaaggcggccccacaacagcgtctgtgagggaggctaaggaagacgaggaagacgaagagaagatccaaaatgaggactaccatcacgaacttagcgacggagacttggatctggatctcgtgtatgaagatgaggtgaaccagttagacgggtcatcgagctcggcgagctctacggcgacaagtaatactgaagagaatgatatcgacgaggaaaccatgtccggagagaatgacgtcgaatataataatatggagcttgaggaaggcgagctcatggaagacgccgccgccgcaggccctgccggctcctcccacggctacgtgggctcatcctctagaatatcccgcagaacccacctgtgctctgcggctacatcaagtttgcttgatattgaccctctgatcttaatccatctcctagatctcaaagacagatcgtcaattgagaatctgtggggtcttcagccccgccctcccgcatccctgcttcaacctaccgcttcttacagtcgcaaggataaggatcaacgcaaacagcaagccatgtggcgcgtgccttctgaccttaaaatgctcaagaggctcaaaactcagatggcagaggtccggtgtatgaagaccgacgttaagaatacactgagcgagataaaaagcagttcagctgcatctggagatatgcagacctctttgttcagcgctgatcaggctgccctggctgcctgtggcactgaaaactctggccggttgcaggatctgggaatggaactattggccaagtcctctgtggctaactgttacattcgcaactctacaaacaaaaagagtaatagccccaagcctgcccgttcttccgtggcagggtctttatctcttcgcagggcggtagacccgggggagaactcccgtagcaaaggtgactgtcaaacattgagcgaaggctccccaggctccagccagtcaggttcaagacatagttcaccacgagcgctgattcatggcagcatcggcgatattctgcccaaaacagaggacaggcagtgtaaggccttagactcagatgcggtagttgtggcggtgtttagtggtctaccggctgtcgagaaaaggaggaagatggtcacactcggcgccaacgctaagggcggccacctggaggggttacagatgactgatctggagaacaactcagaaactggtgaattgcagccagtcttgcctgaaggcgcctccgcagcaccagaggaagggatgagctcagatagtgacatcgagtgtgacaccgaaaatgaggagcaggaggaacatacctctgtggggggattccacgacagcttcatggtgatgacgcagcctcccgatgaagacactcacagctcctttcccgatggtgaacaaatcggcccagaagatctttccttcaatacagacgaaaattcggggcgctag

SEQ ID NO: 185751 - DNA, 2895 bp, Artificial Sequence
  derived and/or modified sequence
atggatgagcagagcgtggagagcattgctgaggtgttccgctgcttcatctgcatggagaagctgagagatgcccggctgtgcccccactgcagcaagctgtgctgcttcagctgcatccgccgctggctgacagagcagagggcccagtgcccccactgccgggcccccctgcagctgcgggagctggtgaactgccgctgggccgaggaggtgacccagcagctggacaccctgcagctgtgcagcctgaccaagcatgaagaaaatgagaaggacaagtgtgagaaccaccacgagaagctgtctgtgttctgctggacctgcaagaagtgcatctgccaccagtgtgccctgtggggcggcatgcacggcggccacaccttcaagcccctggccgagatctatgagcagcacgtgaccaaggtgaatgaggaggtggccaagctgcggcggcggctgatggagctgatcagcctggtgcaggaggtggagagaaatgtggaggccgtgagaaatgccaaggatgagcgggtgcgggagatcagaaatgctgtggagatgatgattgcccggctggacacccagctgaagaacaagctgatcaccctgatgggccagaagaccagcctgacccaggagacagagctgctggagagcctgctgcaggaggtggagcaccagctgcggagctgcagcaagtctgagctgatcagcaagagcagcgagatcctgatgatgttccagcaggtgcacaggaagcccatggccagctttgtgaccacccctgtgcccccagacttcaccagcgagctggtgcccagctatgacagcgccacctttgtgctggagaacttcagcaccctgcggcagagagctgaccctgtgtacagcccccccctgcaggtgtctggcctgtgctggaggctgaaggtgtacccagatggaaatggagtggtgcggggctactacctgagcgtcttcctggagctgtctgctggcctgcctgagaccagcaaatatgagtacagagtggagatggtgcaccagagctgcaatgaccccaccaagaacatcatccgggagtttgccagtgactttgaggtgggggagtgctggggctacaaccgcttcttccggctggacctgctggccaatgaaggctacctgaacccccagaatgacaccgtcatcctgcgcttccaggtgcgcagccccaccttcttccagaagagccgggaccagcactggtacatcacccagctggaggccgcccagaccagctacatccagcagatcaacaacctgaaggagcggctgaccatcgagctgagcaggacccagaagagccgggacctgagccccccagacaaccacctgagcccccagaatgatgatgccctggagacccgggccaagaagagcgcctgcagcgacatgctgctggagggcggccccaccacagcctctgtgcgggaggccaaggaggatgaagaagatgaggagaagatccagaatgaagactaccaccacgagctgagtgatggagacctggacctggacctggtgtatgaagatgaggtgaaccagctggatggcagcagcagcagcgccagcagcacagccaccagcaacacagaggagaatgacattgatgaggagaccatgtctggagaaaatgatgtggagtacaacaacatggagctggaggagggggagctgatggaggatgctgctgctgctggccctgctggcagcagccacggctacgtgggcagcagcagccgcatcagcaggaggacccacctgtgcagcgctgccaccagcagcctgctggacatcgaccccctcatcctgatccacctgctggacctgaaggacaggagcagcattgagaacctgtggggcctgcagccccggcccccagccagcctgctgcagcccacagccagctacagcaggaaggacaaggaccagaggaagcagcaggccatgtggagggtgcccagcgacctgaagatgctgaagaggctgaagacccagatggccgaggtgcgctgcatgaagacagatgtgaagaacaccctgtctgagatcaagagcagcagcgctgccagcggggacatgcagaccagcctcttctctgctgaccaggccgccctggccgcctgtggcacagaaaattctggccgcctgcaggacctgggcatggagctgctggccaagagctctgtggccaactgctacatccggaacagcaccaacaagaagagcaacagccccaagccagcccggagctctgtggccggcagcctgagcctgcggcgggctgtggaccccggggagaacagccgcagcaaaggagactgccagaccctgtctgagggcagccctggcagcagccagagcggcagccgccacagcagcccccgggccctgattcatggcagcatcggggacatcctgcccaagacagaggaccggcagtgcaaggccctggacagtgatgctgtggtggtggccgtgttcagcggcctgcctgctgtggagaagaggaggaagatggtgaccctgggcgccaatgccaagggcggccacctggagggcctgcagatgacagacctggagaacaacagcgagactggagagctgcagcctgtgctgcctgagggcgccagcgctgcccctgaggagggcatgagcagtgacagcgacattgaatgtgacacagaaaatgaggagcaggaggagcacacctctgtgggcggcttccatgacagcttcatggtgatgacccagcccccagatgaggacacccacagcagcttcccagatggagagcagatcggccctgaggacctgtccttcaacacagatgagaacagcggccgctag

SEQ ID NO: 185752 - DNA, 2895 bp, Artificial Sequence
  derived and/or modified sequence
atggacgagcagagcgtggagagcatcgccgaggtgttccggtgctttatatgcatggaaaaattgcgggacgcccggttgtgccctcattgctctaagctctgctgtttttcctgtattaggaggtggcttaccgaacagagagcacagtgcccccattgtcgggctcctctgcagctccgtgagttggtcaactgtcgctgggcagaggaggtcacccagcaactggacaccctgcagctgtgtagcctcacaaaacacgaggagaacgaaaaggataaatgtgagaaccatcatgagaagctgtccgtgttctgctggacatgtaaaaaatgcatttgccatcagtgtgctctgtggggagggatgcacggcgggcacacatttaaaccactggcagagatttatgaacagcacgtaaccaaggtgaacgaagaggtcgcgaaactgcgacggagactgatggaacttattagtctggtgcaggaggtggagcggaatgtggaggctgtgcggaacgccaaagacgaacgagtccgcgaaatccgaaatgctgttgaaatgatgatcgcccgcctcgacacccaacttaagaacaagttaattaccctgatgggtcagaaaaccagcctcactcaggaaaccgagctgctggagtctctcctgcaggaggttgagcatcagctgcggtcctgcagcaaaagtgaactgatctctaagagttctgagattctgatgatgttccagcaggtgcatcgcaagccgatggctagcttcgtcactacaccggtcccgcctgattttaccagtgaacttgtaccaagctacgactctgccacttttgtgctcgagaatttttctaccctgcggcagagagcagatccggtgtattctccaccgttgcaggtctcagggttgtgctggcgcctaaaggtgtacccagatgggaacggggtggtgaggggctattacctctcagtgtttcttgagctgtcagcaggtctgcccgagaccagcaaatacgagtaccgagtagagatggtccatcaatcttgcaatgaccccacaaaaaacataatccgagaattcgcgtctgactttgaggttggcgagtgttggggctacaatcgcttttttcgcttagacctgctagccaatgaaggatacctgaatccccaaaacgataccgtaatacttcggtttcaggttcgatctccaacattctttcagaagtcgcgcgaccagcattggtatattactcagctcgaagcagcccaaacatcttacatccagcagatcaataaccttaaggagcgactgacgattgagctgtcaagaactcaaaagagtagggacctttcccctcctgacaaccatctctctcctcagaatgacgatgccctcgagaccagagctaagaagagtgcgtgttctgacatgctcttagaaggcgggcctactaccgcttcagttagagaagccaaagaagacgaagaggacgaggagaaaatacagaatgaggactatcaccacgagcttagtgacggagacctggacctggaccttgtttacgaagacgaggtaaatcagttggacggcagctcaagtagtgcctcttcaacggcaaccagcaatactgaagaaaatgatatagacgaggagactatgagcggcgaaaatgatgtggagtacaacaacatggagctggaggaaggagaattaatggaggacgcggcagcagcagggcctgccggaagcagccatggttacgtggggagctcaagccggatcagccgtagaactcatctgtgctctgccgctacctcgagcctgctggacatcgaccctttgatcctcatacatctgctggatttaaaggataggtcatctatcgaaaatttatgggggctacagcctcgaccaccggcatcgctgttgcagcccactgcaagctactctcggaaagacaaggaccagaggaagcagcaggctatgtggcgggtaccttcagatctgaagatgctgaagaggctaaaaacacagatggcggaggttcgctgcatgaagaccgacgtcaagaatactttaagcgagattaagagcagcagtgcagcctcgggtgacatgcaaaccagcctgttttcagctgatcaggccgcgctggctgcctgtggaaccgaaaattcagggcggctgcaagatctggggatggagcttctcgccaagtccagcgtggcgaattgttatatccgaaattccaccaacaagaagtctaattcaccaaagccagcccgatctagcgtagcaggatccctgagcctcaggagggccgtggatcccggggaaaacagccgatcaaaaggcgactgtcagacattatcagaaggaagcccagggtcatctcagagcggatctagacattcatcaccccgcgcgttgatacacgggagtatcggtgacatcctgcccaaaaccgaggacaggcaatgtaaggcattagacagcgacgccgtcgtggttgcagtcttttccggcttaccagccgtggaaaagcggaggaagatggtgacacttggcgccaacgctaaggggggccatctggaaggactgcaaatgacggatttggagaataatagcgagacgggagagttgcaacccgtgctgcccgaaggcgccagtgccgctcctgaagagggcatgagtagcgatagcgacatcgaatgcgatacagagaatgaggagcaggaggagcatacaagcgttggaggtttccacgatagcttcatggtcatgactcaaccacccgatgaggatacgcatagcagtttccccgacggggagcagattggcccggaggacttgtccttcaataccgatgaaaatagcggcagatag

SEQ ID NO: 185753 - DNA, 2895 bp, Artificial Sequence
  derived and/or modified sequence
atggacgagcagagcgtggagagcatcgccgaggtgttccggtgcttcatctgtatggaaaagctacgcgacgccagactatgtccgcattgctccaagttatgttgctttagctgcatccggcggtggctgaccgaacaacgggcacagtgcccccactgcagggctccgctgcaactgagagagctagtgaattgccgatgggccgaagaggtgacccagcagcttgacaccttacaactctgttctttaacaaaacatgaggaaaatgaaaaggacaaatgtgaaaaccatcacgaaaaattgagtgtcttctgttggacctgcaaaaagtgtatttgccaccaatgcgcactgtggggaggcatgcacggtggacacacattcaaaccgcttgcagagatctacgaacaacatgtgacaaaggtcaatgaggaagtcgcaaaactacgacggaggctgatggagctaattagcttggtgcaagaagtggagcggaatgttgaggccgtaagaaatgctaaagacgagcgagtgcgggagattcgcaacgctgtggaaatgatgattgccaggctcgacacacagctgaagaataaactgattactctgatgggccagaagactagtctgacacaggagacagagttgctcgagtccttattgcaggaggtcgagcatcagctgcgctcatgcagtaaaagtgagctcatatccaaaagctcggagatcctcatgatgtttcagcaggtgcatcgaaagcccatggcgtcatttgtgaccacgcctgtcccacctgacttcacctccgagctggtcccgagctatgactccgctaccttcgtgcttgaaaactttagcacactgagacaaagggcagaccccgtatacagccctccgctgcaagtatcaggcctttgctggcggctgaaagtgtacccagatgggaatggagtggtcagaggctactacctaagtgttttcctagagctgtccgctggactcccagagacctccaaatatgagtatagggtcgagatggtgcatcagtcgtgcaacgaccctactaaaaatatcatcagagaatttgcatccgactttgaggtaggggagtgttgggggtacaacagattctttaggttggacctgctcgccaatgaaggctacttaaacccccagaatgataccgtcattctacgctttcaggtacgatctccaacctttttccagaagagcagggatcagcattggtacattacccaactcgaggcggcccagacatcttacatccagcagattaacaacctgaaagagcgcctgacgattgagctcagtcgaactcaaaaatcaagagacctgagccctccagataaccatctcagtccacagaacgatgacgctctggaaactagggcgaaaaaatcggcctgcagtgatatgctgctggagggcgggccgactaccgcttctgtccgggaggccaaagaagatgaagaagatgaggagaaaatccagaacgaagactaccaccatgaactctccgacggggacctggacctcgacttggtgtatgaggatgaagtcaatcaactggatggaagttcaagttccgcaagctccacggctacttcaaacaccgaagaaaacgatatagacgaggagacgatgtcgggagaaaatgatgtcgaatacaataacatggagctcgaagagggggaactgatggaagacgcagccgctgccggcccagctggcagttcgcatggctacgtcggctctagttccagaatcagtcggaggactcacctttgctccgccgctacatcttctctgctggatattgatccccttatcctcattcacctacttgatctgaaggaccgaagctccattgaaaatctgtggggtttacagccgaggcctcccgcctcgctgctgcagcctacagcgagttatagcaggaaagacaaggatcagaggaaacagcaggcgatgtggagggtaccttctgatttgaagatgctgaaacgcctgaagactcagatggccgaagtgcggtgtatgaaaaccgacgtcaaaaatacattatcagagattaaatctagcagcgcagcctccggggacatgcagacatccctcttctctgccgaccaggccgcccttgcagcctgtggcacagaaaatagcgggaggttacaggatttagggatggaactgctggcaaagagttcagtagctaattgttatatccgcaactccacaaataagaagtcaaactcccccaagccggcacgatcctctgttgcaggttcactctcactgcgtagagcggtggatcctggagagaacagccgatccaagggcgactgtcagactctcagcgagggaagtcccggtagcagccagtctggctcacgccactcttccccccgtgctctgattcacggatctattggcgacatactgccaaagacagaggaccgccaatgcaaagccttggattctgatgctgttgtcgtggccgtgttttccggcctaccggccgtggagaagcgccgcaaaatggtgacattgggagccaatgcgaagggtgggcatctcgaggggttacagatgactgatttggaaaacaacagtgaaacaggagagctccagccggtgctgcctgaaggagcatccgcagctccagaagaggggatgtcgtcagacagcgatattgagtgcgataccgaaaacgaggagcaggaagagcatacatccgtggggggttttcatgattcctttatggtgatgacgcagcctcccgacgaagacacacacagctcattccctgatggagaacagattggcccagaggacctaagcttcaacacggatgagaacagtggccggtag

SEQ ID NO: 185754 - DNA, 2895 bp, Artificial Sequence
  derived and/or modified sequence
atggacgagcagtccgtcgagagtattgccgaggtgttccgctgcttcatctgcatggagaaactacgtgatgctaggctgtgtccacactgctctaaactctgttgctttagctgtatacgcaggtggctaacagaacagagagcacagtgcccccactgccgggctcccctacaactgagggaactagtgaactgcaggtgggctgaggaggtgacccaacagctagatacgctgcagctttgttccctgaccaaacacgaggaaaatgaaaaggacaaatgcgagaatcatcacgaaaaactttccgtattttgctggacttgcaaaaagtgcatatgtcaccaatgtgccctctggggtggcatgcatggtggtcacactttcaaacctctggctgagatttacgaacaacatgtgactaaggtgaacgaagaagttgccaaactcaggcggcgactgatggaattgatcagccttgtacaggaagtcgaacgcaacgtggaggcagtaagaaacgccaaagacgagcgagtgcgggaaattagaaatgccgttgagatgatgatcgccaggctggatacccaactgaagaacaaattaataaccctcatggggcagaagacttccctcacgcaagagacagagctgctcgagtccctcctccaagaagtggagcaccagctccgatcttgctcaaagagcgaactgatctcaaaaagcagtgaaatcttaatgatgtttcagcaagttcataggaagcccatggccagcttcgtcacaactccagtcccacccgattttacaagcgaactcgtgccatcatacgattcggcaacttttgtgctcgagaatttctccactctccgtcagcgggcagacccagtgtatagcccgccactccaggtgtctgggctgtgctggcggctgaaagtctatcccgatgggaatggtgtggtgcgcggatactacctctcggtcttcctggagttgtctgccggactacctgaaacctccaagtacgagtaccgggtggagatggtccatcagtcatgcaacgatccgactaagaacattattcgcgagttcgcgtcagactttgaagtcggagagtgttggggatataatcgattcttcagactcgatcttctggctaatgagggatacctgaatccccagaacgacacggtgatactccgcttccaggtcaggtctccaacattctttcagaagtctcgggatcaacactggtacatcacacaactagaggcggcacagaccagttacatacagcagattaacaacctgaaggagcggttgacaatcgaactcagcagaacgcagaagtctcgagatctatcaccaccagacaatcacttgtccccgcaaaatgatgatgccctcgagacaagagccaaaaagagcgcctgcagtgacatgctcctcgaaggcggacccaccacagctagtgttagggaggcaaaggaagacgaagaagatgaggaaaaaatccagaatgaggactaccatcacgaactatctgacggggacttagaccttgacctggtgtacgaagacgaagtgaaccaactggatggcagtagcagcagcgcctcaagtacagccacctccaacactgaggagaacgacattgatgaggagacaatgagcggagaaaacgacgtggaatataacaatatggaactggaggagggcgagttgatggaagatgctgctgcagctggtccggcaggttcatctcacggttacgtgggcagcagttctcgcatttcgcggcgtacccacctgtgttcagcagcaacgagcagcttactggacattgacccgctgatcctgatacatctactagacctcaaagatagatctagtatagaaaacttgtggggactccagccaagaccacctgcctccctgcttcagccaacggctagttatagccggaaggataaggatcagagaaagcagcaagccatgtggcgggtgccgtccgatctcaagatgctgaagcggcttaaaacacagatggcggaagttcggtgtatgaaaaccgacgtgaaaaatacgctctccgaaatcaaaagcagcagtgcagcatccggtgacatgcaaactagtctctttagcgcagatcaggctgcactggccgcttgcgggaccgaaaacagcggtaggctccaggatctgggaatggagctgttggctaagtcttctgtggcaaactgttatatccgtaactccacgaataaaaagagtaatagccccaagcccgctcgctcgtccgtcgccggaagtctgtcattgagacgtgcagtcgaccccggtgagaatagcaggtcaaagggcgattgtcagacattgagcgaagggagcccagggtcaagccagagtgggtccaggcattcaagcccaagagccctgatacatggaagcatcggcgatatactgcccaagaccgaggaccggcaatgtaaagctctcgatagcgacgctgttgtggtggccgtgttttccggactgcccgcagtcgaaaagagaaggaaaatggtgacactgggggctaatgccaagggcggacacctggaaggcctccagatgactgacctggagaacaacagcgagaccggcgagctgcagcccgttctgccagagggcgcatccgcggctcccgaagaagggatgtccagcgattcagacattgaatgcgatacggagaatgaggagcaggaagagcacactagtgtggggggattccatgatagtttcatggtcatgacacagcccccagacgaggacactcatagctcatttcccgatggggagcagattggaccagaagacctgagttttaacacagacgagaattccggacgatag

SEQ ID NO: 185755 - DNA, 2895 bp, Artificial Sequence
  derived and/or modified sequence
atggacgaacagtctgtggagtccatagcggaggtctttagatgttttatttgtatggagaagttaagggatgcacggctctgcccccactgttctaagctgtgctgtttcagctgtatacgacgctggctgacagagcagcgtgcccaatgtccacactgccgcgctcccttacaactgcgcgaactcgtgaattgtcgctgggcagaagaagtgacacaacagctcgatacattacagctctgcagcctgacaaaacacgaagagaacgaaaaagataagtgcgaaaatcaccacgaaaagctgagtgtcttctgctggacatgcaagaaatgtatttgtcaccagtgcgccctgtggggcggaatgcatgggggtcataccttcaagcccctggcagaaatctacgagcagcatgtgaccaaggtgaatgaggaagtggctaagctgcggaggcgcctgatggagttgatctctctagtccaagaagtggagcgaaatgtggaggctgtaaggaatgctaaggatgaacgagtgcgcgagattagaaacgcagtcgagatgatgatcgcacgtttggatacccagctgaaaaataaactcatcaccttgatgggccagaagacgagcttgacccaggaaactgagctgctggaaagtttactgcaggaggtggagcatcagctcaggagttgcagtaagtctgaactgatctctaaatcctctgagattttgatgatgttccaacaggtgcatcggaagcctatggctagcttcgtgacaacccctgtcccccctgatttcacatcggaattggtgccttcttacgactctgcaactttcgttctcgaaaatttctcgaccttgagacagcgtgctgatccagtctattctccccctctgcaggtcagtggactatgttggagactcaaggtttacccagacggcaatggagtcgtccgcggatactacttaagcgtgtttttggaactgagcgcagggctccctgagactagtaaatacgagtatcgcgtggagatggttcaccaatcatgcaatgacccgactaagaatatcattagggaatttgcctcagacttcgaagttggcgaatgctggggttacaatagattctttagactcgatcttcttgccaatgaagggtacctgaacccacagaacgatacagtgatcctgcgcttccaggtgcggtcccctaccttcttccagaagtcaagggaccaacactggtacatcacccagctcgaggccgctcagacaagctatatccagcagatcaataatctcaaagagcgtttgacaatcgagctctcccgcacacagaaatcacgcgacctatcaccacccgacaatcatttgagcccccagaacgatgacgccctcgaaactcgtgcgaaaaagtctgcatgctcggacatgctgcttgagggcggacctactacagcgtcggttcgcgaggccaaagaagacgaagaggatgaggagaagattcaaaacgaggattaccaccatgagctgtcagacggggacctggacctggatttggtgtacgaagacgaagtgaatcagctggacggatcatccagcagtgcctcttcaacagccacgagtaacacggaagaaaacgatatcgacgaggagacaatgtccggcgagaacgacgtggagtacaataatatggaattggaggagggtgagctgatggaagatgcagctgcagctgggccagctggttcttctcacggctacgtgggttcaagtagcaggatttcgaggagaacacacttgtgctcagccgcaacctcctctctgttagacattgacccattgatccttatccatttattggacctcaaggacaggtcatcaattgaaaatctgtgggggctccaaccaagaccacccgcttctctccttcagcccaccgcatcctattcacgcaaggacaaggatcagagaaaacagcaagcgatgtggcgggtaccctccgatctgaagatgctaaaacggctgaagacgcaaatggccgaggttcggtgtatgaaaacagacgtgaagaatacgctgtcagagattaaaagcagctccgccgcttccggggacatgcagacctcactcttttcagccgaccaggccgcactggcagcgtgcggaaccgagaatagtggacgccttcaggacctcgggatggagctcctggccaaatcgtcggtcgcaaactgctacatacgcaatagtacaaataagaagtccaattcacccaaaccagcccgttcaagcgttgctggttccctatccctcagaagagcagtagatcctggagaaaattctagaagcaagggggattgccagaccctgtcggaaggctcacccggatcttcccagtccgggtcacggcactcttcaccacgtgcattaattcacggttccataggcgatattctcccaaagactgaagatcggcaatgcaaagccctggatagcgatgcagtcgtcgttgctgttttctcaggactgcctgccgttgagaagcgccgaaagatggtaaccctaggcgcaaacgcgaaaggaggtcacctggaaggtctccagatgacggatctggagaataattccgaaaccggggagcttcagcctgtattaccagaaggggcttctgccgctcccgaagagggcatgagttccgatagcgatatcgagtgtgatacagagaacgaagaacaggaagagcacaccagcgttgggggtttccacgattcattcatggtcatgacccagccacccgatgaagacacacatagctcttttccagacggagagcagatcggacccgaggacctttctttcaacacagacgaaaactcgggcaggtag

SEQ ID NO: 185756 - protein, 1917 aa, Artificial Sequence
  derived and/or modified sequence
MAAADGGGPGGASVGTEEDGGGVGHRTVYLFDRREKESELGDRPLQVGERSDYAGFRACVCQTLGISPEEKFVITTTSRKEITCDNFDETVKDGVTLYLLQSVNQLLLTATKERIDFLPHYDTLVKSGMYEYYASEGQNPLPFALAELIDNSLSATSRNIGVRRIQIKLLFDETQGKPAVAVIDNGRGMTSKQLNNWAVYRLSKFTRQGDFESDHSGYVRPVPVPRSLNSDISYFGVGGKQAVFFVGQSARMISKPADSQDVHELVLSKEDFEKKEKNKEAIYSGYIRNRKPSDSVHITNDDERFLHHLIIEEKEKDSFTAVVITGVQPEHIQYLKNYFHLWTRQLAHIYHYYIHGPKGNEIRTSKEVEPFNNIDIEISMFEKGKVPKIVNLREIQDDMQTLYVNTAADSFEFKAHVEGDGVVEGIIRYHPFLYDRETYPDDPCFPSKLKDEDDEDDCFILEKAARGKRPIFECFWNGRLIPYTSVEDFDWCTPPKKRGLAPIECYNRISGALFTNDKFQVSTNKLTFMDLELKLKDKNTLFTRILNGQEQRMKIDREFALWLKDCHEKYDKQIKFTLFKGVITRPDLPSKKQGPWATYAAIEWDGKIYKAGQLVKTIKTLPLFYGSIVRFFLYGDHDGEVYATGGEVQIAMEPQALYDEVRTVPIAKLDRTVAEKAVKKYVEDEMARLPDRLSVTWPEGDELLPNEVRPAGTPIGALRIEILNKKGEAMQKLPGTSHGGSKKLLVELKVILHSSSGNKEIISHISQHGGKWPYWFKKMENIQKLGNYTLKLQVVLNESNADTYAGRPLPSKAIKFSVKEGKPEKFSFGLLDLPFRVGVPFNIPLEFQDEFGHTSQLVTDIQPVLEASGLSLHYEEITKGPNCVIRGVTAKGPVNSCQGKNYNLKVTLPGLKEDSQILKIRLLPGHPRRLKVKPDSEILVIENGTAFPFQVEVLDESDNITAQPKLIVHCKFSGAPNLPVYVVDCSSSGTSILTGSAIQVQNIKKDQTLKARIEIPSCKDVAPVEKTIKLLPSSHVARLQIFSVEGQKAIQIKHQDEVNWIAGDIMHNLIFQMYDEGEREINITSALAEKIKVNWTPEINKEHLLQGLLPDVQVPTSVKDMRYCQVSFQDDHVSLESAFTVRPLPDEPKHLKCEMKGGKTVQMGQELQGEVVIIITDQYGNQIQAFSPSSLSSLSIAGVGLDSSNLKTTFQENTQSISVRGIKFIPGPPGNKDLCFTWREFSDFIRVQLISGPPAKLLLIDWPELKESIPVINGRDLQNPIIVQLCDQWDNPAPVQHVKISLTKASNLKLMPSNQQHKTDEKGRANLGVFSVFAPRGEHTLQVKAIYNKSIIEGPIIKLMILPDPEKPVRLNVKYDKDASFLAGGLFTDFMISVISEDDSIIKNINPARISMKMWKLSTSGNRPPANAETFSCNKIKDNDKEDGCFYFRDKVIPNKVGTYCIQFGFMMDKTNILNSEQVIVEVLPNQPVKLVPKIKPPTPAVSNVRSVASRTLVRDLHLSITDDYDNHTGIDLVGTIIATIKGSNEEDTDTPLFIGKVRTLEFPFVNGSAEIMSLVLAESSPGRDSTEYFIVFEPRLPLLSRTLEPYILPFMFYNDVKKQQQMAALTKEKDQLSQSIVMYKSLFEASQQLLNEMKCQVEEARLKEAQLRNELKIHNIDIPTTQQVPHIEALLKRKLSEQEELKKKPRRSCTLPNYTKGSGDVLGKIAHLAQIEDDRAAMVISWHLASDMDCVVTLTTDAARRIYDETQGRQQVLPLDSIYKKTLPDWKRSLPHFRNGKLYFKPIGDPVFARDLLTFPDNVEHCETVFGMLLGDTIILDNLDAANHYRKEVVKITHCPTLLTRDGDRIRSNGKFGGLQNKAPPMDKLRGMVFGAPVPKQCLILGEQIVHACVPSYSGG

SEQ ID NO: 185757 - protein, 2005 aa, Artificial Sequence
  derived and/or modified sequence
MAAADGGGPGGASVGTEEDGGGVGHRTVYLFDRREKESELGDRPLQVGERSDYAGFRACVCQTLGISPEEKFVITTTSRKEITCDNFDETVKDGVTLYLLQSVNQLLLTATKERIDFLPHYDTLVKSGMYEYYASEGQNPLPFALAELIDNSLSATSRNIGVRRIQIKLLFDETQGKPAVAVIDNGRGMTSKQLNNWAVYRLSKFTRQGDFESDHSGYVRPVPVPRSLNSDISYFGVGGKQAVFFVGQSARMISKPADSQDVHELVLSKEDFEKKEKNKEAIYSGYIRNRKPSDSVHITNDDERFLHHLIIEEKEKDSFTAVVITGVQPEHIQYLKNYFHLWTRQLAHIYHYYIHGPKGNEIRTSKEVEPFNNIDIEISMFEKGKVPKIVNLREIQDDMQTLYVNTAADSFEFKAHVEGDGVVEGIIRYHPFLYDRETYPDDPCFPSKLKDEDDEDDCFILEKAARGKRPIFECFWNGRLIPYTSVEDFDWCTPPKKRGLAPIECYNRISGALFTNDKFQVSTNKLTFMDLELKLKDKNTLFTRILNGQEQRMKIDREFALWLKDCHEKYDKQIKFTLFKGVITRPDLPSKKQGPWATYAAIEWDGKIYKAGQLVKTIKTLPLFYGSIVRFFLYGDHDGEVYATGGEVQIAMEPQALYDEVRTVPIAKLDRTVAEKAVKKYVEDEMARLPDRLSVTWPEGDELLPNEVRPAGTPIGALRIEILNKKGEAMQKLPGTSHGGSKKLLVELKVILHSSSGNKEIISHISQHGGKWPYWFKKMENIQKLGNYTLKLQVVLNESNADTYAGRPLPSKAIKFSVKEGKPEKFSFGLLDLPFRVGVPFNIPLEFQDEFGHTSQLVTDIQPVLEASGLSLHYEEITKGPNCVIRGVTAKGPVNSCQGKNYNLKVTLPGLKEDSQILKIRLLPGHPRRLKVKPDSEILVIENGTAFPFQVEVLDESDNITAQPKLIVHCKFSGAPNLPVYVVDCSSSGTSILTGSAIQVQNIKKDQTLKARIEIPSCKDVAPVEKTIKLLPSSHVARLQIFSVEGQKAIQIKHQDEVNWIAGDIMHNLIFQMYDEGEREINITSALAEKIKVNWTPEINKEHLLQGLLPDVQVPTSVKDMRYCQVSFQDDHVSLESAFTVRPLPDEPKHLKCEMKGGKTVQMGQELQGEVVIIITDQYGNQIQAFSPSSLSSLSIAGVGLDSSNLKTTFQENTQSISVRGIKFIPGPPGNKDLCFTWREFSDFIRVQLISGPPAKLLLIDWPELKESIPVINGRDLQNPIIVQLCDQWDNPAPVQHVKISLTKASNLKLMPSNQQHKTDEKGRANLGVFSVFAPRGEHTLQVKAIYNKSIIEGPIIKLMILPDPEKPVRLNVKYDKDASFLAGGLFTDFMISVISEDDSIIKNINPARISMKMWKLSTSGNRPPANAETFSCNKIKDNDKEDGCFYFRDKVIPNKVGTYCIQFGFMMDKTNILNSEQVIVEVLPNQPVKLVPKIKPPTPAVSNVRSVASRTLVRDLHLSITDDYDNHTGIDLVGTIIATIKGSNEEDTDTPLFIGKVRTLEFPFVNGSAEIMSLVLAESSPGRDSTEYFIVFEPRLPLLSRTLEPYILPFMFYNDVKKQQQMAALTKEKDQLSQSIVMYKSLFEASQQLLNEMKCQVEEARLKEAQLRNELKIHNIDIPTTQQVPHIEALLKRKLSEQEELKKKPRRSCTLPNYTKGSGDVLGKIAHLAQIEDDRAAMVISWHLASDMDCVVTLTTDAARRIYDETQGRQQVLPLDSIYKKTLPDWKRSLPHFRNGKLYFKPIGDPVFARDLLTFPDNVEHCETVFGMLLGDTIILDNLDAANHYRKEVVKITHCPTLLTRDGDRIRSNGKFGGLQNKAPPMDKLRGMVFGAPVPKQCLILGEQIDLLQQYRSAVCKLDSVNKDLNSQLEYLRTPDMRKKKQELDEHEKNLKLIEEKLGMTPIRKCNDSLRHSPKVETTDCPVPPKRMRREATRQNRIITKTDV

SEQ ID NO: 185758 - DNA, 5754 bp, Artificial Sequence
  derived and/or modified sequence
atggccgccgcggacggcggtgggcccggtggcgccagtgtaggaacagaagaggacggcggcggcgtaggccacaggaccgtgtatctgtttgataggcgggagaaggaatccgagctcggggaccgccctctacaggtcggggagaggtccgactacgccggtttcagggcctgcgtgtgccagaccctcgggatcagcccggaagaaaagttcgtaatcaccacaacttcaaggaaagaaatcacatgtgacaatttcgacgaaactgttaaggatggtgtgactctatacctgctccagagcgtgaaccagctgttgttaaccgccactaaagagcgcatagacttcctccctcactatgacacactggtgaagtccgggatgtacgaatattatgcttctgaagggcaaaatcctctccctttcgcccttgctgaattaattgacaattcactaagcgccaccagcagaaacatcggggtgcgcagaatacagatcaagttgctcttcgacgaaacgcagggaaagcccgccgttgccgtgattgataatggtcgcggaatgacttccaaacaactgaacaactgggctgtgtatagactgagcaaatttaccaggcagggagactttgaaagcgatcactctggctacgttcgaccggtacctgtgccccgaagcttaaacagtgacatctcctattttggggtggggggtaagcaggccgtctttttcgtgggacagagtgccaggatgatttccaaacccgccgatagccaggacgtacatgagctggtcctttccaaagaagacttcgaaaagaaggagaagaataaggaggctatttactccgggtatattaggaataggaagccctcagactctgtgcatattacaaacgacgatgagagatttctccatcatctgattattgaggagaaagagaaagattcattcacggccgttgtcattacaggtgtacagcccgaacacatccaatatctgaaaaattatttccatttgtggactaggcaacttgcgcatatctaccattattacatccatggaccaaaggggaacgaaattaggacctctaaagaagtggagcctttcaacaacatcgacattgagataagcatgtttgagaaaggcaaggttccaaaaatagtgaatttgcgcgagattcaggacgatatgcagactctgtacgtgaatacagccgccgacagctttgaatttaaggcgcatgtggagggcgacggcgtggtcgaaggtatcattaggtaccatccgtttctctatgaccgggagacttaccctgacgacccatgcttcccttctaaactgaaagacgaagacgacgaggacgactgtttcattctcgagaaggcagccagaggcaagagacccatcttcgaatgcttctggaacggtaggctgattccttacacctctgtggaggactttgactggtgtactccgccaaaaaagagaggtctggcccctatagaatgttacaatcggatttcaggagctctgttcactaacgataaatttcaggtgtccactaacaagctgacctttatggaccttgagttgaagctcaaggacaagaacactctgttcacaagaatcctgaacggacaggaacagcggatgaagattgatagagagttcgccctgtggctaaaagactgccatgagaaatatgataagcagatcaagttcaccctctttaagggggttattacgcggccggacctgccaagtaagaagcagggtccatgggctacctacgcggctattgaatgggacggcaagatatataaggcaggtcagctggtcaaaacaatcaagaccctgccactcttttatggctctatagttaggttcttcctgtacggggatcacgacggagaagtctatgctacaggcggagaggttcaaattgcaatggagccgcaggcactttacgatgaggtgagaacagttccaatagccaagctggatcggactgtggccgaaaaggcagtcaaaaaatatgtggaagatgaaatggccaggcttcccgatagactgagtgtcacatggcctgaaggcgatgagctgcttcccaacgaggtgaggcctgccggcacccctattggcgcccttcgaatagagatccttaacaagaagggtgaggccatgcagaagctgcctggtacaagtcacggaggatcaaagaagttgctcgtagaattaaaggtgatcctgcacagcagctcgggaaataaggaaattatttcccatatcagtcaacacggcgggaagtggccatactggtttaagaagatggaaaacatacagaaactaggcaactataccctgaagctgcaggtggtcttaaacgagtctaacgccgacacatacgcagggagacccctcccaagcaaagcgatcaaattttcagtcaaggaaggcaaacctgagaagttttcatttggcctgctggacctcccctttcgagtgggagtgcccttcaatatcccgctagaattccaggacgagtttggacatacttctcagttggttacggatattcagcctgttcttgaggccagtggcttaagcctccactatgaggaaatcaccaaagggccaaattgcgtgatccgcggtgtaacagccaaaggccccgttaattcctgccaaggcaagaactacaacctgaaggtgactctgcctggactgaaagaggattcccagatcctcaagattagactcctgccaggccacccacgcagactgaaagtcaagcctgattccgagatactggtcatagaaaacggcaccgcctttccattccaggtcgaggtgctcgatgaatccgacaacatcaccgcccagccgaagcttattgtgcactgtaagttcagcggcgcaccaaatctgccggtttacgttgttgattgttcttcctccggtacctctatcctgacaggcagcgcaatacaagtgcagaatataaagaaggaccagactctgaaagcacgaattgaaatcccgtcttgcaaggacgtagctccggtcgagaaaactatcaagctgctgccctcatcccacgttgcccgccttcagattttctcagtcgaagggcagaaggccatccagatcaagcatcaggatgaagtgaactggatagcgggcgatattatgcacaatctaattttccagatgtacgatgaaggcgagcgggagattaatatcactagtgcactcgccgagaagataaaagtgaattggactcccgaaatcaacaaggaacatttactgcaaggtctgctgccagatgttcaggtgcctacctctgtgaaggacatgagatattgtcaggtaagcttccaagacgatcatgtctcgctagagagcgctttcactgtcaggccactacccgacgaaccaaaacacctgaaatgcgagatgaaaggcggaaaaacggttcaaatggggcaggaactccagggagaggtcgtcattatcatcaccgaccagtacggaaatcagattcaagctttctcgcctagctcgctatctagcctctctatcgctggcgtcggactggacagtagcaacctaaaaaccacattccaagaaaacactcaatcaatttccgtacgcgggatcaagttcatacctggccctcccggaaacaaggacctgtgtttcacctggcgagaattttcagacttcatccgggtgcaattgatctctggaccccccgccaaactgttattgatcgactggccagaactgaaggagtcaattcctgtaatcaatggcagagatcttcagaacccgatcatcgttcagctgtgcgatcaatgggataacccagctcccgtgcaacacgtgaagataagcctaacaaaggcttcgaacttgaagcttatgccctcaaatcagcagcacaaaacagatgaaaaaggtcgcgctaaccttggcgtgttctccgtgttcgcacccagaggagaacacactctccaggtgaaggctatttataacaagtcaattatcgaaggtcccatcattaagttaatgatcctaccggatccagaaaaaccagtcagattgaacgtgaaatacgacaaggatgcatccttcttagccgggggactctttacagactttatgatctcagtgatttccgaggatgatagcataattaaaaatattaacccagccaggattagcatgaaaatgtggaaactgtcaactagtggtaaccgaccaccagctaatgcagaaaccttttcttgtaataaaatcaaggataacgataaggaggacggttgcttctacttccgcgacaaagtcattcccaataaagtgggaacctactgtattcaatttgggttcatgatggacaaaactaatatattgaattctgagcaagtgattgtggaggtacttccaaaccaacccgtgaagctggttccaaaaatcaagccccccaccccggccgtaagcaatgtgaggagcgtggcctcccggacactggtgcgagacttgcacctcagtattactgacgactacgacaaccacacaggaattgatctggtagggaccataatagctaccatcaaaggctcaaacgaagaggacactgacactcccttgttcattggcaaagtccgaacactggagtttccttttgtgaacggttccgccgagatcatgtccttagtcttagccgagtccagccctggtagagacagcacagagtactttatcgttttcgagccaaggctgcccctgctctcaagaaccctggagccctatatcctgccattcatgttttataatgacgtgaaaaaacagcagcagatggctgccctgaccaaggaaaaagatcaacttagccagtcgatcgtgatgtataaaagcctttttgaagccagtcagcagctgctgaatgaaatgaagtgtcaggtagaagaggccagactcaaggaggctcaactgaggaacgaactcaaaattcacaacattgacatccccacaacccagcaagtgccacatatcgaggccctactgaaacggaaactctccgaacaagaagaactcaaaaagaagccaagacgttcatgcacactcccaaattacaccaagggttctggagacgtcctcggtaaaatcgctcaccttgctcagattgaagacgatcgcgccgccatggtcatctcatggcacctcgcctcagatatggactgtgtcgttaccttaactactgacgccgctcggcggatttatgatgagacgcagggacggcagcaggtgctgcccctcgactcaatctataaaaagaccctgcctgattggaagcggtctctcccccacttcagaaacggcaaactgtacttcaagcccatcggagatcccgtgttcgcacgcgatcttctcacattcccagacaacgtggaacattgtgaaactgttttcggcatgctgcttggagacacaatcattttggacaatcttgacgcggcgaaccattataggaaggaagttgtcaagatcacccattgtccaaccctgctcacaagagatggggaccggatccgtagtaacggaaagtttggcgggctacagaacaaggcccccccaatggataagctcagggggatggtgttcggcgcaccagttcccaagcaatgcctcatactgggtgaacagatcgtccacgcctgcgtgccgtcttattcgggcgggtag

SEQ ID NO: 185759 - DNA, 6018 bp, Artificial Sequence
  derived and/or modified sequence
atggctgcagccgacggcggggggccaggaggcgcctccgtgggaaccgaggaggacggtggcggagtgggtcatcggacagtttatctttttgaccggagagagaaagagtcggaactgggtgatcgtcccctacaggttggtgaaaggagcgattatgccggctttcgtgcctgtgtttgtcaaaccttgggcatatctccagaggagaagtttgtgattaccaccacgagcaggaaggaaattacttgcgataatttcgatgaaaccgttaaggacggtgtcacattgtaccttctgcagtccgtgaatcaactgttactgacagccacgaaagagcggatcgactttctgccccactacgatactctggtcaaatcggggatgtatgagtattatgccagcgagggccaaaaccccctgcccttcgcgctggctgaacttatcgataattccttatctgctacttctcgaaatattggtgttagaaggatccagataaagttgctgttcgacgagacgcaggggaaaccagccgtggctgtcatcgataacggccgtggaatgacctcaaaacagttaaataactgggccgtctaccgactttccaaatttactcgacaaggagattttgagtctgaccactccggatatgtgcggcctgttcctgtgccccgatccctgaatagtgatatctcatacttcggcgttggggggaagcaggccgttttctttgtgggccagagcgcccgaatgatctccaagcccgctgattcccaagatgtccacgagctcgttctgtccaaagaagattttgaaaaaaaagaaaagaataaggaggcgatctactcaggatacattaggaacagaaagccttccgactccgtccacattaccaatgatgatgaacgattcctccaccacctgattatagaagaaaaagagaaggatagcttcacagctgttgtaattaccggggtgcaacccgaacacatacagtatctaaaaaattactttcatctctggacccggcagctggctcatatctatcattattacatccacggcccaaagggaaatgagataagaacttctaaggaagttgaaccctttaataatatagatatcgagatctcgatgttcgagaaaggaaaggtgcctaaaatcgttaatctacgggagattcaggacgatatgcaaaccctctatgtgaacacggccgccgacagtttcgagttcaaggcgcacgtggaaggagatggtgtagttgagggtataatccggtatcacccttttctttacgatcgggagacttatccggatgatccatgctttccttcaaaacttaaagacgaggacgacgaagatgactgtttcattctggaaaaagcagcacgcggtaaaagacccatcttcgagtgtttttggaatgggaggctcataccctacacgagtgtggaagatttcgactggtgtactcccccaaaaaaaagaggccttgcgccaatcgaatgttacaataggatctccggagctctgttcacgaacgataagttccaggtgtcaactaacaaattgacattcatggacctggagcttaagctcaaggataagaacactctctttacccggatcctgaacgggcaggaacagcgtatgaaaatcgatagggagtttgctctgtggttgaaagattgtcacgagaagtatgataaacagataaagtttacgttattcaaaggagtgatcacacggcctgacctgccgagtaagaagcagggtccttgggccacttacgcagcaatcgagtgggacgggaagatctacaaggccggccagctggtgaagactattaagactctccccctcttttatggcagcatcgttcgtttcttcctgtatggggatcacgatggcgaggtgtacgcaactggcggggaggtccagatcgcaatggagccacaagccctgtacgatgaagtgagaaccgtcccaatcgctaagcttgacagaacagtcgctgagaaggccgtaaaaaagtacgtcgaagacgaaatggcaagattgcctgatagactgtctgtcacctggcccgaaggggacgaattactccccaatgaggttcgcccagctggcacacctatcggggctttaaggattgagattctgaacaagaagggcgaagctatgcagaaattgccaggtacgtcccatggagggtcaaaaaagctgctcgtagagctgaaagtgatcctccactcaagcagtgggaacaaggaaataatatcccacatttcccagcatggaggaaagtggccctattggttcaagaaaatggaaaacatccagaaactgggaaactacacactgaagcttcaggtcgtgttgaatgaaagcaatgcagacacatacgctggccgcccgctcccaagtaaagcgatcaagttttcagtgaaggagggaaagcccgaaaagttctcctttgggctgctcgacttaccattcagagtgggagtgccctttaatatcccactcgaattccaggacgagttcggccatacaagccagctggtcaccgatatccagcctgtgctcgaagcgagcgggctgtccctccattacgaagagatcaccaaaggcccaaactgtgttattcggggagtgaccgccaagggcccagtgaacagttgccagggaaagaattacaacttaaaggtgacactgcccgggctgaaagaagacagtcagatactcaagatccgcctgcttccgggtcatcctcggcggctcaaggtcaagcctgattcggagattctggttatcgaaaatggcacagcttttccgttccaagtggaggtgctggatgagagcgacaatattactgcccagcccaaacttatcgtccattgtaaattttccggcgcacctaacttaccagtgtacgttgttgattgtagttcaagtgggacttcgatattgactgggtcagcgattcaggttcaaaacatcaaaaaggaccagaccttaaaggcaaggatcgagataccttcttgcaaagacgttgcccctgtggaaaaaaccatcaaactgttgcctagctctcacgtcgctaggctccagattttctccgttgagggccagaaagccatccagataaaacaccaggatgaagtaaattggatcgctggcgatattatgcataatctcattttccaaatgtatgacgagggcgagcgagaaatcaacattacttctgccttggcagagaaaattaaggtgaactggacccccgagatcaacaaagaacatcttctgcaaggcctcctgccagacgtgcaagtgcccacttcggtcaaagatatgaggtattgccaggtttccttccaggacgaccatgtgtccttggagtcagctttcacagttcgcccattacccgacgaaccaaaacacttaaagtgtgagatgaagggaggcaaaaccgtgcagatgggacaggaactgcagggagaagtagtgatcattattactgatcagtacggtaatcagatacaggcattttcgcccagctccctttccagtctttcgattgctggcgtggggctcgattcctcaaacctgaaaactaccttccaggaaaatactcagtctatcagcgtgaggggtattaagttcatccccggacctccgggaaataaggacttgtgcttcacctggcgagaattcagtgacttcattagggtccagctcatttctgggccccccgccaaattactcctgatcgactggcctgaactgaaggagagcatcccagtgatcaacggccgcgacttacaaaaccctattatcgtacaactgtgtgaccagtgggacaaccctgcaccagtgcagcacgtaaagatcagcctaacgaaagcttctaatctgaaactcatgccctccaaccagcagcataaaactgatgaaaaggggagggccaacctgggggtcttctccgtcttcgctccccgaggggaacacaccctacaagtgaaagccatttataacaaaagtataatagaggggcctattatcaagctgatgatcctcccagatcctgaaaagcccgtgagactcaacgtcaagtacgacaaagatgcctccttcctcgcaggtggcctcttcacggatttcatgatttccgtcattagtgaggatgactccatcataaaaaacattaaccccgccaggatttctatgaaaatgtggaaactatcaacaagtggaaatcgacctcccgccaatgcagaaaccttcagttgtaacaagatcaaggacaatgacaaggaggatggatgtttctattttcgggacaaggtgatccctaacaaggttgggacatattgtattcagttcggcttcatgatggacaaaactaatattttgaactcagagcaagtaattgtcgaggtgctcccgaatcagccagtgaaattggtgcccaagattaaacctccaactccagccgtgtcaaatgttcggagcgtggctagcagaactttggtcagggaccttcacctcagcatcaccgacgactacgataaccacactggcatcgacttggtgggaaccattatagctaccatcaagggctccaacgaagaggacacagacaccccacttttcatcgggaaggttcggactctggagttcccttttgttaatgggtccgctgagatcatgtccttggtcctggcggaatcttcacctgggcgggactccacagagtacttcatcgtctttgagccacgactgcccctgctgtcaagaaccctagagccttatatcctgccatttatgttctacaatgatgtgaagaaacagcagcaaatggccgccttgaccaaagagaaggaccagctgagccagagtatcgtcatgtacaagtctctcttcgaggctagccagcagctgttgaacgaaatgaagtgtcaggtagaggaagcccggctcaaggaggcacagctcagaaacgaattgaaaatccacaatattgatattccaactacccagcaagtgccccacattgaggccctgttaaaaagaaagctgagcgaacaggaggagctcaagaaaaagccacgcagatcctgtacactccccaattacaccaaaggatccggcgatgtactcggtaagatcgcgcatttagcccaaatcgaggacgatcgtgcggcaatggttatctcctggcacttggccagcgatatggattgtgtggtgaccctcactacagacgccgctaggagaatttatgacgaaacccagggtcgtcaacaggtgttgcccctggatagcatctataagaagaccctacctgactggaagcggtccctgccacattttcgtaacggcaagctgtacttcaagcctatcggagacccggtgtttgccagagatcttctgactttcccagacaacgtagagcactgcgagacggtgtttggcatgctcctgggggacactattatactagacaatctggacgccgcgaatcactacaggaaagaggtggtcaaaattacacactgccccactctcctgacccgcgacggcgatcgcattcggagtaacggtaaatttggcggacttcagaataaggcccctcctatggataaactgcggggcatggtgtttggggcgcccgtccctaaacaatgtcttatcctgggggagcagatcgatctgctgcagcagtaccgctctgccgtctgtaagttagacagtgtcaacaaggacttgaacagccagttggaataccttcgaacacctgacatgcgcaagaagaaacaggagctggatgagcacgaaaagaatctgaagctgatcgaggagaaattggggatgacaccaattaggaagtgcaatgatagccttcggcactctccaaaggtcgaaacaaccgattgccctgtgccacctaaacggatgcgaagagaggctacccgccagaaccgtatcattacaaagacagatgtgtag

SEQ ID NO: 185760 - DNA, 5754 bp, Artificial Sequence
  derived and/or modified sequence
atggctgctgctgatggcggcggccctggaggagcctctgtgggcacagaggaggatggcggcggcgtgggccacaggacagtgtacctgtttgacagaagagagaaggagagcgagctgggggaccggcccctgcaggtgggggagaggagtgactatgccggcttccgggcctgtgtgtgccagaccctgggcatcagccctgaggagaagtttgtgatcaccaccaccagcaggaaggagatcacctgtgacaactttgatgagaccgtgaaggatggagtgaccctgtacctgctgcagagcgtgaaccagctgctgctgacagccaccaaggagagaattgacttcctgccccactatgacaccctggtgaagagcggcatgtatgagtactatgccagcgagggccagaaccccctgccctttgccctggccgagctgattgacaacagcctgagcgccaccagcaggaacatcggcgtgcggcgcatccagatcaagctgctgtttgatgagacccagggcaagccagctgtggccgtgattgacaatggccggggcatgaccagcaagcagctgaacaactgggccgtgtaccgcctgagcaagttcacccggcagggcgactttgaaagtgaccacagcggctacgtgcggcctgtgcctgtgcccaggagcctgaacagcgacatctcctactttggagtgggcggcaagcaggccgtgttctttgtgggccagagcgccaggatgatcagcaagccagctgacagccaggatgtgcatgagctggtgctgagcaaggaggactttgagaagaaggagaagaacaaggaggccatctacagcggctacatccggaacaggaagcccagcgacagcgtgcacatcaccaatgatgatgagcgcttcctgcaccacctgatcatcgaggagaaggagaaggacagcttcaccgctgtggtgatcactggagtgcagcctgagcacatccagtacctgaagaactacttccacctgtggacccggcagctggcccacatctaccactactacatccacggccccaagggaaatgagatccgcaccagcaaggaggtggagcccttcaacaacatcgacatcgagatctccatgtttgagaagggcaaggtgcccaagatcgtgaacctgcgggagatccaggatgacatgcagaccctgtatgtgaacacagctgctgacagctttgagttcaaggcccacgtggagggagatggagtggtggagggcatcatccgctaccaccccttcctgtatgaccgggagacctacccagatgacccctgcttccccagcaagctgaaggatgaagatgatgaagatgactgcttcatcctggagaaggccgcccggggcaagaggcccatctttgagtgcttctggaatggccgcctcatcccctacacctctgtggaggactttgactggtgcaccccacccaagaagaggggcctggcccccatcgagtgctacaaccgcatcagcggggccctcttcaccaatgacaagttccaggtgtccaccaacaagctgaccttcatggacctggagctgaagctgaaggacaagaacaccctcttcacccgcatcctgaatggccaggagcagaggatgaagattgaccgggagtttgccctgtggctgaaggactgccacgagaagtatgacaagcagatcaagttcaccctcttcaagggcgtcatcaccaggccagacctgcccagcaagaagcagggcccctgggccacctacgccgccatcgagtgggatggcaagatctacaaggccggccagctggtgaagaccatcaagaccctgcccctcttctacggcagcatcgtgcgcttcttcctgtatggagaccatgatggagaggtgtatgccaccggcggggaggtgcagatcgccatggagccccaggccctgtatgatgaggtgaggacagtgcccatcgccaagctggacagaacagtggccgagaaggctgtgaagaagtatgtggaggatgagatggcccggctgcctgaccggctgtctgtgacctggccagaaggagatgagctgctgcccaatgaggtgcggcctgctggcacccccatcggggccctgcgcatcgagatcctgaacaagaagggggaggccatgcagaagctgcccggcaccagccacggcggcagcaagaagctgctggtggagctgaaggtgatcctgcacagcagcagcggcaacaaggagatcatcagccacatcagccagcacggcggcaagtggccctactggttcaagaagatggagaacatccagaagctgggcaactacaccctgaagctgcaggtggtgctgaatgaaagcaatgctgacacctacgccggccggcccctgcccagcaaggccatcaagttctctgtgaaggagggcaagccagagaagttctcctttggcctgctggacctgcccttccgggtgggcgtgcccttcaacatccccctggagttccaggatgaatttggccacaccagccagctggtgacagacatccagcctgtgctggaggccagcggcctgagcctgcactatgaggagatcaccaagggccccaactgtgtgatccggggcgtgacagccaagggccctgtgaacagctgccagggcaagaactacaacctgaaggtgaccctgcccggcctgaaggaggacagccagatcctgaagatccggctgctgcccggccacccccggcggctgaaggtgaagccagacagcgagatcctggtgattgaaaatggaacagccttccccttccaggtggaggtgctggatgaaagtgacaacatcacagcccagcccaagctgattgtgcactgcaagttcagcggggcccccaacctgcctgtgtatgtggtggactgcagcagcagcggcaccagcatcctgaccggcagcgccatccaggtgcagaacatcaagaaggaccagaccctgaaggccagaattgagatccccagctgcaaggatgtggcccctgtggagaagaccatcaagctgctgcccagcagccacgtggcccggctgcagatcttctctgtggagggccagaaggccatccagatcaagcaccaggatgaggtgaactggattgctggggacatcatgcacaacctgatcttccagatgtatgatgaaggagagcgggagatcaacatcaccagcgccctggccgagaagatcaaggtgaactggaccccagagatcaacaaggagcacctgctgcagggcctgctgcctgatgtgcaggtgcccacctctgtgaaggacatgagatactgccaggtgtccttccaggatgaccacgtgtccctggagagcgccttcaccgtgcggcccctgcctgatgagcccaagcacctgaagtgtgagatgaagggcggcaagacagtgcagatgggccaggagctgcagggcgaggtggtgatcatcatcacagaccagtatggcaaccagatccaggccttcagccccagcagcctgagcagcctgagcattgctggggtgggcctggacagcagcaacctgaagaccaccttccaggagaacacccagagcatctctgtgcggggcatcaagttcatccctggccccccaggcaacaaggacctgtgcttcacctggagggagttcagtgacttcatccgggtgcagctgatcagcggccccccagccaagctgctgctgattgactggccagagctgaaggagagcatccctgtgatcaatggccgggacctgcagaaccccatcatcgtgcagctgtgtgaccagtgggacaacccagcccctgtgcagcacgtgaagatcagcctgaccaaggccagcaacctgaagctgatgcccagcaaccagcagcacaagacagatgagaagggccgggccaacctgggcgtcttctctgtgtttgcccccagaggagagcacaccctgcaggtgaaggccatctacaacaagagcatcatcgagggccccatcatcaagctgatgatcctgcctgaccctgagaagcctgtgcggctgaatgtgaagtatgacaaggatgccagcttcctggccggcggcctcttcacagacttcatgatcagcgtcatcagtgaagatgacagcatcatcaagaacatcaacccagcccgcatctccatgaagatgtggaagctgagcaccagcggcaaccggcccccagccaatgctgagaccttcagctgcaacaagatcaaggacaatgacaaggaggatggctgcttctacttccgggacaaggtgatccccaacaaggtgggcacctactgcatccagtttggcttcatgatggacaagaccaacatcctgaacagcgagcaggtgattgtggaggtgctgcccaaccagcctgtgaagctggtgcccaagatcaagccacccaccccagctgtgtccaatgtgcgctctgtggccagcaggaccctggtgcgggacctgcacctgagcatcacagatgattatgacaaccacactggaattgacctggtgggcaccatcatcgccaccatcaagggcagcaatgaggaggacacagacacccccctcttcatcggcaaggtgaggaccctggagttcccctttgtgaatggatctgctgagatcatgagcctggtgctggccgagagcagccctggccgggacagcacagagtacttcatcgtgtttgagccccggctgcccctgctgagcaggaccctggagccctacatcctgcccttcatgttctacaatgatgtgaagaagcagcagcagatggccgccctgaccaaggagaaggaccagctgagccagagcatcgtgatgtacaagagcctgtttgaggccagccagcagctgctgaatgagatgaagtgccaggtggaggaggcccggctgaaggaggcccagctgagaaatgagctgaagatccacaacatcgacatccccaccacccagcaggtgccccacatcgaggccctgctgaagaggaagctgtctgagcaggaggagctgaagaagaagcccaggaggagctgcaccctgcccaactacaccaagggcagcggagatgtgctgggcaagatcgcccacctggcccagattgaagatgacagagctgccatggtgatctcctggcacctggccagtgacatggactgtgtggtgaccctgaccacagatgctgcccggcgcatctatgatgagacccagggccggcagcaggtgctgcccctggacagcatctacaagaagaccctgcctgactggaagaggagcctgccccacttcagaaatggcaagctgtacttcaagcccatcggggaccctgtgtttgcccgggacctgctgaccttcccagacaacgtggagcactgtgaaacagtgtttggcatgctgctgggggacaccatcatcctggacaacctggatgctgccaaccactacaggaaggaggtggtgaagatcacccactgccccaccctgctgaccagagatggagaccgcatccgcagcaatggcaagtttggaggcctgcagaacaaggccccacccatggacaagctgcggggcatggtgtttggagcccctgtgcccaagcagtgcctgatcctgggggagcagatcgtgcacgcctgtgtgcccagctacagcggcggctag

SEQ ID NO: 185761 - DNA, 6018 bp, Artificial Sequence
  derived and/or modified sequence
atggctgctgctgatggcggcggccctggaggagcctctgtgggcacagaggaggatggcggcggcgtgggccacaggacagtgtacctgtttgacagaagagagaaggagagcgagctgggggaccggcccctgcaggtgggggagaggagtgactatgccggcttccgggcctgtgtgtgccagaccctgggcatcagccctgaggagaagtttgtgatcaccaccaccagcaggaaggagatcacctgtgacaactttgatgagaccgtgaaggatggagtgaccctgtacctgctgcagagcgtgaaccagctgctgctgacagccaccaaggagagaattgacttcctgccccactatgacaccctggtgaagagcggcatgtatgagtactatgccagcgagggccagaaccccctgccctttgccctggccgagctgattgacaacagcctgagcgccaccagcaggaacatcggcgtgcggcgcatccagatcaagctgctgtttgatgagacccagggcaagccagctgtggccgtgattgacaatggccggggcatgaccagcaagcagctgaacaactgggccgtgtaccgcctgagcaagttcacccggcagggcgactttgaaagtgaccacagcggctacgtgcggcctgtgcctgtgcccaggagcctgaacagcgacatctcctactttggagtgggcggcaagcaggccgtgttctttgtgggccagagcgccaggatgatcagcaagccagctgacagccaggatgtgcatgagctggtgctgagcaaggaggactttgagaagaaggagaagaacaaggaggccatctacagcggctacatccggaacaggaagcccagcgacagcgtgcacatcaccaatgatgatgagcgcttcctgcaccacctgatcatcgaggagaaggagaaggacagcttcaccgctgtggtgatcactggagtgcagcctgagcacatccagtacctgaagaactacttccacctgtggacccggcagctggcccacatctaccactactacatccacggccccaagggaaatgagatccgcaccagcaaggaggtggagcccttcaacaacatcgacatcgagatctccatgtttgagaagggcaaggtgcccaagatcgtgaacctgcgggagatccaggatgacatgcagaccctgtatgtgaacacagctgctgacagctttgagttcaaggcccacgtggagggagatggagtggtggagggcatcatccgctaccaccccttcctgtatgaccgggagacctacccagatgacccctgcttccccagcaagctgaaggatgaagatgatgaagatgactgcttcatcctggagaaggccgcccggggcaagaggcccatctttgagtgcttctggaatggccgcctcatcccctacacctctgtggaggactttgactggtgcaccccacccaagaagaggggcctggcccccatcgagtgctacaaccgcatcagcggggccctcttcaccaatgacaagttccaggtgtccaccaacaagctgaccttcatggacctggagctgaagctgaaggacaagaacaccctcttcacccgcatcctgaatggccaggagcagaggatgaagattgaccgggagtttgccctgtggctgaaggactgccacgagaagtatgacaagcagatcaagttcaccctcttcaagggcgtcatcaccaggccagacctgcccagcaagaagcagggcccctgggccacctacgccgccatcgagtgggatggcaagatctacaaggccggccagctggtgaagaccatcaagaccctgcccctcttctacggcagcatcgtgcgcttcttcctgtatggagaccatgatggagaggtgtatgccaccggcggggaggtgcagatcgccatggagccccaggccctgtatgatgaggtgaggacagtgcccatcgccaagctggacagaacagtggccgagaaggctgtgaagaagtatgtggaggatgagatggcccggctgcctgaccggctgtctgtgacctggccagaaggagatgagctgctgcccaatgaggtgcggcctgctggcacccccatcggggccctgcgcatcgagatcctgaacaagaagggggaggccatgcagaagctgcccggcaccagccacggcggcagcaagaagctgctggtggagctgaaggtgatcctgcacagcagcagcggcaacaaggagatcatcagccacatcagccagcacggcggcaagtggccctactggttcaagaagatggagaacatccagaagctgggcaactacaccctgaagctgcaggtggtgctgaatgaaagcaatgctgacacctacgccggccggcccctgcccagcaaggccatcaagttctctgtgaaggagggcaagccagagaagttctcctttggcctgctggacctgcccttccgggtgggcgtgcccttcaacatccccctggagttccaggatgaatttggccacaccagccagctggtgacagacatccagcctgtgctggaggccagcggcctgagcctgcactatgaggagatcaccaagggccccaactgtgtgatccggggcgtgacagccaagggccctgtgaacagctgccagggcaagaactacaacctgaaggtgaccctgcccggcctgaaggaggacagccagatcctgaagatccggctgctgcccggccacccccggcggctgaaggtgaagccagacagcgagatcctggtgattgaaaatggaacagccttccccttccaggtggaggtgctggatgaaagtgacaacatcacagcccagcccaagctgattgtgcactgcaagttcagcggggcccccaacctgcctgtgtatgtggtggactgcagcagcagcggcaccagcatcctgaccggcagcgccatccaggtgcagaacatcaagaaggaccagaccctgaaggccagaattgagatccccagctgcaaggatgtggcccctgtggagaagaccatcaagctgctgcccagcagccacgtggcccggctgcagatcttctctgtggagggccagaaggccatccagatcaagcaccaggatgaggtgaactggattgctggggacatcatgcacaacctgatcttccagatgtatgatgaaggagagcgggagatcaacatcaccagcgccctggccgagaagatcaaggtgaactggaccccagagatcaacaaggagcacctgctgcagggcctgctgcctgatgtgcaggtgcccacctctgtgaaggacatgagatactgccaggtgtccttccaggatgaccacgtgtccctggagagcgccttcaccgtgcggcccctgcctgatgagcccaagcacctgaagtgtgagatgaagggcggcaagacagtgcagatgggccaggagctgcagggcgaggtggtgatcatcatcacagaccagtatggcaaccagatccaggccttcagccccagcagcctgagcagcctgagcattgctggggtgggcctggacagcagcaacctgaagaccaccttccaggagaacacccagagcatctctgtgcggggcatcaagttcatccctggccccccaggcaacaaggacctgtgcttcacctggagggagttcagtgacttcatccgggtgcagctgatcagcggccccccagccaagctgctgctgattgactggccagagctgaaggagagcatccctgtgatcaatggccgggacctgcagaaccccatcatcgtgcagctgtgtgaccagtgggacaacccagcccctgtgcagcacgtgaagatcagcctgaccaaggccagcaacctgaagctgatgcccagcaaccagcagcacaagacagatgagaagggccgggccaacctgggcgtcttctctgtgtttgcccccagaggagagcacaccctgcaggtgaaggccatctacaacaagagcatcatcgagggccccatcatcaagctgatgatcctgcctgaccctgagaagcctgtgcggctgaatgtgaagtatgacaaggatgccagcttcctggccggcggcctcttcacagacttcatgatcagcgtcatcagtgaagatgacagcatcatcaagaacatcaacccagcccgcatctccatgaagatgtggaagctgagcaccagcggcaaccggcccccagccaatgctgagaccttcagctgcaacaagatcaaggacaatgacaaggaggatggctgcttctacttccgggacaaggtgatccccaacaaggtgggcacctactgcatccagtttggcttcatgatggacaagaccaacatcctgaacagcgagcaggtgattgtggaggtgctgcccaaccagcctgtgaagctggtgcccaagatcaagccacccaccccagctgtgtccaatgtgcgctctgtggccagcaggaccctggtgcgggacctgcacctgagcatcacagatgattatgacaaccacactggaattgacctggtgggcaccatcatcgccaccatcaagggcagcaatgaggaggacacagacacccccctcttcatcggcaaggtgaggaccctggagttcccctttgtgaatggatctgctgagatcatgagcctggtgctggccgagagcagccctggccgggacagcacagagtacttcatcgtgtttgagccccggctgcccctgctgagcaggaccctggagccctacatcctgcccttcatgttctacaatgatgtgaagaagcagcagcagatggccgccctgaccaaggagaaggaccagctgagccagagcatcgtgatgtacaagagcctgtttgaggccagccagcagctgctgaatgagatgaagtgccaggtggaggaggcccggctgaaggaggcccagctgagaaatgagctgaagatccacaacatcgacatccccaccacccagcaggtgccccacatcgaggccctgctgaagaggaagctgtctgagcaggaggagctgaagaagaagcccaggaggagctgcaccctgcccaactacaccaagggcagcggagatgtgctgggcaagatcgcccacctggcccagattgaagatgacagagctgccatggtgatctcctggcacctggccagtgacatggactgtgtggtgaccctgaccacagatgctgcccggcgcatctatgatgagacccagggccggcagcaggtgctgcccctggacagcatctacaagaagaccctgcctgactggaagaggagcctgccccacttcagaaatggcaagctgtacttcaagcccatcggggaccctgtgtttgcccgggacctgctgaccttcccagacaacgtggagcactgtgaaacagtgtttggcatgctgctgggggacaccatcatcctggacaacctggatgctgccaaccactacaggaaggaggtggtgaagatcacccactgccccaccctgctgaccagagatggagaccgcatccgcagcaatggcaagtttggaggcctgcagaacaaggccccacccatggacaagctgcggggcatggtgtttggagcccctgtgcccaagcagtgcctgatcctgggggagcagattgacctgctgcagcagtacagatctgctgtgtgcaagctggacagcgtgaacaaggacctgaacagccagctggagtacctgcggaccccagacatgaggaagaagaagcaggagctggatgagcacgagaagaacctgaagctgattgaggagaagctgggcatgacccccatcaggaagtgcaatgacagcctgcggcacagccccaaggtggagaccacagactgccctgtgccccccaagaggatgaggcgggaggccacccggcagaaccgcatcatcaccaagacagatgtgtag

SEQ ID NO: 185762 - DNA, 5754 bp, Artificial Sequence
  derived and/or modified sequence
atggccgccgccgacggcggcggccccggcggcgccagcgtgggcaccgaggaagatggcggtggagtggggcaccgtacggtgtatctgtttgatcggcgggagaaggaatccgagctgggcgaccggccacttcaggtgggggagcggtcagactatgcaggctttcgggcttgtgtttgtcagaccctcgggatcagtccagaggaaaaattcgtcatcacaactacctctagaaaggaaataacttgtgacaatttcgacgagactgtgaaagatggagtgaccctatatttactgcagagcgtcaaccaactattactgaccgccactaaagagagaatcgatttcttaccccactatgacactctggttaaatccggcatgtatgaatattatgcctctgaggggcaaaatccgctgccctttgcacttgctgaactgatcgacaattccctgtcagcaactagccgcaatatcggcgtgagacgcatccagattaagctgcttttcgacgagacacaggggaagccagcagtggcagtaatagataatggtaggggcatgactagtaagcaactcaacaactgggctgtgtacaggctgtccaagttcaccaggcagggagactttgagtctgatcacagcggttacgtccgtccagtacccgttccaaggtccctaaattcagacatatcctattttggcgtcggaggaaaacaggccgtcttctttgtgggacagtccgcccggatgataagtaaacccgctgattctcaagatgtgcatgaactggtccttagcaaagaagatttcgaaaagaaagaaaaaaataaggaagctatttatagcgggtacatacgtaatcgaaagccctcagacagtgtgcatattacgaacgatgatgagcgctttttgcaccacttgataatagaggagaaggaaaaggattccttcacggccgtagtaattaccggcgtgcagccagagcatatccagtacctcaagaactattttcatctgtggacacgacagctcgcccacatttatcattactacatccacgggcctaagggaaacgagataaggacctctaaggaggtagaaccattcaacaacattgacatcgaaatatctatgttcgagaaaggtaaagtgcccaaaatcgtgaatttgagagaaatccaggacgacatgcagacactgtatgttaacacagccgccgacagttttgaattcaaagcccatgtcgaaggtgatggtgtggtggaggggattattcgatatcatcctttcctgtatgatagggagacttatcccgacgatccttgttttccctcaaagctgaaggatgaggacgacgaagatgattgctttattttggaaaaggctgctcgcggtaagaggcccatattcgaatgcttttggaacggacgactaatcccttacacgagtgtcgaggatttcgactggtgcacaccgccaaaaaaacgcggcctcgcccctatcgagtgctacaataggatctccggcgccttatttaccaacgacaaattccaggtaagtacaaacaagctgaccttcatggatctagagctcaagctgaaggataaaaacactttgtttacgagaattctgaatggtcaggaacagagaatgaagattgacagagagttcgctctgtggctgaaagattgtcacgagaagtatgataaacaaataaaattcacactctttaagggggtgattacacgtcctgatctgccatctaagaaacaagggccctgggctacatacgcagccatcgagtgggacgggaagatctacaaagccggacagctggtcaagacaattaagactttgcccttgttttatggcagcattgtgcgatttttcttgtatggggaccatgatggagaggtgtacgcgaccggaggggaggtgcagatagcaatggagcctcaagccctctacgatgaggttcgtaccgttccgattgccaagctggatcgcacagttgccgaaaaagcggtcaaaaaatatgtggaagacgagatggctaggttgccagacagattgtccgtcacttggccggaaggagacgagctgctgcccaacgaggtaagaccagcagggaccccaattggggctcttcgaattgagatactgaacaagaaaggcgaagccatgcagaaacttccaggtacctcacacggaggcagtaaaaaactgctcgtcgagctgaaggtgattctgcactctagctccgggaataaagaaattattagccacataagtcaacatggcggaaaatggccatattggtttaaaaagatggagaatattcagaagctgggtaattataccctcaaactgcaagtggttcttaatgagtccaacgctgatacttacgctggcaggcctctcccctctaaagctatcaagttctctgtaaaagaaggcaaacccgagaagttttcattcgggctgcttgacctcccattcagggttggggtacctttcaacataccactggagttccaggacgagtttgggcataccagccaactcgtcactgacatccagcccgtcctggaggcatccggcttgtcactacactacgaggaaatcactaagggaccaaactgtgtgataagaggcgtcacggccaagggcccagtcaacagctgccaaggtaaaaattataacctgaaagtgaccctcccagggctgaaggaggacagtcagattttgaagatcaggttgctgcccggccaccctcgaaggctgaaggtgaaacccgactcagagatcctggtcattgagaatggcaccgcgttccccttccaggtcgaggtgttggacgaatcagacaatatcacggcgcagcccaagctgatcgtgcactgcaagttctccggagctccaaatttgcccgtgtacgtggttgattgttcttctagcggaactagtatcctcactgggtccgcaatccaggtacagaatataaagaaagatcagaccttgaaagcacgaattgagatcccatcctgtaaagatgtagcacccgtggagaagacaatcaaattgctcccctctagccatgttgcacggctgcagatattctctgtggaggggcagaaagcaattcaaatcaagcaccaggatgaggtgaactggattgcaggcgacattatgcacaatctgatctttcagatgtacgatgagggtgagagggaaataaacattacttctgccctggcagagaagattaaggtaaactggacccctgaaataaataaggaacacctcctccagggcctattgccagatgtccaggttccaacatctgttaaggatatgcgctattgtcaggtatcctttcaagacgatcatgtttcactcgaatctgctttcaccgtgagaccgctgccggatgaaccaaaacacctgaaatgtgaaatgaaggggggcaagactgtacaaatgggacaagagttgcagggtgaggttgtgatcatcatcaccgaccagtatggcaatcagatccaggccttcagtcctagcagtctctcaagtttgagcattgccggcgttggtcttgactctagcaatttgaaaactacattccaggagaatacccagagtatctctgttaggggaattaaatttatccccggcccacctggaaacaaagatctttgtttcacatggcgggaattttccgactttatccgagttcagttaattagcgggccaccagccaaactgcttctcatagattggcccgagttgaaggagagcatcccggtgatcaacggccgcgatctgcaaaaccctattattgttcagttgtgcgatcagtgggacaaccctgcccccgtccagcacgtgaagatcagtctgactaaagcttcaaacttgaagctgatgcccagtaatcagcaacataagacagacgagaagggcagggcaaatctgggggtgttcagcgtgtttgctcctagaggagagcacaccctccaagtgaaggctatctacaataaatctattatcgaaggacctattatcaagttgatgatcttgccggaccccgaaaagcccgtgcgccttaatgtgaaatatgacaaggatgcctccttcttggccggaggtctgtttaccgacttcatgatcagcgttattagcgaggacgacagcatcatcaaaaacattaatcccgcccgcatctccatgaagatgtggaaactgtctacctccggaaacagacctccggcaaatgcggaaacctttagttgcaataagatcaaagacaatgataaggaggacggttgcttttacttccgcgataaagttatacctaataaagtagggacttattgcatacaattcgggtttatgatggataagaccaacatcctgaactcagagcaggtgatcgtggaggtgctgccaaatcagccggttaaactggttcccaaaatcaaaccacccacacccgcggtgagtaatgtccgttccgtggccagcaggactcttgtgcgggatctgcatctgagtatcacggacgactatgacaatcacacaggcatcgatctcgtcgggacaattattgcaactattaagggctccaacgaggaagacactgatacgcccctctttattggaaaagtgaggacgctggaattccccttcgtcaacggttctgccgagatcatgtcattggtgctcgcagaatcctctccgggacgagactccacggaatacttcattgtattcgaaccccgacttcctctgctgagtagaacattggaaccttacatactgccatttatgttctataacgacgtgaaaaaacaacagcagatggcagcactcaccaaggaaaaggaccagctctctcagtccatcgtaatgtacaagtccctgtttgaggcctcccagcagttgcttaacgagatgaagtgccaagtggaagaggctaggctgaaagaagcgcaacttcgcaatgaattgaagatccacaatattgacatccccaccacccaacaggtgcctcacatcgaagccctcctgaaacgcaagctgagcgagcaggaggagctaaagaagaagcccaggaggtcctgcactctgcccaactacacaaaaggcagcggcgacgttcttggcaaaattgcccatctggctcagattgaagacgatagggcagccatggtcattagttggcatttggcttctgacatggattgcgtggtcacgcttacaactgacgctgcccgtagaatttacgacgagacccaaggccgccaacaggttctccctctcgattcaatctacaaaaagactcttcctgactggaagaggtcactccctcatttccggaacggcaaactgtattttaagcccatcggagatcccgtgttcgccagggacctgctgactttccccgataatgtggagcattgcgaaaccgtcttcggcatgctactgggtgacaccataatccttgacaatctggacgctgccaaccactataggaaagaggtggttaaaataacgcattgccccaccctgctgactcgggatggcgatcgcattcgctccaacggcaagtttggagggttacaaaataaggcccctcccatggataagctgcgggggatggtctttggtgcaccagtaccgaaacaatgcctcatcctcggggaacaaatcgtccacgcatgcgtacctagctattcaggaggctag

SEQ ID NO: 185763 - DNA, 6018 bp, Artificial Sequence
  derived and/or modified sequence
atggccgccgccgacggcggcggccccggcggcgccagcgtgggcaccgaggaagatggcggaggagtgggacatcgcactgtttaccttttcgatcgacgggagaaggagtccgaactcggagacagaccattgcaagtgggtgagcggagcgactatgctggctttagagcctgtgtttgccaaacgcttggtatttctcctgaggagaaattcgtaatcacaacgacttctcgtaaagagatcacgtgcgataatttcgatgaaacagtgaaggatggggtaactctgtacctcctgcaatcggtaaaccagctgctcctgacggccaccaaggaaaggatcgacttcctcccacactacgataccctagtgaagtccggtatgtatgagtattatgcgtccgaaggccagaatcctcttccttttgccctagcagagctcatcgacaatagtttgagcgctacatctcgcaatattggcgttcgccgtatacaaatcaaactgcttttcgatgaaacccagggcaagccggccgttgccgtgatcgacaacgggcgcggaatgacaagtaagcaacttaacaactgggccgtgtataggctcagcaagttcactcgccagggtgactttgagtctgatcacagtggctatgtacggccggtccctgtgccaagatcacttaattccgatatctcgtattttggcgtcgggggaaagcaggctgtcttttttgtgggacagtcagcgaggatgatcagcaagccagccgattcccaggacgtccacgagcttgttctatccaaggaggatttcgagaaaaaagagaagaataaagaagctatttatagcggatacatccgaaatcgcaagccctccgattccgttcatattacaaatgacgatgaaaggttcttacaccatctgatcatcgaagaaaaggaaaaagactcttttacggcagtggtgattactggggtccaacctgaacatatccagtatctcaagaattatttccacttgtggacccggcagctggctcacatttatcattattacatccacggacccaaaggaaacgagatccgaaccagcaaggaagtggaaccgtttaataatatcgatattgagatctctatgtttgagaagggcaaagtacctaaaattgtcaacttgagagagatccaggacgatatgcagacactctacgtcaataccgccgcagattcattcgaattcaaggcgcacgtggagggcgatggtgtagtggagggcattatcagatatcaccctttcctttatgatcgagaaacctatccagacgatccatgttttccctctaagcttaaggacgaggacgacgaagacgattgtttcattcttgaaaaggctgcaaggggcaaacggcctatctttgaatgcttttggaatggcagattaataccttacacatcagtggaagattttgattggtgtactcctcctaaaaagcgtggactggctcctatcgagtgctacaaccggattagcggcgcactgttcacgaacgataaatttcaggtctctacaaacaagttgacatttatggacctggagttaaaactgaaggataagaacacactgttcacgagaatcctcaatgggcaggagcagcgaatgaaaatcgaccgggagttcgccttgtggttaaaggattgtcacgagaaatatgacaagcagattaagttcaccctgttcaagggcgtgatcactagacctgatcttccgtcaaagaagcaggggccctgggctacttacgcggctatcgagtgggatgggaagatatataaagccggccagctggtcaaaacaattaaaacattacctctgttctatggcagcattgtgcggttctttctgtacggcgatcatgacggcgaagtctatgccacagggggagaggttcagattgcaatggaaccgcaggcactctacgatgaggtccggaccgtgcccatcgcaaagctcgataggactgtggccgaaaaggctgtcaagaagtatgtggaagatgaaatggcccgtctacctgatcggttaagcgttacatggcccgaaggcgatgaactcctccccaacgaggtccgtccagcaggaacgccaattggagctctcaggatcgagatactgaacaaaaaaggcgaggctatgcagaagttgcccggcacctcacacgggggcagcaagaaactactcgtggagctgaaagtgatccttcatagcagtagtgggaacaaggagatcatcagtcacatcagccagcacggcggcaagtggccgtattggtttaaaaaaatggagaatattcaaaagctgggtaactacaccctgaagctgcaggtagtattgaacgagtctaacgccgacacctatgcaggtaggcccttacctagtaaggctattaaattttctgtgaaggaaggaaagccagaaaaattttccttcggacttctcgacctaccttttcgagttggcgtgccctttaacataccactggagtttcaggacgaattcggacacacttcccaattggtcactgatatccagcctgtgttggaagccagcgggctttcactgcactatgaagaaatcacaaaaggccccaactgcgtgatcaggggagtcaccgctaaagggccagttaattcatgccaaggcaaaaattataatttgaaggtcacactacctgggttgaaagaggatagtcagatcctgaagattagacttcttcctggacatccccggagactgaaggtcaaaccggactcagaaatcttagtcattgaaaatgggaccgccttccctttccaggttgaggtgctggacgagtctgataatattaccgcacaaccaaagctcatcgtgcattgcaagttcagcggggcaccaaatctgccagtgtacgttgtggactgtagcagcagcgggaccagcatattaacaggctcagctattcaggtacagaatattaagaaggaccagacccttaaggctcggatcgagattcccagctgcaaggacgtcgcccctgtcgagaaaacaataaaactcttgccctccagccacgtggcccggctgcagattttttctgttgaaggccagaaagccatccagattaagcaccaggacgaagtaaattggatagctggagacatcatgcacaatctcattttccagatgtatgacgaaggtgaacgagagataaatatcacttctgccctggcagagaagattaaggtcaattggacccctgaaatcaacaaagagcacctgctccaagggttgttaccagacgtgcaggtgccaacaagcgtcaaagacatgagatattgccaggtgagcttccaggatgatcatgtcagccttgagtctgcctttaccgtgcgccccctgcccgatgagcctaagcacctgaaatgtgagatgaaaggcggaaagacagtccaaatgggccaggagctgcagggggaggtggtgattatcatcaccgatcagtacggcaaccagatccaggctttctctccgtctagtctctcttctctcagtattgccggcgttggcctggacagcagcaacctcaagactacttttcaagaaaacacacagagcatctctgtgagaggcatcaaattcattcccggtccaccggggaacaaagacttgtgtttcacctggagggagttctcagacttcattagggtccaactgatctccggccctcctgctaagctgctactgattgattggccagaattaaaagagagtatccctgtgatcaatgggcgggacttgcagaaccccattatagttcagctctgcgatcagtgggacaatccggcacccgttcagcacgttaaaattagcttgacgaaggcctcaaacctgaaactgatgccatcaaaccagcaacacaagactgacgaaaagggccgagcaaacttaggtgtgttttccgtgtttgccccacgcggcgaacacaccctgcaagtgaaggccatttacaacaagtcaataattgagggacccattattaagctgatgatcctgccagaccccgaaaaacccgtgagactaaacgttaaatatgataaagacgcgtcgttcctcgcaggcggattgttcaccgattttatgataagcgttatcagcgaggacgattctatcatcaagaatatcaatcctgctaggatcagcatgaagatgtggaagctgtccacctctggcaatcgtcccccagcaaacgcagagacttttagctgcaataaaattaaggataacgacaaggaggatggctgtttctacttccgggacaaagtaatacccaacaaggtaggcacatattgtatacagttcggctttatgatggataaaactaatatcctgaacagcgaacaggttatcgtggaggtcctaccaaatcagcccgtaaaactggtacccaagataaagccccccacccccgccgtgtccaacgtgagatccgtggcctcaaggacactggtccgagatctacatttgagcattacggatgattatgataatcataccggtatcgacctcgtgggaaccataatagccacgatcaagggaagtaacgaagaggacaccgatacgcccctctttattggcaaagtacgaaccctggaatttccgttcgtcaatggatccgcagaaatcatgtcacttgtcctcgctgagtcctcgccaggcagagattccacagagtactttattgtgttcgaaccccgactaccgttgctctcgaggacattggaaccctatattttgccatttatgttctacaatgatgtgaaaaaacagcagcagatggcagctctgaccaaagagaaggatcagctgtcccagagcattgtgatgtacaaaagtttgtttgaagcgagccagcaactgcttaatgaaatgaaatgtcaagttgaagaggcgcgcctgaaggaagcgcaactgagaaacgagctgaaaatccataacatcgatatccctactactcagcaagtgccacatattgaagcccttctgaagcgtaaacttagcgaacaggaagaactcaaaaaaaagccacgccgaagctgcactctccctaactacactaagggaagcggggacgtgctcggtaaaatcgcgcaccttgcacagattgaagacgacagagctgctatggtgatatcgtggcaccttgcaagtgacatggactgtgtggtgacattgacaaccgacgctgctcgtagaatctatgacgaaacacagggacgccagcaggtgcttcctttggacagcatatacaaaaagacattgcccgactggaaaagaagtctcccacatttccgaaacggcaagctttatttcaagcctatcggcgacccggtcttcgctagagatctcctgacattcccagataatgttgagcactgcgagacagtctttggaatgctgctgggcgacacgatcattctggataatctggatgcggccaatcactaccgcaaagaggtcgtgaaaataacacactgcccaacgctcttaacacgcgatggcgatcgcatccgatctaacgggaaatttggaggtctccaaaataaggcgcctccgatggacaaattaaggggcatggtgtttggagcgcctgtgcccaagcaatgtctcatccttggcgagcagattgatctcctgcagcagtacagatccgctgtctgcaagttggactctgtgaataaggatctcaacagtcagttggagtacctacggacccccgacatgcggaaaaagaaacaagaattggacgagcatgaaaaaaacctgaagttgattgaggagaagttggggatgactccaattcgcaagtgcaacgattcactgcggcactccccaaaagtcgaaaccaccgactgcccagtgccacccaagaggatgcgccgtgaagcaacaagacagaaccgcatcatcacaaagacggacgtctag

SEQ ID NO: 185764 - DNA, 5943 bp, Artificial Sequence
  derived and/or modified sequence
gaatcggttcccgggtgatcctcgcgcctgccgctgctcggccgccgccgctgacgaggagctgcagcgcgccgggccgaggcctcgagccgccccgggagctggagctgaaggcgccgcgcggagcgcgcacctcagccctgagcccggcggcggcaggcgtcgctgtcttttctccttttccccaatatggcagcggcggacggcggcgggcctggtggggcctctgtggggactgaggaggatggcggaggcgtcggccacaggacggtgtacttgtttgatcggcgcgaaaaggagtccgagctcggggaccggcctctgcaggtcggggagcgctcggactacgcgggatttcgcgcgtgtgtgtgtcagacacttggcatttcacctgaagaaaaatttgttattacaacaacaagtaggaaagaaattacctgtgataattttgatgaaactgttaaagatggagtcaccttatacctgctacagtcggtcaatcagttactactgacagctacgaaagaacgaattgacttcttacctcactatgacacactggttaaaagtggcatgtatgaatattatgccagtgaaggacaaaatcctttgccatttgctcttgcggaattaattgacaattcattgtctgctacttctcgtaacattggggttagaagaatacagatcaaattgctttttgatgaaacacaaggaaaacctgctgttgcagtgatagataatggaagaggaatgacctctaaacagcttaacaactgggccgtgtataggttgtcaaaattcacaaggcaaggtgactttgaaagtgatcattcaggatatgttcgtccagtaccagtgccacgcagtttaaatagtgatatttcctattttggtgttgggggcaagcaagctgtcttctttgttggacaatcagccagaatgataagcaaacctgcagattcccaagatgttcacgagcttgtgctttctaaagaagattttgagaagaaggagaaaaataaagaggcaatatatagtggatatattagaaacagaaagccctctgattctgttcacattacaaatgatgatgaaagatttctacatcatcttatcatagaggagaaggaaaaagatagctttactgctgtggttatcacaggggtacaaccagaacacatacagtacttgaaaaattatttccacctttggacacgacagttagcgcatatttatcactactatattcatggcccaaaaggaaatgaaatacgaacatcaaaagaagttgaacctttcaacaatattgatattgaaatttctatgtttgaaaaagggaaggtacctaagattgtcaacctaagggaaatacaagacgacatgcagacgttgtatgtaaacacagcagctgatagttttgaattcaaagctcatgttgaaggagatggtgtagtggaagggattatccgttatcatccattcttatatgatagagaaacttaccctgatgatccatgctttccatcaaaattaaaagatgaagatgatgaagatgattgtttcatacttgagaaagcagctagagggaaaaggcctatttttgaatgtttttggaatggacgattaataccatatacatcagttgaagactttgactggtgtactcctcctaagaagagagggcttgcaccaattgaatgctacaataggatatctggtgcattattcactaatgacaaattccaggtcagcacaaataaattgacgtttatggatcttgagctaaaattgaaagataagaacaccctttttacaaggattttaaatggacaggaacagcgaatgaaaattgacagagaatttgctttgtggctgaaggactgtcatgagaagtatgataaacaaataaaatttacactttttaagggagtaattacacgtcctgatcttccttctaaaaagcaaggtccctgggcaacatatgcagcaatagaatgggatggaaagatatacaaagcaggacagctggtcaagacaatcaagacacttcccctcttttatggaagcatagtaagattttttctttatggcgatcatgatggagaagtatatgctacaggaggagaggttcaaattgcaatggaacctcaggcactatatgatgaagtaagaactgtgccaattgcaaagctggataggacagttgctgagaaagctgttaaaaaatatgtagaagatgaaatggcaaggctccctgatagattgtcagtaacttggcctgaaggagatgaattattgcctaatgaggttaggcctgctggaacccctattggtgcgttaagaattgaaatactgaataaaaaaggggaagcaatgcaaaagcttccaggaacaagccatggagggtcaaagaaactcctggttgagctcaaagttattttacattcttcaagtggaaataaagagattatttcgcatattagtcaacatggaggaaaatggccttactggtttaaaaaaatggaaaatattcagaagttggggaattataccttgaaattacaagttgtgttgaatgaaagtaatgcagacacttatgcaggaagaccactaccatctaaagcaattaagttttctgttaaagagggtaagccagagaaattttcatttggtcttctggatcttccttttcgtgttggagttccatttaatatccctctggagtttcaggatgaatttggtcataccagtcaactagtaactgatattcagccagttcttgaagcaagtggtttatctttacattatgaagaaataaccaaaggaccaaattgtgtaattcgaggtgttacagccaagggccctgtaaactcttgtcaaggcaagaattataatctgaaggttactctgcctggcttaaaagaagactcacagattttgaaaattagattactacctggtcaccctcgtcgactgaaagtgaaacctgattctgaaattttagttatagaaaatggaacagctttcccatttcaggtggaagttttagatgaatcagacaacataacagcacaaccaaaattgattgttcattgtaagttttcaggtgctccaaaccttccagtctatgttgtagattgcagtagttctggaaccagtattttaacaggatctgcaattcaagttcagaatattaaaaaagaccagacgcttaaagcaagaattgaaatacctagttgtaaagatgtggcacctgtggagaagactattaagttgcttcccagtagccatgttgcaagactacaaatattcagtgtagaaggacaaaaggcaattcagatcaaacatcaggatgaggttaattggatagcgggtgatattatgcataatcttatttttcaaatgtatgatgaaggagaaagagaaatcaatataacatcagctttagcagaaaaaattaaagttaattggactcctgagattaacaaagaacacttgctacagggtctgcttcctgatgtgcaagtaccaacatctgtaaaagatatgcgctattgccaggtttcattccaagatgatcatgtgtctttggaaagtgcgtttacagtaagaccacttcctgatgaacctaaacatttaaaatgtgaaatgaaaggaggaaaaacagtacagatgggccaagagcttcaaggagaagtagttataataattacagatcagtacggaaatcagattcaagcattttcaccaagttctttatcttctttgtcaattgctggggttggacttgatagctcaaatttgaaaacaacctttcaggaaaacacacagagtataagtgtaagaggcatcaaatttattccaggtcctcctggaaataaggatctttgttttacttggcgtgagttttctgactttattcgagtgcaactaatttctggacctcctgctaaacttctccttatagactggccagaactaaaggagtccattccagtgattaatggaagagatttacagaaccctattattgttcaactttgtgatcagtgggataatccagcaccggtacaacatgttaaaataagtcttacaaaagctagcaatttaaagctcatgccttcaaaccaacagcataaaacagatgagaaaggcagggctaatttgggagtattcagtgtttttgcccctaggggagagcatactcttcaggttaaagccatctataacaaaagtatcatagaaggacctataattaagttaatgattcttccagacccagaaaaacccgttcgtctcaatgttaaatatgacaaagatgcatccttcttagcagggggtcttttcactgattttatgattagtgttatttctgaagatgacagtatcattaaaaacattaatccagcacgtatttccatgaaaatgtggaagctgtctaccagtgggaaccgacccccagcaaatgcagaaacatttagttgtaataaaataaaagataatgacaaagaagatggctgcttctatttcagggataaagtaattcctaataaagtggggacatattgtatccagtttggttttatgatggataaaacaaatattctcaacagtgaacaggttatagttgaagtcctgcctaatcaacctgtgaagttagtacctaaaattaaaccacctacaccagctgtttcaaatgttcgctcagttgccagtaggaccttggtcagagatctacatcttagtatcacggatgactacgacaaccatactggaattgatttggttggcactataatagccaccattaaaggctctaatgaggaagatactgataccccactttttattgggaaagttagaacacttgaattccccttcgtgaatggttcggctgaaatcatgagtctggtgctggcagaaagtagtcctggaagggatagtactgaatattttattgtatttgagccccggctaccacttttatcaagaaccttagaaccatatatcctaccgttcatgttttacaatgatgttaagaagcagcaacaaatggcagcacttacaaaagaaaaggaccaattatctcagtctattgttatgtataaaagtttatttgaagccagccaacagcttcttaatgaaatgaaatgtcaagttgaagaagcaagattaaaagaggcccaattgcgaaatgaactaaaaatacataatattgacattcctacaacacaacaggtgccacacattgaagcacttctgaaaagaaagctatcagaacaagaagaactgaagaaaaaacctagaagatcgtgtactcttccaaactatactaaaggcagtggagatgttttgggaaagattgcacatctagcacaaattgaagatgatagagctgcgatggttatttcttggcatctggcaagtgacatggactgtgtagtcaccctaaccactgacgctgcacgtcgtatctatgatgaaacccaaggtcgtcagcaggtgttgccccttgattctatttacaagaagactcttccagattggaaaagatctctacctcatttccgaaatggaaaattgtattttaaacccattggagatccagtctttgctcgagacttgttaacatttccagataatgtagaacattgtgaaacagtatttggtatgctgttaggagacaccattattttggataatctggatgcggccaatcattatagaaaagaggttgttaaaattacacactgtcctacactgctgaccagagatggagatcgaattcgaagtaatggaaagtttgggggccttcagaataaagctcctccaatggataaacttcggggaatggtatttggagctccagttccaaaacagtgtctgatcttaggggaacaaatagtgcatgcctgtgttcccagctactcaggaggctaa

SEQ ID NO: 185765 - DNA, 8672 bp, Artificial Sequence
  derived and/or modified sequence
gaatcggttcccgggtgatcctcgcgcctgccgctgctcggccgccgccgctgacgaggagctgcagcgcgccgggccgaggcctcgagccgccccgggagctggagctgaaggcgccgcgcggagcgcgcacctcagccctgagcccggcggcggcaggcgtcgctgtcttttctccttttccccaatatggcagcggcggacggcggcgggcctggtggggcctctgtggggactgaggaggatggcggaggcgtcggccacaggacggtgtacttgtttgatcggcgcgaaaaggagtccgagctcggggaccggcctctgcaggtcggggagcgctcggactacgcgggatttcgcgcgtgtgtgtgtcagacacttggcatttcacctgaagaaaaatttgttattacaacaacaagtaggaaagaaattacctgtgataattttgatgaaactgttaaagatggagtcaccttatacctgctacagtcggtcaatcagttactactgacagctacgaaagaacgaattgacttcttacctcactatgacacactggttaaaagtggcatgtatgaatattatgccagtgaaggacaaaatcctttgccatttgctcttgcggaattaattgacaattcattgtctgctacttctcgtaacattggggttagaagaatacagatcaaattgctttttgatgaaacacaaggaaaacctgctgttgcagtgatagataatggaagaggaatgacctctaaacagcttaacaactgggccgtgtataggttgtcaaaattcacaaggcaaggtgactttgaaagtgatcattcaggatatgttcgtccagtaccagtgccacgcagtttaaatagtgatatttcctattttggtgttgggggcaagcaagctgtcttctttgttggacaatcagccagaatgataagcaaacctgcagattcccaagatgttcacgagcttgtgctttctaaagaagattttgagaagaaggagaaaaataaagaggcaatatatagtggatatattagaaacagaaagccctctgattctgttcacattacaaatgatgatgaaagatttctacatcatcttatcatagaggagaaggaaaaagatagctttactgctgtggttatcacaggggtacaaccagaacacatacagtacttgaaaaattatttccacctttggacacgacagttagcgcatatttatcactactatattcatggcccaaaaggaaatgaaatacgaacatcaaaagaagttgaacctttcaacaatattgatattgaaatttctatgtttgaaaaagggaaggtacctaagattgtcaacctaagggaaatacaagacgacatgcagacgttgtatgtaaacacagcagctgatagttttgaattcaaagctcatgttgaaggagatggtgtagtggaagggattatccgttatcatccattcttatatgatagagaaacttaccctgatgatccatgctttccatcaaaattaaaagatgaagatgatgaagatgattgtttcatacttgagaaagcagctagagggaaaaggcctatttttgaatgtttttggaatggacgattaataccatatacatcagttgaagactttgactggtgtactcctcctaagaagagagggcttgcaccaattgaatgctacaataggatatctggtgcattattcactaatgacaaattccaggtcagcacaaataaattgacgtttatggatcttgagctaaaattgaaagataagaacaccctttttacaaggattttaaatggacaggaacagcgaatgaaaattgacagagaatttgctttgtggctgaaggactgtcatgagaagtatgataaacaaataaaatttacactttttaagggagtaattacacgtcctgatcttccttctaaaaagcaaggtccctgggcaacatatgcagcaatagaatgggatggaaagatatacaaagcaggacagctggtcaagacaatcaagacacttcccctcttttatggaagcatagtaagattttttctttatggcgatcatgatggagaagtatatgctacaggaggagaggttcaaattgcaatggaacctcaggcactatatgatgaagtaagaactgtgccaattgcaaagctggataggacagttgctgagaaagctgttaaaaaatatgtagaagatgaaatggcaaggctccctgatagattgtcagtaacttggcctgaaggagatgaattattgcctaatgaggttaggcctgctggaacccctattggtgcgttaagaattgaaatactgaataaaaaaggggaagcaatgcaaaagcttccaggaacaagccatggagggtcaaagaaactcctggttgagctcaaagttattttacattcttcaagtggaaataaagagattatttcgcatattagtcaacatggaggaaaatggccttactggtttaaaaaaatggaaaatattcagaagttggggaattataccttgaaattacaagttgtgttgaatgaaagtaatgcagacacttatgcaggaagaccactaccatctaaagcaattaagttttctgttaaagagggtaagccagagaaattttcatttggtcttctggatcttccttttcgtgttggagttccatttaatatccctctggagtttcaggatgaatttggtcataccagtcaactagtaactgatattcagccagttcttgaagcaagtggtttatctttacattatgaagaaataaccaaaggaccaaattgtgtaattcgaggtgttacagccaagggccctgtaaactcttgtcaaggcaagaattataatctgaaggttactctgcctggcttaaaagaagactcacagattttgaaaattagattactacctggtcaccctcgtcgactgaaagtgaaacctgattctgaaattttagttatagaaaatggaacagctttcccatttcaggtggaagttttagatgaatcagacaacataacagcacaaccaaaattgattgttcattgtaagttttcaggtgctccaaaccttccagtctatgttgtagattgcagtagttctggaaccagtattttaacaggatctgcaattcaagttcagaatattaaaaaagaccagacgcttaaagcaagaattgaaatacctagttgtaaagatgtggcacctgtggagaagactattaagttgcttcccagtagccatgttgcaagactacaaatattcagtgtagaaggacaaaaggcaattcagatcaaacatcaggatgaggttaattggatagcgggtgatattatgcataatcttatttttcaaatgtatgatgaaggagaaagagaaatcaatataacatcagctttagcagaaaaaattaaagttaattggactcctgagattaacaaagaacacttgctacagggtctgcttcctgatgtgcaagtaccaacatctgtaaaagatatgcgctattgccaggtttcattccaagatgatcatgtgtctttggaaagtgcgtttacagtaagaccacttcctgatgaacctaaacatttaaaatgtgaaatgaaaggaggaaaaacagtacagatgggccaagagcttcaaggagaagtagttataataattacagatcagtacggaaatcagattcaagcattttcaccaagttctttatcttctttgtcaattgctggggttggacttgatagctcaaatttgaaaacaacctttcaggaaaacacacagagtataagtgtaagaggcatcaaatttattccaggtcctcctggaaataaggatctttgttttacttggcgtgagttttctgactttattcgagtgcaactaatttctggacctcctgctaaacttctccttatagactggccagaactaaaggagtccattccagtgattaatggaagagatttacagaaccctattattgttcaactttgtgatcagtgggataatccagcaccggtacaacatgttaaaataagtcttacaaaagctagcaatttaaagctcatgccttcaaaccaacagcataaaacagatgagaaaggcagggctaatttgggagtattcagtgtttttgcccctaggggagagcatactcttcaggttaaagccatctataacaaaagtatcatagaaggacctataattaagttaatgattcttccagacccagaaaaacccgttcgtctcaatgttaaatatgacaaagatgcatccttcttagcagggggtcttttcactgattttatgattagtgttatttctgaagatgacagtatcattaaaaacattaatccagcacgtatttccatgaaaatgtggaagctgtctaccagtgggaaccgacccccagcaaatgcagaaacatttagttgtaataaaataaaagataatgacaaagaagatggctgcttctatttcagggataaagtaattcctaataaagtggggacatattgtatccagtttggttttatgatggataaaacaaatattctcaacagtgaacaggttatagttgaagtcctgcctaatcaacctgtgaagttagtacctaaaattaaaccacctacaccagctgtttcaaatgttcgctcagttgccagtaggaccttggtcagagatctacatcttagtatcacggatgactacgacaaccatactggaattgatttggttggcactataatagccaccattaaaggctctaatgaggaagatactgataccccactttttattgggaaagttagaacacttgaattccccttcgtgaatggttcggctgaaatcatgagtctggtgctggcagaaagtagtcctggaagggatagtactgaatattttattgtatttgagccccggctaccacttttatcaagaaccttagaaccatatatcctaccgttcatgttttacaatgatgttaagaagcagcaacaaatggcagcacttacaaaagaaaaggaccaattatctcagtctattgttatgtataaaagtttatttgaagccagccaacagcttcttaatgaaatgaaatgtcaagttgaagaagcaagattaaaagaggcccaattgcgaaatgaactaaaaatacataatattgacattcctacaacacaacaggtgccacacattgaagcacttctgaaaagaaagctatcagaacaagaagaactgaagaaaaaacctagaagatcgtgtactcttccaaactatactaaaggcagtggagatgttttgggaaagattgcacatctagcacaaattgaagatgatagagctgcgatggttatttcttggcatctggcaagtgacatggactgtgtagtcaccctaaccactgacgctgcacgtcgtatctatgatgaaacccaaggtcgtcagcaggtgttgccccttgattctatttacaagaagactcttccagattggaaaagatctctacctcatttccgaaatggaaaattgtattttaaacccattggagatccagtctttgctcgagacttgttaacatttccagataatgtagaacattgtgaaacagtatttggtatgctgttaggagacaccattattttggataatctggatgcggccaatcattatagaaaagaggttgttaaaattacacactgtcctacactgctgaccagagatggagatcgaattcgaagtaatggaaagtttgggggccttcagaataaagctcctccaatggataaacttcggggaatggtatttggagctccagttccaaaacagtgtctgatcttaggggaacaaatagatcttcttcagcagtatcgttctgctgtgtgcaaactagacagtgtgaataaggatcttaacagtcaattagagtaccttcgcactccggatatgaggaagaaaaagcaagaacttgatgaacatgagaaaaatctcaaactaatagaggaaaaactaggtatgactcccatacgtaagtgtaatgactcattgcgtcattcaccaaaggttgagacgacagattgtccagttcctcctaaaagaatgagacgagaagctacaagacaaaataggattataaccaaaacagatgtatgagaggtgacagagagaagaggccattggtctcagtaagaatgccctgctttctgcatctctgtttcagaagaccaagagggtgacttaccagactgagtatttctggggacaatacaagtacctgggcatgaatttccatttcgattcagatgggactggaaacaaccattcaattttatgaatcttactggacattatggatttactggaattattccagacattatgccctttggttgtcactaccttgcaaatgtgtaagaggaaaatgtgctaatgtggcagtgactgtaaaactggcacatggcatttattaatcctgaagaaaagtacatgtactatttttcagtataaatataatgaacatgtcagaactatttcttgaaaacctttttattacttttgcgtgaatttatttaacaaagatgttttgtcttttgtgtaagggaggttctagaggctagatgtttaattgtaaatatgtgaggaaactcaatgcagaattcaggataaaaattttaaaagcacaggtatttgggaattgaaatgttaagatacccagaacaacattaaatcaatgagtgaacttgtgacagtggtagcatttcaaatttcaaaagacttatcctgtgtgtgtgtgtgtgtgtatatatatatatatatataaatatatatatataaaatattcagcagcaccaagttttataactattgtttgtttgactttattaatactagaatatgtagtctcagccttaattttacatttacattattttgtaattttttattactatttttaaggggttaaagagaacatacattctcacattagtgtactttctggtagaaagttgctgcaaaaacatttgaaatgtatattaacctaatgtatgtcatatatatgtctttgtgtaagttcaagactattgatctgtgaagttattttgtaaggacatacatttggtaagtaagtttgtgtcccaggaaatgtatgtgtttttaaaccctttctaaatatgcaggccattaataaataagattgtttcttccctactgaatagataagtgtttttcttttttaaaattggaagcttcataaaagttatcttgttaaaaaacgatgatgatgttaacctatctatctttataattggaaattatttaaactgtttgttgttacagaagaaacaaaatggtaattacagaattagctgtggggaagattggctcccatggtactacaggttgagtatcccttattcaaaatggttgggacctgaagtgttttggattttggttttttgtggggtttttaaattattattttggaatatttgcattatatttaccaatttagcatccctaatccaaaaatctttcattagaaattggaaatgcttcaatgagcatttcccttatgtgtcatatctgcgctcaaatgttttgaattttggaacatttcttgtttctgacttttagattagggatactcaccccgtaccaatatttggagtccttagacattagattatatgaaaatgattgattgataggtaagaaaggttaaagagaaatgactttttaggaactagacttgaacgtataattaatatgtggaactagtttgcttttataattcattgtatcaagaaggagtcatgttttaaatccaaggcattgagactatctagaagcaaaaaagttggttttaaaaattctttttattagaagtgtgtttaaaaacatgtctttttttcccttgagcgacagtggcctcactacattgcccaggctagtcttgaactcctgggttcaagcagtcttcctgccttggcctcctaagtagcagggattacaggcatgcacccacatgccaatttttattgcttaaaatggcgagttctatggatattatctagccccaagcccatatctgtacacttttgttcattttataataccagaaagaatgttctatcagtaaaagaaggtttttaagtatgaatctccatttttgtggagtttttctaccctgtaaaaattaactttgtggttcccagtaattacagtaaggagtttttctatattttcacagttggatttatctaaggatatttctcagcatattaaggaatccttttctacatttgagcaaatactgaggttcatgttgtaccaaataataataaattgcttttgtgtttaatatgtaacacgtaagaacaattgaaattttcttctaagatttaatactagtcttttagtataaaggaatgtaactggagaaaaaaattaatgctacagccatttatcctgtgttatgtgttatataatctgaaatttgtcacaatgttacaatcaggaagttttttttctggtttcttcttccaaaggaaaataatagcctacttgtattttgaagtaactgaaataaaactctctccaagcctttttgcacatta

SEQ ID NO: 185766 - DNA, 5754 bp, Artificial Sequence
  derived and/or modified sequence
atggcggcagcagatggcggaggccctggaggggcaagtgtggggaccgaggaggacgggggtggggttggacaccggacagtatatctgttcgacaggagagagaaggagtcagagttaggcgatcgccctctccaggttggagagaggtccgactatgccggattcagagcgtgtgtctgccagaccctcggaataagtcctgaggaaaaattcgtcattaccacaacctcaaggaaggagatcacctgtgacaactttgacgagacagtgaaggacggggtaacactttacctactgcagtctgtcaatcaactgctcctgacggccaccaaggaacgcatcgacttcctcccccactatgacacattggtgaagtctggtatgtatgaatattatgcaagtgagggtcagaatccgttgcccttcgctctggccgagttgatcgacaattccctctctgcaacttcacggaatataggcgttaggcgcattcagatcaagctcctgtttgacgaaacacagggaaagccagccgtggcagtgattgacaacgggaggggcatgacatcaaagcaactaaacaactgggctgtttatcggctgtcgaagttcactagacagggggatttcgaaagtgatcacagcggttacgtaagacctgtgccagtcccaaggtcactcaacagtgatatctcttattttggggtaggcggtaaacaggcagtgttctttgtgggacaaagcgcacgcatgattagcaaaccggcagacagtcaagacgtgcacgagttggtgctctccaaagaagatttcgagaagaaggagaaaaataaagaggcaatttactctgggtacatccgtaacagaaaaccttccgactccgtccacattacaaatgatgatgaacgctttctgcaccacctaattattgaggagaaggagaaagactccttcactgccgtcgtgatcacaggcgtccagccagaacatattcagtatttaaagaactacttccatctgtggacaaggcaactcgcacacatatatcactactacattcacgggcctaaaggcaacgagatccggaccagcaaggaagtggagccgttcaacaatatcgatatcgagatttctatgttcgaaaagggaaaagtgccaaagattgtcaacctgcgggagattcaggacgatatgcagaccctctacgtcaacaccgccgcagattcctttgagtttaaggcccacgttgagggagatggtgtcgtggaggggattatcaggtatcatccgttcctgtatgacagggaaacataccccgatgatccctgcttcccgtccaagttaaaagacgaggatgacgaagacgactgttttatcctggaaaaagccgctcgcggaaaacggccaatattcgagtgtttttggaatggacgccttattccttacactagcgtcgaggactttgactggtgtaccccaccaaagaaacgaggactcgccccaattgaatgctacaatagaatcagcggcgcactgttcacaaatgacaaattccaagtgagcaccaacaagttaacttttatggatctcgaacttaaactgaaggacaagaacactttgttcactcgcattctgaatggccaagaacagcgcatgaaaatagatagggagttcgccctgtggctgaaagattgtcatgagaaatacgataagcaaataaagtttacactgttcaaaggcgtgataacacgaccagatttaccttctaagaagcagggaccctgggctacctacgctgctatcgaatgggatggcaagatttacaaggccggtcaactggtaaagaccatcaagactcttccgttattttatgggagtattgtgcgtttcttcctgtatggggatcatgacggggaagtttatgccactggcggtgaggttcagattgctatggagccccaggcactgtatgatgaagttcgcacggtgccgatcgcaaaactggacagaaccgtggcagaaaaggcagtcaaaaaatatgtagaagatgagatggcccgactacccgataggttgagcgtgacatggccagaaggcgacgagcttctgcctaacgaggtccggccagccggaaccccgatcggcgcattacggatagagattctgaacaagaaaggcgaggctatgcaaaagttgccagggacgtcacatggcggatccaagaaacttctagtagaacttaaggttatcctccatagttcatctggtaacaaggaaatcataagccacatctctcagcacggaggaaagtggccttactggttcaaaaagatggagaacattcagaagctgggcaactacacccttaagctgcaggtcgttctcaatgaaagcaatgctgatacatatgctggcagacctttgcccagtaaagccatcaaattctcagtgaaagaaggaaagcctgagaagttctcatttggtcttttggatctgccattccgggtgggtgtccctttcaatatccctctggaatttcaggatgaattcgggcacacatcccagctggtgaccgacatccagcccgtgctggaggcttctgggctgtccctgcactatgaggagataacgaaaggtcccaactgcgtgattagaggggtgaccgcaaaaggccctgtgaattcttgccaaggaaagaactacaaccttaaagtgacattgcccggtctgaaggaggattcccagatcctcaagattaggctgcttccagggcatccccgtagactcaaggttaagcctgacagcgagattttggtgatcgagaatggaactgcctttccctttcaggtggaggtgcttgatgagagcgacaacatcactgcccagccaaaactgatagtgcactgtaaattcagtggcgctccaaatcttccagtgtacgtggtggactgctcaagctctgggacaagcattttaaccggtagtgctatccaggttcagaacatcaagaaggaccagacattgaaagcgaggattgaaattccttcctgcaaagacgttgctccagtggagaagactattaagctcctcccttcctcacacgtggcaaggctgcagatttttagtgtagagggccaaaaggccattcagattaagcatcaggatgaagtgaactggattgctggtgacatcatgcacaaccttatatttcagatgtacgacgagggcgagcgggagataaatataacctctgccctcgccgaaaaaatcaaagtgaactggactcccgaaatcaacaaagaacatttgctgcaaggactcctccctgacgtgcaggttccaacttctgtgaaggacatgcgatactgccaggtctccttccaggacgaccacgtttcattggagagcgcatttactgtgaggccacttccagacgaacccaaacatctgaagtgcgagatgaagggcggaaaaacagtgcagatgggacaggagctccaaggagaagtggtgataatcattacggatcagtacgggaaccaaattcaggccttcagcccttcttcgctttccagcctatcaattgctggggtcggcctggatagttcaaatctgaaaacaactttccaagagaacacgcaatccatctcggttagaggtatcaagttcatccccggaccacccggaaacaaggatctctgttttacatggcgcgagtttagcgactttattagagtccagcttatttctggccctccagcgaagttattgctgattgattggcccgagctgaaagagagtattcccgtcattaatggcagggatttgcagaaccccataatcgttcagctctgcgatcagtgggacaaccctgccccagtgcagcacgtgaaaatttcccttaccaaggcaagtaatctcaaactaatgccttccaatcagcagcacaagacagatgagaaaggacgtgcaaacctcggcgtatttagcgtttttgccccacgcggtgaacacacactacaggtgaaagcaatatacaataaaagcataatcgagggccctataattaaattaatgatactccccgatcccgagaagccagtccgcctaaatgtaaaatacgacaaggacgcctccttcttagccggaggactgttcacagatttcatgattagcgtgatcagcgaagatgactccatcattaagaacataaatcccgctcgaataagtatgaaaatgtggaagctcagtaccagcggcaacagaccacctgcaaatgccgagacgtttagctgcaataaaatcaaagataatgacaaagaagatggatgtttttattttcgtgataaagtgatccccaacaaggtgggtacttactgtatacagttcggattcatgatggacaagaccaatatccttaatagcgagcaggtcatcgtagaagtgctgccgaatcagcctgtgaagttggttcctaaaattaagccaccaactccggctgttagcaacgttaggtctgtggcttcaaggacactggtgcgagatctgcatctgagcataactgacgattatgataaccacactggcattgatctcgtgggtactattatcgccacgatcaaaggcagcaatgaagaggataccgatactcctcttttcatcggtaaagtcagaactttggaatttccgttcgttaacggatctgcggagataatgtcgctggtgctagctgagagctcaccaggacgcgactcaactgaatatttcatcgtttttgaaccacggctgccgctgttgagcagaaccttggaaccgtacatcctacccttcatgttttacaatgacgtcaagaagcaacagcagatggccgcattgactaaagagaaagaccagctgtcccagtctatagtgatgtacaaaagtcttttcgaagcctcgcagcagctgcttaatgagatgaagtgtcaggtggaggaagccaggcttaaggaggcccaactgcgcaacgaactgaagatccataacatcgatatcccaacaacacaacaggtgccacatatagaggccctcctgaaaaggaagttgtcagaacaggaagaactgaaaaaaaaaccaagacgttcctgcactctgcccaattacaccaaaggcagcggagacgtgctgggcaagatagcgcacctcgcccaaatagaagatgatagggctgctatggttatttcctggcatctagcgtccgatatggattgtgtcgttaccctgaccaccgatgccgctcgcagaatatatgacgagactcaggggcgtcagcaggtgctgccattagacagtatctacaaaaagacgctgccagactggaaaaggtctttgccccacttccgcaacggcaagctgtattttaaacctatcggagacccggtattcgccagagacctgctcaccttccccgataatgttgagcactgtgaaacagtgttcgggatgctgcttggagatacaattattcttgataatctcgacgccgctaaccactaccgaaaagaagtagtgaagattacccattgccctactctccttaccagggatggggaccgaatcagatccaacgggaagtttggcggactgcaaaacaaggcacctcccatggataagctcagaggcatggttttcggtgcccctgtccctaaacagtgtctgatcctaggtgagcagatagtccacgcctgcgtgcctagttattcaggcggatac

SEQ ID NO: 185767 - DNA, 6017 bp, Artificial Sequence
  derived and/or modified sequence
atggccgctgccgatggaggaggacctggcggagcctcagtgggtacggaagaagatggcggaggcgtcggacaccgcaccgtgtacctgttcgaccgcagagaaaaggaatccgagctgggagataggcccttgcaggttggggagcggtctgactatgccggttttagggcctgtgtctgtcagacgctggggatatctcccgaggagaagttcgtcatcactaccacgtctcggaaggaaattacctgcgataatttcgatgaaacggtaaaggacggtgttactctttatctcctccagtcggtaaatcagttgctgttaactgcaacaaaggagaggatagatttcttgccacactatgatacactcgtcaaaagtggaatgtacgagtactacgcctccgaagggcagaatccgctccctttcgccctggcagagctgatagataactctttgagcgctacttcaagaaacatcggcgtacgcagaattcaaattaagttgttgttcgacgagacccagggcaaacctgctgtggccgtgatcgacaacggtagggggatgacatccaaacagctcaacaactgggcagtttacagactgagtaagttcactaggcaaggcgattttgagtccgatcatagtggatatgttaggcccgtgccagtgcctagaagcctaaacagtgacatttcctattttggcgtgggtggaaaacaagcagttttcttcgtcggacagtctgctcgcatgatctcaaagccagcagatagtcaggacgtgcacgaactggtgctgtcgaaggaagactttgaaaagaaggaaaaaaataaagaagccatttattccggttacataagaaatcgcaagccttctgactcagtgcatataaccaacgacgacgagcggttcctccaccatctgattattgaggaaaaagaaaaggactcattcacagccgtcgtaattactggggtccagcctgagcacattcaatatctcaagaactattttcatttgtggacacgtcagctcgctcatatataccattactacatccacggccctaagggcaacgagatccggacgagcaaggaggtggagcctttcaacaacatcgacattgaaatctccatgtttgagaaaggaaaggttcccaaaattgtaaatctgcgggaaattcaggacgacatgcagactttatatgtgaataccgccgctgattccttcgaatttaaagctcatgtggagggggacggcgtagttgaggggataattcgctatcatccctttctttacgacagagaaacctatccggacgatccgtgctttcctagcaagctaaaggatgaagatgacgaggacgactgcttcattctcgagaaagccgcacgtggcaaacgcccaatcttcgaatgtttctggaatggcagactaatcccatatacaagcgttgaagatttcgactggtgtacaccccctaagaagagagggctggcacctatagaatgctataatagaatctcgggcgctttgtttacaaacgataagttccaggtgtcaaccaataagctcaccttcatggatcttgaactcaagctgaaggacaaaaatactctctttacccggatcttaaatggccaagaacagaggatgaagattgatagggagtttgcattatggctgaaggattgtcacgaaaagtacgataaacagataaagtttaccctctttaagggggttatcactagaccagacctaccttcaaaaaagcagggcccatgggctacgtacgccgcaattgagtgggacggcaaaatttacaaggctgggcagctggtaaaaacaattaagacattacctttgttctacggttctattgtccggttctttctttacggcgatcatgatggagaagtttacgcaacggggggagaggttcaaatagcaatggagcctcaggcactctacgacgaagtgcgaacggtaccaattgcaaaactggatcggacggtcgccgaaaaagctgttaaaaagtacgttgaggatgagatggccagactcccagatcgcctgtcagtgacctggccagaaggggatgagctccttcccaacgaagtgcgtcccgcaggcacaccgataggggctctgaggattgaaatccttaacaagaaaggggaggccatgcagaagctccccggaacatcacatggtggttcgaagaaactgctagtcgagctgaaagtcatcctgcattctagcagtggcaataaggaaatcatttcccacatcagccaacatggcggtaagtggccctactggtttaaaaagatggaaaacattcagaaactggggaactatactctgaagttacaggtggtgctgaacgagtccaatgcggacacttacgccggacggccattgccatctaaggctataaaattttccgtgaaagagggcaaacccgaaaagtttagctttggcttgctggatctgccctttagagtcggcgtacccttcaatattcctctcgagtttcaggacgagtttggccacacatcgcagctcgtgaccgacatccagcccgttctggaggcaagcggtctgagcctgcactatgaggagattactaagggaccaaactgcgtcattcggggagtcacagccaaagggccagtgaacagttgtcaaggtaaaaattacaacctcaaggtcactctccctggactgaaggaagattcccagatcctgaagataaggctgctccctgggcaccccagacggcttaaggtgaaacctgacagcgaaattctcgtgatcgagaatggcaccgccttcccatttcaagtggaggtgcttgatgaaagtgacaatattaccgcccagccaaagcttatagtacactgtaaattttcaggagcccctaacctcccggtctacgtggtcgattgttcctcctccggcaccagtattttgacgggtagtgcaattcaggttcagaatatcaagaaggaccagaccctgaaggcacgaatcgaaatcccgtcatgtaaagacgtggctcccgtagagaagaccatcaagctcctgccatcatcacatgtggcccgtctgcagatcttcagcgtggagggacagaaagcaatccagataaagcatcaggatgaggtgaactggatcgccggagatatcatgcataacctaattttccagatgtatgatgagggggagcgagaaataaatatcaccagtgcgctggcagagaagataaaggtcaattggactccagagattaataaggagcatttgttacagggcttactcccagatgtccaggtgcccacctccgtgaaagacatgcgttattgccaggtgtccttccaggatgatcatgtgtctctggaaagcgctttcaccgtccggcctcttcctgacgagcctaagcatctgaagtgtgagatgaagggaggaaaaactgtgcagatgggccaggagcttcagggagaagttgtgattatcatcaccgaccagtatgggaaccagatccaggcttttagtccttcctcgctctcaagcctgtcaatcgcaggcgtcgggttagattcaagtaacttaaagaccacgttccaggagaatactcagtccatctctgtgcgcggaatcaagttcatcccaggtcctcccggtaataaagatctgtgcttcacctggagggagttcagcgactttatccgggtccagctgatctccggaccacccgcaaagttacttctcattgattggcccgagctgaaagaatctatccccgtcatcaatggtagagacctgcaaaatcctattatcgtccagctgtgcgaccagtgggataatcctgcccctgtgcagcatgttaagatctccctgaccaaggcttcgaatctgaaactgatgccatctaatcaacagcacaagaccgatgaaaagggacgagccaacttaggagtcttctctgtgttcgccccaaggggagaacatacgctacaggtcaaggccatctataataagagcattatcgagggccctataatcaagttaatgattctgccagaccccgaaaaacctgtgaggctgaatgttaaatatgacaaagatgcaagcttcctggcaggagggttgttcacagattttatgatatccgtaatctctgaggacgattccatcatcaaaaacatcaaccccgctcgaattagcatgaagatgtggaaactgagcacaagcggcaatcgcccaccagcgaacgccgagacttttagctgcaacaaaatcaaagataatgataaagaggacgggtgtttctacttccgagataaggtcataccgaataaagtgggtacatactgtattcagtttggcttcatgatggataagacgaatatccttaatagcgaacaggtcatcgtggaagtgcttcccaaccagcccgttaaactagtcccaaaaattaagccgccaacacctgcagtgtctaatgtccgatctgttgcctcaaggactttagtgcgcgacctgcatctgagcattacagatgattacgataatcatacagggatcgatctcgtgggcacaattatcgcaacaataaagggctccaatgaggaggacaccgacacacctttgttcatcggcaaagtgaggacactggagttcccttttgtgaacggctctgccgagatcatgtccttggtactggccgagtcttctccagggcgagattccacagagtatttcatcgttttcgaaccgaggctccccctgttgtctcgaacactagagccctatattctgccattcatgttttataacgacgtcaaaaaacagcagcagatggccgcactgacaaaggagaaggatcagttgtcgcagagcattgtgatgtataaatcgctgtttgaggccagccagcagttgctcaatgagatgaagtgtcaggttgaggaggcgcgactgaaggaagcccagctgcgcaacgaacttaagatccacaatattgacatacccactactcaacaggtgccccatatcgaggccctcctgaaaaggaaactatcagagcaggaggaattaaagaagaaaccgcgacggagttgtacactcccaaactacacaaaaggcagtggcgacgtattaggtaagatcgctcatctggcccagattgaagacgaccgggctgctatggtaataagctggcacctggcttccgacatggactgcgtggttaccctcactaccgatgctgctcgccgtatttatgacgagactcagggcaggcagcaggttcttcctctggattcaatctacaaaaagaccttgcctgattggaaacgcagcttgccgcactttcggaacggcaagctgtatttcaaaccaattggtgatcctgtgttcgctcgggacctgctcacatttcctgataacgtggagcattgtgagaccgtctttggtatgctcttaggtgacactattatcttggataacttggacgctgcaaaccattacaggaaggaggtggtgaaaattactcactgtccgactcttcttacaagagacggggacaggatcagatcaaatggtaaattcggagggctgcaaaataaggcccctcccatggataagttgcgcggaatggtattcggagctcctgttcctaagcaatgtctgatcctgggcgagcagattgacctgctacagcagtaccggagcgccgtgtgtaaactggactcagtgaacaaagatctaaattctcagctggagtacctccgcacccctgacatgcgtaagaagaagcaggagctcgacgagcatgagaagaatctgaagttaattgaggaaaagctggggatgacccccatcagaaagtgcaacgatagcttgagacactctcctaaggtggaaacaaccgactgtccggtaccccctaagaggatgagaagggaggctacaagacagaaccggatcattaccaagacagacgtgta

SEQ ID NO: 185768 - DNA, 5754 bp, Artificial Sequence
  derived and/or modified sequence
atggccgccgccgacggcggcggccccggcggcgccagcgtgggcaccgaggaggacggcggcggcgtgggccacagaaccgtgtacctgttcgacagaagagagaaggagagcgagctgggcgacagacccctgcaggtgggcgagagaagcgactacgccggcttcagagcctgcgtgtgccagaccctgggcatcagccccgaggagaagttcgtgatcaccaccaccagcagaaaggagatcacctgcgacaacttcgacgagaccgtgaaggacggcgtgaccctgtacctgctgcagagcgtgaaccagctgctgctgaccgccaccaaggagagaatcgacttcctgccccactacgacaccctggtgaagagcggcatgtacgagtactacgccagcgagggccagaaccccctgcccttcgccctggccgagctgatcgacaacagcctgagcgccaccagcagaaacatcggcgtgagaagaatccagatcaagctgctgttcgacgagacccagggcaagcccgccgtggccgtgatcgacaacggcagaggcatgaccagcaagcagctgaacaactgggccgtgtacagactgagcaagttcaccagacagggcgacttcgagagcgaccacagcggctacgtgagacccgtgcccgtgcccagaagcctgaacagcgacatcagctacttcggcgtgggcggcaagcaggccgtgttcttcgtgggccagagcgccagaatgatcagcaagcccgccgacagccaggacgtgcacgagctggtgctgagcaaggaggacttcgagaagaaggagaagaacaaggaggccatctacagcggctacatcagaaacagaaagcccagcgacagcgtgcacatcaccaacgacgacgagagattcctgcaccacctgatcatcgaggagaaggagaaggacagcttcaccgccgtggtgatcaccggcgtgcagcccgagcacatccagtacctgaagaactacttccacctgtggaccagacagctggcccacatctaccactactacatccacggccccaagggcaacgagatcagaaccagcaaggaggtggagcccttcaacaacatcgacatcgagatcagcatgttcgagaagggcaaggtgcccaagatcgtgaacctgagagagatccaggacgacatgcagaccctgtacgtgaacaccgccgccgacagcttcgagttcaaggcccacgtggagggcgacggcgtggtggagggcatcatcagataccaccccttcctgtacgacagagagacctaccccgacgacccctgcttccccagcaagctgaaggacgaggacgacgaggacgactgcttcatcctggagaaggccgccagaggcaagagacccatcttcgagtgcttctggaacggcagactgatcccctacaccagcgtggaggacttcgactggtgcaccccccccaagaagagaggcctggcccccatcgagtgctacaacagaatcagcggcgccctgttcaccaacgacaagttccaggtgagcaccaacaagctgaccttcatggacctggagctgaagctgaaggacaagaacaccctgttcaccagaatcctgaacggccaggagcagagaatgaagatcgacagagagttcgccctgtggctgaaggactgccacgagaagtacgacaagcagatcaagttcaccctgttcaagggcgtgatcaccagacccgacctgcccagcaagaagcagggcccctgggccacctacgccgccatcgagtgggacggcaagatctacaaggccggccagctggtgaagaccatcaagaccctgcccctgttctacggcagcatcgtgagattcttcctgtacggcgaccacgacggcgaggtgtacgccaccggcggcgaggtgcagatcgccatggagccccaggccctgtacgacgaggtgagaaccgtgcccatcgccaagctggacagaaccgtggccgagaaggccgtgaagaagtacgtggaggacgagatggccagactgcccgacagactgagcgtgacctggcccgagggcgacgagctgctgcccaacgaggtgagacccgccggcacccccatcggcgccctgagaatcgagatcctgaacaagaagggcgaggccatgcagaagctgcccggcaccagccacggcggcagcaagaagctgctggtggagctgaaggtgatcctgcacagcagcagcggcaacaaggagatcatcagccacatcagccagcacggcggcaagtggccctactggttcaagaagatggagaacatccagaagctgggcaactacaccctgaagctgcaggtggtgctgaacgagagcaacgccgacacctacgccggcagacccctgcccagcaaggccatcaagttcagcgtgaaggagggcaagcccgagaagttcagcttcggcctgctggacctgcccttcagagtgggcgtgcccttcaacatccccctggagttccaggacgagttcggccacaccagccagctggtgaccgacatccagcccgtgctggaggccagcggcctgagcctgcactacgaggagatcaccaagggccccaactgcgtgatcagaggcgtgaccgccaagggccccgtgaacagctgccagggcaagaactacaacctgaaggtgaccctgcccggcctgaaggaggacagccagatcctgaagatcagactgctgcccggccaccccagaagactgaaggtgaagcccgacagcgagatcctggtgatcgagaacggcaccgccttccccttccaggtggaggtgctggacgagagcgacaacatcaccgcccagcccaagctgatcgtgcactgcaagttcagcggcgcccccaacctgcccgtgtacgtggtggactgcagcagcagcggcaccagcatcctgaccggcagcgccatccaggtgcagaacatcaagaaggaccagaccctgaaggccagaatcgagatccccagctgcaaggacgtggcccccgtggagaagaccatcaagctgctgcccagcagccacgtggccagactgcagatcttcagcgtggagggccagaaggccatccagatcaagcaccaggacgaggtgaactggatcgccggcgacatcatgcacaacctgatcttccagatgtacgacgagggcgagagagagatcaacatcaccagcgccctggccgagaagatcaaggtgaactggacccccgagatcaacaaggagcacctgctgcagggcctgctgcccgacgtgcaggtgcccaccagcgtgaaggacatgagatactgccaggtgagcttccaggacgaccacgtgagcctggagagcgccttcaccgtgagacccctgcccgacgagcccaagcacctgaagtgcgagatgaagggcggcaagaccgtgcagatgggccaggagctgcagggcgaggtggtgatcatcatcaccgaccagtacggcaaccagatccaggccttcagccccagcagcctgagcagcctgagcatcgccggcgtgggcctggacagcagcaacctgaagaccaccttccaggagaacacccagagcatcagcgtgagaggcatcaagttcatccccggcccccccggcaacaaggacctgtgcttcacctggagagagttcagcgacttcatcagagtgcagctgatcagcggcccccccgccaagctgctgctgatcgactggcccgagctgaaggagagcatccccgtgatcaacggcagagacctgcagaaccccatcatcgtgcagctgtgcgaccagtgggacaaccccgcccccgtgcagcacgtgaagatcagcctgaccaaggccagcaacctgaagctgatgcccagcaaccagcagcacaagaccgacgagaagggcagagccaacctgggcgtgttcagcgtgttcgcccccagaggcgagcacaccctgcaggtgaaggccatctacaacaagagcatcatcgagggccccatcatcaagctgatgatcctgcccgaccccgagaagcccgtgagactgaacgtgaagtacgacaaggacgccagcttcctggccggcggcctgttcaccgacttcatgatcagcgtgatcagcgaggacgacagcatcatcaagaacatcaaccccgccagaatcagcatgaagatgtggaagctgagcaccagcggcaacagaccccccgccaacgccgagaccttcagctgcaacaagatcaaggacaacgacaaggaggacggctgcttctacttcagagacaaggtgatccccaacaaggtgggcacctactgcatccagttcggcttcatgatggacaagaccaacatcctgaacagcgagcaggtgatcgtggaggtgctgcccaaccagcccgtgaagctggtgcccaagatcaagccccccacccccgccgtgagcaacgtgagaagcgtggccagcagaaccctggtgagagacctgcacctgagcatcaccgacgactacgacaaccacaccggcatcgacctggtgggcaccatcatcgccaccatcaagggcagcaacgaggaggacaccgacacccccctgttcatcggcaaggtgagaaccctggagttccccttcgtgaacggcagcgccgagatcatgagcctggtgctggccgagagcagccccggcagagacagcaccgagtacttcatcgtgttcgagcccagactgcccctgctgagcagaaccctggagccctacatcctgcccttcatgttctacaacgacgtgaagaagcagcagcagatggccgccctgaccaaggagaaggaccagctgagccagagcatcgtgatgtacaagagcctgttcgaggccagccagcagctgctgaacgagatgaagtgccaggtggaggaggccagactgaaggaggcccagctgagaaacgagctgaagatccacaacatcgacatccccaccacccagcaggtgccccacatcgaggccctgctgaagagaaagctgagcgagcaggaggagctgaagaagaagcccagaagaagctgcaccctgcccaactacaccaagggcagcggcgacgtgctgggcaagatcgcccacctggcccagatcgaggacgacagagccgccatggtgatcagctggcacctggccagcgacatggactgcgtggtgaccctgaccaccgacgccgccagaagaatctacgacgagacccagggcagacagcaggtgctgcccctggacagcatctacaagaagaccctgcccgactggaagagaagcctgccccacttcagaaacggcaagctgtacttcaagcccatcggcgaccccgtgttcgccagagacctgctgaccttccccgacaacgtggagcactgcgagaccgtgttcggcatgctgctgggcgacaccatcatcctggacaacctggacgccgccaaccactacagaaaggaggtggtgaagatcacccactgccccaccctgctgaccagagacggcgacagaatcagaagcaacggcaagttcggcggcctgcagaacaaggccccccccatggacaagctgagaggcatggtgttcggcgcccccgtgcccaagcagtgcctgatcctgggcgagcagatcgtgcacgcctgcgtgcccagctacagcggcggctag

SEQ ID NO: 185769 - DNA, 6018 bp, Artificial Sequence
  derived and/or modified sequence
atggccgccgccgacggcggcggccccggcggcgccagcgtgggcaccgaggaggacggcggcggcgtgggccacagaaccgtgtacctgttcgacagaagagagaaggagagcgagctgggcgacagacccctgcaggtgggcgagagaagcgactacgccggcttcagagcctgcgtgtgccagaccctgggcatcagccccgaggagaagttcgtgatcaccaccaccagcagaaaggagatcacctgcgacaacttcgacgagaccgtgaaggacggcgtgaccctgtacctgctgcagagcgtgaaccagctgctgctgaccgccaccaaggagagaatcgacttcctgccccactacgacaccctggtgaagagcggcatgtacgagtactacgccagcgagggccagaaccccctgcccttcgccctggccgagctgatcgacaacagcctgagcgccaccagcagaaacatcggcgtgagaagaatccagatcaagctgctgttcgacgagacccagggcaagcccgccgtggccgtgatcgacaacggcagaggcatgaccagcaagcagctgaacaactgggccgtgtacagactgagcaagttcaccagacagggcgacttcgagagcgaccacagcggctacgtgagacccgtgcccgtgcccagaagcctgaacagcgacatcagctacttcggcgtgggcggcaagcaggccgtgttcttcgtgggccagagcgccagaatgatcagcaagcccgccgacagccaggacgtgcacgagctggtgctgagcaaggaggacttcgagaagaaggagaagaacaaggaggccatctacagcggctacatcagaaacagaaagcccagcgacagcgtgcacatcaccaacgacgacgagagattcctgcaccacctgatcatcgaggagaaggagaaggacagcttcaccgccgtggtgatcaccggcgtgcagcccgagcacatccagtacctgaagaactacttccacctgtggaccagacagctggcccacatctaccactactacatccacggccccaagggcaacgagatcagaaccagcaaggaggtggagcccttcaacaacatcgacatcgagatcagcatgttcgagaagggcaaggtgcccaagatcgtgaacctgagagagatccaggacgacatgcagaccctgtacgtgaacaccgccgccgacagcttcgagttcaaggcccacgtggagggcgacggcgtggtggagggcatcatcagataccaccccttcctgtacgacagagagacctaccccgacgacccctgcttccccagcaagctgaaggacgaggacgacgaggacgactgcttcatcctggagaaggccgccagaggcaagagacccatcttcgagtgcttctggaacggcagactgatcccctacaccagcgtggaggacttcgactggtgcaccccccccaagaagagaggcctggcccccatcgagtgctacaacagaatcagcggcgccctgttcaccaacgacaagttccaggtgagcaccaacaagctgaccttcatggacctggagctgaagctgaaggacaagaacaccctgttcaccagaatcctgaacggccaggagcagagaatgaagatcgacagagagttcgccctgtggctgaaggactgccacgagaagtacgacaagcagatcaagttcaccctgttcaagggcgtgatcaccagacccgacctgcccagcaagaagcagggcccctgggccacctacgccgccatcgagtgggacggcaagatctacaaggccggccagctggtgaagaccatcaagaccctgcccctgttctacggcagcatcgtgagattcttcctgtacggcgaccacgacggcgaggtgtacgccaccggcggcgaggtgcagatcgccatggagccccaggccctgtacgacgaggtgagaaccgtgcccatcgccaagctggacagaaccgtggccgagaaggccgtgaagaagtacgtggaggacgagatggccagactgcccgacagactgagcgtgacctggcccgagggcgacgagctgctgcccaacgaggtgagacccgccggcacccccatcggcgccctgagaatcgagatcctgaacaagaagggcgaggccatgcagaagctgcccggcaccagccacggcggcagcaagaagctgctggtggagctgaaggtgatcctgcacagcagcagcggcaacaaggagatcatcagccacatcagccagcacggcggcaagtggccctactggttcaagaagatggagaacatccagaagctgggcaactacaccctgaagctgcaggtggtgctgaacgagagcaacgccgacacctacgccggcagacccctgcccagcaaggccatcaagttcagcgtgaaggagggcaagcccgagaagttcagcttcggcctgctggacctgcccttcagagtgggcgtgcccttcaacatccccctggagttccaggacgagttcggccacaccagccagctggtgaccgacatccagcccgtgctggaggccagcggcctgagcctgcactacgaggagatcaccaagggccccaactgcgtgatcagaggcgtgaccgccaagggccccgtgaacagctgccagggcaagaactacaacctgaaggtgaccctgcccggcctgaaggaggacagccagatcctgaagatcagactgctgcccggccaccccagaagactgaaggtgaagcccgacagcgagatcctggtgatcgagaacggcaccgccttccccttccaggtggaggtgctggacgagagcgacaacatcaccgcccagcccaagctgatcgtgcactgcaagttcagcggcgcccccaacctgcccgtgtacgtggtggactgcagcagcagcggcaccagcatcctgaccggcagcgccatccaggtgcagaacatcaagaaggaccagaccctgaaggccagaatcgagatccccagctgcaaggacgtggcccccgtggagaagaccatcaagctgctgcccagcagccacgtggccagactgcagatcttcagcgtggagggccagaaggccatccagatcaagcaccaggacgaggtgaactggatcgccggcgacatcatgcacaacctgatcttccagatgtacgacgagggcgagagagagatcaacatcaccagcgccctggccgagaagatcaaggtgaactggacccccgagatcaacaaggagcacctgctgcagggcctgctgcccgacgtgcaggtgcccaccagcgtgaaggacatgagatactgccaggtgagcttccaggacgaccacgtgagcctggagagcgccttcaccgtgagacccctgcccgacgagcccaagcacctgaagtgcgagatgaagggcggcaagaccgtgcagatgggccaggagctgcagggcgaggtggtgatcatcatcaccgaccagtacggcaaccagatccaggccttcagccccagcagcctgagcagcctgagcatcgccggcgtgggcctggacagcagcaacctgaagaccaccttccaggagaacacccagagcatcagcgtgagaggcatcaagttcatccccggcccccccggcaacaaggacctgtgcttcacctggagagagttcagcgacttcatcagagtgcagctgatcagcggcccccccgccaagctgctgctgatcgactggcccgagctgaaggagagcatccccgtgatcaacggcagagacctgcagaaccccatcatcgtgcagctgtgcgaccagtgggacaaccccgcccccgtgcagcacgtgaagatcagcctgaccaaggccagcaacctgaagctgatgcccagcaaccagcagcacaagaccgacgagaagggcagagccaacctgggcgtgttcagcgtgttcgcccccagaggcgagcacaccctgcaggtgaaggccatctacaacaagagcatcatcgagggccccatcatcaagctgatgatcctgcccgaccccgagaagcccgtgagactgaacgtgaagtacgacaaggacgccagcttcctggccggcggcctgttcaccgacttcatgatcagcgtgatcagcgaggacgacagcatcatcaagaacatcaaccccgccagaatcagcatgaagatgtggaagctgagcaccagcggcaacagaccccccgccaacgccgagaccttcagctgcaacaagatcaaggacaacgacaaggaggacggctgcttctacttcagagacaaggtgatccccaacaaggtgggcacctactgcatccagttcggcttcatgatggacaagaccaacatcctgaacagcgagcaggtgatcgtggaggtgctgcccaaccagcccgtgaagctggtgcccaagatcaagccccccacccccgccgtgagcaacgtgagaagcgtggccagcagaaccctggtgagagacctgcacctgagcatcaccgacgactacgacaaccacaccggcatcgacctggtgggcaccatcatcgccaccatcaagggcagcaacgaggaggacaccgacacccccctgttcatcggcaaggtgagaaccctggagttccccttcgtgaacggcagcgccgagatcatgagcctggtgctggccgagagcagccccggcagagacagcaccgagtacttcatcgtgttcgagcccagactgcccctgctgagcagaaccctggagccctacatcctgcccttcatgttctacaacgacgtgaagaagcagcagcagatggccgccctgaccaaggagaaggaccagctgagccagagcatcgtgatgtacaagagcctgttcgaggccagccagcagctgctgaacgagatgaagtgccaggtggaggaggccagactgaaggaggcccagctgagaaacgagctgaagatccacaacatcgacatccccaccacccagcaggtgccccacatcgaggccctgctgaagagaaagctgagcgagcaggaggagctgaagaagaagcccagaagaagctgcaccctgcccaactacaccaagggcagcggcgacgtgctgggcaagatcgcccacctggcccagatcgaggacgacagagccgccatggtgatcagctggcacctggccagcgacatggactgcgtggtgaccctgaccaccgacgccgccagaagaatctacgacgagacccagggcagacagcaggtgctgcccctggacagcatctacaagaagaccctgcccgactggaagagaagcctgccccacttcagaaacggcaagctgtacttcaagcccatcggcgaccccgtgttcgccagagacctgctgaccttccccgacaacgtggagcactgcgagaccgtgttcggcatgctgctgggcgacaccatcatcctggacaacctggacgccgccaaccactacagaaaggaggtggtgaagatcacccactgccccaccctgctgaccagagacggcgacagaatcagaagcaacggcaagttcggcggcctgcagaacaaggccccccccatggacaagctgagaggcatggtgttcggcgcccccgtgcccaagcagtgcctgatcctgggcgagcagatcgacctgctgcagcagtacagaagcgccgtgtgcaagctggacagcgtgaacaaggacctgaacagccagctggagtacctgagaacccccgacatgagaaagaagaagcaggagctggacgagcacgagaagaacctgaagctgatcgaggagaagctgggcatgacccccatcagaaagtgcaacgacagcctgagacacagccccaaggtggagaccaccgactgccccgtgccccccaagagaatgagaagagaggccaccagacagaacagaatcatcaccaagaccgacgtgtag

SEQ ID NO: 185770 - protein, 202 aa, Artificial Sequence
  derived and/or modified sequence
MENEPDHENVEQSLCAKTSEEELNKSFNLEASLSKFSYIDMDKELEFKNDLIDDKEFDIPQVDTPPTLESILNETDDEDESFILEDPTLLNIDTIDSHSYDTSSVASSDSGDRTNLKRKKKLPDSFSLHGSVMRHSLLKGISAQIVSAADKVDAGLPTAIAVSSLIAVGTSHGLALIFDQNQALRLCLGSTSVGGQYGAISA

SEQ ID NO: 185771 - protein, 1426 aa, Artificial Sequence
  derived and/or modified sequence
MENEPDHENVEQSLCAKTSEEELNKSFNLEASLSKFSYIDMDKELEFKNDLIDDKEFDIPQVDTPPTLESILNETDDEDESFILEDPTLLNIDTIDSHSYDTSSVASSDSGDRTNLKRKKKLPDSFSLHGSVMRHSLLKGISAQIVSAADKVDAGLPTAIAVSSLIAVGTSHGLALIFDQNQALRLCLGSTSVGGQYGAISALSINNDCSRLLCGFAKGQITMWDLASGKLLRSITDAHPPGTAILHIKFTDDPTLAICNDSGGSVFELTFKRVMGVRTCESRCLFSGSKGEVCCIEPLHSKPELKDHPITQFSLLAMASLTKILVIGLKPSLKVWMTFPYGRMDPSSVPLLAWHFVAVQNYVNPMLAFCRGDVVHFLLVKRDESGAIHVTKQKHLHLYYDLINFTWINSRTVVLLDSVEKLHVIDRQTQEELETVEISEVQLVYNSSHFKSLATGGNVSQALALVGEKACYQSISSYGGQIFYLGTKSVYVMMLRSWRERVDHLLKQDCLTEALALAWSFHEGKAKAVVGLSGDASKRKAIVADRMVEILFHYADRALKKCPDQGKIQVMEQHFQDMVPVIVDYCLLLQRKDLLFSQMYDKLSENSVAKGVFLECLEPYILSDKLVGITPQVMKDLIVHFQDKKLMENVEALIVHMDITSLDIQQVVLMCWENRLYDAMIYVYNRGMNEFISPMEKLFRVIAPPLNAGKTLTDEQVVMGNKLLVYISCCLAGRAYPLGDIPEDLVPLVKNQVFEFLIRLHSAEASPEEEIYPYIRTLLHFDTREFLNVLALTFEDFKNDKQAVEYQQRIVDILLKVMVENSDFTPSQVGCLFTFLARQLAKPDNTLFVNRTLFDQVLEFLCSPDDDSRHSERQQVLLELLQAGGIVQFEESRLIRMAEKAEFYQICEFMYEREHQYDKIIDCYLRDPLREEEVFNYIHNILSIPGHSAEEKQSVWQKAMDHIEELVSLKPCKAAELVATHFSGHIETVIKKLQNQVLLFKFLRSLLDPREGIHVNQELLQISPCITEQFIELLCQFNPTQVIETLQVLECYRLEETIQITQKYQLHEVTAYLLEKKGDIHGAFLIMLERLQSKLQEVTHQGENTKEDPSLKDVEDTMVETIALCQRNSHNLNQQQREALWFPLLEAMMAPQKLSSSAIPHLHSEALKSLTMQVLNSMAAFIALPSILQRILQDPVYGKGKLGEIQGLILGMLDTFNYEQTLLETTTSLLNQDLHWSLCNLRASVTRGLNPKQDYCSICLQQYKRRQEMADEIIVFSCGHLYHSFCLQNKECTVEFEGQTRWTCYKCSSSNKVGKLSENSSEIKKGRITPSQVKMSPSYHQSKGDPTAKKGTSEPVLDPQQIQAFDQLCRLYRGSSRLALLTELSQNRSSESYRPFSGSQSAPAFNSIFQNENFQLQLIPPPVTED

SEQ ID NO: 185772 - protein, 121 aa, Artificial Sequence
  derived and/or modified sequence
MENEPDHENVEQSLCAKTSEEELNKSFNLEASLSKFSYIDMDKELEFKNDLIDDKEFDIPQVDTPPTLESILNETDDEDESFILEDPTLLNIDTIDSHSYDTSSVASSDSGDRTNLKRKKK

SEQ ID NO: 185773 - protein, 1336 aa, Artificial Sequence
  derived and/or modified sequence
MENEPDHENVEQSLCAKTSEEELNKSFNLEASLSKFSYIDMDKELEFKNDLIDDKEFDIPQVDTPPTLESILNETDDEDESFILEDPTLLNIDTIDSHSYDTSSVASSDSGDRTNLKRKKKLPDSFSLHGSVMRHSLLKGISAQIVSAADKVDAGLPTAIAVSSLIAVGTSHGLALIFDQNQALRLCLGSTSVGGQYGAISALSINNDCSRLLCGFAKGQITMWDLASGKLLRSITDAHPPGTAILHIKFTDDPTLAICNDSGGSVFELTFKRVMGVRTCESRCLFSGSKGEVCCIEPLHSKPELKDHPITQFSLLAMASLTKILVIGLKPSLKVWMTFPYGRMDPSSVPLLAWHFVAVQNYVNPMLAFCRGDVVHFLLVKRDESGAIHVTKQKHLHLYYDLINFTWINSRTVVLLDSVEKLHVIDRQTQEELETVEISEVQLVYNSSHFKSLATGGNVSQALALVGEKACYQSISSYGGQIFYLGTKSVYVMMLRSWRERVDHLLKQDCLTEALALAWSFHEGKAKAVVGLSGDASKRKAIVADRMVEILFHYADRALKKCPDQGKIQVMEQHFQVVLMCWENRLYDAMIYVYNRGMNEFISPMEKLFRVIAPPLNAGKTLTDEQVVMGNKLLVYISCCLAGRAYPLGDIPEDLVPLVKNQVFEFLIRLHSAEASPEEEIYPYIRTLLHFDTREFLNVLALTFEDFKNDKQAVEYQQRIVDILLKVMVENSDFTPSQVGCLFTFLARQLAKPDNTLFVNRTLFDQVLEFLCSPDDDSRHSERQQVLLELLQAGGIVQFEESRLIRMAEKAEFYQICEFMYEREHQYDKIIDCYLRDPLREEEVFNYIHNILSIPGHSAEEKQSVWQKAMDHIEELVSLKPCKAAELVATHFSGHIETVIKKLQNQVLLFKFLRSLLDPREGIHVNQELLQISPCITEQFIELLCQFNPTQVIETLQVLECYRLEETIQITQKYQLHEVTAYLLEKKGDIHGAFLIMLERLQSKLQEVTHQGENTKEDPSLKDVEDTMVETIALCQRNSHNLNQQQREALWFPLLEAMMAPQKLSSSAIPHLHSEALKSLTMQVLNSMAAFIALPSILQRILQDPVYGKGKLGEIQGLILGMLDTFNYEQTLLETTTSLLNQDLHWSLCNLRASVTRGLNPKQDYCSICLQQYKRRQEMADEIIVFSCGHLYHSFCLQNKECTVEFEGQTRWTCYKCSSSNKVGKLSENSSEIKKGRITPSQVKMSPSYHQSKGDPTAKKGTSEPVLDPQQIQAFDQLCRLYRGSSRLALLTELSQNRSSESYRPFSGSQSAPAFNSIFQNENFQLQLIPPPVTED

SEQ ID NO: 185774 - protein, 74 aa, Artificial Sequence
  derived and/or modified sequence
MENEPDHENVEQSLCAKTSEEELNKSFNLEASLSKFSYIDMDKELEFKNDLIDDKEFDIPQVDTPPTLESILNE

SEQ ID NO: 185775 - DNA, 4281 bp, Artificial Sequence
  derived and/or modified sequence
atggagaacgagcccgaccacgagaacgtggagcagagcctgtgcgccaagaccagcgaggaggagctgaacaagagcttcaacctggaggccagcctgagcaagttcagctacatcgacatggacaaggagctggagttcaagaacgacctgatcgacgacaaggagttcgacatcccccaggtggacaccccccccaccctggagagcatcctgaacgagaccgacgacgaggacgagagcttcatcctggaggaccccaccctgctgaacatcgacaccatcgacagccacagctacgacaccagcagcgtggccagcagcgacagcggcgacagaaccaacctgaagagaaagaagaagctgcccgacagcttcagcctgcacggcagcgtgatgagacacagcctgctgaagggcatcagcgcccagatcgtgagcgccgccgacaaggtggacgccggcctgcccaccgccatcgccgtgagcagcctgatcgccgtgggcaccagccacggcctggccctgatcttcgaccagaaccaggccctgagactgtgcctgggcagcaccagcgtgggcggccagtacggcgccatcagcgccctgagcatcaacaacgactgcagcagactgctgtgcggcttcgccaagggccagatcaccatgtgggacctggccagcggcaagctgctgagaagcatcaccgacgcccacccccccggcaccgccatcctgcacatcaagttcaccgacgaccccaccctggccatctgcaacgacagcggcggcagcgtgttcgagctgaccttcaagagagtgatgggcgtgagaacctgcgagagcagatgcctgttcagcggcagcaagggcgaggtgtgctgcatcgagcccctgcacagcaagcccgagctgaaggaccaccccatcacccagttcagcctgctggccatggccagcctgaccaagatcctggtgatcggcctgaagcccagcctgaaggtgtggatgaccttcccctacggcagaatggaccccagcagcgtgcccctgctggcctggcacttcgtggccgtgcagaactacgtgaaccccatgctggccttctgcagaggcgacgtggtgcacttcctgctggtgaagagagacgagagcggcgccatccacgtgaccaagcagaagcacctgcacctgtactacgacctgatcaacttcacctggatcaacagcagaaccgtggtgctgctggacagcgtggagaagctgcacgtgatcgacagacagacccaggaggagctggagaccgtggagatcagcgaggtgcagctggtgtacaacagcagccacttcaagagcctggccaccggcggcaacgtgagccaggccctggccctggtgggcgagaaggcctgctaccagagcatcagcagctacggcggccagatcttctacctgggcaccaagagcgtgtacgtgatgatgctgagaagctggagagagagagtggaccacctgctgaagcaggactgcctgaccgaggccctggccctggcctggagcttccacgagggcaaggccaaggccgtggtgggcctgagcggcgacgccagcaagagaaaggccatcgtggccgacagaatggtggagatcctgttccactacgccgacagagccctgaagaagtgccccgaccagggcaagatccaggtgatggagcagcacttccaggacatggtgcccgtgatcgtggactactgcctgctgctgcagagaaaggacctgctgttcagccagatgtacgacaagctgagcgagaacagcgtggccaagggcgtgttcctggagtgcctggagccctacatcctgagcgacaagctggtgggcatcaccccccaggtgatgaaggacctgatcgtgcacttccaggacaagaagctgatggagaacgtggaggccctgatcgtgcacatggacatcaccagcctggacatccagcaggtggtgctgatgtgctgggagaacagactgtacgacgccatgatctacgtgtacaacagaggcatgaacgagttcatcagccccatggagaagctgttcagagtgatcgccccccccctgaacgccggcaagaccctgaccgacgagcaggtggtgatgggcaacaagctgctggtgtacatcagctgctgcctggccggcagagcctaccccctgggcgacatccccgaggacctggtgcccctggtgaagaaccaggtgttcgagttcctgatcagactgcacagcgccgaggccagccccgaggaggagatctacccctacatcagaaccctgctgcacttcgacaccagagagttcctgaacgtgctggccctgaccttcgaggacttcaagaacgacaagcaggccgtggagtaccagcagagaatcgtggacatcctgctgaaggtgatggtggagaacagcgacttcacccccagccaggtgggctgcctgttcaccttcctggccagacagctggccaagcccgacaacaccctgttcgtgaacagaaccctgttcgaccaggtgctggagttcctgtgcagccccgacgacgacagcagacacagcgagagacagcaggtgctgctggagctgctgcaggccggcggcatcgtgcagttcgaggagagcagactgatcagaatggccgagaaggccgagttctaccagatctgcgagttcatgtacgagagagagcaccagtacgacaagatcatcgactgctacctgagagaccccctgagagaggaggaggtgttcaactacatccacaacatcctgagcatccccggccacagcgccgaggagaagcagagcgtgtggcagaaggccatggaccacatcgaggagctggtgagcctgaagccctgcaaggccgccgagctggtggccacccacttcagcggccacatcgagaccgtgatcaagaagctgcagaaccaggtgctgctgttcaagttcctgagaagcctgctggaccccagagagggcatccacgtgaaccaggagctgctgcagatcagcccctgcatcaccgagcagttcatcgagctgctgtgccagttcaaccccacccaggtgatcgagaccctgcaggtgctggagtgctacagactggaggagaccatccagatcacccagaagtaccagctgcacgaggtgaccgcctacctgctggagaagaagggcgacatccacggcgccttcctgatcatgctggagagactgcagagcaagctgcaggaggtgacccaccagggcgagaacaccaaggaggaccccagcctgaaggacgtggaggacaccatggtggagaccatcgccctgtgccagagaaacagccacaacctgaaccagcagcagagagaggccctgtggttccccctgctggaggccatgatggccccccagaagctgagcagcagcgccatcccccacctgcacagcgaggccctgaagagcctgaccatgcaggtgctgaacagcatggccgccttcatcgccctgcccagcatcctgcagagaatcctgcaggaccccgtgtacggcaagggcaagctgggcgagatccagggcctgatcctgggcatgctggacaccttcaactacgagcagaccctgctggagaccaccaccagcctgctgaaccaggacctgcactggagcctgtgcaacctgagagccagcgtgaccagaggcctgaaccccaagcaggactactgcagcatctgcctgcagcagtacaagagaagacaggagatggccgacgagatcatcgtgttcagctgcggccacctgtaccacagcttctgcctgcagaacaaggagtgcaccgtggagttcgagggccagaccagatggacctgctacaagtgcagcagcagcaacaaggtgggcaagctgagcgagaacagcagcgagatcaagaagggcagaatcacccccagccaggtgaagatgagccccagctaccaccagagcaagggcgaccccaccgccaagaagggcaccagcgagcccgtgctggacccccagcagatccaggccttcgaccagctgtgcagactgtacagaggcagcagcagactggccctgctgaccgagctgagccagaacagaagcagcgagagctacagacccttcagcggcagccagagcgcccccgccttcaacagcatcttccagaacgagaacttccagctgcagctgatccccccccccgtgaccgaggactag

SEQ ID NO: 185776 - DNA, 4011 bp, Artificial Sequence
  derived and/or modified sequence
atggagaacgagcccgaccacgagaacgtggagcagagcctgtgcgccaagaccagcgaggaggagctgaacaagagcttcaacctggaggccagcctgagcaagttcagctacatcgacatggacaaggagctggagttcaagaacgacctgatcgacgacaaggagttcgacatcccccaggtggacaccccccccaccctggagagcatcctgaacgagaccgacgacgaggacgagagcttcatcctggaggaccccaccctgctgaacatcgacaccatcgacagccacagctacgacaccagcagcgtggccagcagcgacagcggcgacagaaccaacctgaagagaaagaagaagctgcccgacagcttcagcctgcacggcagcgtgatgagacacagcctgctgaagggcatcagcgcccagatcgtgagcgccgccgacaaggtggacgccggcctgcccaccgccatcgccgtgagcagcctgatcgccgtgggcaccagccacggcctggccctgatcttcgaccagaaccaggccctgagactgtgcctgggcagcaccagcgtgggcggccagtacggcgccatcagcgccctgagcatcaacaacgactgcagcagactgctgtgcggcttcgccaagggccagatcaccatgtgggacctggccagcggcaagctgctgagaagcatcaccgacgcccacccccccggcaccgccatcctgcacatcaagttcaccgacgaccccaccctggccatctgcaacgacagcggcggcagcgtgttcgagctgaccttcaagagagtgatgggcgtgagaacctgcgagagcagatgcctgttcagcggcagcaagggcgaggtgtgctgcatcgagcccctgcacagcaagcccgagctgaaggaccaccccatcacccagttcagcctgctggccatggccagcctgaccaagatcctggtgatcggcctgaagcccagcctgaaggtgtggatgaccttcccctacggcagaatggaccccagcagcgtgcccctgctggcctggcacttcgtggccgtgcagaactacgtgaaccccatgctggccttctgcagaggcgacgtggtgcacttcctgctggtgaagagagacgagagcggcgccatccacgtgaccaagcagaagcacctgcacctgtactacgacctgatcaacttcacctggatcaacagcagaaccgtggtgctgctggacagcgtggagaagctgcacgtgatcgacagacagacccaggaggagctggagaccgtggagatcagcgaggtgcagctggtgtacaacagcagccacttcaagagcctggccaccggcggcaacgtgagccaggccctggccctggtgggcgagaaggcctgctaccagagcatcagcagctacggcggccagatcttctacctgggcaccaagagcgtgtacgtgatgatgctgagaagctggagagagagagtggaccacctgctgaagcaggactgcctgaccgaggccctggccctggcctggagcttccacgagggcaaggccaaggccgtggtgggcctgagcggcgacgccagcaagagaaaggccatcgtggccgacagaatggtggagatcctgttccactacgccgacagagccctgaagaagtgccccgaccagggcaagatccaggtgatggagcagcacttccaggtggtgctgatgtgctgggagaacagactgtacgacgccatgatctacgtgtacaacagaggcatgaacgagttcatcagccccatggagaagctgttcagagtgatcgccccccccctgaacgccggcaagaccctgaccgacgagcaggtggtgatgggcaacaagctgctggtgtacatcagctgctgcctggccggcagagcctaccccctgggcgacatccccgaggacctggtgcccctggtgaagaaccaggtgttcgagttcctgatcagactgcacagcgccgaggccagccccgaggaggagatctacccctacatcagaaccctgctgcacttcgacaccagagagttcctgaacgtgctggccctgaccttcgaggacttcaagaacgacaagcaggccgtggagtaccagcagagaatcgtggacatcctgctgaaggtgatggtggagaacagcgacttcacccccagccaggtgggctgcctgttcaccttcctggccagacagctggccaagcccgacaacaccctgttcgtgaacagaaccctgttcgaccaggtgctggagttcctgtgcagccccgacgacgacagcagacacagcgagagacagcaggtgctgctggagctgctgcaggccggcggcatcgtgcagttcgaggagagcagactgatcagaatggccgagaaggccgagttctaccagatctgcgagttcatgtacgagagagagcaccagtacgacaagatcatcgactgctacctgagagaccccctgagagaggaggaggtgttcaactacatccacaacatcctgagcatccccggccacagcgccgaggagaagcagagcgtgtggcagaaggccatggaccacatcgaggagctggtgagcctgaagccctgcaaggccgccgagctggtggccacccacttcagcggccacatcgagaccgtgatcaagaagctgcagaaccaggtgctgctgttcaagttcctgagaagcctgctggaccccagagagggcatccacgtgaaccaggagctgctgcagatcagcccctgcatcaccgagcagttcatcgagctgctgtgccagttcaaccccacccaggtgatcgagaccctgcaggtgctggagtgctacagactggaggagaccatccagatcacccagaagtaccagctgcacgaggtgaccgcctacctgctggagaagaagggcgacatccacggcgccttcctgatcatgctggagagactgcagagcaagctgcaggaggtgacccaccagggcgagaacaccaaggaggaccccagcctgaaggacgtggaggacaccatggtggagaccatcgccctgtgccagagaaacagccacaacctgaaccagcagcagagagaggccctgtggttccccctgctggaggccatgatggccccccagaagctgagcagcagcgccatcccccacctgcacagcgaggccctgaagagcctgaccatgcaggtgctgaacagcatggccgccttcatcgccctgcccagcatcctgcagagaatcctgcaggaccccgtgtacggcaagggcaagctgggcgagatccagggcctgatcctgggcatgctggacaccttcaactacgagcagaccctgctggagaccaccaccagcctgctgaaccaggacctgcactggagcctgtgcaacctgagagccagcgtgaccagaggcctgaaccccaagcaggactactgcagcatctgcctgcagcagtacaagagaagacaggagatggccgacgagatcatcgtgttcagctgcggccacctgtaccacagcttctgcctgcagaacaaggagtgcaccgtggagttcgagggccagaccagatggacctgctacaagtgcagcagcagcaacaaggtgggcaagctgagcgagaacagcagcgagatcaagaagggcagaatcacccccagccaggtgaagatgagccccagctaccaccagagcaagggcgaccccaccgccaagaagggcaccagcgagcccgtgctggacccccagcagatccaggccttcgaccagctgtgcagactgtacagaggcagcagcagactggccctgctgaccgagctgagccagaacagaagcagcgagagctacagacccttcagcggcagccagagcgcccccgccttcaacagcatcttccagaacgagaacttccagctgcagctgatccccccccccgtgaccgaggactag

SEQ ID NO: 185777 - DNA, 4281 bp, Artificial Sequence
  derived and/or modified sequence
atggaaaatgaacccgaccatgaaaacgtggagcagagtctgtgtgccaagaccagtgaggaggagcttaataaatccttcaatctggaggcctcgctgtctaaattctcctatatcgacatggacaaagaattggaattcaaaaatgatctaatcgacgacaaagagtttgatattccacaggttgacaccccacccacattagaatcaatactcaatgaaactgatgacgaagatgagtcctttatactggaggatcccacgctgcttaatatcgataccattgacagccactcatacgatacctcttcagtggcgtccagtgattcaggtgatcgaacaaatttgaagaggaagaaaaagttgccagactcgttctccctgcacggtagtgttatgaggcactctctcctgaaaggcatctccgcccaaatcgtgtcggcagctgacaaagtggacgcaggtttgcccacggccatagccgtctccagccttatcgcagttgggacatcccatgggcttgcattgatattcgatcaaaaccaggcgctgcgtttgtgcttgggttccacctctgtgggaggccagtacggcgccatttcagccctgagcatcaataacgactgcagccggctgctttgtggattcgcaaaaggacagattacaatgtgggacctggctagcggcaagttactccgcagcattacagacgctcaccccccaggaaccgcgatcttacatatcaaatttacagatgacccaaccctggccatctgcaatgattccgggggatcagtgtttgaactgacattcaaacgcgtgatgggcgtacgcacctgtgagtcacgatgcctgttctcggggtctaaaggcgaagtctgttgtattgagccgctgcactctaaacccgaattgaaagaccatccgatcacccagttctcattgctcgccatggcatcactcacgaaaatcctggtgatcggactgaaacccagtttgaaggtctggatgacattcccctacggtagaatggatccttctagtgtgcccctcctggcttggcactttgtggctgtacagaactatgtgaatcctatgctggctttttgcagaggagacgtggtccactttttgctggtaaagcgcgatgaatccggagcaatccacgtcaccaagcagaagcatctccacctgtattacgatctgatcaatttcacatggataaactcccgcaccgttgttttgttggattctgtggaaaagctgcacgttatcgacaggcagacgcaggaagaactcgagacagtggagatcagcgaagtgcagctcgtgtacaactcaagtcactttaagagcctagccacaggaggcaatgtttcacaggcactggcattagttggcgagaaggcgtgctatcagtccatcagttcctatggaggccagatcttttacctgggcacaaaaagtgtgtacgtcatgatgcttcgctcttggcgcgagcgggttgatcacctactgaagcaggactgtttaacggaggctctggccctcgcctggtcgtttcacgaaggaaaggccaaagccgttgtgggtctaagtggcgatgcctcgaagcgtaaggcaatagttgcagatagaatggtagagatactgttccactatgccgatagggctctgaaaaagtgtccagatcagggaaaaattcaggtgatggagcagcatttccaagatatggttcctgtgattgtggactattgtctcctcctgcagaggaaagacctactcttctctcagatgtatgacaagctgtccgaaaactcagtggctaaaggggtgttccttgagtgccttgagccgtatatcctaagtgacaagttagtggggataaccccacaggtcatgaaggatctcattgtacactttcaggataagaagcttatggaaaatgtggaagcgctgattgtccacatggatataacctccctggacatccaacaggttgttctgatgtgttgggaaaatcgtttgtacgatgccatgatctacgtgtataatcgaggcatgaacgaatttatttcccctatggagaaactgtttagggttatagctcctcctttgaatgctggcaaaactctcacagatgaacaggtggtgatgggaaataagctactagtctacatctcctgttgtctggctgggagggcttaccccctaggggatataccggaagacctggtgcccctggtgaaaaaccaggtctttgaattccttatcagactgcacagcgctgaggctagtcccgaagaggagatatatccttatatcaggacactcctgcactttgatacacgtgaattcctaaacgtgctcgctctgaccttcgaggactttaagaacgacaagcaggcggtagagtaccagcaaaggatagtggacattcttcttaaggtaatggttgagaatagcgattttaccccttcacaggttggctgtttgttcacctttctggcacgacagttggccaagcccgataacaccctcttcgttaacagaaccctgtttgatcaggttctcgagttcctctgctctcccgatgacgatagccgccatagcgagcggcagcaggtgctgttggaactgctgcaggcaggggggatcgtacaatttgaagagtctcgcttgattagaatggccgagaaagccgaattctaccagatttgtgaatttatgtatgaacgagagcaccagtatgataaaattattgattgttatctcagggatcctctaagagaggaggaggtgtttaattatattcacaatattctaagtatcccaggtcattcagccgaggagaaacagagcgtctggcaaaaggccatggaccacattgaggagcttgtgtccttaaagccttgtaaggctgccgagctggttgccacccacttttccggtcacatcgagaccgtgataaagaaacttcaaaatcaagtcctgctttttaaatttctccgttcactgttggatccgcgggagggcattcacgtgaatcaggagctgctgcagatcagtccatgtataacagaacagtttatagaactgttatgccagtttaaccccacacaggtcatcgaaactctccaagtgttagagtgttatcgcctcgaagagactatccagataacgcagaagtaccagttgcatgaggtgacggcatatctgctggagaaaaaaggagatattcatggcgcattcctaataatgctggaacggctccagagcaaattgcaggaagtaactcaccagggagaaaatacaaaggaagacccgtcgctcaaagatgtcgaggacaccatggtggagacgatcgctctctgtcaaaggaattcacacaacctgaaccagcagcagcgcgaagcattgtggttccccctccttgaggccatgatggcaccccagaagctgagttcatctgctatcccacacttgcactctgaggcccttaaatcactgacaatgcaggttctgaactcgatggcagccttcatcgctctccctagcattctccaaaggattctgcaggatcccgtgtatggtaagggaaagctgggagaaatccagggactcattttgggcatgctcgataccttcaattacgagcagaccctactggaaacaactacctcacttctgaaccaggatctccactggtccctctgtaacttacgtgcaagcgtcaccagggggctgaatcccaagcaggactattgcagcatttgcttgcagcagtacaagcgtcggcaggagatggcagatgagattatcgtcttttcctgtggacatttatatcattcattctgtttgcagaataaggagtgcacggtggagttcgaagggcaaacacgctggacatgttataagtgcagttcttcgaacaaagtcggaaagctgagtgaaaactcatcagagattaagaaaggccgtatcacaccatcacaggtcaagatgtctccctcatatcatcaaagtaagggtgatcctacagcaaagaaaggcacttccgaaccggtgctggacccacaacaaatccaggcatttgaccagctgtgcaggttgtatcgcggctcgtcgaggctggcactactcaccgaattgtcccagaacaggagctccgagtcctatcgaccattttccggttcacagtccgccccagcctttaatagtatcttccagaatgagaacttccaactgcagctgatccctcctcccgtcactgaggactag

SEQ ID NO: 185778 - DNA, 4011 bp, Artificial Sequence
  derived and/or modified sequence
atggagaacgaaccggaccatgaaaacgttgaacagtccctctgcgctaagacgtccgaagaggagcttaacaagtctttcaaccttgaggcctccctgtccaaattctcttacattgacatggacaaagagttagaattcaagaatgacctcatcgacgacaaggagttcgacatcccacaggtagatacaccccctaccctggaaagtatcctgaacgaaacagacgacgaagacgaaagcttcatactggaagatcccacattactgaacattgatactatcgattcacacagctatgacacatctagcgtcgcatcctctgactctggggatcgcacaaatttgaaaagaaagaagaaattgccagactccttctctttgcacgggagcgtaatgaggcattctctactaaaaggcatttctgcacagattgtcagtgcagctgataaagtcgacgcgggtttgcccacagcaatcgccgtgagctccctaatagccgtaggaacctctcacgggctggcattgatattcgaccagaaccaggctctgcggttatgtctgggcagcacttcagttggcgggcagtatggggccatcagtgccctgagtattaataatgactgctccagactactgtgtgggttcgctaagggacagatcactatgtgggacttggcaagtggcaagttgctgcggtcgatcactgatgctcatcctcccggcactgccatccttcacatcaagttcaccgacgatccaacccttgccatctgtaatgattctggtggttccgttttcgaacttacttttaagcgagtgatgggcgtccggacttgcgagtcaaggtgtctgttctctgggagcaaaggtgaggtgtgctgtatcgagcccctgcactcaaagccagagttgaaggaccaccccataacacagttctctttactcgcaatggcctctttgacaaagattctggtaattggtcttaagccttcacttaaggtgtggatgactttcccttacggacgtatggatccttcatccgtgcctttgctggcatggcattttgtcgccgttcagaactacgttaatcccatgctggccttttgtagaggggatgtggtgcatttcttgctggtcaaaagggatgagtctggtgctatacacgtgaccaaacagaaacacctgcacctttattacgatctgatcaattttacctggatcaactcccgaactgtcgtgctcctggactccgtggagaagctgcatgttatcgaccgccaaacccaggaggagctggaaacggtggaaatcagcgaggtccagttggtatacaacagcagtcatttcaaatctctggccacaggcggtaacgtgtcacaggccttagccctggtcggagaaaaagcttgctatcaaagcatctcttcatacggaggacagatcttttacttgggcactaagtcagtgtacgtcatgatgcttaggtcctggcgcgagagagtcgaccatctcctcaaacaggattgtctcactgaagccctggcactggcctggtcgtttcatgaagggaaggcaaaggccgtggtgggcttgtcgggcgatgccagcaaacggaaagctattgtggccgaccgcatggtagagattctgtttcactacgcagacagggcattaaagaagtgccccgatcagggaaagatacaagtgatggagcaacatttccaagtggttttgatgtgctgggagaaccgcttatacgatgccatgatatacgtgtataaccgtggtatgaatgaatttatcagcccgatggagaagctctttcgcgtaatagcccctcctctcaatgcaggcaaaacactcacagatgaacaggtcgttatgggcaacaaactgcttgtttacatcagttgctgcctggctggaagagcttatcctctcggtgacattcctgaggatctggtgcctctcgtgaaaaaccaggtttttgagttcctcatccggctgcacagcgcagaggcgtctccagaggaagagatatacccctatatcaggaccttgctgcactttgacacccgagaattcctgaatgtcttagccctcactttcgaggactttaagaatgataaacaggctgttgagtatcaacagcgaattgttgacatacttctgaaagtgatggttgaaaattcggactttacgccttcccaggttggctgtctgttcacattcttagcccggcaacttgcgaagccagacaacaccctgttcgtcaataggaccttgttcgatcaggtgttagaatttctgtgttccccagacgatgactccagacactccgagaggcaacaggtgctgcttgagctcctgcaggccggaggaatcgtgcagttcgaagaatccaggctcatccgtatggccgagaaagcagaattttaccagatctgtgaatttatgtatgagcgagagcaccagtacgacaagattatcgactgttatctccgcgaccccttgagagaagaggaggtgtttaattacatacataatattctgtccattcccgggcatagcgctgaggagaagcagtccgtgtggcaaaaagccatggatcacattgaggagctggttagtctcaaaccatgtaaggctgctgagcttgtcgcaacccatttcagcggtcatattgagaccgtgatcaaaaaattacagaatcaggtgctgctgtttaagtttctccgatccttgctggatccacgagaaggcatccatgttaaccaagagctgttacaaatctccccttgtatcaccgaacagttcattgagctcctgtgtcagttcaatcccacacaggtgatcgaaacattgcaagttttagaatgctacagacttgaagagaccatccaaatcacccagaagtaccagttgcatgaagtgaccgcttatttactggagaaaaagggagatatccatggggcattcctcattatgctggagagacttcagagtaaactgcaggaagtgacccatcagggagagaataccaaggaggatccatccctaaaagatgtggaggacacaatggtagagactatcgcactgtgccagagaaactcgcacaaccttaatcagcaacagcgcgaggccttgtggtttccgctcctcgaagccatgatggcaccccagaaactgagttcatcagccattcctcatctgcatagtgaggcactgaagagcctcactatgcaggttctgaatagtatggctgcctttatcgctctccctagtatactgcagcggattttgcaggacccagtgtatggcaaaggtaagttaggcgaaattcagggtctaatcctgggcatgctggataccttcaattacgaacagacattactggagactacaacatctctgctcaaccaggaccttcattggtctttatgtaatctgcgggcctccgtgacacggggactgaaccctaaacaggattattgttctatctgtctgcaacagtataagcgtcggcaagagatggccgatgagatcatagtgttctcgtgtggtcacttatatcattccttctgtctgcaaaataaggaatgtactgttgagttcgaaggacagactcgctggacttgctacaagtgtagttcctcgaataaggtggggaaactgagcgagaattcttcagaaattaagaagggcaggattaccccatcgcaggtcaaaatgagccccagctaccaccagagtaagggcgacccaaccgcaaagaaaggtacctccgaacctgtgttggacccacagcagattcaagcattcgatcagctctgccggctttaccggggaagttctcggctcgctctgctgacagagctatcgcaaaaccggtccagtgagagttatcgacctttcagcggcagccagtcggcgccagcctttaattccatttttcagaacgagaatttccagctgcagttgatccctccacctgtcacagaggattag

SEQ ID NO: 185779 - DNA, 4281 bp, Artificial Sequence
  derived and/or modified sequence
atggagaatgaaccagaccatgaaaatgtggagcagagcctgtgtgccaagaccagcgaggaggagctgaacaagagcttcaacctggaggccagcctgagcaagttctcctacatcgacatggacaaggagctggagttcaagaatgacctgattgatgacaaggagtttgacatcccccaggtggacaccccacccaccctggagagcatcctgaatgaaacagatgatgaagatgagagcttcatcctggaggaccccaccctgctgaacatcgacaccatcgacagccacagctatgacaccagctctgtggccagcagtgacagcggggacaggaccaacctgaagaggaagaagaagctgcctgacagcttcagcctgcacggctctgtgatgaggcacagcctgctgaagggcatcagcgcccagatcgtgtctgctgctgacaaggtggatgctggcctgcccacagccatcgctgtgagcagcctgattgctgtgggcaccagccacggcctggccctgatctttgaccagaaccaggccctgcggctgtgcctgggcagcacctctgtgggcggccagtatggagccatcagcgccctgagcatcaacaatgactgcagccggctgctgtgtggctttgccaagggccagatcaccatgtgggacctggccagcggcaagctgctgcggagcatcacagatgcccaccccccaggcacagccatcctgcacatcaagttcacagatgaccccaccctggccatctgcaatgacagcggcggctctgtgtttgagctgaccttcaagagggtgatgggcgtgaggacctgtgagagccgctgcctcttcagcggcagcaagggggaggtgtgctgcatcgagcccctgcacagcaagccagagctgaaggaccaccccatcacccagttcagcctgctggccatggccagcctgaccaagatcctggtgattggcctgaagcccagcctgaaggtgtggatgaccttcccctacggccgcatggaccccagctctgtgcccctgctggcctggcactttgtggccgtgcagaactacgtgaaccccatgctggccttctgcagaggagatgtggtgcacttcctgctggtgaagagagatgaaagtggggccatccacgtgaccaagcagaagcacctgcacctgtactatgacctgatcaacttcacctggatcaacagcaggacagtggtgctgctggacagcgtggagaagctgcacgtgattgaccggcagacccaggaggagctggagaccgtggagatcagcgaggtgcagctggtgtacaacagcagccacttcaagagcctggccactggaggaaatgtgtcccaggccctggccctggtgggggagaaggcctgctaccagagcatcagcagctatggaggccagatcttctacctgggcaccaagtctgtgtatgtgatgatgctgcgctcctggagggagcgggtggaccacctgctgaagcaggactgcctgacagaggccctggccctggcctggagcttccacgagggcaaggccaaggctgtggtgggcctgtctggagatgccagcaagaggaaggccatcgtggccgacaggatggtggagatcctcttccactatgctgaccgggccctgaagaagtgcccagaccagggcaagatccaggtgatggagcagcacttccaggacatggtgcctgtgattgtggactactgcctgctgctgcagaggaaggacctgctcttcagccagatgtatgacaagctgtctgaaaattctgtggccaagggcgtcttcctggagtgcctggagccctacatcctgagtgacaagctggtgggcatcaccccccaggtgatgaaggacctgattgtgcacttccaggacaagaagctgatggagaatgtggaggccctgattgtgcacatggacatcaccagcctggacatccagcaggtggtgctgatgtgctgggagaaccggctgtatgatgccatgatctacgtgtacaacagaggcatgaatgagttcatcagccccatggagaagctgttccgggtcatcgccccacccctgaatgctgggaagaccctgacagatgagcaggtggtgatgggcaacaagctgctggtgtacatcagctgctgcctggccggccgggcctaccccctgggggacatccctgaggacctggtgcccctggtgaagaaccaggtgtttgagttcctgatccggctgcacagcgctgaggccagccctgaggaggagatctacccctacatccgcaccctgctgcactttgacacccgggagttcctgaatgtgctggccctgacctttgaggacttcaagaatgacaagcaggccgtggagtaccagcagagaattgtggacatcctgctgaaggtgatggtggagaacagcgacttcacccccagccaggtgggctgcctcttcaccttcctggcccggcagctggccaagccagacaacaccctgtttgtgaacagaaccctgtttgaccaggtgctggagttcctgtgcagcccagatgatgacagccgccacagcgagcggcagcaggtgctgctggagctgctgcaggccggcggcatcgtgcagtttgaggagagccgcctcatccgcatggccgagaaggccgagttctaccagatctgtgagttcatgtatgagcgggagcaccagtatgacaagatcatcgactgctacctgcgggaccccctgcgggaggaggaggtgttcaactacatccacaacatcctgagcatccctggccacagcgctgaggagaagcagagcgtgtggcagaaggccatggaccacatcgaggagctggtgtccctgaagccctgcaaggctgctgagctggtggccacccacttcagcggccacatcgagaccgtcatcaagaagctgcagaaccaggtgctgctcttcaagttcctgcggagcctgctggacccccgggagggcatccacgtgaaccaggagctgctgcagatcagcccctgcatcacagagcagttcatcgagctgctgtgccagttcaaccccacccaggtgattgagaccctgcaggtgctggagtgctaccgcctggaggagaccatccagatcacccagaagtaccagctgcacgaggtgacagcctacctgctggagaagaagggggacatccatggagccttcctgatcatgctggagcggctgcagagcaagctgcaggaggtgacccaccagggcgagaacaccaaggaggaccccagcctgaaggatgtggaggacaccatggtggagaccatcgccctgtgccagaggaacagccacaacctgaaccagcagcagcgggaggccctgtggttccccctgctggaggccatgatggccccccagaagctgagcagcagcgccatcccccacctgcacagcgaggccctgaagagcctgaccatgcaggtgctgaacagcatggccgccttcatcgccctgcccagcatcctgcagaggatcctgcaggaccctgtgtatggcaagggcaagctgggggagatccagggcctcatcctgggcatgctggacaccttcaactatgagcagaccctgctggagaccaccaccagcctgctgaaccaggacctgcactggagcctgtgcaacctgcgggcctctgtgacccggggcctgaaccccaagcaggactactgcagcatctgcctgcagcagtacaagaggcggcaggagatggctgatgagatcatcgtgttcagctgtggccacctgtaccacagcttctgcctgcagaacaaggaatgtactgtggagtttgagggccagacccgctggacctgctacaagtgcagcagcagcaacaaggtgggcaagctgtctgagaacagcagcgagatcaagaagggccgcatcacccccagccaggtgaagatgagccccagctaccaccagagcaaaggagaccccacagccaagaagggcaccagcgagcctgtgctggacccccagcagatccaggcctttgaccagctgtgccgcctgtaccggggcagcagccggctggccctgctgacagagctgagccagaacagaagcagcgagagctaccggcccttcagcggcagccagagcgccccagccttcaacagcatcttccagaatgaaaacttccagctgcagctgatccccccacctgtgacagaagattag

SEQ ID NO: 185780 - DNA, 4011 bp, Artificial Sequence
  derived and/or modified sequence
atggagaatgaaccagaccatgaaaatgtggagcagagcctgtgtgccaagaccagcgaggaggagctgaacaagagcttcaacctggaggccagcctgagcaagttctcctacatcgacatggacaaggagctggagttcaagaatgacctgattgatgacaaggagtttgacatcccccaggtggacaccccacccaccctggagagcatcctgaatgaaacagatgatgaagatgagagcttcatcctggaggaccccaccctgctgaacatcgacaccatcgacagccacagctatgacaccagctctgtggccagcagtgacagcggggacaggaccaacctgaagaggaagaagaagctgcctgacagcttcagcctgcacggctctgtgatgaggcacagcctgctgaagggcatcagcgcccagatcgtgtctgctgctgacaaggtggatgctggcctgcccacagccatcgctgtgagcagcctgattgctgtgggcaccagccacggcctggccctgatctttgaccagaaccaggccctgcggctgtgcctgggcagcacctctgtgggcggccagtatggagccatcagcgccctgagcatcaacaatgactgcagccggctgctgtgtggctttgccaagggccagatcaccatgtgggacctggccagcggcaagctgctgcggagcatcacagatgcccaccccccaggcacagccatcctgcacatcaagttcacagatgaccccaccctggccatctgcaatgacagcggcggctctgtgtttgagctgaccttcaagagggtgatgggcgtgaggacctgtgagagccgctgcctcttcagcggcagcaagggggaggtgtgctgcatcgagcccctgcacagcaagccagagctgaaggaccaccccatcacccagttcagcctgctggccatggccagcctgaccaagatcctggtgattggcctgaagcccagcctgaaggtgtggatgaccttcccctacggccgcatggaccccagctctgtgcccctgctggcctggcactttgtggccgtgcagaactacgtgaaccccatgctggccttctgcagaggagatgtggtgcacttcctgctggtgaagagagatgaaagtggggccatccacgtgaccaagcagaagcacctgcacctgtactatgacctgatcaacttcacctggatcaacagcaggacagtggtgctgctggacagcgtggagaagctgcacgtgattgaccggcagacccaggaggagctggagaccgtggagatcagcgaggtgcagctggtgtacaacagcagccacttcaagagcctggccactggaggaaatgtgtcccaggccctggccctggtgggggagaaggcctgctaccagagcatcagcagctatggaggccagatcttctacctgggcaccaagtctgtgtatgtgatgatgctgcgctcctggagggagcgggtggaccacctgctgaagcaggactgcctgacagaggccctggccctggcctggagcttccacgagggcaaggccaaggctgtggtgggcctgtctggagatgccagcaagaggaaggccatcgtggccgacaggatggtggagatcctcttccactatgctgaccgggccctgaagaagtgcccagaccagggcaagatccaggtgatggagcagcacttccaggtggtgctgatgtgctgggagaaccggctgtatgatgccatgatctacgtgtacaacagaggcatgaatgagttcatcagccccatggagaagctgttccgggtcatcgccccacccctgaatgctgggaagaccctgacagatgagcaggtggtgatgggcaacaagctgctggtgtacatcagctgctgcctggccggccgggcctaccccctgggggacatccctgaggacctggtgcccctggtgaagaaccaggtgtttgagttcctgatccggctgcacagcgctgaggccagccctgaggaggagatctacccctacatccgcaccctgctgcactttgacacccgggagttcctgaatgtgctggccctgacctttgaggacttcaagaatgacaagcaggccgtggagtaccagcagagaattgtggacatcctgctgaaggtgatggtggagaacagcgacttcacccccagccaggtgggctgcctcttcaccttcctggcccggcagctggccaagccagacaacaccctgtttgtgaacagaaccctgtttgaccaggtgctggagttcctgtgcagcccagatgatgacagccgccacagcgagcggcagcaggtgctgctggagctgctgcaggccggcggcatcgtgcagtttgaggagagccgcctcatccgcatggccgagaaggccgagttctaccagatctgtgagttcatgtatgagcgggagcaccagtatgacaagatcatcgactgctacctgcgggaccccctgcgggaggaggaggtgttcaactacatccacaacatcctgagcatccctggccacagcgctgaggagaagcagagcgtgtggcagaaggccatggaccacatcgaggagctggtgtccctgaagccctgcaaggctgctgagctggtggccacccacttcagcggccacatcgagaccgtcatcaagaagctgcagaaccaggtgctgctcttcaagttcctgcggagcctgctggacccccgggagggcatccacgtgaaccaggagctgctgcagatcagcccctgcatcacagagcagttcatcgagctgctgtgccagttcaaccccacccaggtgattgagaccctgcaggtgctggagtgctaccgcctggaggagaccatccagatcacccagaagtaccagctgcacgaggtgacagcctacctgctggagaagaagggggacatccatggagccttcctgatcatgctggagcggctgcagagcaagctgcaggaggtgacccaccagggcgagaacaccaaggaggaccccagcctgaaggatgtggaggacaccatggtggagaccatcgccctgtgccagaggaacagccacaacctgaaccagcagcagcgggaggccctgtggttccccctgctggaggccatgatggccccccagaagctgagcagcagcgccatcccccacctgcacagcgaggccctgaagagcctgaccatgcaggtgctgaacagcatggccgccttcatcgccctgcccagcatcctgcagaggatcctgcaggaccctgtgtatggcaagggcaagctgggggagatccagggcctcatcctgggcatgctggacaccttcaactatgagcagaccctgctggagaccaccaccagcctgctgaaccaggacctgcactggagcctgtgcaacctgcgggcctctgtgacccggggcctgaaccccaagcaggactactgcagcatctgcctgcagcagtacaagaggcggcaggagatggctgatgagatcatcgtgttcagctgtggccacctgtaccacagcttctgcctgcagaacaaggaatgtactgtggagtttgagggccagacccgctggacctgctacaagtgcagcagcagcaacaaggtgggcaagctgtctgagaacagcagcgagatcaagaagggccgcatcacccccagccaggtgaagatgagccccagctaccaccagagcaaaggagaccccacagccaagaagggcaccagcgagcctgtgctggacccccagcagatccaggcctttgaccagctgtgccgcctgtaccggggcagcagccggctggccctgctgacagagctgagccagaacagaagcagcgagagctaccggcccttcagcggcagccagagcgccccagccttcaacagcatcttccagaatgaaaacttccagctgcagctgatccccccacctgtgacagaagattag

SEQ ID NO: 185781 - DNA, 4281 bp, Artificial Sequence
  derived and/or modified sequence
atggagaacgagcccgaccacgagaacgtggagcagagcctgtgcgcaaaaacatccgaagaggaactcaataagagctttaacctagaagcctctctgagtaaattcagttacatagacatggataaggaattggagtttaaaaacgatctaattgacgataaggaattcgacatcccacaggtggacacaccaccaacgctggagtctatcttaaatgaaacggatgacgaagacgagtcttttatcctggaggatccaactcttcttaacatagataccatcgatagccattcatacgataccagcagcgtcgccagttcagatagtggggacagaactaatctgaaaaggaaaaagaaattgcccgattcattttcattgcacggcagcgtgatgcgacacagtctcctgaagggaatatctgcccagatcgtgtcagcagctgacaaggtggatgcaggcctgcctactgccatcgccgtgagctccctcatagcagttgggaccagtcatggactcgctctgatcttcgatcagaaccaggcgctgagactatgtctcggttccacctcagtggggggacagtatggggccatcagcgccctcagcattaataatgattgctcacggttactttgtgggtttgccaaggggcaaatcaccatgtgggatctggcatctggtaaattgctgaggagcataaccgatgcacaccctcccggcaccgcgatactgcatatcaagttcaccgacgaccctactctcgccatctgtaatgattcaggcgggtctgtgttcgagctgaccttcaagcgcgtaatgggcgtgcgcacgtgtgagagtagatgtctgttttcaggatcaaaaggggaagtgtgctgcatcgagcctctgcattctaagcctgaactcaaggatcatcccatcactcagttttcattgctggcaatggcaagcctgactaagatccttgtgattggcttaaagccatccctcaaggtgtggatgacattcccttacggtaggatggatccaagcagcgttcctttactggcctggcattttgtcgctgttcagaattatgttaatcctatgctcgcgttttgccgtggggacgtggtgcacttcctgctggttaagagagatgaatcaggcgctatccatgtgaccaagcagaaacacctccacctttactacgatctgattaactttacgtggataaactcgaggactgtagtgctcctcgattccgttgaaaagttgcacgtgatcgatagacagacgcaggaagagctagagacagtagagattagcgaggtgcaactggtttataatagctctcattttaagagcttggctacaggagggaatgtgagtcaggctctcgctcttgtcggcgagaaggcctgctaccaaagcatttcttcttacggtggtcagatcttttatttaggcaccaaatccgtgtacgtcatgatgcttcgtagttggcgcgaaagagtggatcacctgctgaagcaggactgtctcactgaagccttagcactggcctggtcttttcatgaggggaaagccaaggcagtggtgggcctatccggcgacgccagtaagaggaaagctattgtcgccgaccgcatggtcgaaatcttgtttcattacgcggaccgggccttgaaaaaatgccccgaccaggggaagatccaggtgatggaacagcattttcaagacatggtccctgtgatcgtcgattattgcctcttgctgcagcgcaaggatctgctgttttctcaaatgtacgacaaactgagcgagaatagtgtcgcaaaaggcgtgttcctggaatgtctcgaaccttacatcttatccgataaactggtgggcatcacaccacaggttatgaaagacctgatcgtacacttccaagataagaagcttatggaaaacgtcgaggccctgatcgtacacatggatataaccagcctagacatccaacaggtggtgttgatgtgctgggaaaatcgtctgtacgacgccatgatctatgtgtataatagggggatgaatgagttcatttccccaatggagaaactgtttagagtgattgctcctcctctgaacgcgggtaaaacactgaccgatgaacaagttgtcatgggtaataagctgctggtgtacatttcatgttgcctcgccggaagagcttatccgctcggcgatatccctgaagatctcgtgcccctggtgaagaaccaggtcttcgagttcttgattcgcttgcattctgctgaggcgagtcctgaggaggagatttatccctacattcggacccttttacactttgatactagggagttccttaatgtgctggcccttacttttgaagatttcaaaaatgataagcaggccgtggaataccagcagcggatagtggatatcctgttaaaagtgatggtcgagaattccgactttaccccatcgcaggtggggtgcctgttcacctttctggcgcgccagctggctaagccagataatactcttttcgtcaacagaacactcttcgaccaggttttggaattcctctgttcaccagatgacgattctcgacactctgagagacagcaggtacttctcgagctgctgcaggccgggggcatcgtccagtttgaagagtccagattaattcggatggccgaaaaggcagagttttaccagatctgtgagtttatgtatgagagagaacatcaatacgacaagataatcgattgctaccttagggaccccctaagagaggaggaggtgttcaattacattcacaatatactgagcattcctggccactccgccgaggaaaagcagtcagtttggcagaaagccatggaccacattgaagaactggtgtccctgaaaccgtgcaaggctgccgagctggtggcaactcacttcagcggccacatagagactgttataaaaaagctccaaaaccaggtcctgctcttcaaatttcttagaagtctcctagaccccagagagggcattcacgtcaaccaggagttgctacaaataagcccatgcatcactgagcaattcattgaattgttgtgccaatttaatcctactcaagtgatcgagactcttcaggtgctggaatgttaccgactcgaggaaacgatccagattacccagaagtaccaattgcatgaggtcacagcttatttacttgagaagaaaggggacattcatggagcattccttattatgcttgaaagactgcagtctaagttgcaggaggttacacatcagggagagaatactaaagaagaccccagcttgaaggacgtggaagatacgatggtggagacaattgccctctgtcaacgtaacagtcacaacctcaatcagcagcaacgggaggcattgtggtttcccctgctcgaggccatgatggccccccagaagctcagttcaagcgctatacctcatctgcattcagaagctctcaagtccctgaccatgcaggttctgaactctatggccgcattcattgccctcccctcgatccttcagcgaatattgcaggaccctgtgtacgggaagggcaaacttggggaaattcaagggctcatacttggcatgctcgacactttcaactacgaacagactctgcttgaaacgacgacatccttactgaatcaagaccttcattggagcctttgcaacctaagggcaagtgtaactcggggtttgaatcccaaacaggactactgctcaatctgtctgcaacagtacaagagaagacaggaaatggctgatgaaattatcgtcttctcatgtggccacttataccatagtttctgtctccagaataaggagtgcacagtggaatttgagggccagacgcgatggacatgctataagtgctcctctagtaataaggtgggcaaattgtccgagaactcaagcgaaattaaaaagggaagaatcacaccatcccaagtaaaaatgagccctagttaccaccaaagtaagggcgatccgacagcaaagaagggcaccagtgaaccagtgctggacccgcagcagatccaggcatttgatcagctctgtaggctgtaccgaggaagtagtaggctcgccctgttgacagagttgtctcagaatagatcatctgagtcgtacagacccttctctggctcacagtcagcaccggcttttaatagcattttccaaaatgagaatttccaactgcagctgatcccgcctcctgtaacagaagattag

SEQ ID NO: 185782 - DNA, 4011 bp, Artificial Sequence
  derived and/or modified sequence
atggagaacgagcccgaccacgagaacgtggagcagagcctgtgcgcgaagacaagcgaggaagaactgaataaaagcttcaatctggaggcatcgctttcaaagttttcgtacatcgacatggacaaggagctggagtttaaaaatgacttgatcgacgacaaggaatttgacatacctcaggtagacactcccccaacgctggagtctattctgaatgagaccgacgacgaggacgaatcgttcatcttggaggaccccaccctgctcaacattgatactattgatagtcacagctacgatacttcatccgtggccagctccgactctggcgaccggactaaccttaaaaggaaaaagaagttgccagatagcttttctctgcatggatcagtcatgcgccattcgctgttgaaaggcatttcggcccaaatcgtaagcgctgcagataaggtggacgcaggcctgccaacggcaattgcagtctcctccttgatcgctgtcgggacatctcatggactggccttgatcttcgaccaaaatcaggctctgaggctgtgcctgggatcaacgtcggttggcggacaatacggagcaatctccgcactctccatcaacaacgattgctcccgcctgctctgtggctttgccaagggacaaataactatgtgggatctcgccagcggcaaacttttacgctcaattaccgatgcccacccacctggcacggcgattcttcatattaaattcaccgacgaccctaccctggccatctgcaatgatagtggtggatctgtctttgaacttacatttaagcgggtcatgggggtgcgcacctgcgaaagtaggtgcctgttcagcggaagcaaaggcgaagtttgctgtatcgaacctctgcattccaaacccgagctcaaggaccaccccatcacacagtttagtctgctggccatggcctccctcacgaagatccttgtgatcgggctgaagccatccctgaaagtctggatgacctttccttacggacgtatggatccatcctccgtgcccctgctcgcctggcatttcgtcgccgtgcagaattacgtgaacccaatgttggctttctgcagaggagacgtggtgcacttcctgctggttaaacgcgatgagagcggtgcgatccatgtgactaagcagaagcacctgcacctgtattacgacttgatcaattttacatggatcaactctagaaccgtggtgctattggacagtgtggaaaaactccatgtgattgataggcagacccaagaagaacttgaaactgtagagatttctgaagtccagcttgtgtacaactcctcccacttcaaaagtctcgccactggcggtaatgtgtctcaggcccttgctctggttggcgaaaaggcatgttatcaatccatcagttcttatggtggacaaatcttctatcttggaactaagagcgtgtatgtgatgatgctgagaagttggagggagcgagtggaccaccttctcaaacaggattgcttgacggaggctttagccctggcttggagcttccacgaaggaaaggcaaaagcagtggtcggcctatcaggggatgctagcaagcggaaggcaatcgtggccgacagaatggttgagatccttttccactacgccgaccgcgccttgaaaaaatgtccggaccaggggaagatacaggtcatggaacaacactttcaagttgtcctgatgtgttgggagaatcgactctatgatgctatgatttatgtgtacaataggggcatgaacgagttcatcagccccatggagaagttattccgcgttatcgctccaccgctgaatgctggcaaaaccttaaccgacgagcaggtcgttatgggaaacaagctccttgtgtacatttcgtgttgccttgctggaagggcttatcccctcggtgatatccctgaggatctggtgccattagtgaaaaaccaagtctttgagtttctcataaggttgcactcagcggaggcgtctcccgaggaggaaatttatccatacattcggacgctcctacatttcgataccagggaatttcttaacgtgctggcgctaacttttgaggactttaagaacgacaaacaggccgtggaataccagcagcggatcgtagatatcctcctcaaagtgatggttgagaattctgacttcaccccaagccaggtcggttgcctattcacctttttagcgcgccagctggcaaagccggataatactctcttcgtgaacagaaccctttttgatcaggtcttagaattcctctgttcacctgacgatgattctaggcattccgagcgacagcaagtcctgctagagctgctccaggctggcggcattgtacagttcgaggaatctcgcctcattcgtatggcggaaaaggcggaattctaccagatttgcgagtttatgtacgagcgggagcatcagtacgacaagattatcgattgctacctccgcgacccgttacgggaggaggaggtgttcaattatattcacaatatcctttctatccctgggcattctgcggaggaaaaacagagcgtgtggcaaaaagcaatggatcacatcgaagagcttgtgagcctcaagccgtgtaaggccgccgaactcgttgcaactcacttctcaggccacatcgagacagtgattaagaagttacagaaccaggtgctgctgttcaagtttttgagaagcttgctggatcccagggaaggaattcatgttaaccaggagctgctccagatcagcccttgcataaccgagcagttcattgagttgctgtgtcaattcaaccccactcaggtgattgaaactctgcaggtcctggagtgctatcgcctggaggagaccattcaaatcacccagaaatatcaacttcatgaggtgactgcatatctgctggagaagaaaggagatatccatggtgcctttctcatcatgttggagcggctgcagtccaaactacaggaagtgacccaccagggggagaatactaaggaagacccgtcattaaaggacgtagaggacacaatggttgaaaccatcgctctctgccaaaggaatagccacaacctaaatcaacaacagcgggaagcactgtggttccctctgctggaagcaatgatggccccacagaaactctcttcgagcgccattccccatctgcactcagaggctctcaagtctctgacaatgcaggtcctgaactctatggcagctttcattgctctaccttccatactgcaaagaatcctgcaggatccagtgtatggcaaggggaagctgggggagatccagggcctcatcttgggcatgctcgacaccttcaattatgagcagaccctactggagacaaccactagcctcctgaatcaggacctccactggtcactgtgtaatctgcgggcttctgtgactagggggctcaacccaaagcaggactattgctccatttgtcttcaacagtataagcgtcgccaagaaatggccgacgagattatcgtcttctcatgcggccacctgtaccatagtttttgccttcagaacaaagagtgtactgttgagtttgagggccagacgaggtggacctgttacaagtgtagttcctctaataaagtgggtaagctcagtgagaactctagcgagatcaagaaaggccggattacgccgtcccaagtgaagatgtctcccagctatcaccagtcgaaaggcgacccgaccgccaagaagggaaccagcgagcctgttctggacccccagcagattcaggcattcgatcagttgtgccggctctaccggggtagttctcggctggctttattgaccgaactgagtcaaaatagaagtagtgagagctataggcccttttccgggagtcagtccgctcccgctttcaatagcatcttccagaacgaaaactttcagctccagctgattccacctcctgtgactgaggattag

SEQ ID NO: 185783 - DNA, 4281 bp, Artificial Sequence
  derived and/or modified sequence
atggagaacgagcctgatcacgagaacgtggagcagtctctgtgtgcaaaaacgtctgaagaggaactaaataaatctttcaacctggaagcgtcactctcaaagttcagttatattgacatggataaagagttagaatttaagaatgatttaattgatgataaagaattcgacattccgcaggtggatacccccccaacccttgaatcaatccttaacgaaacagatgatgaagacgaatcgtttatcctggaggatcctaccctccttaatatcgacaccattgattctcattcctacgacacttcgtccgtggcgagttcagactctggtgacaggaccaatctcaagcgcaagaaaaaacttcctgactcctttagcctccatggttctgtcatgcgacactccctgctaaagggcatcagtgcccagatcgttagcgccgctgataaagtggatgctggtcttccaacagcaatagccgtgtcgagcctgatagctgtgggcacatcccacggcctggcacttatatttgaccaaaaccaggccctgcgcctgtgcttggggagcacctctgtgggagggcagtacggggcaattagcgctctttccataaacaatgactgctcccggttgctgtgcggatttgctaaggggcagatcacgatgtgggacctggcatccggcaaactgttgagatctattaccgacgcacaccccccaggaactgccattctgcacattaagttcactgatgaccctacacttgccatctgcaacgacagtggtggctcagtgtttgaactcacatttaagcgagtcatgggggtgcggacctgcgaaagtcggtgtctcttcagtgggtcgaaaggagaggtgtgttgtatcgaacctttgcactccaaacccgaacttaaggaccacccgatcacccagtttagcttacttgccatggcctctcttacaaaaattctggtgatcggcctgaagcccagcttgaaagtttggatgacattcccatatggtcggatggatccaagctcagtacccctactcgcgtggcacttcgtggctgtccagaattacgtgaatcctatgttggccttctgccgaggtgatgtggtgcatttcctcttagtaaaaagagacgagtccggagcaattcacgttacaaaacaaaaacatctccacctgtactatgatttgataaactttacctggattaactcacgcactgtcgttttgttagatagtgtggaaaaattgcatgtcattgacagacagacacaagaggaactggaaacggtggaaatttcggaagtgcaactggtgtataactccagtcatttcaagtccctggctacaggaggaaatgtgagtcaagcactggctctcgtgggtgaaaaagcctgctaccagagcatctcctcttacggagggcagatattctatctagggactaaatcagtttatgtgatgatgttgcggtcctggcgcgagcgtgtggaccatctactcaagcaggactgtctgacggaggctttagcactcgcttggagctttcatgaagggaaagccaaagcagtcgtcgggctgtccggggatgcaagcaagcggaaggccatcgtggctgatcggatggtggagatcctcttccattatgccgacagagccctaaagaagtgtccagatcagggcaagatccaggtcatggagcaacacttccaggacatggtgccagtaattgttgattattgtttgttgctccaacgcaaggatctgttgtttagccaaatgtatgataaactgtcagaaaactccgtagctaaaggcgtgtttctagagtgtctggagccatacatcctgagcgacaagctggtaggcattaccccacaggttatgaaggacctaattgtgcacttccaggacaagaaattgatggaaaatgtagaagccctgattgtacacatggacattacttccttagacatccagcaggtcgtgctcatgtgctgggaaaaccgcttatatgatgccatgatctatgtttacaaccgcggaatgaacgaatttatctcacctatggaaaagttattcagagtgatcgcaccgccactaaatgcgggtaaaaccctcaccgacgaacaggtcgtgatggggaataagctgctcgtatatattagctgttgcttagccggaagggcctaccccctgggtgacatccccgaagacctggttcctttagtgaagaatcaggtgttcgaattcctgattcgactgcactctgccgaggcgtcaccagaagaagaaatttacccttatatccgcacactgctgcactttgatactcgtgagtttttgaacgtccttgctttgacttttgaagatttcaagaatgataaacaggccgttgagtaccagcagcgcatcgtggatatccttctgaaggtaatggttgagaactcggactttaccccttcccaggtgggatgcctgttcacattcctggccaggcagttggctaagcctgacaataccctcttcgttaatcgaacactgttcgatcaggtacttgaattcctctgcagcccagacgacgattcaagacactctgaaagacagcaagtcttgctggagctactacaggccggaggcattgttcagttcgaagagagccgcttgataagaatggccgaaaaggctgagttctatcagatctgcgaattcatgtacgagagggagcatcaatatgataaaataatcgactgctacctccgtgaccccctgcgggaggaggaagtattcaactacatccacaacattctctctatcccaggtcattccgctgaggagaagcagtctgtgtggcagaaagcgatggaccatatcgaggagttggtctccctgaaaccttgcaaagcagcagaattggtggctactcattttagcggccacatcgagacagtgattaagaaattacagaatcaggtgctgctgtttaaatttctcagaagcctgctggatcctagggaaggcatccacgtgaatcaagagctcctgcaaatctccccatgcatcacagaacaattcattgaactgctttgccagtttaatccaactcaggtcatcgagacactgcaggtgcttgagtgttacaggctggaagaaactatccagattacccagaaatatcagctgcatgaggtgaccgcatacctgctggagaaaaaaggagatatacatggagctttcctgatcatgctcgaacgtctgcagagcaagttgcaggaggtcacccatcagggggagaacacaaaagaggatccatctcttaaagacgttgaagatacgatggttgagacaatcgccctgtgccagagaaacagccacaatctgaaccagcagcagcgcgaggcattgtggttccccctgcttgaggccatgatggctcctcagaagctatcatctagcgctatcccacacttacactctgaggccttaaagtcattgactatgcaggtcttgaattccatggccgctttcatcgctctgccatccatcctccagcgaatcctccaagacccagtgtatggcaaaggaaagctcggggagatacaggggctcatcttaggaatgctcgacacattcaactacgaacaaacccttttagaaaccacaacctccttacttaaccaagacctgcactggtcattgtgtaatctaagagcctctgtgacgagggggctgaaccccaagcaggattattgttcaatatgtctgcagcagtacaagagacgccaggaaatggctgatgaaataatcgtctttagctgcgggcatctgtaccacagtttctgcctgcaaaacaaagaatgcacagtcgaatttgaagggcagaccaggtggacatgttataagtgcagctcttccaacaaagtgggcaagcttagcgaaaattcatcagaaattaagaaagggagaatcactccttcacaggtgaaaatgtctccatcataccaccagtccaaaggagatccgaccgccaagaaaggcacctccgagccagttctggatccccaacagatacaggcctttgaccagctctgcaggctgtatcgcggaagttcccgattggcactgctgacagaacttagccagaacaggagctcagaaagctacaggccgtttagcgggagccagtccgccccagcttttaatagtatatttcaaaacgaaaattttcagctgcagttaataccgccacccgtgaccgaagattag

SEQ ID NO: 185784 - DNA, 4011 bp, Artificial Sequence
  derived and/or modified sequence
atggagaacgaacccgaccatgaaaatgtggaacagtccctctgcgcaaaaacaagcgaggaggagctcaacaaatccttcaacctcgaggcctccctgtcaaaattcagttatatcgacatggataaagagctagaattcaaaaacgacctgattgatgataaggagttcgacatccctcaagtcgatacacctcccaccctggaatctattctcaatgagacggacgatgaggatgaaagtttcatacttgaggatcctaccctcctgaacatcgacaccattgattcacatagctatgatacatcatcagtggcctcttcagattcaggagaccggacgaacctaaaacgaaagaaaaaattgcctgacagcttttccttacacggcagcgtgatgcgccactcccttctgaagggaatcagcgcccagatcgtttctgctgccgacaaggtggatgctggcctgcctacggccattgccgtaagttcactgattgcagtgggtacgtcccatggactggccctaatttttgatcagaaccaggccctgcgactctgcttgggaagcacaagtgtgggcggtcagtatggtgctattagcgctttatcgatcaataatgactgtagccgtctactttgtgggtttgcgaaagggcagatcactatgtgggatctcgctagcggcaagctcttgcgttccattaccgacgcccatccgcctggaactgccatcctgcacatcaaatttactgatgaccccaccctagctatctgcaacgattctggaggcagcgtttttgagctgactttcaaaagggtaatgggtgttcggacatgcgagtcccgttgcctgttttcggggagtaaaggcgaggtgtgctgtatcgagccactgcactccaaacctgaattaaaggaccatcctatcacacagttcagtctcttagcgatggcctccctgaccaaaatcctagtgattggcctgaaaccatccctcaaagtctggatgacatttccttacggccgaatggatccttcatctgtccccctgctcgcgtggcatttcgtcgctgtgcagaactacgtcaacccaatgttggccttctgccggggtgacgtggttcacttcctgctagtcaaaagagacgagagcggcgctattcacgtgaccaaacagaaacatctgcatctttactacgacctcatcaacttcacatggatcaactcccgcactgtggtccttcttgactccgttgagaaattacacgtcatagacaggcaaactcaggaagaactggagactgtggagatcagcgaggtccagcttgtttacaattcatcccatttcaagagcctcgccaccggtggtaatgttagtcaggccctcgctctggtgggagagaaggcctgttaccagagcatcagctcgtacggcggacaaatcttctacctcgggaccaagtcagtgtatgtgatgatgctgcggtcctggagagagcgcgtggaccacctcttaaagcaggactgtctgacagaggcattggccctagcctggagctttcacgagggtaaggccaaagccgtcgtagggctgtccggggatgcatccaaacgcaaagcgattgtggctgataggatggtcgagatactttttcattacgccgacagggccctgaagaagtgtcctgaccagggaaaaatccaggtaatggaacagcacttccaggtggtgctgatgtgctgggagaatagactctacgatgctatgatctatgtgtacaatagggggatgaatgagtttattagccccatggaaaagttgttccgcgtcattgctccccctcttaacgccggaaaaaccttaaccgacgagcaagtcgtgatgggcaataaactgcttgtgtacatatcctgttgcctcgcaggtagggcctatcccctcggcgacatacctgaggatctggtgcccttggtgaagaatcaagttttcgaatttctgatccggctgcactccgccgaagccagcccggaagaagaaatctacccttacatccgtactttgttgcatttcgatacccgcgagtttttgaatgtgctcgcactcacattcgaagattttaaaaacgataagcaagccgtggagtaccaacagcggattgtggacattctgctgaaagtaatggttgaaaacagcgacttcaccccctcccaggttggctgcttatttacttttctggcccgacagctcgccaaaccagataatactctgtttgtgaaccgcacactctttgatcaggtgctcgagttcctgtgcagccccgatgatgacagtcgccatagcgagaggcaacaggttctgctggagctactgcaagccggaggcatcgtgcagtttgaggagtcacggctaattcgaatggcagaaaaggctgaattttatcagatatgcgagttcatgtacgagcgagaacatcaatatgacaagatcatcgattgttacctgcgggatcccctccgagaggaagaagtgtttaattatatacacaacatcctgtctattcctggccattcagctgaagagaaacagagcgtgtggcagaaagcaatggaccatatcgaggagttggtgtccctgaagccatgtaaagctgcggagttggtggccacgcacttcagcggacacattgaaacagttatcaagaaactccagaatcaggtgctcctattcaaattcttaagaagcctcttggatccaagggagggaattcacgtaaaccaggagctgctgcaaatctccccttgtatcactgagcagttcattgagcttctttgtcagtttaatccaacccaggtcatcgaaactttacaggtactagagtgttatagactcgaagaaaccatccagatcacccaaaagtaccagctgcacgaggtgaccgcataccttctggagaagaagggcgacatccacggggcatttttgatcatgctggaacgcttgcagagcaagctacaggaggtcacacaccagggagaaaataccaaggaagacccctccttgaaagatgttgaagatacaatggtcgaaaccattgcactgtgtcaacgcaactctcacaatttaaatcagcagcagcgagaggcactgtggttcccactgctcgaggccatgatggccccacagaaactatcctcttcagcaatcccgcacctgcacagtgaagctctgaaatcgctcactatgcaggtattgaattccatggcagctttcatcgcattaccatcaatcctccagcgaattctgcaggaccccgtgtatggtaaaggaaaattaggtgagattcagggcttgattttgggcatgctagacacattcaattatgagcaaactctgctggaaacgacgaccagtttgcttaatcaagacctgcactggtcgctgtgcaatctccgagcctccgtcaccaggggcctaaaccccaagcaggactactgttcaatttgcctccagcagtacaagcgtcggcaggagatggctgacgagattatagtttttagttgcggccatttgtaccattctttttgtcttcagaacaaagagtgcactgttgagttcgaaggccagacccgctggacctgttacaagtgttcctcatccaacaaggtgggaaagctgtcagaaaattctagcgagattaaaaagggcagaattacaccatctcaggtgaagatgtcacccagttatcaccagtccaagggtgatccaactgccaaaaagggtacgtccgaaccagtactcgatccccagcagattcaggcgttcgaccagctgtgcaggttgtacagagggtcaagcaggctcgccctgctcaccgaactttcccaaaatcgctcttccgaatcatacaggccctttagtggttctcaaagtgcaccagcattcaactccattttccagaacgagaatttccagctgcagctgatccctcctcccgtcaccgaggattag

SEQ ID NO: 185785 - DNA, 5011 bp, Artificial Sequence
  derived and/or modified sequence
agtgggtgcggtcacgtgggccggcggtccacggccggaatggcagcaagctcagagataatcattcaggtcttcgtgagctaaggccaaacaaacaaaaaacacttgctttgatggactgaatactgttattagaagtaaatatggaaaatgaaccagaccatgaaaatgtggaacagagcctctgtgccaagacgagcgaagaagagctgaataagtctttcaatctagaagcttcactttcaaaattctcttacatagatatggacaaggaactggagttcaaaaatgatctgattgatgacaaggagtttgatattcctcaagttgatactcctccaacactggaaagcatactaaatgagactgatgatgaagatgagtcttttattcttgaggatcctacattgttaaacattgatactattgattctcactcctatgatacttcatctgtggcaagctcagatagtggtgacaggaccaacttaaaaaggaagaagaaattacctgattctttttcacttcatggatcagttatgcgccattcacttttgaagggaatttctgcccagatagtgtctgcagctgacaaagtagatgctggcttgcctacagcaattgcagtatccagtctgatagcagtgggtacatctcatggattggctttaatatttgatcagaatcaagctttgcgactctgtctgggtagcactagtgttggaggtcagtatggcgctatctctgccctcagtatcaacaatgattgctcaagacttctttgtggctttgctaaaggacagatcaccatgtgggatttggccagtggaaaacttctaagatcaataacagatgctcatcctccaggaacagcaatattgcatatcaagtttacagatgatccaactcttgcaatttgcaacgacagcggaggctctgtttttgaattgacatttaagagagtgatgggagtgagaacctgtgaatctagatgtctgttcagtggttccaagggtgaagtctgctgtattgagcctctgcattctaagcctgagttgaaagatcatcccatcacacagttttcattattggccatggcatccttgacaaaaatactggtcattggattgaaaccatccttgaaagtatggatgacttttccctatggccggatggatccttccagtgtgccactgctggcctggcactttgtagcagtacaaaattacgtgaatcccatgcttgccttctgcagaggagatgttgttcattttctattggtaaagagagatgaatctggagcaatacatgttactaagcaaaagcatcttcacctatactatgacctcatcaactttacctggataaattcacgcacagttgtgctcttagacagcgtagagaagttgcatgtgattgatcggcaaacacaagaggaattggagacagtggagatctcagaagttcagctggtctacaatagcagccatttcaaatcactagccactggaggaaatgttagccaggcactggctttggttggagagaaggcttgttatcaatccatcagtagctatggtggtcagatcttttatttggggacaaaatctgtttatgtgatgatgctgaggagctggagagagagagtggatcatctcctgaaacaagattgtcttacagaagcgttggctcttgcgtggtctttccatgaaggaaaagcaaaagcagtagtgggattatcaggggatgccagtaagcgaaaggctattgttgcagaccggatggtagaaatcctattccattatgcagatcgagctctgaaaaagtgcccagaccaaggaaaaatccaagtgatggagcagcattttcaggatatggtgcctgtcatagttgattactgccttctgctgcagcgaaaggatcttttatttagtcagatgtatgataaattaagtgagaattcagtggccaaaggagtatttttggagtgccttgagccatatattttaagtgataaattggtgggaatcacaccccaagtaatgaaagacttgattgttcatttccaagataaaaaattaatggaaaatgtggaagcgctcattgtacatatggatatcaccagcctagatattcagcaggtagttctcatgtgttgggaaaatcgtttatatgatgctatgatctatgtctacaacagaggcatgaatgaatttattagtccaatggagaaacttttcagagtcattgctcctcctctgaatgcaggaaaaacactaacagatgaacaagttgttatgggcaataagctccttgtatatattagctgttgtctagcaggtcgtgcctatccccttggtgacatccctgaagatctggttcccttggttaaaaaccaggtttttgaatttctaattcgcctgcattcagcagaggcttctcctgaggaagaaatctatccttacattcggactttgctacattttgacacaagagaatttctaaatgtattggcactgacttttgaagattttaaaaatgacaagcaagctgtggaatatcaacagcgaattgtggatattttgttgaaagttatggtggagaattcagactttaccccctcacaagtaggatgtctctttaccttccttgctcggcagcttgcaaagcctgacaacaccttgtttgtaaacagaacactttttgatcaggtccttgaattcctttgtagtcctgacgatgactcccgacactctgaaagacagcaggtccttttagaattgctgcaggctggaggcatagttcaatttgaagagagtcgactcatccggatggcagaaaaagctgagttctatcaaatttgtgaatttatgtatgaaagagaacaccaatatgataaaattattgattgctacttacgtgaccctctgcgagaggaagaagtctttaattacattcacaatatcttatccattcccggacacagtgcagaggagaagcagtctgtatggcagaaagcaatggatcatattgaggaactcgtgtccctgaagccttgtaaagctgcggagctggttgccacccacttttctggacatattgaaacggtcattaaaaaacttcagaaccaggttttgcttttcaaatttttgaggagtcttcttgacccaagggaaggtattcatgtaaatcaagaattactgcaaatatctccttgtatcacagagcagttcattgagctgttgtgtcagttcaacccaacccaagttatagagactctgcaagtccttgagtgctaccgtctggaagaaactattcagattactcagaagtatcaacttcatgaagtcaccgcttatctattggaaaagaaaggagatattcatggtgccttcctaataatgttagagagactacaaagcaaacttcaagaggtaacacatcaaggtgaaaataccaaagaggatccctcattgaaggatgttgaagatactatggtggagaccattgctctttgccagagaaattcacataatttgaaccagcagcaacgtgaggcactttggtttccgttattggaggcaatgatggcccctcagaagctgtccagttcagccattcctcatctacactctgaagctctgaagtctttgaccatgcaagttttaaatagcatggcagcatttattgcccttccatcaatcttgcaaagaatcttacaggatccagtttatggaaaaggaaaacttggagaaatccagggacttatcttgggaatgttagatacctttaactatgaacaaaccctgctggaaacaacaaccagccttctaaaccaagatctccattggtcattgtgtaacctgagagcttcggtcaccagaggactgaatcccaaacaagattactgctctatatgtttgcagcagtacaagagacgccaagaaatggctgatgaaataattgtctttagctgtggccatttgtatcactcattctgcctacaaaacaaagaatgcactgtggaatttgagggccaaacaagatggacatgctacaaatgcagttcaagtaacaaagtaggaaaactcagtgaaaattcatctgaaattaaaaagggaaggataaccccatcacaggtaaaaatgtctccatcgtatcatcagtccaaaggggatcccactgctaaaaagggaacctcagaacctgttctggatccacagcaaatccaagcatttgatcagctttgccgtctctaccgaggaagctccaggctggctctcctcacggaactctcccagaatcgcagcagcgagagctataggccattcagtggctcgcagagtgctcctgctttcaacagcatcttccagaatgagaacttccagctgcagctcattcctccacctgtgactgaggattgatgactccatggagcctggcccaggagaaccagagatgatcccgaggcagctggggagaggccccgcctctggtgggcttggcctccaccacctcccacgcttctgagaagaggttccaaattgggcttctgtgcccagagcgtccacagcaccattcccagtgtagactcccagtcttctccacattgctgtcatggcgtcagttcaccagactcattgattttgttttgcttgttaagcaaaggaatgtcacatacctctgtccagctttttaggaaatacatttcgcctattgcgactttttccatttaccctgaagcctagaaagtaggtggaactcacacaaatggcattccagagtctgccatactccgtctcctccagctgctggataatacagaggaacttcaacttctacagggaacagtggttggccaggctgcagtataactgaagcatgccttggagagagcagacactgtgggggccagggccatctccctttaatgtgttcatgttaaaacctatttgagtgtaagacttgccctttctaacaataaatgctccgtgtttaagttctgcaggtc

SEQ ID NO: 185786 - DNA, 4721 bp, Artificial Sequence
  derived and/or modified sequence
cacgtgggccggcggtccacggccggaatggcagcaagctcagagataatcattcaggtcttcgtgagctaaggccaaacaaacaaaaaacacttgctttgatggactgaatactgttattagaagtaaatatggaaaatgaaccagaccatgaaaatgtggaacagagcctctgtgccaagacgagcgaagaagagctgaataagtctttcaatctagaagcttcactttcaaaattctcttacatagatatggacaaggaactggagttcaaaaatgatctgattgatgacaaggagtttgatattcctcaagttgatactcctccaacactggaaagcatactaaatgagactgatgatgaagatgagtcttttattcttgaggatcctacattgttaaacattgatactattgattctcactcctatgatacttcatctgtggcaagctcagatagtggtgacaggaccaacttaaaaaggaagaagaaattacctgattctttttcacttcatggatcagttatgcgccattcacttttgaagggaatttctgcccagatagtgtctgcagctgacaaagtagatgctggcttgcctacagcaattgcagtatccagtctgatagcagtgggtacatctcatggattggctttaatatttgatcagaatcaagctttgcgactctgtctgggtagcactagtgttggaggtcagtatggcgctatctctgccctcagtatcaacaatgattgctcaagacttctttgtggctttgctaaaggacagatcaccatgtgggatttggccagtggaaaacttctaagatcaataacagatgctcatcctccaggaacagcaatattgcatatcaagtttacagatgatccaactcttgcaatttgcaacgacagcggaggctctgtttttgaattgacatttaagagagtgatgggagtgagaacctgtgaatctagatgtctgttcagtggttccaagggtgaagtctgctgtattgagcctctgcattctaagcctgagttgaaagatcatcccatcacacagttttcattattggccatggcatccttgacaaaaatactggtcattggattgaaaccatccttgaaagtatggatgacttttccctatggccggatggatccttccagtgtgccactgctggcctggcactttgtagcagtacaaaattacgtgaatcccatgcttgccttctgcagaggagatgttgttcattttctattggtaaagagagatgaatctggagcaatacatgttactaagcaaaagcatcttcacctatactatgacctcatcaactttacctggataaattcacgcacagttgtgctcttagacagcgtagagaagttgcatgtgattgatcggcaaacacaagaggaattggagacagtggagatctcagaagttcagctggtctacaatagcagccatttcaaatcactagccactggaggaaatgttagccaggcactggctttggttggagagaaggcttgttatcaatccatcagtagctatggtggtcagatcttttatttggggacaaaatctgtttatgtgatgatgctgaggagctggagagagagagtggatcatctcctgaaacaagattgtcttacagaagcgttggctcttgcgtggtctttccatgaaggaaaagcaaaagcagtagtgggattatcaggggatgccagtaagcgaaaggctattgttgcagaccggatggtagaaatcctattccattatgcagatcgagctctgaaaaagtgcccagaccaaggaaaaatccaagtgatggagcagcattttcaggtagttctcatgtgttgggaaaatcgtttatatgatgctatgatctatgtctacaacagaggcatgaatgaatttattagtccaatggagaaacttttcagagtcattgctcctcctctgaatgcaggaaaaacactaacagatgaacaagttgttatgggcaataagctccttgtatatattagctgttgtctagcaggtcgtgcctatccccttggtgacatccctgaagatctggttcccttggttaaaaaccaggtttttgaatttctaattcgcctgcattcagcagaggcttctcctgaggaagaaatctatccttacattcggactttgctacattttgacacaagagaatttctaaatgtattggcactgacttttgaagattttaaaaatgacaagcaagctgtggaatatcaacagcgaattgtggatattttgttgaaagttatggtggagaattcagactttaccccctcacaagtaggatgtctctttaccttccttgctcggcagcttgcaaagcctgacaacaccttgtttgtaaacagaacactttttgatcaggtccttgaattcctttgtagtcctgacgatgactcccgacactctgaaagacagcaggtccttttagaattgctgcaggctggaggcatagttcaatttgaagagagtcgactcatccggatggcagaaaaagctgagttctatcaaatttgtgaatttatgtatgaaagagaacaccaatatgataaaattattgattgctacttacgtgaccctctgcgagaggaagaagtctttaattacattcacaatatcttatccattcccggacacagtgcagaggagaagcagtctgtatggcagaaagcaatggatcatattgaggaactcgtgtccctgaagccttgtaaagctgcggagctggttgccacccacttttctggacatattgaaacggtcattaaaaaacttcagaaccaggttttgcttttcaaatttttgaggagtcttcttgacccaagggaaggtattcatgtaaatcaagaattactgcaaatatctccttgtatcacagagcagttcattgagctgttgtgtcagttcaacccaacccaagttatagagactctgcaagtccttgagtgctaccgtctggaagaaactattcagattactcagaagtatcaacttcatgaagtcaccgcttatctattggaaaagaaaggagatattcatggtgccttcctaataatgttagagagactacaaagcaaacttcaagaggtaacacatcaaggtgaaaataccaaagaggatccctcattgaaggatgttgaagatactatggtggagaccattgctctttgccagagaaattcacataatttgaaccagcagcaacgtgaggcactttggtttccgttattggaggcaatgatggcccctcagaagctgtccagttcagccattcctcatctacactctgaagctctgaagtctttgaccatgcaagttttaaatagcatggcagcatttattgcccttccatcaatcttgcaaagaatcttacaggatccagtttatggaaaaggaaaacttggagaaatccagggacttatcttgggaatgttagatacctttaactatgaacaaaccctgctggaaacaacaaccagccttctaaaccaagatctccattggtcattgtgtaacctgagagcttcggtcaccagaggactgaatcccaaacaagattactgctctatatgtttgcagcagtacaagagacgccaagaaatggctgatgaaataattgtctttagctgtggccatttgtatcactcattctgcctacaaaacaaagaatgcactgtggaatttgagggccaaacaagatggacatgctacaaatgcagttcaagtaacaaagtaggaaaactcagtgaaaattcatctgaaattaaaaagggaaggataaccccatcacaggtaaaaatgtctccatcgtatcatcagtccaaaggggatcccactgctaaaaagggaacctcagaacctgttctggatccacagcaaatccaagcatttgatcagctttgccgtctctaccgaggaagctccaggctggctctcctcacggaactctcccagaatcgcagcagcgagagctataggccattcagtggctcgcagagtgctcctgctttcaacagcatcttccagaatgagaacttccagctgcagctcattcctccacctgtgactgaggattgatgactccatggagcctggcccaggagaaccagagatgatcccgaggcagctggggagaggccccgcctctggtgggcttggcctccaccacctcccacgcttctgagaagaggttccaaattgggcttctgtgcccagagcgtccacagcaccattcccagtgtagactcccagtcttctccacattgctgtcatggcgtcagttcaccagactcattgattttgttttgcttgttaagcaaaggaatgtcacatacctctgtccagctttttaggaaatacatttcgcctattgcgactttttccatttaccctgaagcctagaaagtaggtggaactcacacaaatggcattccagagtctgccatactccgtctcctccagctgctggataatacagaggaacttcaacttctacagggaacagtggttggccaggctgcagtataactgaagcatgccttggagagagcagacactgtgggggccagggccatctccctttaatgtgttcatgttaaaacctatttgagtgtaagacttgccctttctaacaataaatgctccgtgtttaagttc

SEQ ID NO: 185787 - protein, 1047 aa, Artificial Sequence
  derived and/or modified sequence
MEGRSAAAETFVWVNNASAHSQSVAKAKYEFLFGRSEGKAPDTSDHGGSTLLPPNVTNEFPEYGTMEEGGEGLRASLEFDGEALPCHPQEQQGVQPLTGCHSGLDSVTEGPKDVREAPSQSHLKEQSLQPIDSLISALKATEARIISGTLQATKVLDQDAVSSFSVQQVEKELDTASRKTQRVNKTLPAGQKNLPEIPLSAEVTTEESFYLSIQKDLTALLTGDTQAEISQIMNNGRKGAVCVQEPSCPLASLGSSAVTCHSAGSVGFLKEQRSALGREHPGGCDRSSSMGRPGRVKHVEFQGVEILWTGGDKRETQHPIDFETSLQRTASPDSKESSKVPRHLISSAGLCNSSSLTENVWDESWKAPSERPGTSSGTFSPVRLDESGEDEVFLQENKQHLEKTPKPERDRERISEQEEHVKGEDEDILGPGYTEDSTDVYSSQFETILDNTSLYYSAESLETLYSEPDSYFSFEMPLTPMIQQRIKEGGQFLERTSGGGHQDILSVSADGGIVMGYSSGVTNGLNDASDSIYTKGTPEIAFWGSNAGVKTTRLEAHSEMGSTEILEKETPENLSNGTSSNVEAAKRLAKRLYQLDRFKRSDVAKHLGKNNEFSKLVAEEYLKFFDFTGMTLDQSLRYFFKAFSLVGETQERERVLIHFSNRYFYCNPDTIASQDGVHCLTCAIMLLNTDLHGHNIGKKMTCQEFIANLQGVNEGVDFSKDLLKALYNSIKNEKLEWAVDDEEKKKSPSESTEEKANGTHPKTISRIGSTTNPFLDIPHDPNAAVYKSGFLARKIHADMDGKKTPRGKRGWKTFYAVLKGTVLYLQKDEYKPEKALSEEDLKNAVSVHHALASKATDYEKKPNVFKLKTADWRVLLFQTQSPEEMQGWINKINCVAAVFSAPPFPAAIGSQKKFSRPLLPATTTKLSQEEQLKSHESKLKQITTELAEHRSYPPDKKVKAKDVDEYKLKDHYLEFEKTRYEMYVSILKEGGKELLSNDESEAAGLKKSHSSPSLNPDTSPITAKVKRNVSERKDHRPETPSIKQKVT

SEQ ID NO: 185788 - protein, 1049 aa, Artificial Sequence
  derived and/or modified sequence
MEGRSAAAETFVWVNNASAHSQSVAKAKYEFLFGRSEGKAPDTSDHGGSTLLPPNVTNEFPEYGTMEEGGEGLRASLEFDGEALPCHPQEQQGVQPLTGCHSGLDSVTEGPKDVREAPSQSHLKEQSLQPIDSLISALKATEARIISGTLQATKVLDQDAVSSFSVQQVEKELDTASRKTQRVNKTLPAGQKNLPEIPLSAEVTTEESFYLSIQKDLTALLTGDTQAEISQIMNNGRKGAVCVQEPSCPLASLGSSAVTCHSAGSVGFLKEQRSALGREHPGGCDRSSSMGRPGRVKHVEFQGVEILWTGGDKRETQHPIDFETSLQRTASPDSKESSKVPRHLISSAGLCNSSSLTENVWDESWKAPSERPGTSSGTFSPVRLDESGEDEVFLQENKQHLEKTPKPERDRERISEQEEHVKGEDEDILGPGYTEDSTDVYSSQFETILDNTSLYYSAESLETLYSEPDSYFSFEMPLTPMIQQRIKEGGQFLERTSGGGHQDILSVSADGGIVMGYSSGVTNGLNDASDSIYTKGTPEIAFWGSNAGVKTTRLEAHSEMGSTEILEKETPENLSNGTSSNVEAAKRLAKRLYQLDRFKRSDVAKHLGKNNEFSKLVAEEYLKFFDFTGMTLDQSLRYFFKAFSLVGETQERERVLIHFSNRYFYCNPDTIASQDGVHCLTCAIMLLNTDLHGHVSNIGKKMTCQEFIANLQGVNEGVDFSKDLLKALYNSIKNEKLEWAVDDEEKKKSPSESTEEKANGTHPKTISRIGSTTNPFLDIPHDPNAAVYKSGFLARKIHADMDGKKTPRGKRGWKTFYAVLKGTVLYLQKDEYKPEKALSEEDLKNAVSVHHALASKATDYEKKPNVFKLKTADWRVLLFQTQSPEEMQGWINKINCVAAVFSAPPFPAAIGSQKKFSRPLLPATTTKLSQEEQLKSHESKLKQITTELAEHRSYPPDKKVKAKDVDEYKLKDHYLEFEKTRYEMYVSILKEGGKELLSNDESEAAGLKKSHSSPSLNPDTSPITAKVKRNVSERKDHRPETPSIKQKVT

SEQ ID NO: 185789 - DNA, 3144 bp, Artificial Sequence
  derived and/or modified sequence
atggaggggaggagcgccgccgccgagactttcgtgtgggtcaataatgctagcgcccactcacaatctgtcgcgaaggccaagtacgagttcctgttcggaagaagtgagggtaaagctcctgatacatctgatcacggggggtccacgcttctgcctccaaacgtcaccaacgagttccctgagtatgggaccatggaggaagggggcgagggcttgagagcctccctagagtttgacggcgaggccctgccctgtcatcctcaagaacaacagggagttcaacctctgacagggtgtcatagtggactggattctgtgaccgaaggtccaaaagacgtaagagaggcgcccagtcagagccatctgaaagagcagtcattacagccgattgattctctgatatccgcattaaaagccaccgaggcgcggataatttccggaaccttgcaggccacgaaagtcctagaccaggacgccgttagttctttctccgttcagcaggttgaaaaggagttggacaccgcatctagaaaaactcaacgcgtgaataaaaccttgccagccggccagaaaaatctgcctgagatacctttatcagccgaagtgaccaccgaagaatctttctacttgagtattcagaaagacctgaccgccctgctcactggcgatacccaggctgagatctcccagatcatgaataatggaaggaagggtgccgtctgtgttcaggaaccatcctgtccactggcttcactgggtagcagtgccgtgacatgtcattcagctggctctgtgggtttcctgaaggaacagaggtccgctctgggtcgggaacatcccggagggtgtgaccgctcatcctcaatggggcgtccgggtcgggtcaagcatgtcgagttccaaggtgtggaaattctctggaccggaggcgacaaaagggagacgcagcacccgatcgactttgagacatcgctccagagaaccgcttccccagacagcaaggagtcttctaaagtcccgagacatctgatttcatcagccgggctgtgtaattcgagttcattaaccgaaaacgtgtgggatgagtcctggaaagcaccatccgagcgacctggcacctcctcggggaccttcagccccgtacgcctggacgagagcggggaagacgaggttttcctgcaagagaataaacagcacctggagaagacccctaagcctgagcgggaccgggaaaggatttctgaacaggaagagcacgtgaaaggagaagacgaagatatccttggccctggatacacagaagacagcaccgacgtgtattcaagccagttcgagacaatcctggacaatacatctctctattattccgctgaatcattggagaccctatattcagagcctgattcgtatttcagtttcgaaatgcctctgacaccgatgattcagcagaggatcaaggaaggcggacagtttttagagcggactagcggggggggacaccaagacattctgtccgtttctgctgacggaggaatcgtcatgggatacagctcaggcgtgactaatgggctcaacgatgcctctgactctatttacacgaagggaacacctgaaattgccttctggggatcaaacgcgggggtcaagaccacccgcctggaggctcatagcgagatggggagcacggaaatcctcgaaaaagagacacctgaaaatttgtccaacggaacttcatcaaacgtggaagctgcaaaacgtttagctaagcgcctctaccagctggaccgattcaagaggtccgacgttgctaagcacctagggaaaaataatgagttttctaaactagttgctgaagagtacttgaaattttttgatttcactggcatgaccctcgatcagagcttgcgatatttttttaaagccttttcgttggtcggcgaaacacaggaaagggaaagggtactcatacacttcagcaacaggtacttttattgcaacccagatacaatcgcttctcaggacggtgtgcattgtctcacatgtgcaatcatgcttctgaataccgacctccacgggcataacatcgggaaaaaaatgacctgtcaggaattcatagccaacctgcagggagtgaacgaaggtgttgatttcagcaaggatttactcaaagcattgtacaattctattaagaacgaaaaattggaatgggctgttgacgatgaggagaagaaaaagagccccagtgagtctaccgaagagaaagcaaatggtacccaccccaaaacgatttcccgcatcggatccaccaccaacccatttctggacatcccacatgatccgaacgctgccgtttacaaaagcgggttcttagctcggaagattcacgcggacatggatgggaagaagactcctcggggtaagaggggatggaagaccttttacgccgtgcttaagggcacagtgctctatctgcaaaaggatgagtataagcccgagaaagcactgtctgaggaagatttgaagaatgcagtttccgtccatcacgcactggcctctaaggcaaccgattacgagaagaagcctaacgtctttaagctgaaaaccgctgattggagggtcctgttatttcagacacagtcccctgaggagatgcagggctggatcaacaagataaattgcgtggcagcagtgttctcagctccacctttccctgccgcgatcggctctcaaaaaaaattttctcgccctttactgcctgctacaactactaaattatcgcaggaagagcagttgaaatcccacgaatcgaagctcaagcagatcactacagaacttgccgaacacaggtcatatccacctgataagaaggtgaaggccaaggacgtggacgagtacaagctaaaagaccactacctagagttcgaaaaaacccgctatgaaatgtatgtgtctattttgaaggaaggaggtaaggaattgctctcgaatgacgaatccgaagcggccgggctgaagaaatcacattcatccccatccctcaaccccgatacatccccgatcacggctaaagtcaagagaaacgttagcgagcggaaggaccatcgcccagaaacaccctcgataaagcagaaagttacttag

SEQ ID NO: 185790 - DNA, 3150 bp, Artificial Sequence
  derived and/or modified sequence
atggaagggaggtccgcagctgcagaaacttttgtgtgggtgaataatgccagcgctcattcccagtcagtcgcgaaggctaaatatgagttcctttttgggaggtctgaggggaaagcccccgacacaagtgaccacggcgggagtactctactgcctcccaacgtgaccaatgaattccccgagtatggaaccatggaagaggggggcgagggactccgggcatccctggagttcgacggggaagctctaccctgccacccacaagaacaacaaggcgttcagccgcttacaggatgtcatagcggcctcgacagcgttaccgaaggtccaaaggatgtgcgcgaggcaccttctcaaagtcatctcaaagaacagtcattgcaaccaatcgattcactgatttctgcattgaaagctactgaggcccggattatatccgggaccctgcaggccacaaaggtgctcgaccaggacgccgtgtccagtttttctgtgcagcaggtggagaaggaattagacacagcctccagaaagacgcagcgagtgaataaaactcttcctgctggccaaaagaacctgccagagatcccactgagcgcagaagtgacaacagaagaatcattctatctgtctatccagaaggacttaactgctctgctgacaggcgatacgcaggccgagattagccagatcatgaataacgggcgcaaaggagcggtctgtgtgcaggagccatcatgtccactcgctagcctggggtcctcagccgtaacctgtcacagcgccggttccgtgggattcttaaaagagcagcggtctgcactgggacgggaacatcccggggggtgtgatagaagctcatcaatgggaagaccaggtcgggtgaaacacgtggaatttcaaggcgtggaaatcctctggacgggcggcgataagagggaaacccagcacccaattgactttgagacatcactacagcgtacagcttcacctgattctaaggagtcctcgaaagtgcctagacatctgatatcgtccgccggcttatgcaacagctcctctctcactgaaaacgtgtgggatgagtcatggaaggccccctctgagagacccgggacatccagcggaacatttagcccggtgcgcctggatgaaagcggagaagatgaggtgtttctgcaggagaacaaacagcacctggaaaagaccccaaaaccggagagagatagggaaagaatcagcgagcaagaggagcacgtgaaaggtgaagacgaagacatcttgggtcctggttatacagaagattccaccgacgtgtattcaagccagtttgagactattctcgacaacacgtctctctactattctgcagaatcactggagacactttattcagagcccgactcctactttagtttcgagatgcccttaaccccgatgatccaacagcggataaaggaaggcggacagttcctagagcgaactagtggcggaggccaccaggatatcctgagtgtttcggcagacggcggcatcgtgatgggatactccagcggggtcacgaatggcctaaatgatgcaagcgattcaatttacaccaagggcacacccgaaattgcgttctggggcagcaatgcaggcgtaaaaacgacccggttggaggctcacagcgaaatgggatctactgaaatccttgagaaggagacccccgaaaacttgtccaatgggacctcttctaatgtcgaggccgccaaaaggctcgccaaacgtctctatcagctggaccggttcaagcgttccgacgtggccaagcacctgggaaaaaataatgagttctcaaaactggtggctgaggagtatctcaaattttttgacttcacgggtatgacactcgatcagtctcttagatacttttttaaagctttttctctcgtgggcgagacccaagagagggaacgagtgctgattcacttttctaaccgatacttctactgcaaccctgacacaatcgcctctcaggatggggtgcactgcttgacatgcgcgatcatgctgttaaatactgatctccatggccacgtgtccaacatagggaagaaaatgacatgccaagaattcattgccaatctgcagggtgtgaacgaaggagtagatttctctaaagatctactgaaagccctatacaactccattaagaacgagaaactggaatgggcagtcgacgacgaggaaaaaaagaaaagtccaagcgagagtaccgaggagaaggcgaacggcacacaccccaagactatttctcgtatcggctccactaccaatccattcttggatattccccatgatcctaacgctgctgtttataaatcaggtttccttgcgagaaagatccatgcggacatggatggcaaaaagacaccccggggcaagaggggttggaaaaccttctacgctgttctgaagggtacagtgctttacctgcagaaagacgagtataaaccagagaaagccctctctgaggaggatctgaaaaacgccgtttcagttcaccacgccctagcttcaaaagccaccgattatgagaagaaacctaatgtcttcaagttaaagacagcagactggagggtgctcctgtttcagacccaaagtccagaagagatgcaggggtggatcaataagattaactgcgtggcggccgtcttttctgcaccgccctttccagcggccattggcagccagaaaaagttctccagaccgttgttgccagcaacaacaacgaagctttcccaggaggagcaactgaagtcacacgagagcaaactgaagcaaataacgactgaactggcagaacaccgcagctatcctccagacaagaaggtgaaagccaaagacgttgacgagtacaaacttaaggatcactacttggagttcgagaagactaggtatgaaatgtacgttagtatactgaaggaaggaggcaaggaactcctgagtaacgacgagtcggaggccgccggtctgaaaaaatcacactctagtcccagcctgaaccctgacacctctcccattacagccaaagttaagaggaatgtgagcgagcgcaaagaccacagaccagagacacccagtatcaagcagaaggttacttag

SEQ ID NO: 185791 - DNA, 3144 bp, Artificial Sequence
  derived and/or modified sequence
atggagggccgctctgctgctgctgagacctttgtgtgggtgaacaatgccagcgcccacagccagagcgtggccaaggccaagtatgagttcctgtttggccgctctgagggcaaggccccagacaccagtgaccacggcggcagcaccctgctgcccccaaatgtgaccaatgagttcccagaatatggcaccatggaggagggcggggagggcctgcgggccagcctggagtttgatggagaggccctgccctgccacccccaggagcagcagggcgtgcagcccctgaccggctgccacagcggcctggacagcgtgacagagggccccaaggatgtgcgggaggcccccagccagagccacctgaaggagcagagcctgcagcccatcgacagcctcatcagcgccctgaaggccacagaggcccgcatcatcagcggcaccctgcaggccaccaaggtgctggaccaggatgctgtgtcctccttctctgtgcagcaggtggagaaggagctggacacagccagcaggaagacccagagggtgaacaagaccctgcctgctggccagaagaacctgcctgagatccccctgtctgctgaggtgaccacagaggagagcttctacctgagcatccagaaggacctgacagccctgctgaccggggacacccaggccgagatcagccagatcatgaacaatggaagaaaaggagctgtgtgtgtgcaggagcccagctgccccctggccagcctgggcagcagcgctgtgacctgccacagcgctggctctgtgggcttcctgaaggagcagaggtctgccctgggccgggagcaccctgggggctgtgacaggagcagctccatgggccggcccggccgggtgaagcacgtggagttccagggcgtggagatcctgtggacaggaggagacaagcgggagacccagcaccccatcgactttgagaccagcctgcagaggacagccagcccagacagcaaggagagcagcaaggtgcccaggcacctgatcagcagcgctggcctgtgcaacagcagcagcctgacagaaaatgtgtgggatgagagctggaaggcccccagcgagcggcccggcaccagcagcggcaccttcagccctgtgcggctggatgaaagtggagaagatgaggtgttcctgcaggagaacaagcagcacctggagaagacccccaagccagagcgggaccgggagcgcatcagcgagcaggaggagcacgtgaagggggaggatgaggacatcctgggccctggctacacagaggacagcacagatgtgtacagcagccagtttgagaccatcctggacaacaccagcctgtactacagcgctgagagcctggagaccctgtacagcgagccagacagctacttctcctttgagatgcccctgacccccatgatccagcagaggatcaaggagggcggccagttcctggagaggaccagcggcggcggccaccaggacatcctgtctgtgtctgcagatggcggcatcgtgatgggctacagcagtggagtgaccaacggcctgaatgatgccagtgacagcatctacaccaagggcaccccagagatcgccttctggggcagcaatgccggcgtgaagaccacccggctggaggcccacagcgagatgggcagcacagagatcctggagaaggagaccccagagaacctgagcaatggcaccagcagcaatgtggaggccgccaagaggctggccaagaggctgtaccagctggaccgcttcaagagaagtgatgtggccaagcacctgggcaagaacaatgagttcagcaagctggtggccgaggagtacctgaagttctttgacttcaccggcatgaccctggaccagagcctgcgctacttcttcaaggccttcagcctggtgggggagacccaggagcgggagcgggtgctgatccacttcagcaaccgctacttctactgcaacccagacaccatcgccagccaggatggagtgcactgcctgacctgtgccatcatgctgctgaacacagacctgcacggccacaacatcggcaagaagatgacctgccaggagttcatcgccaacctgcagggcgtgaatgaaggagtggacttcagcaaggacctgctgaaggccctgtacaacagcatcaagaatgagaagctggagtgggccgtggatgatgaggagaagaagaagagccccagcgagagcacagaggagaaggccaacggcacccaccccaagaccatcagcagaattggcagcaccaccaaccccttcctggacatcccccatgaccccaatgctgctgtgtacaagagcggcttcctggccaggaagatccatgctgacatggatggcaagaagaccccccggggcaagaggggctggaagaccttctatgctgtgctgaagggcaccgtgctgtacctgcagaaggatgagtacaagccagagaaggccctgtctgaggaggacctgaagaatgctgtgtctgtgcaccacgccctggccagcaaggccacagattatgagaagaagcccaacgtgttcaagctgaagacagctgactggagggtgctgctcttccagacccagagccctgaggagatgcagggctggatcaacaagatcaactgtgtggccgctgtgttcagcgccccacccttccctgctgccatcggcagccagaagaagttcagccggcccctgctgcctgccaccaccaccaagctgagccaggaggagcagctgaagagccatgagagcaagctgaagcagatcaccacagagctggccgagcacaggagctaccccccagacaagaaggtgaaggccaaggatgtggatgagtacaagctgaaggaccactacctggagtttgagaagaccaggtatgagatgtatgtgtccatcctgaaggagggcggcaaggagctgctgagcaatgatgagagcgaggccgccggcctgaagaagagccacagcagccccagcctgaacccagacaccagccccatcacagccaaggtgaagagaaatgtgtctgagaggaaggaccacaggcctgagacccccagcatcaagcagaaggtgacctag

SEQ ID NO: 185792 - DNA, 3150 bp, Artificial Sequence
  derived and/or modified sequence
atggagggccgctctgctgctgctgagacctttgtgtgggtgaacaatgccagcgcccacagccagagcgtggccaaggccaagtatgagttcctgtttggccgctctgagggcaaggccccagacaccagtgaccacggcggcagcaccctgctgcccccaaatgtgaccaatgagttcccagaatatggcaccatggaggagggcggggagggcctgcgggccagcctggagtttgatggagaggccctgccctgccacccccaggagcagcagggcgtgcagcccctgaccggctgccacagcggcctggacagcgtgacagagggccccaaggatgtgcgggaggcccccagccagagccacctgaaggagcagagcctgcagcccatcgacagcctcatcagcgccctgaaggccacagaggcccgcatcatcagcggcaccctgcaggccaccaaggtgctggaccaggatgctgtgtcctccttctctgtgcagcaggtggagaaggagctggacacagccagcaggaagacccagagggtgaacaagaccctgcctgctggccagaagaacctgcctgagatccccctgtctgctgaggtgaccacagaggagagcttctacctgagcatccagaaggacctgacagccctgctgaccggggacacccaggccgagatcagccagatcatgaacaatggaagaaaaggagctgtgtgtgtgcaggagcccagctgccccctggccagcctgggcagcagcgctgtgacctgccacagcgctggctctgtgggcttcctgaaggagcagaggtctgccctgggccgggagcaccctgggggctgtgacaggagcagctccatgggccggcccggccgggtgaagcacgtggagttccagggcgtggagatcctgtggacaggaggagacaagcgggagacccagcaccccatcgactttgagaccagcctgcagaggacagccagcccagacagcaaggagagcagcaaggtgcccaggcacctgatcagcagcgctggcctgtgcaacagcagcagcctgacagaaaatgtgtgggatgagagctggaaggcccccagcgagcggcccggcaccagcagcggcaccttcagccctgtgcggctggatgaaagtggagaagatgaggtgttcctgcaggagaacaagcagcacctggagaagacccccaagccagagcgggaccgggagcgcatcagcgagcaggaggagcacgtgaagggggaggatgaggacatcctgggccctggctacacagaggacagcacagatgtgtacagcagccagtttgagaccatcctggacaacaccagcctgtactacagcgctgagagcctggagaccctgtacagcgagccagacagctacttctcctttgagatgcccctgacccccatgatccagcagaggatcaaggagggcggccagttcctggagaggaccagcggcggcggccaccaggacatcctgtctgtgtctgcagatggcggcatcgtgatgggctacagcagtggagtgaccaacggcctgaatgatgccagtgacagcatctacaccaagggcaccccagagatcgccttctggggcagcaatgccggcgtgaagaccacccggctggaggcccacagcgagatgggcagcacagagatcctggagaaggagaccccagagaacctgagcaatggcaccagcagcaatgtggaggccgccaagaggctggccaagaggctgtaccagctggaccgcttcaagagaagtgatgtggccaagcacctgggcaagaacaatgagttcagcaagctggtggccgaggagtacctgaagttctttgacttcaccggcatgaccctggaccagagcctgcgctacttcttcaaggccttcagcctggtgggggagacccaggagcgggagcgggtgctgatccacttcagcaaccgctacttctactgcaacccagacaccatcgccagccaggatggagtgcactgcctgacctgtgccatcatgctgctgaacacagacctgcacggccacgtgagcaacatcggcaagaagatgacctgccaggagttcatcgccaacctgcagggcgtgaatgaaggagtggacttcagcaaggacctgctgaaggccctgtacaacagcatcaagaatgagaagctggagtgggccgtggatgatgaggagaagaagaagagccccagcgagagcacagaggagaaggccaacggcacccaccccaagaccatcagcagaattggcagcaccaccaaccccttcctggacatcccccatgaccccaatgctgctgtgtacaagagcggcttcctggccaggaagatccatgctgacatggatggcaagaagaccccccggggcaagaggggctggaagaccttctatgctgtgctgaagggcaccgtgctgtacctgcagaaggatgagtacaagccagagaaggccctgtctgaggaggacctgaagaatgctgtgtctgtgcaccacgccctggccagcaaggccacagattatgagaagaagcccaacgtgttcaagctgaagacagctgactggagggtgctgctcttccagacccagagccctgaggagatgcagggctggatcaacaagatcaactgtgtggccgctgtgttcagcgccccacccttccctgctgccatcggcagccagaagaagttcagccggcccctgctgcctgccaccaccaccaagctgagccaggaggagcagctgaagagccatgagagcaagctgaagcagatcaccacagagctggccgagcacaggagctaccccccagacaagaaggtgaaggccaaggatgtggatgagtacaagctgaaggaccactacctggagtttgagaagaccaggtatgagatgtatgtgtccatcctgaaggagggcggcaaggagctgctgagcaatgatgagagcgaggccgccggcctgaagaagagccacagcagccccagcctgaacccagacaccagccccatcacagccaaggtgaagagaaatgtgtctgagaggaaggaccacaggcctgagacccccagcatcaagcagaaggtgacctag

SEQ ID NO: 185793 - DNA, 3144 bp, Artificial Sequence
  derived and/or modified sequence
atggagggccggagcgccgccgccgagaccttcgtgtgggtgaacaacgcaagcgctcactcccagtctgtggctaaggctaagtacgaattcctcttcgggagatccgagggcaaggccccagataccagcgatcatgggggttcaaccctgctgccacctaacgtaaccaatgagttccctgaatatgggacaatggaggaagggggagagggtctgcgcgcaagcctggagttcgacggggaagctcttccctgccacccccaagagcagcagggcgttcagccactcaccggttgccactctggcttagatagcgtaacagaggggcctaaggacgtgcgcgaagctcccagccaatcacatctgaaggagcaaagcctccagcccatcgattcattaatcagtgcgctgaaggcaaccgaggcgcgcattatcagtggtacccttcaggccaccaaagtgctagaccaggacgcagtgtcatctttttctgttcagcaggtagagaaggaactagatacagcgtcacgaaaaacacagcgggtaaataaaactctccctgcgggccaaaagaacctgcctgaaatcccactctcggcggaggtaacaacggaggagtcattctacctaagcattcagaaagacctgacggcactgcttactggggatacgcaggccgaaatatcgcagatcatgaacaatgggcgaaagggggcagtctgtgtgcaggagcccagctgcccgctggccagtttagggtcatctgcggtcacctgccattctgctggatctgtcgggttccttaaagaacaacgatctgccctgggacgtgagcaccctggtgggtgtgaccgctccagttctatgggtcgaccgggaagggtgaaacacgttgaatttcaaggtgtcgagatcttatggactgggggggataagagggagactcagcacccaatcgattttgagacatccctgcagaggactgccagtcctgactctaaagagtcctcaaaagtgccgcggcatctgatttcaagtgctgggctttgtaattcctcttcactgaccgagaacgtgtgggacgaatcttggaaggcccccagcgaacggcccggtacatcatctggtacctttagcccagtccgtcttgacgaatccggcgaagatgaggtttttctccaggagaacaaacagcacctggagaaaacccctaagcctgagcgcgatcgggaaagaatctcagagcaggaggagcatgtgaaaggagaggacgaggatatacttggacctgggtataccgaagattcaactgatgtgtactctagccagttcgagacaattttggacaacacgagtctgtattactctgccgaaagtttggagacactgtattccgagccagacagttacttctcgtttgagatgcccttgactcccatgatccagcaaagaatcaaggaaggtggccagttcctggagagaaccagcggaggtgggcaccaggacatactttccgtttcagccgatggcggtatcgtgatgggctattcttcgggcgtcaccaatgggttgaatgacgcaagtgattccatatacactaagggtacccccgagatcgctttctggggctcgaacgccggagtgaaaactactagattagaggctcattcagagatgggaagcacagagatcctcgagaaggaaaccccagaaaatctgagcaatggcacttcctctaacgtggaggccgctaaaagattagccaagaggctgtatcagctcgatagattcaaaaggtcagacgttgctaaacatcttggtaaaaataacgaatttagtaagctggttgccgaggaatatctgaagttttttgactttaccggtatgacactggaccagtcactcagatacttcttcaaggcattttccctggtgggtgaaacacaggagcgtgagagagtccttattcacttctccaatagatacttctactgcaatcccgataccatagctagccaggatggcgttcattgtcttacgtgtgccatcatgctgttaaacaccgatctacatggtcacaatatcggtaagaagatgacgtgccaggagtttattgctaatcttcagggagtgaatgagggagtcgatttcagtaaggatctccttaaggccctctataacagcattaaaaacgagaaactggaatgggccgtggacgacgaggagaagaaaaaatcccctagcgagagcaccgaagagaaggccaacggaacacatccaaaaaccattagcaggataggcagtacaaccaatcccttcctagacatcccccatgatccgaatgcagctgtgtataagagcggcttcctcgcccgcaagattcatgccgacatggacgggaagaagaccccccgtggcaaacgtgggtggaagactttctacgccgttttgaagggtacagttctgtacctgcaaaaggatgaatacaagcctgagaaggccctctcagaagaagatctgaagaatgccgtatctgtccatcacgcactggcgtctaaggccacagactacgagaaaaagcctaatgtatttaagcttaaaacagcagattggcgcgtgctcttatttcagacccagtcgccggaggaaatgcaaggctggattaataagattaactgtgtggcagctgtattcagcgcacctccgttccccgcagcaattggcagtcaaaagaaattctcacgccctctcctgccagccactaccacgaaactatcccaggaggagcagcttaagagccacgaatcgaaactgaaacagataaccaccgaattagcagagcacaggtcctatcctcctgataagaaggtcaaagctaaagacgtagacgagtacaagttaaaggaccattatctggaatttgagaagacccgctacgagatgtatgtatctatactgaaggaaggcggcaaagagctgctgagtaacgacgaaagtgaggccgccgggcttaagaagtcccattcctctccaagcctcaatccagatacatcccccataactgccaaggtcaagaggaacgtgagcgaacggaaggatcacaggcccgaaactccttcaattaagcagaaggtaacatag

SEQ ID NO: 185794 - DNA, 3150 bp, Artificial Sequence
  derived and/or modified sequence
atggagggccggagcgccgccgccgagaccttcgtgtgggtgaacaacgcatcagcacattctcagagcgtggcaaaggccaagtacgagttcctctttggaagatcagaaggaaaagctcccgacacatcagatcatggagggtccaccctcctgcccccgaatgtgacaaacgaattccctgagtatggcactatggaggagggaggcgaaggcctacgcgcttcactggaattcgatggcgaggcattgccttgccatcctcaggaacaacagggcgtgcagcctttgaccggatgccatagcggactcgattccgtcacggaaggacctaaagatgtgagagaggctccctctcagagccatctcaaggaacagtccctccagcccatcgatagtctaatttcagccttaaaggctactgaggcccggattattagcggtaccctgcaagctacaaaagtccttgaccaggatgcagtatcgtctttctccgtgcagcaggtcgagaaagaattggatacagcgagtcgtaagactcagcgggtgaacaaaacacttccagcgggccaaaagaatctccctgagatccccctgagtgctgaagtgacaaccgaggaaagtttctatcttagcatccagaaggacctgacagcccttctgaccggcgacacacaggccgaaatctcacaaatcatgaataatgggaggaaaggggcggtttgtgtgcaggagcccagctgtcctttggcctcccttggctctagcgctgtcacgtgtcattcagctggttctgtcggatttctaaaagaacagaggtctgcgcttggtcgagaacaccctggaggatgcgacagaagttcctctatggggcggcctgggcgggtgaaacacgtagagtttcagggagtggagattttgtggacaggtggcgataaaagagagacccagcacccaatcgacttcgagacaagtctccaacggaccgctagccctgattccaaagagtcatctaaagtgcctcgccacttgatctcgtcggccggtctctgtaactcttccagcctcactgaaaacgtgtgggacgagtcctggaaggctccttcagagagaccaggcacctcctccggcaccttcagtcccgtgcgcctggacgaatctggcgaagacgaagtgttccttcaggaaaacaaacaacacctcgagaagacacctaaacctgaaagagatagagagcgtatctccgagcaggaggagcatgtgaaaggtgaagatgaggatattttggggccggggtacactgaggattctacggatgtgtattcaagtcagtttgagactatactggacaatacgagtctgtattacagcgccgagtcactggagaccctctacagcgaaccagatagctattttagctttgaaatgccacttacacccatgattcagcagaggattaaggagggtggacagttcctggagcgaacctccgggggagggcaccaagatatcctcagtgtgtcggccgacgggggtatcgtgatgggctacagttcaggtgtgactaatggcctgaacgatgcaagtgattcaatatacacgaaaggcacacctgagatcgcattctggggttccaacgcaggggtgaagacgaccagacttgaggctcacagcgagatgggctccacggagatacttgagaaggaaacccctgaaaatctatccaatggcacctcgagcaacgtcgaggcagctaagcgtctggcgaaaaggctgtaccaactggatcgtttcaagagatctgatgtggctaagcacctgggcaaaaataatgagttttccaagttggttgcagaggaatatctgaagttttttgactttaccgggatgactctcgaccagagcttacgatacttctttaaagccttttcgctcgtgggcgagacccaggagcgtgaacgggtactgatccattttagtaatcggtacttttactgtaaccccgatacaatagctagccaagatggggtgcactgtctgacctgcgccatcatgctgttgaacactgacttgcatggtcatgtgtcgaacatcgggaagaagatgacatgccaggagtttatagcgaaccttcagggcgttaacgagggtgtggatttcagtaaggacctgctaaaggcgctctataatagtattaaaaacgaaaaactggaatgggcagtcgacgacgaagagaaaaagaaaagtcccagcgaaagcacagaggagaaggccaatgggacccatcccaaaacgatatctagaatcgggagcaccacaaaccctttccttgacataccccatgacccaaatgccgccgtgtacaaatctggttttcttgcacgcaagatccacgctgatatggatgggaaaaagacacctaggggtaaacgcggctggaaaacattttacgccgttctcaaggggactgtgctttatttgcagaaagatgaatacaagccagaaaaggccctgagcgaagaagacctgaagaacgccgttagcgtacaccacgctctggcaagtaaggctacagactatgagaaaaagccgaacgtctttaagttgaagaccgcggactggagagtcctcctgtttcagacacagagtccagaggaaatgcaggggtggataaataaaattaattgtgtcgccgccgtattcagtgctccccctttccccgctgccatagggtcacagaagaaattctctcgccccctgttgcccgcgacaaccacaaaactaagccaggaggaacagctgaaaagccatgaatctaaattaaaacaaatcactacagagttggctgagcaccgatcctaccccccggataagaaggtgaaggcaaaggacgtcgacgaatataagctgaaagatcactatctggagtttgagaagactcgatacgagatgtacgtgtctatccttaaggaaggagggaaagaacttctcagcaacgatgagagtgaagcagccggactgaagaaatcccatagcagcccctcactgaaccctgatacatcccccatcaccgccaaagttaaacggaacgtgtccgagagaaaggatcaccgacctgaaacacctagcatcaaacagaaggtgacatag

SEQ ID NO: 185795 - DNA, 11689 bp, Artificial Sequence
  derived and/or modified sequence
aacaaagagcacgcggcgctggccgccggcactcgcgccctgaggctgcggccccggagcgcccggcggcggtttcggcgcgcggccgggctggcgatggaagatggaaggaaggagcgcagcggcagagacatttgtttgggtgaacaatgcatctgcacattcccagagtgttgccaaggccaaatatgaatttttatttggcagatctgaagggaaagctccagatactagtgatcatggaggaagcactttactcccaccaaatgtcacaaatgaatttccagaatatgggaccatggaggaaggtggagaaggcctaagggcttctctggaatttgatggtgaggctctgccatgccacccacaagagcagcagggtgtccagcctcttactggctgccactctgggctcgacagtgttacagaaggaccaaaagatgtcagagaggccccctctcaaagtcatctcaaggaacaaagtttacagcccattgactctttgatttcagctctgaaagccacagaagccagaatcatttccggaacattacaggctacaaaggtactggaccaagatgctgtttctagtttttcagttcagcaggtggaaaaagagctggacactgccagtcgtaaaacacagagagtcaacaaaacgctccctgctggccaaaaaaatttaccagaaatacctctttcagctgaagtaacaacggaggaaagtttttatttgagcatccagaaagatctcaccgcgctgttaactggagacactcaggcagagatttcccagataatgaataatgggaggaaaggggctgtctgtgtgcaggagccatcttgtcctttggcctccctcgggagctcagcagtgacctgccactctgcaggcagtgttggtttcttgaaagagcagaggtctgctcttgggagagagcacccagggggatgtgatcgaagcagctccatgggacgcccaggccgggtcaaacatgtggaatttcaaggagtggaaatactgtggacaggaggagacaagagagagacccagcatcctatagattttgagacatcactgcaaagaacagcctctcctgacagcaaagagtcttccaaagtgccacgccatctcatctcatcagctggtttgtgtaattcaagtagtttaactgagaatgtttgggatgaatcctggaaagctccttcagagaggcctggcactagctcggggacattttcccctgtgcgtcttgatgagagtggagaggatgaagtcttcctacaggaaaacaaacagcatcttgagaagacacctaaaccagagagagacagggaaaggatcagcgaacaagaggagcacgttaagggggaagatgaagacatccttgggcctggatatacggaggactccaccgacgtgtacagctcccagtttgaaaccattttggacaacacttctttatactacagtgcagagtccctggagacattatactcagagcctgatagctattttagctttgaaatgcccctcactccaatgatacaacagcgcattaaagaaggtggtcagttcttggagaggacatcagggggaggacatcaggatatcctgagtgtgtctgcagatggtggcatcgtgatgggctattctagtggcgtcaccaatgggctgaatgatgccagcgactccatctacacgaaaggcaccccggagattgctttctggggaagcaatgctggggtgaaaacaacacggctagaagctcattctgaaatggggagcactgaaattttggaaaaggagaccccagaaaatctcagtaatggtaccagcagcaatgtggaagcagccaaaaggttggccaaacgcctttatcagctggacagattcaaaagatcagatgttgcaaaacaccttggcaagaacaacgaatttagcaaactagttgcagaagaatatctgaagttttttgattttacaggaatgacgctggatcagtcactcaggtatttctttaaagcattctctcttgtgggagaaactcaagaacgagagagagttttaatacacttctccaatagatatttttattgtaacccagataccattgcttcacaagatggagtccattgccttacctgtgcaataatgcttcttaataccgatctacatggccacaatattggaaagaagatgacctgtcaggagttcattgcaaatctgcaaggggtaaatgagggtgttgatttctccaaggatctgctgaaagctctgtacaactcaatcaagaatgagaagcttgaatgggcagtagatgatgaagagaaaaaaaagtctccctcagaaagtactgaggagaaagctaacggaacacatccaaagaccatcagtcgtattggaagtactactaacccatttttggacattcctcatgatccaaatgctgctgtgtacaaaagtggattcttggctcggaaaattcatgcagatatggatggaaagaagactccaagaggaaaacgaggatggaaaaccttttatgctgtactgaagggaacagttctttacttgcaaaaggatgaatacaagccagaaaaggccttgtctgaagaggacttgaaaaacgctgtgagtgtgcaccacgcattggcatccaaggccacggactatgagaagaaaccaaacgtgtttaaacttaaaactgccgactggagggtcttgctttttcaaactcagagcccagaggaaatgcaagggtggataaacaaaatcaattgtgtggcagctgtattttctgcaccaccatttccagcagcaatcggctctcagaagaagtttagccgcccacttctgcctgccactacaacaaaactgtctcaggaggagcaactgaagtcacatgaaagtaagctgaagcagatcaccaccgagctggccgagcaccgctcatatccccccgacaagaaggtcaaagccaaggacgtcgatgagtacaaactgaaagaccactatctggagtttgagaaaacccgctatgaaatgtatgtcagcattctcaaggaaggaggcaaagagctactgagtaacgatgaaagcgaggctgcaggactgaagaagtcgcactcgagtccttcgctgaacccggatacttctccaatcactgccaaagtcaagcgtaacgtgtcagagaggaaggatcaccgacctgaaacaccaagcattaagcaaaaagttacttagagtccatctgcggccaggaagtgctggtcatggagcaaaatagggtttttcaagatctttctggtaatccgtgaatatatttaaaaaaaaaaagtctgtgacaaaacggtgcattagtaattttttctattgtatatttttgttagtttctgtacagattgtctttgctcttgatttcttttgctttgatgatttttgcaacttgatagctaatgcaccttttctgtgaggaggaggggatcgtgatttcagaatgaattatgtatcccttctcttttggttttctcttgtttgcagtctgctcagttgttttatgtattctcatatcaactgttaaacttttttttaaggttaaagaatttaatccattgtgaaacacttaactggacaaactgtagttttagtaaattctagctggagttaatatacgcctttatatgtgaaatcttgcccagtcacagaggtagaattgagcactcacagatgctccagtaagaatcacagtgctgggaatctagttgctccaatatgaggcagcttcatgtgcagcttagcacttgttgttgagatcggaccctgctggaagcagggaaaagaagcgtgaagatcgtaggattgagaacttagggaagcacattagcttgcttgaagtgctgattccatttcagccaagcaagggaaagaggaagtggagtcattttgcctttgaaggctgaggaaagattgatacccagttaattttgtttgctaaaggatgggggcaataatcggcccttgaggagctgcagcagtaggcatgtgctcagtctgcaggaattgttacctcactcccacagggtctagactagaaatccatcatctctatcgttgatatccttccatccaggaatagatttttcttactctacatatgtgtgtgtgcgtgcgtgtgtgtgcgtgtgtgggcatggggttgtgtcctggttgtgatattgaggtcttccttcctaacaaattaatactaaaatgaaacagcttttcttgtgtccttaagacaaaataaggaaggaaaacgtagctgcagttgtccacgatggatattggttctttaaaatatatctgaaagtagtagtcagaatgaattatggttggaaaactgaggaatcttctggttgcaggtgcaaagtgactttgtttattcttgtctcagtctccttgatagccacttcactctgctactactcaactttctcctaaaaatacttcatctattttcagtcctttctttctgtctactcaaaatggttctattaactttgcagtcatgagcttgttccagttacagtccctttgaagttcagggtgataaacagaatattcttctgtagaggaagagaaaggagtgaaagtttagcccactgagacctagagctttgtgatttcctaaccttgaaactctgtaatccctaaagttaaaatctccgcaagtggcacaacttcagaactaatagtatcactttgatttttctttttcctcccttagaaagtttctctagttctatagtttatttgttgaaggtactatgaccaaagaatcagctgctctacaggaatagcatggttccagtgaattagagaaaacctgctgtaaagccatggtagtgtctaagtggtatgttattatgatgtactagcatttatttacagaattatttattaacgtttacttccttcccctctgtaaatgtccatgactattgcccagagaaggcttacccctctctagggttgcagttgctttctttgtaataagtattttgccacacctgtaaaaaaaaaaacctcacttttaactctctgccttgtttgggtaaaggcagtaactaagtttatgtttcagaactgcaaaacaaacaggatagttaccaatatggcccatgtatcagattgatttttgtagcctctcactgaatccaacatatccacaagcaagttatctgtctttctacctgataatctaaattatcaggatatttgttttctgcctaaatgtttatactaagccgaggggagagaggtacctagaccatgtcatctacaagcttcagtaactaaagaaaaaggaacttccctgagtggcttgaatgtgtttgcccacagtctatatctatgtatatagaatgtctgtatgtattttacttatttaatatacattgaatggtaccttgctacagtatttctgacatttagagtagtgttgaaatactcggctagcatcagcaccactatagcactgtccgtgtcatatgagtcactaatattaactccagggacttctggataggctaatagatcattggatacgaagggctcttttgaagcttcagtataccatgtttgcatagtttatctttaaaaacaactttaaaggttcttttgtgagccaggatctcagactgccgtagcatgatgctgtccatctttagcgcatgggctgagaacacctcttccctgaggcttctgaaggttgctgtctgtcatgagtgcatgaaggaggccaagagtttatgctatgggaggaaacagtcactgatttgcctagattctgagagtctggcccatagccaaccacattttcctttgggataatttatttcctgtggcatctagccagaagaaattgaggatgtttcctttcacagctgctccaagcctgttgcccaattcacggtacaagggagcaccccttccctttcctctgaaggtacgccacccacctccgtcgcccacctcagcgcccaggagccttgggacttccttccatatgataaatcattcttcttcacgtcaatacacttcatattaatttctagtacagaaaatcttgacagctatcagaatgccttggtcatagtgttgttgcaaaattgaccatacaggtggcccatgtataaaatctgaattttaggggtttgtccccacctcgcatgctggcttttacagggaggtgtctgggattcctcattagcaatcaaaacttaattactgggatgcagagtccttactttatcgccagcccgtaggcatttctgaagtgcacttttttgaaacatcattttgctaactctcagcagtgtctaattaaactgagcaatacttttgtgaattttaattaatctcagcaaaaccatgatgggagagagtcctctgatggaaatgtagtccctggattatgtgtaacctttttattcctcttagatgcagaggatagaaagcattttttggtgcagtggtcttgtggcaaacacaagaccctctatgcgtctccaactgttatcctaatctagaaaatgaggactggcccctgggcaaaagtgacatgaggaatttactctggaagaggaaaatctgggtggctttccaaggctaagataggtttgtatttcaccctgtggccaagctacagaacttctgagattgtggaagaatttttgcaaccagcagggaaagaggcctcttactgcctaaacacaaagttacactgagcttttctactgtcctttgcctattgctccctctatcatgtaaagatctgggaaggatgagaggcagggcctgcttgtcatgagctgcactcttttctttttaactaatcattgacaattggaagaaaattgacgttaaagaagtttctccattgtcttactaacaaaaccttttgggtttcattaattgtccttgaaattgagttcctttggcatttttccttgcagtcatcagttaagcatgttgcatcctgaattcacagaagtttagctttgcaggtttgaatctctgtaatttaactcccgtggacttggtcgagttttcagcaggttgggagccacctctcttcatttcagcagtgagtcatcccttgacttttcaaatgacagaattttttccaattgtaaaattagcactgtaaaacaaagaaccaaagtggcatcctaagagttgttaaacctgaagtctagtttatgaggaattgtccaagttggagtttaaatagtatctgcttttgtctcaaagcatctaagttattctgacagaaaatggtaagtcagctttgcaggcagatgcgcctctgggcctcctaccttgctccacagctttctggccatcttgtctcccaggccatgccactgctctgccacatgtcagcaaatttctttccaccagtcttatagcatcttacatgatcaaatcatcacagaataaccccgtgatagattattgatagcaatagagaggggctttgtcactgatttttctctcagattccttttccatctctcatccataaaggaaggactgaaatccaaaggcattctccttttgtacctacagtatccagaacccacgtgggcagccttctgcttatgacaataattggcccattgcatgcagagagaatgtcttcatagagagaatgtcattaaatacttgaatctgcatgacagtttgacttgaatgcaacagcaggaaaattttgcaagttacataattgtatatacagtaggttttcttaagtctcttcggttcatcctttgtaatttgtgtgtgtatctgtagtattgcaggcttttggagactattcttacaggcagtatgtcagtcatcaaagaaaatgctgtcacctgccattgttgtatttgtgggtatttatagttgtatgtatgtaaatgcatcagtgtgtagattgcatatcagtgtatggtacatgtacatcaaaattatttttgtccttaatcagtgtgatatgaaaagcaagtacaacctcataggactgattatataatgaagttgttgagagtatatatagtggtattgttttattaaacttaaactcaaataatattttgattaaaatttttaataagactttatgctagaaaattctttgagctttgaatcaccagggcaaaaatgactttcaactaaccttgtgaatcttttgcagtgtactgtgtgcaataccaagggcatagctccctgtaatttgggaaatacagaaagaaaagaaaaaaaaaaaaaaaggcagcctgtgcagtcttagtaactttagtattaagagcacttaaagtcaaactgacaattttgggcttattacaaaatgtgatgctttaaagcacacgttctttattgttgttgtaattagtccataaaaaatatagctttcggaagaattaagtacccaccatatcatttatgtatttgtgtatgttttacgggagatcaaaccactctcgtggtgccgcatccgtactcgcttgacttggaagaaatatcacaagcactaaagtatatcagggcatcccaggattgggtactgtatcctaggtttgcagttgcagaaattagcatctagtgtcacaggtaaaagaatttcaggaccaggtttaaactttattttaaatatttttatacttaggtctctttttcctgcctctccccaaagaagagccactggccttagttgtttgagcttactgcttatattatagagtgtaaataggtaactagagactaaaattttattaaccagcatgtttggtatatttaaagcagtgactgagtgtgtttgagtgagtggctgagtgcagtgtcttttgtttaaacacactgcctcgtgtctttgtagctgattcagagagtttgaattgtggggtgggagactaacttcagctccaggctgcagtaatgtgttggtagttacacttgaggcatttttttgttgttgttaattaactctatagtctcaaactatttttgcaaatatatcatttttcctaattggttcttgacgtgcagtggactggctctgtgaatgattggcagggtcttagttttgcgagagtatttccttctaagaattattgtgatctgcagaaacagccatttgattcaaaaatcatgtagaaaaggagtaggagaagcaaaacgtttcatttttgggccttaaccatttgaaatgtttggactttaaacataaagccatggagtttataaagccaagtaaccatttgatatggataataatatctactctagagagagtatatatatgcacattgatttttaatgctgttaagatacttttgtaaaactgtaggaacaagagtaattagaccaaattgaagcttaggggacagtaaagtggttgctttccatttagggtaaccatgcatgtggttagtcctctcctcctgagattcagaaccagttgactgtccccttaggtgtataaggagaaaagttgacatgtctgggacctctgacatgtgtacacatgcttgcacacatgcacacacagtgaatgttttaagttatacaaacataagaccttaagatgcaaagagccagaatattctaaagaggtgatgaacagagggggtggaaactgcatcacagatgttttccaagggccagggtggaatctgagctctagtgtctgactttgagatgcattatatttttaacacataaatgaggggatccatatcacattctttcttgtggaccaccaaattgaaggctttcttgtaattcacaagcagcagctctccagcatctctccgtagcctgggtgaagtcccagaagctggtgtgcatcattttccaaggtggcagagctgcttgctctgcagatcattcctttgagagaggagtacaagtgaagaaacaaggaggcacttcctgtaggagcactgatgtgccttgtccacactcccctctgagctttactggtaagagagctccgactgaacatgctgagcagttgagcacttttccatcagcaacaacagcgaggatggaaatggaaaggaaccgaactaaaatgcatttccctttgcagggcagagagctaagctcttaggaatagtgttatagaaataagcaccctaacttcaattcctgaaaatgttggttaatggagagaattttggagtttcacttaatattttcccatcggtcgccataaataagtcttcaggcgctcctagaagagtcccagcccaaggctcgattaaggaccacactgcaggtctgaggctcactgctctgagtcctgaacaccagagccctgcagagagtggtgataacacatcatctctgcaaagaggaacctctcccccggccgccacttcactcaggcttctactgagcagcaaggacagcctgggtttcaaatgccacttcccctgctttagggatccaggtgtcctgatagcgtgaccctgctgaggcaaggtatcaactccgagagtgactgagtcactgagcgtggcacatgaacaaacgtcatgacaaagattctctgagtgaagttaacaccacgtattttacctttgcaaaaaacaaactggcaccctgagttctaactacggacggacgatatctttgcctccacacccagattcctggaaatggctaacgtttcctttctaggggaagggtcgaggaatactcaagtgctagcttagcagctttgttcagtccagatcagagctgttaggtaaaggcctaaccacctccctgcagtctcttatatctcaagctttaggaacccatttctaaatgtacactagcggagaatttatattgtcagccttgattaccataggacaggcagaaaggcgataatttgtatcttttaatataaaagaagcttttaacttttccagcctattataataactgagttatattcactgtggctcaaactaattggcattgtggaacatttctttaccttcaaagttttctccaccaatcatttcagttctattgcagtcctggtgccatatgtcccctgcaaattgtgaaagtaattagtgacaaaatagcagcctgctccttttcaatggcgaaactgtcggcattagcagttttgggtaagctggcggtactataacacgtactggaaacctgttcctcatcaccacctaccagattctggaaatgccgtcttctagaaaacgatggcgtttgtggtggtcttcttttgaaaggaacagtaatttgtgtggatattgttaaagtgtttaaagaatattttgacaattaagtttacattttacaattgctttattttttattaaaatagttgtatataaatattaccctatttcactgttgttcaagtaaatctaaaccttgtagacaagtgagtcatctgatatgtatagaagctgtgatatatagagtacatttattgtgtaaatgtttatgaatataattgttcctgtgtttttataagttggggatattttgttgttttacggcaacaaaatttattgcatttaaatggtttttatgtaatagaaatcacgcaaaatagtgaaggatttaaaatatgtatatgatacatgtaaatgtacaaactttagaaagaaataaatccaacaaatttcaatcatt

SEQ ID NO: 185796 - DNA, 11693 bp, Artificial Sequence
  derived and/or modified sequence
aacaaagagcacgcggcgctggccgccggcactcgcgccctgaggctgcggccccggagcgcccggcggcggtttcggcgcgcggccgggctggcgatggaagatggaaggaaggagcgcagcggcagagacatttgtttgggtgaacaatgcatctgcacattcccagagtgttgccaaggccaaatatgaatttttatttggcagatctgaagggaaagctccagatactagtgatcatggaggaagcactttactcccaccaaatgtcacaaatgaatttccagaatatgggaccatggaggaaggtggagaaggcctaagggcttctctggaatttgatggtgaggctctgccatgccacccacaagagcagcagggtgtccagcctcttactggctgccactctgggctcgacagtgttacagaaggaccaaaagatgtcagagaggccccctctcaaagtcatctcaaggaacaaagtttacagcccattgactctttgatttcagctctgaaagccacagaagccagaatcatttccggaacattacaggctacaaaggtactggaccaagatgctgtttctagtttttcagttcagcaggtggaaaaagagctggacactgccagtcgtaaaacacagagagtcaacaaaacgctccctgctggccaaaaaaatttaccagaaatacctctttcagctgaagtaacaacggaggaaagtttttatttgagcatccagaaagatctcaccgcgctgttaactggagacactcaggcagagatttcccagataatgaataatgggaggaaaggggctgtctgtgtgcaggagccatcttgtcctttggcctccctcgggagctcagcagtgacctgccactctgcaggcagtgttggtttcttgaaagagcagaggtctgctcttgggagagagcacccagggggatgtgatcgaagcagctccatgggacgcccaggccgggtcaaacatgtggaatttcaaggagtggaaatactgtggacaggaggagacaagagagagacccagcatcctatagattttgagacatcactgcaaagaacagcctctcctgacagcaaagagtcttccaaagtgccacgccatctcatctcatcagctggtttgtgtaattcaagtagtttaactgagaatgtttgggatgaatcctggaaagctccttcagagaggcctggcactagctcggggacattttcccctgtgcgtcttgatgagagtggagaggatgaagtcttcctacaggaaaacaaacagcatcttgagaagacacctaaaccagagagagacagggaaaggatcagcgaacaagaggagcacgttaagggggaagatgaagacatccttgggcctggatatacggaggactccaccgacgtgtacagctcccagtttgaaaccattttggacaacacttctttatactacagtgcagagtccctggagacattatactcagagcctgatagctattttagctttgaaatgcccctcactccaatgatacaacagcgcattaaagaaggtggtcagttcttggagaggacatcagggggaggacatcaggatatcctgagtgtgtctgcagatggtggcatcgtgatgggctattctagtggcgtcaccaatgggctgaatgatgccagcgactccatctacacgaaaggcaccccggagattgctttctggggaagcaatgctggggtgaaaacaacacggctagaagctcattctgaaatggggagcactgaaattttggaaaaggagaccccagaaaatctcagtaatggtaccagcagcaatgtggaagcagccaaaaggttggccaaacgcctttatcagctggacagattcaaaagatcagatgttgcaaaacaccttggcaagaacaacgaatttagcaaactagttgcagaagaatatctgaagttttttgattttacaggaatgacgctggatcagtcactcaggtatttctttaaagcattctctcttgtgggagaaactcaagaacgagagagagttttaatacacttctccaatagatatttttattgtaacccagataccattgcttcacaagatggagtccattgccttacctgtgcaataatgcttcttaataccgatctacatggccacgtaagtaatattggaaagaagatgacctgtcaggagttcattgcaaatctgcaaggggtaaatgagggtgttgatttctccaaggatctgctgaaagctctgtacaactcaatcaagaatgagaagcttgaatgggcagtagatgatgaagagaaaaaaaagtctccctcagaaagtactgaggagaaagctaacggaacacatccaaagaccatcagtcgtattggaagtactactaacccatttttggacattcctcatgatccaaatgctgctgtgtacaaaagtggattcttggctcggaaaattcatgcagatatggatggaaagaagactccaagaggaaaacgaggatggaaaaccttttatgctgtactgaagggaacagttctttacttgcaaaaggatgaatacaagccagaaaaggccttgtctgaagaggacttgaaaaacgctgtgagtgtgcaccacgcattggcatccaaggccacggactatgagaagaaaccaaacgtgtttaaacttaaaactgccgactggagggtcttgctttttcaaactcagagcccagaggaaatgcaagggtggataaacaaaatcaattgtgtggcagctgtattttctgcaccaccatttccagcagcaatcggctctcagaagaagtttagccgcccacttctgcctgccactacaacaaaactgtctcaggaggagcaactgaagtcacatgaaagtaagctgaagcagatcaccaccgagctggccgagcaccgctcatatccccccgacaagaaggtcaaagccaaggacgtcgatgagtacaaactgaaagaccactatctggagtttgagaaaacccgctatgaaatgtatgtcagcattctcaaggaaggaggcaaagagctactgagtaacgatgaaagcgaggctgcaggactgaagaagtcgcactcgagtccttcgctgaacccggatacttctccaatcactgccaaagtcaagcgtaacgtgtcagagaggaaggatcaccgacctgaaacaccaagcattaagcaaaaagttacttagagtccatctgcggccaggaagtgctggtcatggagcaaaatagggtttttcaagatctttctggtaatccgtgaatatatttaaaaaaaaaaagtctgtgacaaaacggtgcattagtaattttttctattgtatatttttgttagtttctgtacagattgtctttgctcttgatttcttttgctttgatgatttttgcaacttgatagctaatgcaccttttctgtgaggaggaggggatcgtgatttcagaatgaattatgtatcccttctcttttggttttctcttgtttgcagtctgctcagttgttttatgtattctcatatcaactgttaaacttttttttaaggttaaagaatttaatccattgtgaaacacttaactggacaaactgtagttttagtaaattctagctggagttaatatacgcctttatatgtgaaatcttgcccagtcacagaggtagaattgagcactcacagatgctccagtaagaatcacagtgctgggaatctagttgctccaatatgaggcagcttcatgtgcagcttagcacttgttgttgagatcggaccctgctggaagcagggaaaagaagcgtgaagatcgtaggattgagaacttagggaagcacattagcttgcttgaagtgctgattccatttcagccaagcaagggaaagaggaagtggagtcattttgcctttgaaggctgaggaaagattgatacccagttaattttgtttgctaaaggatgggggcaataatcggcccttgaggagctgcagcagtaggcatgtgctcagtctgcaggaattgttacctcactcccacagggtctagactagaaatccatcatctctatcgttgatatccttccatccaggaatagatttttcttactctacatatgtgtgtgtgcgtgcgtgtgtgtgcgtgtgtgggcatggggttgtgtcctggttgtgatattgaggtcttccttcctaacaaattaatactaaaatgaaacagcttttcttgtgtccttaagacaaaataaggaaggaaaacgtagctgcagttgtccacgatggatattggttctttaaaatatatctgaaagtagtagtcagaatgaattatggttggaaaactgaggaatcttctggttgcaggtgcaaagtgactttgtttattcttgtctcagtctccttgatagccacttcactctgctactactcaactttctcctaaaaatacttcatctattttcagtcctttctttctgtctactcaaaatggttctattaactttgcagtcatgagcttgttccagttacagtccctttgaagttcagggtgataaacagaatattcttctgtagaggaagagaaaggagtgaaagtttagcccactgagacctagagctttgtgatttcctaaccttgaaactctgtaatccctaaagttaaaatctccgcaagtggcacaacttcagaactaatagtatcactttgatttttctttttcctcccttagaaagtttctctagttctatagtttatttgttgaaggtactatgaccaaagaatcagctgctctacaggaatagcatggttccagtgaattagagaaaacctgctgtaaagccatggtagtgtctaagtggtatgttattatgatgtactagcatttatttacagaattatttattaacgtttacttccttcccctctgtaaatgtccatgactattgcccagagaaggcttacccctctctagggttgcagttgctttctttgtaataagtattttgccacacctgtaaaaaaaaaaacctcacttttaactctctgccttgtttgggtaaaggcagtaactaagtttatgtttcagaactgcaaaacaaacaggatagttaccaatatggcccatgtatcagattgatttttgtagcctctcactgaatccaacatatccacaagcaagttatctgtctttctacctgataatctaaattatcaggatatttgttttctgcctaaatgtttatactaagccgaggggagagaggtacctagaccatgtcatctacaagcttcagtaactaaagaaaaaggaacttccctgagtggcttgaatgtgtttgcccacagtctatatctatgtatatagaatgtctgtatgtattttacttatttaatatacattgaatggtaccttgctacagtatttctgacatttagagtagtgttgaaatactcggctagcatcagcaccactatagcactgtccgtgtcatatgagtcactaatattaactccagggacttctggataggctaatagatcattggatacgaagggctcttttgaagcttcagtataccatgtttgcatagtttatctttaaaaacaactttaaaggttcttttgtgagccaggatctcagactgccgtagcatgatgctgtccatctttagcgcatgggctgagaacacctcttccctgaggcttctgaaggttgctgtctgtcatgagtgcatgaaggaggccaagagtttatgctatgggaggaaacagtcactgatttgcctagattctgagagtctggcccatagccaaccacattttcctttgggataatttatttcctgtggcatctagccagaagaaattgaggatgtttcctttcacagctgctccaagcctgttgcccaattcacggtacaagggagcaccccttccctttcctctgaaggtacgccacccacctccgtcgcccacctcagcgcccaggagccttgggacttccttccatatgataaatcattcttcttcacgtcaatacacttcatattaatttctagtacagaaaatcttgacagctatcagaatgccttggtcatagtgttgttgcaaaattgaccatacaggtggcccatgtataaaatctgaattttaggggtttgtccccacctcgcatgctggcttttacagggaggtgtctgggattcctcattagcaatcaaaacttaattactgggatgcagagtccttactttatcgccagcccgtaggcatttctgaagtgcacttttttgaaacatcattttgctaactctcagcagtgtctaattaaactgagcaatacttttgtgaattttaattaatctcagcaaaaccatgatgggagagagtcctctgatggaaatgtagtccctggattatgtgtaacctttttattcctcttagatgcagaggatagaaagcattttttggtgcagtggtcttgtggcaaacacaagaccctctatgcgtctccaactgttatcctaatctagaaaatgaggactggcccctgggcaaaagtgacatgaggaatttactctggaagaggaaaatctgggtggctttccaaggctaagataggtttgtatttcaccctgtggccaagctacagaacttctgagattgtggaagaatttttgcaaccagcagggaaagaggcctcttactgcctaaacacaaagttacactgagcttttctactgtcctttgcctattgctccctctatcatgtaaagatctgggaaggatgagaggcagggcctgcttgtcatgagctgcactcttttctttttaactaatcattgacaattggaagaaaattgacgttaaagaagtttctccattgtcttactaacaaaaccttttgggtttcattaattgtccttgaaattgagttcctttggcatttttccttgcagtcatcagttaagcatgttgcatcctgaattcacagaagtttagctttgcaggtttgaatctctgtaatttaactcccgtggacttggtcgagttttcagcaggttgggagccacctctcttcatttcagcagtgagtcatcccttgacttttcaaatgacagaattttttccaattgtaaaattagcactgtaaaacaaagaaccaaagtggcatcctaagagttgttaaacctgaagtctagtttatgaggaattgtccaagttggagtttaaatagtatctgcttttgtctcaaagcatctaagttattctgacagaaaatggtaagtcagctttgcaggcagatgcgcctctgggcctcctaccttgctccacagctttctggccatcttgtctcccaggccatgccactgctctgccacatgtcagcaaatttctttccaccagtcttatagcatcttacatgatcaaatcatcacagaataaccccgtgatagattattgatagcaatagagaggggctttgtcactgatttttctctcagattccttttccatctctcatccataaaggaaggactgaaatccaaaggcattctccttttgtacctacagtatccagaacccacgtgggcagccttctgcttatgacaataattggcccattgcatgcagagagaatgtcttcatagagagaatgtcattaaatacttgaatctgcatgacagtttgacttgaatgcaacagcaggaaaattttgcaagttacataattgtatatacagtaggttttcttaagtctcttcggttcatcctttgtaatttgtgtgtgtatctgtagtattgcaggcttttggagactattcttacaggcagtatgtcagtcatcaaagaaaatgctgtcacctgccattgttgtatttgtgggtatttatagttgtatgtatgtaaatgcatcagtgtgtagattgcatatcagtgtatggtacatgtacatcaaaattatttttgtccttaatcagtgtgatatgaaaagcaagtacaacctcataggactgattatataatgaagttgttgagagtatatatagtggtattgttttattaaacttaaactcaaataatattttgattaaaatttttaataagactttatgctagaaaattctttgagctttgaatcaccagggcaaaaatgactttcaactaaccttgtgaatcttttgcagtgtactgtgtgcaataccaagggcatagctccctgtaatttgggaaatacagaaagaaaagaaaaaaaaaaaaaaaggcagcctgtgcagtcttagtaactttagtattaagagcacttaaagtcaaactgacaattttgggcttattacaaaatgtgatgctttaaagcacacgttctttattgttgttgtaattagtccataaaaaatatagctttcggaagaattaagtacccaccatatcatttatgtatttgtgtatgttttacgggagatcaaaccactctcgtggtgccgcatccgtactcgcttgacttggaagaaatatcacaagcactaaagtatatcagggcatcccaggattgggtactgtatcctaggtttgcagttgcagaaattagcatctagtgtcacaggtaaaagaatttcaggaccaggtttaaactttattttaaatatttttatacttaggtctctttttcctgcctctccccaaagaagagccactggccttagttgtttgagcttactgcttatattatagagtgtaaataggtaactagagactaaaattttattaaccagcatgtttggtatatttaaagcagtgactgagtgtgtttgagtgagtggctgagtgcagtgtcttttgtttaaacacactgcctcgtgtctttgtagctgattcagagagtttgaattgtggggtgggagactaacttcagctccaggctgcagtaatgtgttggtagttacacttgaggcatttttttgttgttgttaattaactctatagtctcaaactatttttgcaaatatatcatttttcctaattggttcttgacgtgcagtggactggctctgtgaatgattggcagggtcttagttttgcgagagtatttccttctaagaattattgtgatctgcagaaacagccatttgattcaaaaatcatgtagaaaaggagtaggagaagcaaaacgtttcatttttgggccttaaccatttgaaatgtttggactttaaacataaagccatggagtttataaagccaagtaaccatttgatatggataataatatctactctagagagagtatatatatgcacattgatttttaatgctgttaagatacttttgtaaaactgtaggaacaagagtaattagaccaaattgaagcttaggggacagtaaagtggttgctttccatttagggtaaccatgcatgtggttagtcctctcctcctgagattcagaaccagttgactgtccccttaggtgtataaggagaaaagttgacatgtctgggacctctgacatgtgtacacatgcttgcacacatgcacacacagtgaatgttttaagttatacaaacataagaccttaagatgcaaagagccagaatattctaaagaggtgatgaacagagggggtggaaactgcatcacagatgttttccaagggccagggtggaatctgagctctagtgtctgactttgagatgcattatatttttaacacataaatgaggggatccatatcacattctttcttgtggaccaccaaattgaaggctttcttgtaattcacaagcagcagctctccagcatctctccgtagcctgggtgaagtcccagaagctggtgtgcatcattttccaaggtggcagagctgcttgctctgcagatcattcctttgagagaggagtacaagtgaagaaacaaggaggcacttcctgtaggagcactgatgtgccttgtccacactcccctctgagctttactggtaagagagctccgactgaacatgctgagcagttgagcacttttccatcagcaacaacagcgaggatggaaatggaaaggaaccgaactaaaatgcatttccctttgcagggcagagagctaagctcttaggaatagtgttatagaaataagcaccctaacttcaattcctgaaaatgttggttaatggagagaattttggagtttcacttaatattttcccatcggtcgccataaataagtcttcaggcgctcctagaagagtcccagcccaaggctcgattaaggaccacactgcaggtctgaggctcactgctctgagtcctgaacaccagagccctgcagagagtggtgataacacatcatctctgcaaagaggaacctctcccccggccgccacttcactcaggcttctactgagcagcaaggacagcctgggtttcaaatgccacttcccctgctttagggatccaggtgtcctgatagcgtgaccctgctgaggcaaggtatcaactccgagagtgactgagtcactgagcgtggcacatgaacaaacgtcatgacaaagattctctgagtgaagttaacaccacgtattttacctttgcaaaaaacaaactggcaccctgagttctaactacggacggacgatatctttgcctccacacccagattcctggaaatggctaacgtttcctttctaggggaagggtcgaggaatactcaagtgctagcttagcagctttgttcagtccagatcagagctgttaggtaaaggcctaaccacctccctgcagtctcttatatctcaagctttaggaacccatttctaaatgtacactagcggagaatttatattgtcagccttgattaccataggacaggcagaaaggcgataatttgtatcttttaatataaaagaagcttttaacttttccagcctattataataactgagttatattcactgtggctcaaactaattggcattgtggaacatttctttaccttcaaagttttctccaccaatcatttcagttctattgcagtcctggtgccatatgtcccctgcaaattgtgaaagtaattagtgacaaaatagcagcctgctccttttcaatggcgaaactgtcggcattagcagttttgggtaagctggcggtactataacacgtactggaaacctgttcctcatcaccacctaccagattctggaaatgccgtcttctagaaaacgatggcgtttgtggtggtcttcttttgaaaggaacagtaatttgtgtggatattgttaaagtgtttaaagaatattttgacaattaagtttacattttacaattgctttattttttattaaaatagttgtatataaatattaccctatttcactgttgttcaagtaaatctaaaccttgtagacaagtgagtcatctgatatgtatagaagctgtgatatatagagtacatttattgtgtaaatgtttatgaatataattgttcctgtgtttttataagttggggatattttgttgttttacggcaacaaaatttattgcatttaaatggtttttatgtaatagaaatcacgcaaaatagtgaaggatttaaaatatgtatatgatacatgtaaatgtacaaactttagaaagaaataaatccaacaaatttcaatca

SEQ ID NO: 185797 - DNA, 3144 bp, Artificial Sequence
  derived and/or modified sequence
atggaaggtcgatctgccgctgccgagaccttcgtgtgggtcaataacgcaagcgctcactctcagtccgttgcaaaagcaaagtatgagttcttgtttgggagatcggagggcaaggcccctgacacttcagatcatggtggcagcactctactcccccctaatgttaccaatgagtttccagaatatggtactatggaagagggaggggaaggcctgagagcctccctcgagtttgacggagaagcccttccttgccaccctcaagaacagcagggggtacagcccctgactggctgccactccgggctggactctgtgaccgagggacccaaggatgtgcgggaggccccttctcagagccacctgaaggaacaaagtttacagcctatcgacagcctgatcagtgccctaaaggctacggaggctaggataatttcaggcactctacaggcaacaaaagttctggaccaagatgccgtgagtagtttcagcgtccagcaagtcgagaaggaactcgacacggcatccaggaagactcagcgcgtaaacaagacgcttccagccggacagaagaacctgccagaaatacccttgtcagccgaagtgacaactgaagaatcattctacctcagcatccaaaaggacctgacggccctgctaacgggggacacccaggcagagatcagtcagatcatgaacaacggaagaaagggagcagtgtgcgtccaggaacccagctgtcctctggcaagcctgggctccagcgcggtgacctgtcattcggctggttcagtgggattccttaaggagcagagaagcgcattgggaagagaacacccagggggatgtgaccgaagtagctctatgggcaggcccggtagagtgaagcacgtagagtttcaaggggtggaaattctgtggactggaggggacaaacgggagactcagcacccaatcgatttcgaaaccagcctccaaaggacagcaagccccgacagcaaagaatcaagtaaggttcccaggcatctcatatcttcagccggactatgcaattccagttctttgactgaaaacgtgtgggatgagtcgtggaaggcccctagtgaaaggccgggaacatcaagtggaacgttctctcctgtgcggcttgacgagagtggcgaagatgaggtgtttctccaggaaaataaacagcatctcgagaaaacccctaagccggaacgagatagagaacgaatttcagaacaggaagagcacgtgaagggcgaagacgaggatatcctggggccaggatatacagaagattctaccgacgtgtattcttcccagttcgagacaatcctggataatacgtcactgtattactctgccgaaagcctggagacgctgtactcggaaccagacagttacttctcgttcgagatgccactcactccaatgatccagcagaggattaaggaaggtggccagttcctggaacggaccagcgggggtggccaccaagacatcctctccgttagcgcagacgggggtatagtaatgggctactcaagcggggtgactaacggcttgaacgatgcctctgacagcatctatacgaaaggcacccccgaaatcgccttttgggggtctaacgctggtgtcaaaacaacgcgactcgaggcgcattctgaaatgggctctactgaaatattagagaaagaaacacccgaaaacttgtctaatggtacctcatctaacgtggaggccgctaaaaggctagcaaaaaggttgtaccagctagaccgtttcaagcgttctgacgtggctaagcatctggggaaaaataacgagttctccaaacttgtggcagaggagtatttgaagtttttcgacttcacaggcatgactctggaccagagcctccgatatttctttaaggccttctccttagtaggagagacacaagagagagagcgcgtgctcatccatttttcaaacagatacttctattgtaatccggacaccattgcctcccaggatggagtgcattgcctgacatgcgcaatcatgttgctgaacactgacctccatgggcataatatcggtaaaaaaatgacctgccaggagttcatagccaacctgcagggtgttaacgaaggcgtggacttttccaaggacttgctcaaggccctctataacagcattaagaacgaaaagttagagtgggccgtggacgacgaggaaaagaaaaagtcaccgagcgagagtacggaagagaaagccaacgggacccatcccaagacaatctctcggatcggaagtacaactaacccattcctggatatcccacacgacccaaacgcagctgtatataaatcagggtttctggcccgaaagattcacgccgatatggacggaaagaagactccacggggtaagcggggatggaagaccttttacgctgtcttgaaggggacggtcctgtacctgcagaaggacgaatacaagcctgagaaggccctgtcagaggaagacctgaaaaatgcggtctcagtgcatcacgccctagctagcaaggcaacagactacgagaagaaacctaatgtgtttaagttgaaaaccgccgattggcgagtgctcttgttccagactcaaagccctgaggagatgcagggatggattaacaaaattaactgcgtggctgccgtcttcagcgctccaccattccctgctgctatcggctctcagaaaaaattcagccggccattgctgcccgctaccaccaccaagctgagtcaggaagaacagctcaagagtcacgagagtaaactgaaacagattaccaccgaactggctgagcatcggtcctatccccctgataaaaaagtgaaggcgaaggacgtcgacgaatacaaactcaaggaccactacctggaattcgagaaaactcggtatgagatgtacgtgtctattctcaaggaagggggaaaggagttactgtcaaatgacgagtctgaagcggctggcttgaagaagtctcactcttcccctagcttgaatcccgatacatcaccgatcacggccaaagtcaagcggaatgtgagcgaaagaaaggatcatagacctgagactccttccattaaacagaaggtgacttag

SEQ ID NO: 185798 - DNA, 3150 bp, Artificial Sequence
  derived and/or modified sequence
atggaagggcgatccgccgcagccgagactttcgtgtgggtcaacaacgctagtgcccatagccagagtgtggctaaggccaaatatgagtttctgtttggtcgaagcgagggtaaagcgccagatacttcagaccacggcggttctacccttttgccccctaatgtgacaaatgaatttcccgagtacggaaccatggaagaaggtggcgaggggctcagggcaagtcttgagttcgacggcgaggcgctaccttgccacccccaagagcagcagggagtgcagccactcactggttgtcattccggcttggatagtgtgacggaggggccaaaggacgtgagagaggctcctagtcagtcccatctgaaggagcaaagcttgcagcccatagacagccttatcagtgccttgaaagctacggaggcaagaatcatctctgggacgcttcaggccaccaaagttctcgaccaagatgcggtgagctcattctccgtgcagcaagtagagaaagagctggataccgcatctcgtaagacgcagcgggtgaataagacccttccagccggtcagaaaaatctcccggaaattccgttgtccgcagaggtaaccaccgaggaatcattctatttatccatccaaaaggacctcacagctctgcttaccggcgatacccaggctgagatctcgcagataatgaacaatggacgcaagggcgctgtgtgtgtccaggagccaagctgcccccttgcctccttgggctcatcggccgttacgtgtcacagcgcaggctctgtcggatttctgaaggagcagcggtctgcacttgggagagagcatccaggaggatgcgaccggtcgtcatccatgggcaggcccggtagggtgaagcacgttgaattccagggggtggaaattctctggactggcggtgataaacgtgagactcagcaccctatcgacttcgagaccagcctacaacggaccgcgagtcctgattctaaagaatcctccaaagtgccaagacacctcatttcttctgcgggtctctgtaactccagcagcctgactgaaaacgtttgggacgaatcatggaaagcaccctccgagaggccaggaacctcaagcgggacattctcccccgttcggttagatgagagcggagaagacgaagtatttttacaagaaaacaagcaacacctggagaagacccctaagccagagcgcgaccgcgagcggatctcagagcaagaagagcatgtcaaaggagaagatgaggacattctcggccctggctatacagaggatagtacagatgtttattcttcacaattcgagacaattctggacaatacaagtttatattactctgcagaaagccttgaaactctttattctgagcccgattcttacttttccttcgagatgcctcttacccctatgatccagcagagaattaaggaggggggacagttcctggaacggacttccgggggagggcatcaggatattttgagcgtgtctgctgacggcggaatcgtgatgggctactccagtggcgtgaccaacgggctgaacgatgcttctgattcaatttatacgaaaggtacacctgaaatcgctttctggggctctaacgccggtgtgaagaccacacgactggaggcccactccgaaatgggatctacagagatcttggagaaggagacacccgaaaatctctcaaatggaactagttcaaatgtggaagctgcaaaacgactggccaagcggttataccaactggatcgctttaagagatcagatgttgctaagcatctgggcaaaaacaatgaattttcaaagctagtagcagaggagtatttgaaattcttcgatttcactggcatgaccctcgaccaatctctcaggtatttcttcaaagcatttagcctggtgggagaaacccaggagagagagagagtgctgatccattttagcaacaggtacttctactgtaaccctgacacaatcgcctcacaggatggcgtccactgccttacttgtgcaatcatgctgttgaacacggacctgcacggtcatgtttcaaatatcgggaagaagatgacctgccaggagttcatcgctaatttgcagggggtaaacgagggcgtagatttctcaaaggacctccttaaggccctatacaatagtattaaaaacgagaaactggagtgggccgtggatgacgaagagaaaaagaagtctccatccgagtccacagaagagaaagcaaacggtacccatcctaaaactatcagcaggatcggttctactactaacccattcctagacataccacatgaccctaatgccgcagtgtacaaatctggctttcttgcacggaagattcacgctgatatggatggcaagaaaaccccacgagggaaacggggttggaagactttttatgccgtcctgaaaggcacggttctctacctacagaaggatgaatataagcccgaaaaggcattgtctgaagaagacctgaagaacgcggtgagcgttcaccacgccctggcttctaaggcaacagattatgaaaaaaaaccaaacgtctttaagctcaagacagccgattggcgagttctgctcttccagactcagtcccccgaggaaatgcagggatggatcaacaaaattaattgtgttgccgcagtcttctcagctccccctttcccggcagctatcggctcgcaaaagaaattctcccggcctctgctgccagccaccacaactaaattgtcccaggaggagcaactgaagtctcatgagagcaagctgaaacagattacaactgagctggccgagcaccgttcctaccctcctgacaagaaagttaaggcaaaggatgtggacgaatacaagctgaaagatcactacctggagttcgaaaaaaccagatatgagatgtacgtcagcatcttgaaagaaggtgggaaagaactgctctcaaacgatgagagtgaggctgccggactcaagaagtcacactccagtcccagcttgaatccagatacatctcctatcaccgccaaagtgaagcgcaatgttagcgaacggaaagaccatagaccagagacaccatccattaaacagaaggttacttag

SEQ ID NO: 185799 - DNA, 3144 bp, Artificial Sequence
  derived and/or modified sequence
atggagggcagaagcgccgccgccgagaccttcgtgtgggtgaacaacgccagcgcccacagccagagcgtggccaaggccaagtacgagttcctgttcggcagaagcgagggcaaggcccccgacaccagcgaccacggcggcagcaccctgctgccccccaacgtgaccaacgagttccccgagtacggcaccatggaggagggcggcgagggcctgagagccagcctggagttcgacggcgaggccctgccctgccacccccaggagcagcagggcgtgcagcccctgaccggctgccacagcggcctggacagcgtgaccgagggccccaaggacgtgagagaggcccccagccagagccacctgaaggagcagagcctgcagcccatcgacagcctgatcagcgccctgaaggccaccgaggccagaatcatcagcggcaccctgcaggccaccaaggtgctggaccaggacgccgtgagcagcttcagcgtgcagcaggtggagaaggagctggacaccgccagcagaaagacccagagagtgaacaagaccctgcccgccggccagaagaacctgcccgagatccccctgagcgccgaggtgaccaccgaggagagcttctacctgagcatccagaaggacctgaccgccctgctgaccggcgacacccaggccgagatcagccagatcatgaacaacggcagaaagggcgccgtgtgcgtgcaggagcccagctgccccctggccagcctgggcagcagcgccgtgacctgccacagcgccggcagcgtgggcttcctgaaggagcagagaagcgccctgggcagagagcaccccggcggctgcgacagaagcagcagcatgggcagacccggcagagtgaagcacgtggagttccagggcgtggagatcctgtggaccggcggcgacaagagagagacccagcaccccatcgacttcgagaccagcctgcagagaaccgccagccccgacagcaaggagagcagcaaggtgcccagacacctgatcagcagcgccggcctgtgcaacagcagcagcctgaccgagaacgtgtgggacgagagctggaaggcccccagcgagagacccggcaccagcagcggcaccttcagccccgtgagactggacgagagcggcgaggacgaggtgttcctgcaggagaacaagcagcacctggagaagacccccaagcccgagagagacagagagagaatcagcgagcaggaggagcacgtgaagggcgaggacgaggacatcctgggccccggctacaccgaggacagcaccgacgtgtacagcagccagttcgagaccatcctggacaacaccagcctgtactacagcgccgagagcctggagaccctgtacagcgagcccgacagctacttcagcttcgagatgcccctgacccccatgatccagcagagaatcaaggagggcggccagttcctggagagaaccagcggcggcggccaccaggacatcctgagcgtgagcgccgacggcggcatcgtgatgggctacagcagcggcgtgaccaacggcctgaacgacgccagcgacagcatctacaccaagggcacccccgagatcgccttctggggcagcaacgccggcgtgaagaccaccagactggaggcccacagcgagatgggcagcaccgagatcctggagaaggagacccccgagaacctgagcaacggcaccagcagcaacgtggaggccgccaagagactggccaagagactgtaccagctggacagattcaagagaagcgacgtggccaagcacctgggcaagaacaacgagttcagcaagctggtggccgaggagtacctgaagttcttcgacttcaccggcatgaccctggaccagagcctgagatacttcttcaaggccttcagcctggtgggcgagacccaggagagagagagagtgctgatccacttcagcaacagatacttctactgcaaccccgacaccatcgccagccaggacggcgtgcactgcctgacctgcgccatcatgctgctgaacaccgacctgcacggccacaacatcggcaagaagatgacctgccaggagttcatcgccaacctgcagggcgtgaacgagggcgtggacttcagcaaggacctgctgaaggccctgtacaacagcatcaagaacgagaagctggagtgggccgtggacgacgaggagaagaagaagagccccagcgagagcaccgaggagaaggccaacggcacccaccccaagaccatcagcagaatcggcagcaccaccaaccccttcctggacatcccccacgaccccaacgccgccgtgtacaagagcggcttcctggccagaaagatccacgccgacatggacggcaagaagacccccagaggcaagagaggctggaagaccttctacgccgtgctgaagggcaccgtgctgtacctgcagaaggacgagtacaagcccgagaaggccctgagcgaggaggacctgaagaacgccgtgagcgtgcaccacgccctggccagcaaggccaccgactacgagaagaagcccaacgtgttcaagctgaagaccgccgactggagagtgctgctgttccagacccagagccccgaggagatgcagggctggatcaacaagatcaactgcgtggccgccgtgttcagcgccccccccttccccgccgccatcggcagccagaagaagttcagcagacccctgctgcccgccaccaccaccaagctgagccaggaggagcagctgaagagccacgagagcaagctgaagcagatcaccaccgagctggccgagcacagaagctacccccccgacaagaaggtgaaggccaaggacgtggacgagtacaagctgaaggaccactacctggagttcgagaagaccagatacgagatgtacgtgagcatcctgaaggagggcggcaaggagctgctgagcaacgacgagagcgaggccgccggcctgaagaagagccacagcagccccagcctgaaccccgacaccagccccatcaccgccaaggtgaagagaaacgtgagcgagagaaaggaccacagacccgagacccccagcatcaagcagaaggtgacctag

SEQ ID NO: 185800 - DNA, 3150 bp, Artificial Sequence
  derived and/or modified sequence
atggagggcagaagcgccgccgccgagaccttcgtgtgggtgaacaacgccagcgcccacagccagagcgtggccaaggccaagtacgagttcctgttcggcagaagcgagggcaaggcccccgacaccagcgaccacggcggcagcaccctgctgccccccaacgtgaccaacgagttccccgagtacggcaccatggaggagggcggcgagggcctgagagccagcctggagttcgacggcgaggccctgccctgccacccccaggagcagcagggcgtgcagcccctgaccggctgccacagcggcctggacagcgtgaccgagggccccaaggacgtgagagaggcccccagccagagccacctgaaggagcagagcctgcagcccatcgacagcctgatcagcgccctgaaggccaccgaggccagaatcatcagcggcaccctgcaggccaccaaggtgctggaccaggacgccgtgagcagcttcagcgtgcagcaggtggagaaggagctggacaccgccagcagaaagacccagagagtgaacaagaccctgcccgccggccagaagaacctgcccgagatccccctgagcgccgaggtgaccaccgaggagagcttctacctgagcatccagaaggacctgaccgccctgctgaccggcgacacccaggccgagatcagccagatcatgaacaacggcagaaagggcgccgtgtgcgtgcaggagcccagctgccccctggccagcctgggcagcagcgccgtgacctgccacagcgccggcagcgtgggcttcctgaaggagcagagaagcgccctgggcagagagcaccccggcggctgcgacagaagcagcagcatgggcagacccggcagagtgaagcacgtggagttccagggcgtggagatcctgtggaccggcggcgacaagagagagacccagcaccccatcgacttcgagaccagcctgcagagaaccgccagccccgacagcaaggagagcagcaaggtgcccagacacctgatcagcagcgccggcctgtgcaacagcagcagcctgaccgagaacgtgtgggacgagagctggaaggcccccagcgagagacccggcaccagcagcggcaccttcagccccgtgagactggacgagagcggcgaggacgaggtgttcctgcaggagaacaagcagcacctggagaagacccccaagcccgagagagacagagagagaatcagcgagcaggaggagcacgtgaagggcgaggacgaggacatcctgggccccggctacaccgaggacagcaccgacgtgtacagcagccagttcgagaccatcctggacaacaccagcctgtactacagcgccgagagcctggagaccctgtacagcgagcccgacagctacttcagcttcgagatgcccctgacccccatgatccagcagagaatcaaggagggcggccagttcctggagagaaccagcggcggcggccaccaggacatcctgagcgtgagcgccgacggcggcatcgtgatgggctacagcagcggcgtgaccaacggcctgaacgacgccagcgacagcatctacaccaagggcacccccgagatcgccttctggggcagcaacgccggcgtgaagaccaccagactggaggcccacagcgagatgggcagcaccgagatcctggagaaggagacccccgagaacctgagcaacggcaccagcagcaacgtggaggccgccaagagactggccaagagactgtaccagctggacagattcaagagaagcgacgtggccaagcacctgggcaagaacaacgagttcagcaagctggtggccgaggagtacctgaagttcttcgacttcaccggcatgaccctggaccagagcctgagatacttcttcaaggccttcagcctggtgggcgagacccaggagagagagagagtgctgatccacttcagcaacagatacttctactgcaaccccgacaccatcgccagccaggacggcgtgcactgcctgacctgcgccatcatgctgctgaacaccgacctgcacggccacgtgagcaacatcggcaagaagatgacctgccaggagttcatcgccaacctgcagggcgtgaacgagggcgtggacttcagcaaggacctgctgaaggccctgtacaacagcatcaagaacgagaagctggagtgggccgtggacgacgaggagaagaagaagagccccagcgagagcaccgaggagaaggccaacggcacccaccccaagaccatcagcagaatcggcagcaccaccaaccccttcctggacatcccccacgaccccaacgccgccgtgtacaagagcggcttcctggccagaaagatccacgccgacatggacggcaagaagacccccagaggcaagagaggctggaagaccttctacgccgtgctgaagggcaccgtgctgtacctgcagaaggacgagtacaagcccgagaaggccctgagcgaggaggacctgaagaacgccgtgagcgtgcaccacgccctggccagcaaggccaccgactacgagaagaagcccaacgtgttcaagctgaagaccgccgactggagagtgctgctgttccagacccagagccccgaggagatgcagggctggatcaacaagatcaactgcgtggccgccgtgttcagcgccccccccttccccgccgccatcggcagccagaagaagttcagcagacccctgctgcccgccaccaccaccaagctgagccaggaggagcagctgaagagccacgagagcaagctgaagcagatcaccaccgagctggccgagcacagaagctacccccccgacaagaaggtgaaggccaaggacgtggacgagtacaagctgaaggaccactacctggagttcgagaagaccagatacgagatgtacgtgagcatcctgaaggagggcggcaaggagctgctgagcaacgacgagagcgaggccgccggcctgaagaagagccacagcagccccagcctgaaccccgacaccagccccatcaccgccaaggtgaagagaaacgtgagcgagagaaaggaccacagacccgagacccccagcatcaagcagaaggtgacctag

SEQ ID NO: 185801 - protein, 1896 aa, Artificial Sequence
  derived and/or modified sequence
MKASSGDQGSPPCFLRFPRPVRVVSGAEAELKCVVLGEPPPVVVWEKGGQQLAASERLSFPADGAEHGLLLTAALPTDAGVYVCRARNAAGEAYAAAAVTVLEPPASDPELQPAERPLPSPGSGEGAPVFLTGPRSQWVLRGAEVVLTCRAGGLPEPTLYWEKDGMALDEVWDSSHFALQPGRAEDGPGASLALRILAARLPDSGVYVCHARNAHGHAQAGALLQVHQPPESPPADPDEAPAPVVEPLKCAPKTFWVNEGKHAKFRCYVMGKPEPEIEWHWEGRPLLPDRRRLMYRDRDGGFVLKVLYCQAKDRGLYVCAARNSAGQTLSAVQLHVKEPRLRFTRPLQDVEGREHGIAVLECKVPNSRIPTAWFREDQRLLPCRKYEQIEEGTVRRLIIHRLKADDDGIYLCEMRGRVRTVANVTVKGPILKRLPRKLDVLEGENAVLLVETLEAGVEGRWSRDGEELPVICQSSSGHMHALVLPGVTREDAGEVTFSLGNSRTTTLLRVKCVKHSPPGPPILAEMFKGHKNTVLLTWKPPEPAPETPFIYRLERQEVGSEDWIQCFSIEKAGAVEVPGDCVPSEGDYRFRICTVSGHGRSPHVVFHGSAHLVPTARLVAGLEDVQVYDGEDAVFSLDLSTIIQGTWFLNGEELKSNEPEGQVEPGALRYRIEQKGLQHRLILHAVKHQDSGALVGFSCPGVQDSAALTIQESPVHILSPQDRVSLTFTTSERVVLTCELSRVDFPATWYKDGQKVEESELLVVKMDGRKHRLILPEAKVQDSGEFECRTEGVSAFFGVTVQDPPVHIVDPREHVFVHAITSECVMLACEVDREDAPVRWYKDGQEVEESDFVVLENEGPHRRLVLPATQPSDGGEFQCVAGDECAYFTVTITDVSSWIVYPSGKVYVAAVRLERVVLTCELCRPWAEVRWTKDGEEVVESPALLLQKEDTVRRLVLPAVQLEDSGEYLCEIDDESASFTVTVTEPPVRIIYPRDEVTLIAVTLECVVLMCELSREDAPVRWYKDGLEVEESEALVLERDGPRCRLVLPAAQPEDGGEFVCDAGDDSAFFTVTVTAPPERIVHPAARSLDLHFGAPGRVELRCEVAPAGSQVRWYKDGLEVEASDALQLGAEGPTRTLTLPHAQPEDAGEYVCETRHEAITFNVILAEPPVQFLALETTPSPLCVAPGEPVVLSCELSRAGAPVVWSHNGRPVQEGEGLELHAEGPRRVLCIQAAGPAHAGLYTCQSGAAPGAPSLSFTVQVAEPPVRVVAPEAAQTRVRSTPGGDLELVVHLSGPGGPVRWYKDGERLASQGRVQLEQAGARQVLRVQGARSGDAGEYLCDAPQDSRIFLVSVEEPLLVKLVSELTPLTVHEGDDATFRCEVSPPDADVTWLRNGAVVTPGPQVEMAQNGSSRILTLRGCQLGDAGTVTLRAGSTATSARLHVRETELLFLRRLQDVRAEEGQDVCLEVETGRVGAAGAVRWVRGGQPLPHDSRLSMAQDGHIHRLFIHGVILADQGTYGCESHHDRTLARLSVRPRQLRVLRPLEDVTISEGGSATFQLELSQEGVTGEWARGGVQLYPGPKCHIHSDGHRHRLVLNGLGLADSGCVSFTADSLRCAARLIVREVPVTIVRGPHDLEVTEGDTATFECELSQALADVTWEKDGNALTPSPRLRLQALGTRRLLQLRRCGPSDAGTYSCAVGTARAGPVRLTVRERTVAVLSELRSVSAREGDGATFECTVSEVETTGRWELGGRPLRPGARVRIRQEGKKHILVLSELRAEDAGEVRFQAGPAQSLALLEVEALPLQMCRHPPREKTVLVGRRAVLEVTVSRSGGHVCWLREGAELCPGDKYEMRSHGPTHSLVIHDVRPEDQGTYCCQAGQDSTHTRLLVEGN

SEQ ID NO: 185802 - DNA, 5691 bp, Artificial Sequence
  derived and/or modified sequence
atgaaagccagctcgggtgatcaaggttctcctccctgttttctgcgattcccacggccggttcgggttgtttccggggccgaggctgagctaaagtgtgtggtgcttggcgagcccccccctgttgtcgtgtgggagaaagggggacagcaactcgctgcctctgagcgcctctccttcccggctgacggcgccgagcacggcctactgctgactgctgctctgcccacagatgctggagtatacgtgtgtcgcgcccggaatgccgccggtgaagcatacgcggctgccgcagtgaccgtcttagagccacccgctagtgatcccgagctgcagccagctgaaagacccttgccctcccctggatctggcgagggggccccggtttttttgaccgggccaaggagtcagtgggtgctgcggggcgcggaggtggttctaacgtgtcgggccggaggactcccagagccgaccctctattgggaaaaggacggtatggcactggacgaggtctgggactcttcgcacttcgccctgcagcccggaagggctgaagatgggcctggcgcgtccctggcgctcagaattttggccgcgaggctccccgatagtggtgtgtatgtgtgtcacgctcgaaacgctcacggccacgcacaggcaggtgccctcttacaggtacaccagcctccggaatctccacccgctgatcctgatgaggcacccgcccctgtcgtggaacctctaaaatgcgccccgaaaactttctgggtgaacgaaggtaagcacgctaaattccgctgttatgtgatgggcaaacccgaacctgagattgagtggcactgggaaggtaggccactgctccctgatcgacgaagattaatgtatagagacagggatggcggtttcgtcctaaaagtcctctattgtcaggccaaagatcgaggattgtacgtgtgtgccgctcgcaacagcgctggccagactctgtccgccgttcagctgcacgtgaaggagcctaggcttcgctttactcggcctctccaggacgtggaaggcagagagcacggcatcgccgtgctggagtgtaaggtgccaaattccagaattcctacggcatggttccgagaggaccagcggctccttccttgcaggaagtacgagcagatagaggaggggactgtcaggcgcctgataatccacagactaaaggctgacgacgatgggatttacctttgtgaaatgagaggtcgcgtcagaaccgtggcaaacgtgactgtcaaaggccctattctgaaaagactacctcgcaagcttgacgtgttagagggagaaaacgccgtgctgttagttgagaccttagaggcgggtgttgagggcaggtggtcaagagatggcgaagagcttcccgtgatctgtcagtcctcctccggccatatgcacgcccttgttctacctggagtcacaagagaggacgccggcgaggtgactttttccttgggaaattctcgcacaaccacccttctgagagtcaaatgcgttaagcattcccctcctgggcccccaattctcgccgagatgttcaaagggcacaaaaatactgtgctgttaacctggaagccgcctgaaccagcccctgagactccctttatttatcgcttggaacgacaggaagtagggtcggaagattggatccagtgcttctcaatcgagaaggccggcgcagttgaggtgcccggcgactgtgttccttccgaaggggactatcggtttcggatatgtactgtgtcaggccacggacgttcaccacacgtggtgtttcacgggtcagcccatcttgtgcctactgccagactcgtggcaggattggaggacgtacaagtttacgacggcgaggacgctgttttttctctggatttgagcaccatcatccagggcacatggtttctgaacggtgaggagctgaagagcaacgagccagagggacaggtcgagccaggcgctctgcggtaccggatcgagcagaagggtctacagcaccgcctgatcttgcacgcagtcaaacatcaggactctggcgcgttagtcggattttcgtgtcccggagtgcaggattccgcagccctgactattcaggagtcaccagtccatatcctgtctccgcaggacagggtttccctcacttttactacatcagaaagagttgtattgacctgcgaattgagtcgcgtggatttccctgccacttggtataaggacggccagaaagtcgaggaatctgaacttctggttgtcaagatggatgggaggaaacataggttgattctgcccgaagcaaaggtccaagattctggcgaatttgaatgccgcactgagggagtgagtgcatttttcggggtcaccgtccaggatccacctgtgcatatcgtcgacccccgggagcacgtttttgttcatgcaattacaagcgagtgtgtaatgttagcctgcgaagtagaccgcgaggatgcccccgtcagatggtataaagacggacaagaagtcgaggaatccgattttgttgtactggaaaatgagggcccacaccgccgtcttgtgctgcctgctactcagccatccgacgggggggagtttcagtgcgtggcgggtgacgagtgcgcttatttcaccgttacgattaccgatgtgagttcttggatcgtctatccctccgggaaagtgtacgtagcagccgttagactggagcgggtggtccttacctgtgaactttgtagaccatgggctgaagtgcggtggactaaggatggggaggaggtggtcgagtcacctgccctccttctccagaaggaggataccgtgagacggctcgttttgcccgccgttcagctagaggatagcggtgagtacctctgtgaaatcgatgacgagtccgcctccttcactgtcactgtgactgaacctccggtaagaatcatctaccctcgcgatgaggtgactctgattgctgtcacattggagtgcgttgtgttgatgtgtgagctgtccagagaagacgcgcccgtacggtggtacaaagacggcctagaagtcgaggaatcagaagccttggtgctggaacgagacggccccagatgccggctggttctgccagcggctcagccagaggatggaggcgagttcgtctgcgatgccggtgatgatagcgctttttttactgttacggttacggccccaccagaacgaattgtgcatcccgccgcacgctccctggacctgcacttcggggcccctggacgggtggaattgcgatgcgaagtggctccagccggctctcaagtaagatggtacaaagatggcttagaagtggaggccagcgatgccttgcagctgggcgccgaaggccccacgagaacgttgacgctgccacatgcccaacctgaggatgctggagagtacgtatgtgagacaaggcatgaggccatcacctttaacgtcatcctagccgaacccccagtgcaattcttggcactcgagactactccctcccctctctgtgtagcacccggcgagcccgtggttctcagttgtgagctgtcacgggctggggctcctgtcgtgtggtctcacaacgggcgcccggtgcaggagggtgaaggtctcgaattgcacgcagagggcccaaggagagtcctgtgtatccaagctgctggcccagcgcatgctggtctgtatacttgtcagtccggtgcagcccctggcgccccatctctatccttcacagtgcaggtggcggaacctcctgtcagagtagtggcccccgaagcagcgcagactcgggtgcgcagtacgccgggaggggatttggaactggtggtgcacttgagcgggcccggcggaccagttcgctggtacaaggacggcgaacgcctcgccagtcaagggcgtgtgcagctagagcaggcaggtgcccgacaagtcctgagagttcagggcgctcggtccggggacgccggggaatacttgtgtgatgctccccaggattcaaggatattccttgtaagcgttgaagagcccctgcttgtcaagctcgtttccgagctgacaccactcaccgtacatgagggggacgatgcaactttccggtgtgaggtgagcccccctgatgcagacgttacatggctgaggaatggtgcggtggtgacacctggtccccaagttgagatggctcagaatggttctagccgaatattgaccctgcggggctgccaactgggcgatgcaggcacagtgacgcttcgagctggatctacagcaacttccgctagattgcatgtgcgtgaaaccgaactgctgttcctacgcaggctccaagatgttcgggccgaagaggggcaagacgtgtgcctcgaggtcgaaactggaagggtgggcgctgcaggtgccgttaggtgggtgagaggtggacagcctctgccccatgacagtagactaagcatggctcaggacggccatatacaccgcctctttattcacggagtgatcctggccgaccagggcacttacggctgcgaaagccatcatgatcgcactctggcgcgcctgagcgtgcgccctagacagctcagagtcctgcgtccactcgaagacgtgaccatctcagaaggtggtagtgctacctttcaactggagttaagtcaggagggcgtcaccggggagtgggccagaggcggcgttcagctttacccagggcctaagtgtcacatccatagtgacggccaccgccatcgtctggtgctaaacggactaggactggctgactctggatgtgtatcgttcaccgctgacagccttcggtgcgccgctcgcctgatagtgcgtgaagtccccgtcactatcgtccgaggacctcacgacctggaagtgaccgagggggacaccgcaacatttgaatgcgagctgtcccaggccctggcggatgtcacctgggaaaaagatggtaatgccctgacaccatcaccccgtctgcgactgcaagcacttggtactaggcggttgttgcaattgagacggtgtgggccttcagacgcaggcacttattcatgtgccgttgggaccgctcgggccggccctgtgaggttaacagtgcgagaacgaaccgtcgcggtgctcagcgagcttagatccgtctccgcgcgggaaggagatggtgctacattcgaatgtactgtgagtgaagtggagactacagggcggtgggagcttggcggcagaccactgcgtccaggtgccagggtaagaatccggcaggaagggaagaagcacatattagtgctgtccgagctccgagctgaggacgctggggaagtgcggttccaggccggaccagcacaatcactggcacttctggaagttgaggcgcttcccctgcagatgtgtcgccaccctcctcgggagaagacagtcctggttggtcgacgggccgtgttggaggtcacagtctcacgatctggcggacatgtgtgctggctgcgtgaaggcgccgaattgtgcccaggagacaagtatgagatgcgatcccatggtcctactcactcgctggtcattcatgacgtgagacctgaggaccaggggacctactgctgccaagcgggacaagactcaacacatactcgactgctggtagagggcaattag

SEQ ID NO: 185803 - DNA, 5691 bp, Artificial Sequence
  derived and/or modified sequence
atgaaggccagcagcggggaccagggcagccccccctgcttcctgcgcttccccaggcctgtgcgggtggtgtctggagctgaggccgagctgaagtgtgtggtgctgggggagcccccacctgtggtggtgtgggagaagggcggccagcagctggccgccagcgagcggctgtccttcccagcagatggagctgagcacggcctgctgctgacagctgccctgcccacagatgctggggtgtatgtgtgccgggccagaaatgctgctggggaggcctatgctgctgctgctgtgacagtgctggagcccccagccagtgaccctgagctgcagcctgctgagcggcccctgcccagccctggcagcggggagggcgcccctgtgttcctgaccggccccaggagccagtgggtgctgcggggagctgaggtggtgctgacctgcagagctgggggcctgcctgagcccaccctgtactgggagaaggatggcatggccctggatgaggtgtgggacagcagccactttgccctgcagcccggccgggcagaagatggccctggggccagcctggccctgcgcatcctggccgcccggctgcctgacagcggcgtgtatgtgtgccacgccagaaatgcccacggccacgcccaggccggggccctgctgcaggtgcaccagcccccagagagccccccagctgaccctgatgaggccccagcccctgtggtggagcccctgaagtgtgcccccaagaccttctgggtgaatgaaggcaagcacgccaagttccgctgctacgtgatgggcaagccagagcctgagattgagtggcactgggagggccggcccctgctgcctgacagaagaaggctgatgtacagagacagagatggcggctttgtgctgaaggtgctgtactgccaggccaaggaccggggcctgtatgtgtgtgccgccaggaacagcgctggccagaccctgtctgctgtgcagctgcacgtgaaggagccccggctgcgcttcacccggcccctgcaggatgtggagggccgggagcacggcattgctgtgctggagtgcaaggtgcccaacagccgcatccccacagcctggttccgggaggaccagaggctgctgccctgcaggaaatatgagcagatcgaggagggcaccgtgagaagactcatcatccaccggctgaaggcagatgatgatggcatctacctgtgtgagatgaggggccgggtgaggacagtggccaacgtgacagtgaagggccccatcctgaagaggctgcccaggaagctggatgtgctggagggggagaatgctgtgctgctggtggagaccctggaggccggcgtggagggccgctggagcagagatggagaggagctgcctgtgatctgccagagcagcagcggccacatgcacgccctggtgctgcccggggtgacccgggaggatgctggggaggtgaccttcagcctgggcaacagcaggaccaccaccctgctgcgggtgaagtgtgtgaagcacagccccccaggcccccccatcctggccgagatgttcaagggccacaagaacacagtgctgctgacctggaagcccccagagcccgcccctgagacccccttcatctaccgcctggagcggcaggaggtgggcagcgaggactggatccagtgcttcagcattgagaaggccggggctgtggaggtgcctggggactgtgtgcccagcgagggggactaccgcttccgcatctgcaccgtgtctggccacggccgcagcccccacgtggtgttccacggcagcgcccacctggtgcccacagcccggctggtggccggcctggaggatgtgcaggtgtatgatggagaagatgctgtgttcagcctggacctgagcaccatcatccagggcacctggttcctgaatggagaggagctgaagagcaatgaacctgagggccaggtggagcccggggccctgcgctaccgcatcgagcagaagggcctgcagcacaggctcatcctgcatgctgtgaagcaccaggacagcggggccctggtgggcttcagctgccctggggtgcaggacagcgctgccctgaccatccaggagagccctgtgcacatcctgagcccccaggacagagtgtccctgaccttcaccaccagcgagcgggtggtgctgacctgtgagctgagccgggtggacttccctgccacctggtacaaggatggccagaaggtggaggagagcgagctgctggtggtgaagatggatggcaggaagcacaggctcatcctgcctgaggccaaggtgcaggacagcggggagtttgaatgtagaacagagggcgtgtctgccttctttggagtgacagtgcaggacccccctgtgcacatcgtggacccccgggagcacgtgtttgtgcacgccatcaccagtgaatgtgtgatgctggcctgtgaggtggaccgggaggatgcccctgtgcgctggtacaaggatggccaggaggtggaggagagtgactttgtggtgctggagaatgaaggcccccaccggcggctggtgctgcctgccacccagcccagtgatggaggagagttccagtgtgtggccggagatgaatgtgcctacttcaccgtgaccatcacagatgtgtcctcctggatcgtgtaccccagcggcaaggtgtatgtggccgctgtgcggctggagcgggtggtgctgacctgtgagctgtgccggccctgggccgaggtgcgctggaccaaggatggagaggaggtggtggagagccctgccctgctgctgcagaaggaggacacagtgcggcggctggtgctgcctgctgtgcagctggaggacagcggggagtacctgtgtgaaattgatgatgagagcgccagcttcaccgtgacagtgacagagccccctgtgcgcatcatctaccccagagatgaggtgaccctgattgctgtgaccctggagtgtgtggtgctgatgtgtgagctgagccgggaggatgcccctgtgcgctggtacaaggatggcctggaggtggaggagagcgaggccctggtgctggagagagatggcccccgctgccgcctggtgctgcctgctgcccagccagaagatggaggagaatttgtgtgtgatgctggagatgattctgccttcttcaccgtgacagtgacagcccctcctgagagaattgtgcaccctgctgcccggagcctggacctgcactttggagcccctggccgggtggagctgcgctgtgaggtggccccagctggcagccaggtgcgctggtacaaggatggcctggaggtggaggccagtgatgccctgcagctgggcgctgagggccccaccaggaccctgaccctgccccacgcccagccagaagatgctggggagtatgtgtgtgagaccaggcatgaggccatcaccttcaacgtcatcctggccgagccccctgtgcagttcctggccctggagaccacccccagccccctgtgtgtggcccctggagagcctgtggtgctgagctgtgagctgagccgggccggggcccctgtggtgtggagccacaacggccggcctgtgcaggagggggagggcctggagctgcatgctgagggccccaggagagtgctgtgcatccaggccgccggccctgcccacgccggcctgtacacctgccagagcggggccgcccctggggcccccagcctgtccttcaccgtgcaggtggccgagccccctgtgcgggtggtggcccctgaggccgcccagaccagggtgcgcagcaccccaggaggagacctggagctggtggtgcacctgagcggccctgggggccctgtgcgctggtacaaggatggagagcggctggccagccagggccgggtgcagctggagcaggccggggcccggcaggtgctgcgggtgcagggcgcccggtctggagatgctggggagtacctgtgtgatgccccccaggacagccgcatcttcctggtgtctgtggaggagcccctgctggtgaagctggtgtctgagctgacccccctgactgtgcatgaaggagatgatgccaccttccgctgtgaggtgtccccaccagatgctgatgtgacctggctgagaaatggagctgtggtgaccccaggcccccaggtggagatggcccagaatggcagcagccgcatcctgaccctgcggggctgccagctgggagatgctggcaccgtgaccctgcgggccggcagcacagccaccagcgcccggctgcacgtgcgggagacagagctgctcttcctgcggcggctgcaggatgtgcgggcagaggagggccaggatgtgtgcctggaggtggagaccggccgggtgggcgccgccggggctgtgcgctgggtgcggggcggccagcccctgccccatgacagccggctgtccatggcccaggacggccacatccacaggctcttcatccacggcgtcatcctggccgaccagggcacctacggctgtgagagccaccacgacaggaccctggcccggctgtctgtgcggccccggcagctgcgggtgctgcggcccctggaggatgtgaccatcagcgagggcggcagcgccaccttccagctggagctgagccaggagggcgtgactggagagtgggcccggggcggcgtgcagctgtacccaggccccaagtgccacatccacagtgatggccaccgccaccggctggtgctgaatggcctgggcctggccgacagcggctgtgtgtccttcaccgctgacagcctgcgctgtgccgcccggctgattgtgcgggaggtgcctgtgaccatcgtgcggggcccccatgacctggaggtgacagaaggagacacagccacctttgaatgtgagctgagccaggccctggctgatgtgacctgggagaaggatggaaatgccctgacccccagcccccggctgcggctgcaggccctgggcacccggcggctgctgcagctgcggcgctgtggccccagtgatgctggcacctacagctgtgctgtgggcacagcccgggccggccctgtgcggctgactgtgcgggagaggacagtggccgtgctgtctgagctgcggtctgtgtctgcccgggagggagatggagccacctttgaatgtactgtgtctgaggtggagaccaccggccgctgggagctgggcggccggcccctgcggcctggggcccgggtgcgcatccggcaggagggcaagaagcacatcctggtgctgtctgagctgcgggcagaagatgctggggaggtgcgcttccaggccggccctgcccagagcctggccctgctggaggtggaggccctgcccctgcagatgtgccgccaccccccccgggagaagacagtgctggtgggccggcgggctgtgctggaggtgacagtgagccgcagcggcggccacgtgtgctggctgcgggagggcgctgagctgtgccctggggacaagtatgagatgaggagccacggccccacccacagcctggtgattcatgatgtgcggcctgaggaccagggcacctactgctgccaggccggccaggacagcacccacacccggctgctggtggagggcaactag

SEQ ID NO: 185804 - DNA, 5691 bp, Artificial Sequence
  derived and/or modified sequence
atgaaggccagcagcggcgaccagggcagccccccctgcttcctgcgttttcccagaccagtgcgcgttgtgagcggagcggaggctgaactcaaatgtgtggtcctgggagagccacctcctgtggtcgtgtgggagaaaggcggccagcagctggctgcgagtgaacgactaagctttccagccgacggcgccgaacacggtctgctgttaactgccgcattgccaacggatgccggggtatacgtgtgccgggccagaaacgccgcaggcgaagcctacgcggctgctgctgtgaccgtgctggagccgccagccagcgatccagaactgcagccagctgaaaggcctttaccctctccaggaagtggcgagggggcaccagtctttctaacaggtcccagaagtcagtgggtgctgaggggtgccgaagttgtcttgacttgcagggctggtggtctccctgaacccacattatattgggagaaggatgggatggccctcgacgaagtctgggattcttcacacttcgctttgcagccaggccgggctgaggacgggcctggtgctagtctggctctcagaatcctcgctgccagactccccgattcaggggtgtatgtgtgtcatgccaggaacgctcatggtcatgcacaagctggagctctgctgcaggtgcaccaaccccccgagtctccccctgctgatccggatgaagcccccgcccctgtggtcgaaccccttaagtgtgcacccaagacattttgggtgaacgagggcaaacacgcaaagtttagatgctatgtcatgggtaagcccgaacccgaaatcgagtggcactgggaaggccgacctttgctgcccgaccgccgcaggcttatgtaccgcgatagggacggggggtttgttcttaaggtgctttattgtcaggcaaaagataggggactctatgtgtgcgccgcccgcaacagcgctggacagacccttagtgccgttcagctccatgtgaaagaaccaagactccggtttactcgccccctgcaggatgtggagggacgagaacatggtattgccgtcctggagtgtaaagtccctaactcccgcattccgacagcttggtttagggaagaccaaagactgttgccatgccgaaaatacgagcagattgaggaggggaccgttaggagactgattatccatcgactgaaggccgatgacgacggaatatacctttgcgagatgcggggcagagtgcgcaccgtagcaaatgtcacagttaaggggcccatcctgaagcgcttacctcgaaagcttgacgtgctggaaggtgagaatgccgtgctcctcgtggagacccttgaggccggcgttgagggtcgatggtcccgcgacggagaggaactacctgtgatttgccaatcaagctcaggccacatgcacgcacttgtgcttccaggcgtaaccagagaagacgccggggaagtgaccttttctttaggcaacagtcggaccacaactcttctgagggtcaaatgtgtcaagcacagcccaccaggcccccctatactggcagagatgttcaaaggccacaaaaacacagtcttgctgacctggaagccccccgagccagctccagagactcctttcatctaccgcctggagcgccaggaagtaggctccgaagattggattcagtgtttttctatcgaaaaagccggagccgttgaagtgcccggcgactgtgtgcctagcgagggagattacagatttcgtatttgcacggttagtggtcatggacgttccccccatgttgtatttcatgggtcagctcaccttgtgcctacggccagactggtcgctgggctggaggatgtgcaggtctatgacggcgaggacgcggtatttagcctggatctcagcaccattatccaggggacctggtttcttaatggtgaagagctgaagtctaatgaaccagaaggccaggtagaacccggcgccctgcgatatagaatcgagcagaagggcctgcagcaccgcttgattctgcatgctgtcaaacaccaggatagcggcgccctcgtgggtttttcctgcccaggcgtgcaggacagcgccgccctgaccattcaggaatctccagtccatatcttgtcgccccaggatcgtgtgtccctgactttcaccacgagtgaacgcgtggtgttgacctgcgaactatcaagagtagacttcccagcaacctggtacaaagacggacagaaggtggaagagtcagagttgctcgtcgtcaagatggacgggagaaagcatcggctgattttgccagaagcgaaagtacaggacagcggtgagttcgagtgccgaacagagggcgtctccgccttcttcggtgttaccgtacaggacccgcccgtgcatatcgtggacccaagggaacacgtgtttgtacacgccatcaccagcgagtgcgtaatgctcgcttgcgaagtggacagggaggatgcaccggtgcgatggtataaagacgggcaagaggtggaggaaagtgactttgttgttctggaaaatgagggaccccatcgccgtttggtattacccgctacgcaacccagtgacggcggcgagttccaatgcgtggctggagatgagtgcgcatacttcaccgtcactattacagacgtgagtagctggatagtgtatccttctgggaaagtgtacgtagccgcagtgcggctagaaagagtggttctgacgtgtgaattgtgccgcccatgggccgaggttaggtggaccaaagatggggaagaggtggttgagagtccggcactcctgctgcagaaggaggatacagttaggcgcctggtcctgcctgccgttcagctggaagatagcggagagtacctgtgtgagatcgatgatgaatccgcgtccttcaccgtcacagttacagaaccaccggtccgcatcatctatccgagagacgaagtgactctcatcgccgtgacacttgagtgcgttgtgctcatgtgtgagctgagtagggaggacgctcctgtaaggtggtacaaagatggcttagaggtagaggaaagtgaagccctggtgctcgagagggacgggccacgctgcaggcttgttctgccggctgcccagccggaggatggaggggagtttgtctgcgacgctggtgacgatagtgcattctttacagtcacagtgacagctcctccagaaagaatcgtgcatcccgccgcacgatccttggatctccatttcggggccccaggccgcgtggagttgcggtgcgaagtggcaccagccggctcacaggtgaggtggtacaaggatggcttggaagtggaggcaagcgacgccttgcagctgggtgccgagggccccacacgtaccctcaccctgcctcatgctcagcccgaggatgctggcgagtatgtgtgtgagactcggcatgaggccataaccttcaacgtcatcctggccgagccgcctgtgcaattcttggctttagagaccacaccttccccactgtgcgtcgctcccggcgagccagtggtgctctcttgcgaactcagcagagccggggctcccgttgtgtggtcacacaacggccggcctgtccaggaaggcgagggactggaactgcatgctgaaggacctagacgtgtgctgtgcatccaggctgctggtccagctcatgccggtctctacacatgtcaatctggggccgctcccggagccccttctttgagctttaccgtgcaggtggcagagcctccagttagggtggtggcccctgaggcggcacagacccgcgttcggtctaccccgggtggagaccttgaactcgttgtgcacttatccgggcctggaggtcctgtccggtggtacaaagacggggagcgtttggccagtcagggtagagtccagctggaacaagcaggcgctcgccaagtgttacgcgtgcagggagcgagatcaggtgacgcaggggagtacctatgtgatgccccccaggactcccgcatcttcctggtgagcgtggaggaaccactcttagttaagctggtgtccgaactcactccactaaccgtgcatgaaggggatgatgccacatttagatgcgaagtgagccccccagatgcagatgtgacctggctacgtaatggagccgtggtgaccccaggcccgcaggtggagatggcccaaaatggctcctcccggatcctgacactgcgaggttgtcagttaggggatgcaggaacagtgacactgagggccggatctaccgctactagtgcgagattgcatgtacgggaaaccgagttactttttcttcggcgcctgcaggacgtcagggccgaagaaggacaggacgtctgcttggaggtcgagactgggcgtgtgggggcggctggcgccgttagatgggtgagggggggccaaccgctgccacacgattcccgcctgtccatggcacaagacggccatatccacagattatttattcacggggtgatcctggccgaccagggtacatatgggtgcgaatctcaccacgatcggaccctcgccaggcttagcgtccgtcctagacagcttcgcgtgctccgcccactggaagacgttaccattagcgaagggggaagcgccaccttccagctcgagctgagccaggaaggggtgaccggggaatgggccagaggtggggtgcagctctacccaggcccaaagtgccacatccatagcgatggacaccgtcatcggcttgtcctgaatggtttaggcttagctgacagcgggtgtgtctcatttacggccgactccctccgctgcgccgcaagactgattgtcagagaggtgcccgtgaccatcgtgcggggcccacatgatctggaggtcaccgaaggcgataccgctacttttgagtgtgagttgtcccaggccctggcggacgtgacttgggagaaggacgggaacgcactcacccctagtcctcggctgcgcctccaggcattggggacccggaggctgttgcagctacgcagatgcggccccagcgacgctgggacgtatagttgtgccgtgggaacggctcgtgctggtcccgtaagactcacagtgcgcgagaggaccgtggcagtgctgtctgagcttcggtccgtatcagcccgcgagggagacggcgctacctttgagtgtactgtttccgaggttgagacgactgggcggtgggaacttggaggcaggccactgagacccggtgcccgggtgcgcatccgacaggagggaaaaaagcatatcctggtcctgtctgagttaagggctgaggatgccggagaggtcagatttcaggcaggcccggctcagtccctcgccctcctggaagtggaggccctccccctgcagatgtgtcggcaccccccaagagaaaagactgtcctagtaggccggagggcagtgctggaggtcactgtttcgcgctctggcgggcatgtttgctggcttagggaaggggccgagctctgccccggggataagtatgaaatgagaagccacggccctacacacagcctggtcattcatgatgtacgccctgaagatcaaggaacctactgttgccaagcaggacaggactcgacccatactcggctcctcgtggagggcaattag

SEQ ID NO: 185805 - DNA, 5841 bp, Artificial Sequence
  derived and/or modified sequence
ctccgcacccccccctgcccccccaccgttcgccgctgcaggcggtcggccgccgcgatgaaggcgagctcgggggatcaggggagccccccgtgcttcctgcgcttcccgcggcctgtgcgggtggtaagtggcgccgaggccgagctcaagtgcgtggtcctgggggagccgccgcctgtagtggtgtgggagaagggcgggcagcagctggcggcctcggaacgcctgagcttcccggcggacggcgcggagcacggcctgctgctgaccgccgcactgcccaccgacgcgggggtctacgtgtgccgcgcccgcaacgcggccggcgaggcctacgcggcggccgccgtcaccgtgctggagccgccggcctccgaccccgagctgcagcccgccgagcgcccgctgccatcgccggggtccggggagggcgccccggtcttcctcacggggcctcgatcccagtgggtgctgcggggggcggaggtggtgctgacgtgccgggcggggggcctccccgagcccacactgtactgggagaaggacgggatggccctggacgaagtgtgggacagcagccacttcgcgctccagccgggccgcgccgaggacggccccggcgcgagcctggcactgcgcatcctggcggctcggctgccggattccggcgtctacgtgtgccacgcccgcaacgcgcacggccacgcgcaggcgggggcgctgctccaggtgcaccagccccccgagagcccgcccgcggaccccgacgaggcccccgcgccggtggtggagccgctcaagtgcgcgcctaagaccttctgggtgaacgagggcaagcacgccaagttccgctgctacgtgatgggcaagcccgagcccgagatcgaatggcactgggagggccgcccgctgctcccggaccgccgccgcctcatgtaccgcgaccgcgacggcggcttcgtgctcaaggtgctttactgccaggccaaggatcgtgggctctacgtctgcgccgcgcgcaactcggcgggccagacgctcagtgccgtgcagctgcacgtgaaagagccccgcctccggttcacacggcccctgcaggacgtggagggccgtgagcacgggattgccgtgctggaatgtaaagtacccaactcccgcatccccacggcctggttccgtgaggaccagcggctgctgccctgccgcaagtacgagcagatcgaagagggcactgtccggcgcctcatcatccacaggctgaaggcagacgatgatggtatctacctgtgcgagatgcggggccgggtgcgcaccgtggccaacgtcacagtcaaagggcccatcctgaagcgcctgccccggaagctcgacgtcctggaaggagagaatgctgtgctgctagtggaaactctagaggccggggtcgagggacgctggagccgtgatggggaggagctgccggtcatctgccagagcagctcaggccacatgcatgccctggtccttccaggggtcacccgagaggatgctggcgaggtcacctttagcctgggcaactcccgtaccactacgcttctcagagtaaaatgtgtcaagcacagtcccccaggaccccccatattggcagagatgttcaagggccacaagaacacggtcctgttgacctggaagcctcccgagccagctcccgagaccccattcatctaccggctggagcggcaggaagtgggctctgaagactggattcagtgcttcagcatcgagaaagccggagccgtggaggtgccgggcgactgtgtgccctccgagggtgactaccgcttccgcatctgcacagtcagcggacatggccgtagtccccacgtggtgttccacggttctgctcaccttgtgcccacagctcgcctggtggcaggtctggaggatgtgcaggtatacgacggggaagatgccgtcttctccctcgatctctccaccatcatccagggtacctggttccttaatggggaagagctcaagagtaacgagccggagggccaggtggaacctggggccctgcggtaccgtatagagcagaagggtctgcagcacagactcatcctgcatgccgtcaagcaccaggacagcggtgccctggtcggcttcagctgccccggcgtgcaggactcagctgccctcacaatccaagagagcccggtgcacatcctgagcccccaggacagggtgtcgttgaccttcacaacctcagagcgggtggtgctgacttgtgagctctcaagggtggacttcccggcaacctggtacaaggatgggcagaaggtggaggagagcgagttgctggtggtgaagatggatgggcgcaaacaccgtctgatcctgcctgaggccaaagtccaggacagtggcgagtttgagtgcaggacagaaggggtctcggccttcttcggcgtcactgtccaagatcctcccgtgcacatcgtggacccccgagaacatgtgttcgtgcatgccataacttccgagtgtgtcatgctggcctgtgaggtggaccgagaggacgcccctgtgcgttggtacaaggacgggcaggaggtggaggagagtgacttcgtggtgctggagaatgaggggccccatcgccgcctggtgctgcccgccacccagccctcagacgggggcgagtttcagtgcgtcgctggagatgagtgtgcctacttcactgtcaccatcacagacgtctcctcgtggatcgtgtatcccagcggcaaggtgtatgtggcagccgtgcgcctggagcgtgtggtgctgacctgtgagctatgccggccctgggcagaggtgcgctggaccaaggatggagaggaggtggtggagagccccgcgctgctcctgcagaaggaagacactgtccgccgcctggtgctgcccgctgtccagctcgaggactccggcgagtacttgtgtgaaattgacgatgagtcggcctccttcactgtcaccgtcacagaacccccagtgcggatcatataccctcgcgatgaggtgaccttgatcgccgtgaccttggagtgtgtggtgctgatgtgtgaactgtctcgggaggatgcccctgtgcgctggtacaaggatgggctggaagtggaggagagcgaggccctggtgctggagagggatgggccacgctgccgcctggtgctacctgctgctcagcccgaggacgggggcgagtttgtatgtgatgctggagatgactcggccttcttcactgtcactgtcacagccccaccagagaggattgtgcacccggcagcccgctccctggatctgcattttggggctccagggcgcgtggagctgcgctgtgaggtggccccagctgggtctcaggtgcgctggtacaaggacgggctggaagtggaggcatcagatgccctgcagctgggtgccgaggggcccacccgcaccctgaccctgccccacgcccagcctgaggacgccggggagtatgtgtgtgagacccggcatgaggccatcaccttcaatgtcatcctggctgagcctccagtgcagttccttgctctagagacaactccaagcccgctctgtgtggcccctggggagccagtggtgctgagctgtgaactgtcccgggctggcgcccccgtggtctggagccacaatgggaggcccgtgcaggagggcgagggcctagagctccatgccgagggcccccgccgagtcctctgcatccaggctgcaggcccagcccatgcagggctctacacctgccagtctggagcagcccccggagccccaagcctcagcttcaccgtccaggtggctgagccccctgtgcgggtggtagctcccgaggcagcccagacgagggttcggagcaccccaggcggggacctagagctggtggtgcacctctccgggccagggggccctgtacgctggtacaaggacggggagcgactggcaagccaggggcgggtgcagctggagcaggccggggccaggcaggtgctgcgggtgcagggggcacggagcggggacgctggggagtacctgtgcgatgcgccccaggacagccgcatcttccttgtcagcgtggaagagccactgctggtgaagctggtctcggagctgacaccactcactgtccacgagggcgatgatgccacgttccggtgtgaagtctccccaccagatgccgatgtcacctggctgcgcaatggggccgtcgtcactccagggccccaggtggagatggcccagaatggttcaagccgcatcttaaccttgcgaggctgccaactgggggatgcagggaccgtgactttgcgggcagggagcacggccacaagtgcccggctccatgttcgagagacagagctgctgttcctacggcggttgcaggatgtgcgggcagaggaaggccaggatgtgtgtctcgaagtggagacaggccgagtgggtgcagcgggggccgtgcgctgggtgcgaggtgggcagcccctgccccacgactctcgcctgtccatggcccaggatgggcacatccaccgcctcttcatccatggtgtcatactggccgaccagggcacctacggctgcgagagccaccacgatcgcaccctggccaggctcagcgtgaggccgaggcagctgagggtgctgcggcctctggaggacgtgaccatcagtgaggggggcagtgccaccttccagctggagctgtcccaggaaggtgtgaccggggagtgggcccggggtggagtacagctgtatccaggacccaagtgtcacatccactcggacggccaccgtcaccgactggtactcaatggcctgggcctggccgactcaggctgtgtctccttcacagcggattccctgcgctgcgcagccagactcattgtgagagaggtcccagtgaccatcgtgcgggggccacacgacctagaggtgaccgagggcgacacagctacgttcgagtgcgagctttcccaagctttggctgatgttacctgggagaaggacgggaacgcgcttacgcctagcccgcggctccggctccaggccctcggcacgcgccgccttctccagctgcgacgctgcggcccctcggacgccgggacctacagctgcgcggtggggacggcccgcgccggaccggtccgcctgaccgtgcgcgagcgtactgtggcggtactctccgagctgcggtcggtgagcgcccgcgaaggcgacggcgctacgttcgagtgcaccgtgtcggaggtcgagaccacggggcgctgggagctcggaggccgcccgctgagacccggagcccgcgtccgcatccgacaggaagggaagaaacacattctggtgcttagcgagctgcgcgccgaggacgccggtgaagtccgcttccaggcggggcccgcccagtccctggctctactggaagtggaggcattgcctctccagatgtgccgccacccccctcgcgagaagaccgttctggtgggccgccgggcggtgctggaggtgactgtgtcccgctcggggggccacgtgtgctggctgcgggagggggccgagctgtgcccgggagataagtatgagatgcgcagccacggccccacccacagcctggtcatccatgacgttcgacctgaggaccaaggcacttactgctgccaggccggccaggacagcacccacacacggctgctggtagagggcaactaggagaacctaaccaggccaggcgggtgcccttggacagcttggaaggcgtttgcccttaccctgggcaggggtagagagacaaggaacaataaa

SEQ ID NO: 185806 - DNA, 5690 bp, Artificial Sequence
  derived and/or modified sequence
atgaaagcttcttcaggggaccagggatcccccccatgtttcttgaggtttcctcggccagtaagggtcgtctctggagccgaggcggagttgaagtgcgtagttctcggggagcctcctcccgttgttgtgtgggagaaggggggacagcagctggccgcttcagagagactgtcctttcccgcagatggagccgagcacgggctgctgctgactgctgctctgcccactgacgcaggtgtctatgtgtgtcgcgctaggaacgctgcgggtgaagcgtatgcagccgctgctgtgacagtccttgaacctcccgctagcgacccagagttgcagcctgcggaaagaccactgccgtccccaggcagcggagagggggctccagtcttcctgaccgggcctcgttcccagtgggtcctccggggagctgaggtggtactgacatgccgggcagggggactccccgagcctaccctgtactgggaaaaagatggaatggcactcgatgaagtgtgggactcatcgcacttcgccctccagccgggacgggctgaggatggacccggtgcgagtctggccctacgtatcttagcggcaaggttgcctgattcaggagtttatgtgtgtcacgcccgtaacgcgcacgggcatgcccaggccggagcacttctgcaagtccaccagcctcccgaatccccacccgctgacccagacgaggctcccgctccagtggtcgaaccccttaaatgcgcacccaaaactttctgggtgaacgaggggaagcacgccaaattccgttgctatgtgatgggaaaacccgaacctgagatcgaatggcactgggagggcaggcctctgcttcccgacaggcgtcgcttaatgtaccgcgacagagacgggggatttgtgctcaaggttctgtactgccaggccaaagatagaggcttgtacgtctgtgcggcaaggaacagcgctggacaaactctatccgccgttcagttgcatgtgaaagaacctcggctgcggtttacccgcccactccaggacgtggagggtcgtgaacatggcattgctgtcctggaatgtaaggttcccaacagccgcatcccaacagcttggttccgggaagaccaaaggctgcttccatgccggaaatatgaacagatcgaggagggcacagtccgccgtctgattatccatcgcctcaaagccgatgatgacggtatctatctctgcgagatgagaggaagggtgaggacagttgctaacgtgacagttaaagggcctatacttaaacgtctgccgaggaaattagacgtgttggaaggtgagaatgccgttctgttagtagaaactctcgaagcaggtgtagaaggacgctggagcagggacggtgaagagctgcctgtaatctgccagtcgtcttcaggccacatgcacgctctcgttctgccaggcgtgacaagggaagacgctggcgaagtgaccttcagccttggcaattccaggaccaccacccttctgagggtgaaatgtgtgaagcatagtccacctggcccaccgatcctcgcagagatgtttaaagggcataagaatacggtgctgctgacatggaagcccccagagccggcacctgagacccccttcatctatcgcctggagcgacaagaggtcgggagcgaggactggatccagtgcttttcaatagagaaggccggtgcagtggaggtacctggggattgcgttcccagtgagggagattatagattcagaatctgcaccgtcagtgggcatgggaggagccctcacgtggtgtttcacggcagcgcacatctggtgcctacggcaagactggtagccggtctcgaggatgtccaggtgtacgatggggaggatgctgtgttttccctcgatctgtccacaataattcagggcacgtggttcctaaatggagaggaattgaaatcaaatgaaccagaaggccaggttgaacctggagctctgaggtacaggattgaacagaaggggctgcagcatcgcctgattctccacgccgttaagcaccaggactctggcgcactggttggtttctcatgtcctggggtgcaggattccgctgcactgacgattcaggaatctcccgtgcatatcctgtcaccccaggatcgggtgtcactcaccttcactacatccgagcgcgttgtgctgacatgtgagctgtccagggtcgatttcccagccacatggtacaaagatggccagaaggtagaggagagcgagctgctggttgtgaagatggacgggaggaaacaccgtctgattctaccagaggccaaagtgcaggatagcggagaatttgagtgtagaactgaaggggtgagcgctttcttcggagtcacggtgcaagatccacctgtacacatagtcgatccaagggaacatgtgttcgttcatgccataacatccgagtgcgtcatgctagcatgcgaagtcgacagagaggacgctcccgtccgctggtataaagatggacaggaagtggaagaatccgacttcgtggtactagagaacgagggaccccatcgcagactggtgctgcccgctacccaaccttctgacggcggtgaattccagtgcgtggccggtgacgagtgcgcctacttcacagtgactatcactgacgtgtctagctggattgtgtatccttctggcaaggtgtacgtcgccgctgtgcgactggaacgggttgtgctaacatgcgagctgtgccggccttgggcagaggtcagatggacgaaagacggagaggaagttgtcgagagtcctgccctgctgctgcagaaggaggacactgtccgcagactggtattgccagccgtccagctcgaggattccggggaatatctctgtgaaatagacgacgaatctgcctcctttaccgtgacggtcaccgagcctcctgttcgcatcatataccctcgcgacgaggtcaccctcatagccgttaccctcgagtgcgtggtcctgatgtgcgagttgtctcgagaggacgccccagtgcgatggtacaaagatggacttgaggtcgaagagtccgaggccctcgtcctggagagagatggccctcgctgtagactggtacttcccgcagctcagcctgaggatggcggagagttcgtctgcgatgcgggagatgactccgccttcttcacggttacagtgactgcacccccagagcggattgtgcaccctgccgctcggtccctggatttgcacttcggcgcacctgggagagttgaactcaggtgcgaagtcgccccagctggtagtcaggtgagatggtataaagacggactggaagtcgaagccagcgatgccttgcagctgggcgctgaaggtccaacacgaactctcaccttgcctcacgcacagccagaagacgctggcgagtacgtgtgcgagaccaggcacgaggccatcacattcaatgtcattctagccgaaccgccagtccaattcctggccttagaaaccactccttccccattatgcgttgcgccaggagaaccagtggtgctgtcttgcgaactgtctagggctggcgcacctgtggtctggagtcacaacggacgccctgtgcaggaaggggagggcttagagcttcatgcagagggcccaaggcgcgtactatgcatccaggcagccggaccagcacacgccggtctttacacatgccagagcggcgctgccccaggtgccccatcactctcgttcaccgttcaggtcgcagagcccccagtccgcgtggtggccccagaggccgcacaaacccgggtacgctccaccccaggtggagacctggaacttgtggttcacttgagcggccctggcggtccagtgaggtggtataaggacggcgagagactcgctagccaaggccgtgtacaactcgagcaggccggagctaggcaggtcctcagggttcaaggggctcggtcaggtgacgccggagagtacttatgcgacgctccacaggatagcaggatattcctggtgagtgtcgaagaaccgctgctggtgaagctcgtctctgaactgacacccctgactgtgcacgagggagatgacgctacctttaggtgcgaagtgagccctccagacgcagacgtgacttggctgcgcaacggagcagtggtgactcccggaccgcaagtggaaatggctcagaacgggagctctaggattctgacactgagagggtgccagttaggggacgccggaaccgtcacgctgcgagccggttcaaccgccaccagtgcccgattacacgtccgcgaaactgagctcctatttttacgcagattgcaggatgtcagagctgaagagggccaggacgtatgcctggaagttgaaaccggcagggtaggtgccgctggggctgttagatgggtgaggggcggtcagccactccctcatgactctcgcttgtcaatggcacaggatgggcacatccaccgcttgtttatccatggagtcattctggcggaccagggtacctatggatgcgagtcacatcatgaccgcaccctcgcccgtttgagcgtgcgccctcgtcagttacgcgtccttcgccctctggaagatgtgaccatctctgaaggtggaagtgctacattccagctggagctaagccaggagggggtgacaggagagtgggctaggggcggagttcagctgtacccagggcctaagtgccacatccactccgatggccaccgtcatcggctagtattaaacggactcggactggctgactcagggtgtgttagctttacagcagactcattgcggtgcgcagcgaggctcatagtaagggaggtcccggtaacgatagtgcgaggcccacatgatctggaagttaccgagggggatacagctacttttgagtgtgaacttagccaagccctcgccgacgtgacctgggagaaagatgggaatgctctgacgccgtcccctcggctgcggctccaggcactcgggacacgaaggctgctgcagctgagacgctgcgggccttctgatgctggaacctattcctgcgcggtgggtaccgccagggccggacctgtccgcttgaccgttcgcgagagaaccgtagcagtcttgtcagaactgcggagtgtttccgcccgagaaggtgatggggcaacatttgagtgtaccgtctcagaggtcgagactactggcaggtgggagttgggaggcagacccttacgccctggagcccgtgtacgaataaggcaggaggggaagaagcatattctagtgctttctgagctgagggccgaggatgcaggagaagtgcgattccaggcgggacctgcccagtcactggctctgttggaagtggaagccctaccgctccagatgtgccgccatcctcccagggagaaaacagttctggttgggagacgagctgtgttagaagtcacagtctcccggtccggtgggcacgtgtgttggctacgagaaggggctgagctgtgtccgggtgataaatacgagatgagatcccacgggccaactcacagtctggtaatacacgacgtccgaccggaagaccagggcacttattgctgccaagccggacaggacagtacccatacgagactgctagtcgaggggaacta

SEQ ID NO: 185807 - DNA, 5691 bp, Artificial Sequence
  derived and/or modified sequence
atgaaggccagcagcggcgaccagggcagccccccctgcttcctgagattccccagacccgtgagagtggtgagcggcgccgaggccgagctgaagtgcgtggtgctgggcgagcccccccccgtggtggtgtgggagaagggcggccagcagctggccgccagcgagagactgagcttccccgccgacggcgccgagcacggcctgctgctgaccgccgccctgcccaccgacgccggcgtgtacgtgtgcagagccagaaacgccgccggcgaggcctacgccgccgccgccgtgaccgtgctggagccccccgccagcgaccccgagctgcagcccgccgagagacccctgcccagccccggcagcggcgagggcgcccccgtgttcctgaccggccccagaagccagtgggtgctgagaggcgccgaggtggtgctgacctgcagagccggcggcctgcccgagcccaccctgtactgggagaaggacggcatggccctggacgaggtgtgggacagcagccacttcgccctgcagcccggcagagccgaggacggccccggcgccagcctggccctgagaatcctggccgccagactgcccgacagcggcgtgtacgtgtgccacgccagaaacgcccacggccacgcccaggccggcgccctgctgcaggtgcaccagccccccgagagcccccccgccgaccccgacgaggcccccgcccccgtggtggagcccctgaagtgcgcccccaagaccttctgggtgaacgagggcaagcacgccaagttcagatgctacgtgatgggcaagcccgagcccgagatcgagtggcactgggagggcagacccctgctgcccgacagaagaagactgatgtacagagacagagacggcggcttcgtgctgaaggtgctgtactgccaggccaaggacagaggcctgtacgtgtgcgccgccagaaacagcgccggccagaccctgagcgccgtgcagctgcacgtgaaggagcccagactgagattcaccagacccctgcaggacgtggagggcagagagcacggcatcgccgtgctggagtgcaaggtgcccaacagcagaatccccaccgcctggttcagagaggaccagagactgctgccctgcagaaagtacgagcagatcgaggagggcaccgtgagaagactgatcatccacagactgaaggccgacgacgacggcatctacctgtgcgagatgagaggcagagtgagaaccgtggccaacgtgaccgtgaagggccccatcctgaagagactgcccagaaagctggacgtgctggagggcgagaacgccgtgctgctggtggagaccctggaggccggcgtggagggcagatggagcagagacggcgaggagctgcccgtgatctgccagagcagcagcggccacatgcacgccctggtgctgcccggcgtgaccagagaggacgccggcgaggtgaccttcagcctgggcaacagcagaaccaccaccctgctgagagtgaagtgcgtgaagcacagcccccccggcccccccatcctggccgagatgttcaagggccacaagaacaccgtgctgctgacctggaagccccccgagcccgcccccgagacccccttcatctacagactggagagacaggaggtgggcagcgaggactggatccagtgcttcagcatcgagaaggccggcgccgtggaggtgcccggcgactgcgtgcccagcgagggcgactacagattcagaatctgcaccgtgagcggccacggcagaagcccccacgtggtgttccacggcagcgcccacctggtgcccaccgccagactggtggccggcctggaggacgtgcaggtgtacgacggcgaggacgccgtgttcagcctggacctgagcaccatcatccagggcacctggttcctgaacggcgaggagctgaagagcaacgagcccgagggccaggtggagcccggcgccctgagatacagaatcgagcagaagggcctgcagcacagactgatcctgcacgccgtgaagcaccaggacagcggcgccctggtgggcttcagctgccccggcgtgcaggacagcgccgccctgaccatccaggagagccccgtgcacatcctgagcccccaggacagagtgagcctgaccttcaccaccagcgagagagtggtgctgacctgcgagctgagcagagtggacttccccgccacctggtacaaggacggccagaaggtggaggagagcgagctgctggtggtgaagatggacggcagaaagcacagactgatcctgcccgaggccaaggtgcaggacagcggcgagttcgagtgcagaaccgagggcgtgagcgccttcttcggcgtgaccgtgcaggacccccccgtgcacatcgtggaccccagagagcacgtgttcgtgcacgccatcaccagcgagtgcgtgatgctggcctgcgaggtggacagagaggacgcccccgtgagatggtacaaggacggccaggaggtggaggagagcgacttcgtggtgctggagaacgagggcccccacagaagactggtgctgcccgccacccagcccagcgacggcggcgagttccagtgcgtggccggcgacgagtgcgcctacttcaccgtgaccatcaccgacgtgagcagctggatcgtgtaccccagcggcaaggtgtacgtggccgccgtgagactggagagagtggtgctgacctgcgagctgtgcagaccctgggccgaggtgagatggaccaaggacggcgaggaggtggtggagagccccgccctgctgctgcagaaggaggacaccgtgagaagactggtgctgcccgccgtgcagctggaggacagcggcgagtacctgtgcgagatcgacgacgagagcgccagcttcaccgtgaccgtgaccgagccccccgtgagaatcatctaccccagagacgaggtgaccctgatcgccgtgaccctggagtgcgtggtgctgatgtgcgagctgagcagagaggacgcccccgtgagatggtacaaggacggcctggaggtggaggagagcgaggccctggtgctggagagagacggccccagatgcagactggtgctgcccgccgcccagcccgaggacggcggcgagttcgtgtgcgacgccggcgacgacagcgccttcttcaccgtgaccgtgaccgccccccccgagagaatcgtgcaccccgccgccagaagcctggacctgcacttcggcgcccccggcagagtggagctgagatgcgaggtggcccccgccggcagccaggtgagatggtacaaggacggcctggaggtggaggccagcgacgccctgcagctgggcgccgagggccccaccagaaccctgaccctgccccacgcccagcccgaggacgccggcgagtacgtgtgcgagaccagacacgaggccatcaccttcaacgtgatcctggccgagccccccgtgcagttcctggccctggagaccacccccagccccctgtgcgtggcccccggcgagcccgtggtgctgagctgcgagctgagcagagccggcgcccccgtggtgtggagccacaacggcagacccgtgcaggagggcgagggcctggagctgcacgccgagggccccagaagagtgctgtgcatccaggccgccggccccgcccacgccggcctgtacacctgccagagcggcgccgcccccggcgcccccagcctgagcttcaccgtgcaggtggccgagccccccgtgagagtggtggcccccgaggccgcccagaccagagtgagaagcacccccggcggcgacctggagctggtggtgcacctgagcggccccggcggccccgtgagatggtacaaggacggcgagagactggccagccagggcagagtgcagctggagcaggccggcgccagacaggtgctgagagtgcagggcgccagaagcggcgacgccggcgagtacctgtgcgacgccccccaggacagcagaatcttcctggtgagcgtggaggagcccctgctggtgaagctggtgagcgagctgacccccctgaccgtgcacgagggcgacgacgccaccttcagatgcgaggtgagcccccccgacgccgacgtgacctggctgagaaacggcgccgtggtgacccccggcccccaggtggagatggcccagaacggcagcagcagaatcctgaccctgagaggctgccagctgggcgacgccggcaccgtgaccctgagagccggcagcaccgccaccagcgccagactgcacgtgagagagaccgagctgctgttcctgagaagactgcaggacgtgagagccgaggagggccaggacgtgtgcctggaggtggagaccggcagagtgggcgccgccggcgccgtgagatgggtgagaggcggccagcccctgccccacgacagcagactgagcatggcccaggacggccacatccacagactgttcatccacggcgtgatcctggccgaccagggcacctacggctgcgagagccaccacgacagaaccctggccagactgagcgtgagacccagacagctgagagtgctgagacccctggaggacgtgaccatcagcgagggcggcagcgccaccttccagctggagctgagccaggagggcgtgaccggcgagtgggccagaggcggcgtgcagctgtaccccggccccaagtgccacatccacagcgacggccacagacacagactggtgctgaacggcctgggcctggccgacagcggctgcgtgagcttcaccgccgacagcctgagatgcgccgccagactgatcgtgagagaggtgcccgtgaccatcgtgagaggcccccacgacctggaggtgaccgagggcgacaccgccaccttcgagtgcgagctgagccaggccctggccgacgtgacctgggagaaggacggcaacgccctgacccccagccccagactgagactgcaggccctgggcaccagaagactgctgcagctgagaagatgcggccccagcgacgccggcacctacagctgcgccgtgggcaccgccagagccggccccgtgagactgaccgtgagagagagaaccgtggccgtgctgagcgagctgagaagcgtgagcgccagagagggcgacggcgccaccttcgagtgcaccgtgagcgaggtggagaccaccggcagatgggagctgggcggcagacccctgagacccggcgccagagtgagaatcagacaggagggcaagaagcacatcctggtgctgagcgagctgagagccgaggacgccggcgaggtgagattccaggccggccccgcccagagcctggccctgctggaggtggaggccctgcccctgcagatgtgcagacacccccccagagagaagaccgtgctggtgggcagaagagccgtgctggaggtgaccgtgagcagaagcggcggccacgtgtgctggctgagagagggcgccgagctgtgccccggcgacaagtacgagatgagaagccacggccccacccacagcctggtgatccacgacgtgagacccgaggaccagggcacctactgctgccaggccggccaggacagcacccacaccagactgctggtggagggcaactag

SEQ ID NO: 185808 - protein, 1544 aa, Artificial Sequence
  derived and/or modified sequence
MSGTQSTITDRFPLKKPIRHGSILNRESPTDKKQKVERIASHDFDPTDSSSKKTKSSSEESRSEIYGLVQRCVIIQKDDNGFGLTVSGDNPVFVQSVKEDGAAMRAGVQTGDRIIKVNGTLVTHSNHLEVVKLIKSGSYVALTVQGRPPGSPQIPLADSEVEPSVIGHMSPIMTSPHSPGASGNMERITSPVLMGEENNVVHNQKVEILRKMLQKEQERLQLLQEDYNRTPAQRLLKEIQEAKKHIPQLQEQLSKATGSAQDGAVVTPSRPLGDTLTVSEAETDPGDVLGRTDCSSGDASRPSSDNADSPKSGPKERIYLEENPEKSETIQDTDTQSLVGSPSTRIAPHIIGAEDDDFGTEHEQINGQCSCFQSIELLKSRPAHLAVFLHHVVSQFDPATLLCYLYSDLYKHTNSKETRRIFLEFHQFFLDRSAHLKVSVPDEMSADLEKRRPELIPEDLHRHYIQTMQERVHPEVQRHLEDFRQKRSMGLTLAESELTKLDAERDKDRLTLEKERTCAEQIVAKIEEVLMTAQAVEEDKSSTMQYVILMYMKHLGVKVKEPRNLEHKRGRIGFLPKIKQSMKKDKEGEEKGKRRGFPSILGPPRRPSRHDNSAIGRAMELQKARHPKHLSTPSSVSPEPQDSAKLRQSGLANEGTDAGYLPANSMSSVASGASFSQEGGKENDTGSKQVGETSAPGDTLDGTPRTLNTVFDFPPPPLDQVQEEECEVERVTEHGTPKPFRKFDSVAFGESQSEDEQFENDLETDPPNWQQLVSREVLLGLKPCEIKRQEVINELFYTERAHVRTLKVLDQVFYQRVSREGILSPSELRKIFSNLEDILQLHIGLNEQMKAVRKRNETSVIDQIGEDLLTWFSGPGEEKLKHAAATFCSNQPFALEMIKSRQKKDSRFQTFVQDAESNPLCRRLQLKDIIPTQMQRLTKYPLLLDNIAKYTEWPTEREKVKKAADHCRQILNYVNQAVKEAENKQRLEDYQRRLDTSSLKLSEYPNVEELRNLDLTKRKMIHEGPLVWKVNRDKTIDLYTLLLEDILVLLQKQDDRLVLRCHSKILASTADSKHTFSPVIKLSTVLVRQVATDNKALFVISMSDNGAQIYELVAQTVSEKTVWQDLICRMAASVKEQSTKPIPLPQSTPGEGDNDEEDPSKLKEEQHGISVTGLQSPDRDLGLESTLISSKPQSHSLSTSGKSEVRDLFVAERQFAKEQHTDGTLKEVGEDYQIAIPDSHLPVSEERWALDALRNLGLLKQLLVQQLGLTEKSVQEDWQHFPRYRTASQGPQTDSVIQNSENIKAYHSGEGHMPFRTGTGDIATCYSPRTSTESFAPRDSVGLAPQDSQASNILVMDHMIMTPEMPTMEPEGGLDDSGEHFFDAREAHSDENPSEGDGAVNKEEKDVNLRISGNYLILDGYDPVQESSTDEEVASSLTLQPMTGIPAVESTHQQQHSPQNTHSDGAISPFTPEFLVQQRWGAMEYSCFEIQSPSSCADSQSQIMEYIHKIEADLEHLKKVEESYTILCQRLAGSALTDKHSDKS

SEQ ID NO: 185809 - DNA, 4635 bp, Artificial Sequence
  derived and/or modified sequence
atgtccggtacacaatccacgatcacggaccggtttccactcaagaagcccatacggcatggctctatcctgaaccgagagtcaccaacagacaaaaagcagaaagttgagagaattgcctctcacgacttcgatcctacggacagctccagtaagaagactaagtcaagtagtgaggagagtcgatctgagatttacggcctcgtccagcgatgtgttattattcagaaagacgacaacggcttcggactgactgtcagcggtgataatccagtgtttgtgcagagcgtgaaggaagatggagcagccatgagagccggggtgcaaacgggggaccggattatcaaggtgaatggcactctggtgacccattccaatcatctcgaagtggtcaaattgatcaaatcgggctcctatgtcgccctgaccgtccaggggaggccaccaggaagtccccagatacctctggcagatagcgaggtagagccctctgtcatcgggcacatgtctcccattatgactagccctcatagccctggggcttcaggcaacatggagaggataacaagtcctgtactgatgggtgaggagaataacgtggttcataaccaaaaggtagagattctgaggaagatgctccagaaggagcaggagcgcctccagctgttacaggaagactataatcggaccccagcgcaacggttactaaaagaaatccaagaggctaaaaagcatataccccaactccaagagcagttgagcaaggccacagggagcgcccaggatggagctgtcgtgacccccagccgcccccttggtgacacgcttacggtctcagaagcagaaacagacccgggtgatgtactgggcaggacagactgctcctccggcgacgcatctcgcccttcaagcgacaacgccgacagcccaaagagtgggcccaaggagagaatctaccttgaagagaacccagagaagtcagagaccatacaggacaccgatacacagtcactggtcggctctcctagtacgaggattgccccgcatatcatcggagctgaggatgacgactttggtactgaacacgagcagattaatggacagtgcagctgcttccaatctattgagctcttaaagagtaggccggctcacctcgccgtctttctccatcatgtagtgtcgcaattcgatcctgcaactcttctttgttacctgtacagcgatctgtataaacatacaaattccaaggagaccagaagaatctttctcgagtttcatcagttctttctggaccgcagcgctcacctgaaggtaagtgtgcctgatgagatgagcgccgatctggaaaaacgaagaccagagctgatccccgaggatcttcatcgccattatatccaaaccatgcaggaacgcgtgcatcctgaggtccagcgacaccttgaggatttccgacagaagagatccatgggactgaccctggcggagtcagaactgactaaactggatgccgaaagagataaagataggcttacgctggagaaagagcggacctgcgccgaacagatcgtcgccaagatcgaagaggtactgatgaccgcgcaggcagtcgaagaggataagtcctccaccatgcagtatgtcatcctgatgtatatgaagcaccttggagtgaaggtaaaggagccaaggaacctagagcataaacgggggaggattggattcctccccaaaatcaagcagagcatgaagaaggacaaagagggcgaggagaaggggaagagacgcggattcccatcgattctaggacctccccggcggccatctaggcacgacaattcagccatcgggcgtgcaatggagttgcaaaaggctagacatcccaaacatctgtccacgccatcttcagtctctcctgagccgcaggactctgccaaactgcgtcagagtggcttggcaaacgaaggcacagacgcaggataccttcctgcaaattctatgtcttccgtggcttctggtgcttcatttagccaggagggaggaaaggagaatgacactgggagcaagcaggtgggggaaaccagcgcccctggggataccctcgatggtacgccgcgtaccctaaacaccgttttcgactttcctcccccccctctcgaccaggtacaggaggaagaatgtgaagtcgagagggtcactgaacacggcaccccaaagcccttcagaaagtttgacagtgtggcattcggagaatcccaatccgaggatgagcagtttgagaacgatcttgagaccgatccccctaactggcagcagctggtctctcgagaggttctcctgggcctcaaaccatgcgagatcaaacgccaggaggttattaatgaattattctatacagagcgggcacacgtgcgcacactgaaggttctggatcaggttttctatcagcgcgtgagtagggagggtatcttgagcccctctgagctgcgaaaaatctttagcaacctcgaagacatcttacagctgcacattggcctgaatgagcagatgaaggccgtgagaaagagaaatgagactagcgtcatcgatcagatcggtgaagatttgttgacttggttcagcggccccggggaggagaagcttaaacacgccgccgctaccttttgctcaaaccagccgttcgcgctggaaatgatcaagtcaagacagaaaaaagatagtcgcttccaaacattcgtgcaggacgccgagtctaatcctctttgtcgccgactccaactgaaagacatcattcctacacaaatgcagcgcctgacaaagtatcctctgctgctcgataacattgccaagtataccgagtggcccacagagcgcgaaaaggttaaaaaagccgctgatcattgccgacaaatactgaattacgtgaaccaagctgttaaagaagcagaaaacaagcaaaggctggaggattatcagagaagactggacacgtcaagcctgaaactctctgaatatcccaatgtggaggagctccggaaccttgatcttacaaaacgaaaaatgattcatgagggccccctcgtgtggaaagttaacagagataaaacgattgacctttatacccttttgctcgaggatatcctggtgctgctccagaagcaggatgaccggctagtgctgcggtgccactcaaaaatcttggcctccacagccgattccaagcacaccttctcaccagtgatcaagctatctacggtcctggttcggcaggttgcaacagacaataaggccttattcgttatatccatgtctgataacggtgctcagatttatgagctcgtggcccagacagtgtcagagaaaactgtatggcaagacttaatctgtcggatggccgctagcgtgaaggagcagagcactaaacccatacccttgccccagagcacgccaggagagggagataacgacgaggaggatcccagcaaactgaaggaagaacaacacggtatctcagtaaccggcctgcagtcaccagatagagatctcggcctggaatccaccctgatatcctctaagcctcaaagtcattcgttgtctaccagcggcaagtccgaagtcagggacctcttcgtggccgaaaggcagttcgcgaaagagcaacacaccgatggcactctgaaagaagtcggtgaagactaccagattgctatccccgactcccatctacccgtctctgaggagcgctgggccctcgacgcactgaggaacctgggcctgttaaaacagctcctggttcagcagctgggattgacagaaaagtctgtccaggaagactggcagcatttcccaagataccggacagcatcgcagggaccacagaccgacagtgtgatccagaattccgagaatatcaaggcttaccacagcggcgagggccacatgccgttccgcaccgggaccggagacattgctacctgctatagccctcgaacctccaccgagtcgttcgcccccagggatagtgtgggacttgccccacaggatagccaagcttctaacatccttgtcatggaccacatgattatgacaccagaaatgccaactatggaacccgagggcggcttggacgactcgggggaacacttcttcgacgcccgggaagcccactctgatgagaaccccagcgaaggcgacggagccgtgaataaagaagaaaaggatgtgaacttgcggatctcaggcaattatttaatactggacggctacgatcctgtccaggagtcctccaccgacgaagaggtggcctcgtccttaacgctgcaacccatgaccgggatacccgccgtcgaaagcacacaccagcagcagcattctccccagaacacccatagcgacggcgccattagtcctttcacaccagagtttctggtgcagcagaggtggggagccatggaatacagctgctttgaaatccagagtccatcaagctgcgccgacagccagagtcaaataatggaatatatccataagattgaggccgatttggagcatctgaagaaagttgaggagtcttacactattctgtgccagcgactcgcaggcagtgcccttaccgataagcattcagataaatcgtag

SEQ ID NO: 185810 - DNA, 4635 bp, Artificial Sequence
  derived and/or modified sequence
atgagcggcacccagagcaccatcacagaccgcttccccctgaagaagcccatccgccacggcagcatcctgaaccgggagagccccacagacaagaagcagaaggtggagagaattgccagccatgactttgaccccacagacagcagcagcaagaagaccaagagcagcagcgaggagagccgctctgagatctacggcctggtgcagcgctgcgtcatcatccagaaggatgacaatggcttcggcctgactgtgtctggggacaaccctgtgtttgtgcagagcgtgaaggaggatggagctgccatgagagctggggtgcagacaggagaccgcatcatcaaggtgaatggcaccctggtgacccacagcaaccacctggaggtggtgaagctgatcaagagcggcagctatgtggccctgactgtgcagggccggcccccaggcagcccccagatccccctggccgacagcgaggtggagcccagcgtcatcggccacatgagccccatcatgaccagcccccacagccctggggccagcggcaacatggagcgcatcaccagccctgtgctgatgggagaagaaaataatgtggtgcacaaccagaaggtggagatcctgaggaagatgctgcagaaggagcaggagcggctgcagctgctgcaggaggactacaacagaacaccagcccagaggctgctgaaggagatccaggaggccaagaagcacatcccccagctgcaggagcagctgagcaaggccactggaagtgcccaggatggagctgtggtgacccccagccggcccctgggggacaccctgactgtgtctgaggccgagacagatcctggagatgtgctgggccgcacagactgcagcagtggagatgccagccggcccagcagtgacaatgctgacagccccaagagcggccccaaggagcgcatctacctggaggagaaccctgagaagtctgagaccatccaggacacagacacccagagcctggtgggcagccccagcacccgcatcgccccccacatcattggagcagaagatgatgactttggaacagagcacgagcagatcaatggccagtgcagctgcttccagagcattgagctgctgaagagcaggcctgcccacctggccgtgttcctgcaccacgtggtgtcccagtttgatcctgccaccctgctgtgctacctgtacagcgacctgtacaagcacaccaacagcaaggagacccggcgcatcttcctggagttccaccagttcttcctggacagaagtgcccacctgaaggtgtctgtgcctgatgagatgtctgctgacctggagaagagaagacctgagctgatccctgaggacctgcaccgccactacatccagaccatgcaggagcgggtgcaccctgaggtgcagaggcacctggaggacttccggcagaagaggtccatgggcctgaccctggccgagagcgagctgaccaagctggatgctgagcgggacaaggaccggctgaccctggagaaggagaggacctgtgccgagcagatcgtggccaagattgaggaggtgctgatgacagcccaggccgtggaggaggacaagagcagcaccatgcagtatgtgatcctgatgtacatgaagcacctgggcgtgaaggtgaaggagcccaggaacctggagcacaagaggggccgcatcggcttcctgcccaagatcaagcagagcatgaagaaggacaaggagggggaggagaagggcaagaggcggggcttccccagcatcctgggccccccaagaagacccagcagacatgacaacagcgccatcggccgggccatggagctgcagaaggcccggcaccccaagcacctgagcacccccagctctgtgtccccagagccccaggacagcgccaagctgcggcagagcggcctggccaatgaaggaacagatgctggctacctgcctgccaacagcatgagctctgtggccagcggggccagcttcagccaggagggcggcaaggaaaatgacaccggcagcaagcaggtgggggagaccagcgcccctggggacaccctggatggcacccccaggaccctgaacacagtgtttgacttccccccaccacccctggaccaggtgcaggaggaggagtgtgaggtggagcgggtgacagagcacggcacccccaagcccttcaggaagtttgattctgtggccttcggggagagccagagtgaagatgagcagtttgaaaatgacctggagacagacccccccaactggcagcagctggtgtcccgggaggtgctgctgggcctgaagccctgtgagatcaagaggcaggaggtgatcaatgaactcttctacacagagcgggcccacgtgaggaccctgaaggtgctggaccaggtgttctaccagagggtgtcccgggagggcatcctgagccccagcgagctgaggaagatcttcagcaacctggaggacatcctgcagctgcacatcggcctgaatgagcagatgaaggctgtgaggaagagaaatgagacctctgtgattgaccagatcggggaggacctgctgacctggttcagcggccctggagaggagaagctgaagcatgctgctgccaccttctgcagcaaccagccctttgccctggagatgatcaagagccggcagaagaaggacagccgcttccagacctttgtgcaggatgctgagagcaaccccctgtgccggcggctgcagctgaaggacatcatccccacccagatgcagaggctgaccaagtaccccctgctgctggacaacatcgccaagtacacagagtggcccacagagcgggagaaggtgaagaaggctgctgaccactgccggcagatcctgaactacgtgaaccaggccgtgaaggaggccgagaacaagcagaggctggaggactaccagaggcggctggacaccagcagcctgaagctgtctgagtaccccaacgtggaggagctgaggaacctggacctgaccaagaggaagatgatccacgagggccccctggtgtggaaggtgaacagagacaagaccatcgacctgtacaccctgctgctggaggacatcctggtgctgctgcagaagcaggatgaccggctggtgctgcgctgccacagcaagatcctggccagcacagctgacagcaagcacaccttcagccctgtgatcaagctgagcacagtgctggtgcggcaggtggccacagacaacaaggccctcttcgtcatctccatgtctgacaatggagcccagatctatgagctggtggcccagacagtgtctgagaagacagtgtggcaggacctgatctgcaggatggccgcctctgtgaaggagcagagcaccaagcccatccccctgccccagagcaccccaggagagggggacaatgatgaggaggaccccagcaagctgaaggaggagcagcacggcatctctgtgacaggcctgcagagcccagaccgggacctgggcctggagagcaccctcatcagcagcaagccccagagccacagcctgagcaccagcggcaagtctgaggtgcgggacctgtttgtggccgagcggcagtttgccaaggagcagcacacagatggcaccctgaaggaggtgggggaggactaccagatcgccatcccagacagccacctgcctgtgtctgaggagcgctgggccctggatgccctgaggaacctgggcctgctgaagcagctgctggtgcagcagctgggcctgacagagaagtctgtgcaggaggactggcagcacttcccccgctacagaacagccagccagggcccccagacagattctgtcatccagaacagcgagaacatcaaggcctaccacagcggggagggccacatgcccttcagaactggaactggagacatcgccacctgctacagccccaggaccagcacagagagctttgccccccgggacagcgtgggcctggccccccaggacagccaggccagcaacatcctggtgatggaccacatgatcatgaccccagagatgcccaccatggagcctgagggcggcctggatgattctggagagcacttctttgatgcccgggaggcccacagtgatgagaaccccagtgaaggagatggagctgtgaacaaggaggagaaggatgtgaacctgcgcatcagcggcaactacctgatcctggatggctatgaccctgtgcaggagagcagcacagatgaggaggtggccagcagcctgaccctgcagcccatgacaggcatcccagctgtggagagcacccaccagcagcagcacagcccccagaacacccacagtgatggagccatcagccccttcaccccagagttcctggtgcagcagcgctggggcgccatggagtacagctgctttgagatccagagccccagcagctgtgccgacagccagagccagatcatggagtacatccacaagattgaggccgacctggagcacctgaagaaggtggaggagagctacaccatcctgtgccagaggctggccggcagcgccctgacagacaagcacagcgacaagagctag

SEQ ID NO: 185811 - DNA, 4635 bp, Artificial Sequence
  derived and/or modified sequence
atgagcggcacccagagcaccatcaccgaccggttccccctgaagaagcctattaggcacggatccatccttaatagggagagcccgacggacaagaagcaaaaagtggagcggatcgctagtcatgatttcgatcctacggactcctcctcaaaaaaaactaaaagctcatcagaggaatcacggagtgagatctacggcctggtgcagcggtgcgtcattatccaaaaagacgataacggattcggactcacggtcagcggcgataacccggtattcgtccagagtgtgaaggaggatggtgctgctatgagagcaggcgtccagactggggacagaatcatcaaagtgaacggcactttagtaacccattctaatcacctggaggttgtgaagctgatcaaaagtggaagttacgtagcgctgacagttcagggcaggccaccaggcagtcctcaaattccattggcggattccgaagttgagccatcggttattgggcacatgagtcctataatgacctccccccatagtcctggagcaagtggtaacatggagcgcattaccagtccggtgcttatgggtgaagagaataacgtcgtgcacaatcagaaagtggaaattctgcgtaagatgctccagaaggagcaggagagactacagctgcttcaggaggactataacagaactcccgcccaacgactattaaaagagatacaagaggccaagaagcatatacctcagttacaggagcagctctccaaggcaaccggctcagcacaggacggggccgtcgtgacgcccagtaggccactgggggataccttaacagttagcgaagccgagacagacccgggcgacgtgctggggcgcacagactgctccagtggtgatgcctcaaggcctagctctgacaatgcagattctcccaagtctggcccgaaggaacgaatttacctggaggagaatccagaaaagtctgaaacaatccaggacaccgatacccagagtctggtaggcagcccttccaccaggatcgctccccatattatcggcgctgaagacgacgacttcggcacagagcatgagcagatcaatggccagtgtagttgctttcaatcaatcgagcttttgaaatcaagacctgcccacctagctgtgttcctgcaccatgttgtcagccagtttgacccagccactctactctgttatctttactctgacctgtataaacacactaattctaaggaaaccaggcggatcttccttgagttccaccagttcttcctcgaccgatctgcccatttgaaggtgtccgtgcccgacgagatgtccgcggatctagagaaacgcagacccgaactcattcctgaggatctccaccgccactatattcagacaatgcaggagagggtccacccagaagttcagaggcacttggaggatttcagacagaagagatcaatggggctgacattggcagaaagcgagctaaccaaattggatgcagagagagacaaggatcggcttaccttggagaaagagagaacctgcgccgaacagatcgttgctaaaattgaagaggtgttgatgacagctcaagctgttgaggaggacaaaagcagcacgatgcagtacgtgattctaatgtacatgaagcacctaggggtgaaagtcaaggaacctaggaacctggaacacaagagaggccgaatcggatttctgcctaaaattaagcagtccatgaagaaggataaagaaggggaagagaagggaaagaggaggggattcccctccatcttaggacctccccgtcgcccaagccgccacgataactctgccattggccgcgctatggaattgcagaaggcccgacaccccaaacacctgagcaccccgtcatccgtttcgccagagccccaggactcagctaagcttcgccaaagcgggctggcgaatgaaggtaccgatgccggttacctgcctgctaattctatgtcctccgtcgcatcaggcgcatccttcagccaagaaggcggcaaggagaacgacacaggaagcaaacaggtgggcgaaacatcggctccgggagataccctagacggtacaccgcggacactaaacacagtgtttgatttcccccctcctcctctggatcaggttcaagaggaggagtgcgaggtcgaacgcgtgactgaacacggcacgcctaagccattccgaaagtttgattctgtagcgttcggagagtcacagagtgaggacgaacagttcgagaacgatctcgagaccgatcctccgaattggcaacagctggtctccagagaagttctgttaggactcaagccctgcgaaatcaagcgccaggaggtgataaacgagctcttttataccgagcgtgcccatgtgcgaactctcaaggtgttagaccaggttttctaccagagagtatcacgagaaggtatcctttcaccgtccgagcttcggaagattttcagcaacctcgaagatatattacagttacatattgggctgaatgagcagatgaaggcggttcgtaagaggaacgaaacaagtgtgatcgatcaaattggagaggacctgctgacctggttttctggacccggggaagaaaagctcaagcatgcggccgctacattttgtagcaatcagcctttcgcattggagatgatcaaatctcgccaaaagaaggattctcgcttccagactttcgtccaggatgccgaatcaaacccattatgtcggagactgcagttgaaggacattattcccacacaaatgcagaggctcactaagtatcctcttctgctcgacaacatagctaagtacacggagtggcctaccgagagggagaaggtgaaaaaggcagcagaccattgtaggcagatactgaactatgtcaaccaggctgtgaaggaagcggagaacaagcagcgtctggaagactaccagcgcagattggacacaagtagcctcaaactgtccgaataccctaatgtggaggagctgcggaacctggatctcacaaagcgcaaaatgatccacgagggaccgctggtgtggaaggtgaaccgcgataagactattgatctctatacccttctgctggaggacatcctcgtgctgctgcagaaacaggatgaccggctggttctgaggtgtcattccaaaattcttgctagcaccgccgattctaagcatacctttagcccagtgatcaaattaagtaccgtgctggttcggcaggtggcaacggataataaagccctgttcgtgatctcaatgtcggataatggagcgcagatctacgaactcgtcgcgcagaccgtatccgaaaaaaccgtttggcaggacttaatatgtaggatggccgcgagtgtgaaagagcaatccaccaaaccaatacccctaccccagtccacccctggtgagggtgacaacgatgaagaggaccccagtaaactgaaggaagagcagcatggaatttccgtcaccggactgcagagccccgacagagacctcggcctggagtccacccttatatcaagcaaacctcaatcccattcactgtcgacctccggcaagagcgaggtcagggatcttttcgttgctgagcggcagttcgccaaggagcaacatacagacggtacactgaaggaggtgggagaggattatcaaatcgcaattccagatagccatcttccagtgtccgaggagagatgggctctggatgccctaaggaacttgggtctacttaaacagctgttagtacagcaactcgggctgaccgagaaaagtgtacaagaggactggcagcacttccctcgctatagaacagctagtcaggggccccagaccgactcggtgatccagaattccgaaaatatcaaggcctatcattctggggagggacatatgccttttaggacgggtactggtgacattgccacctgctattctccaagaacttccactgagtcttttgccccacgggacagtgttggactagctccccaagactctcaagcttctaacatcctggtgatggatcatatgattatgacacctgagatgcctaccatggagccagaaggagggttagacgatagtggggagcattttttcgacgccagggaggcccactcagatgaaaatcccagtgagggcgatggagcggtgaacaaggaagagaaagacgttaacctgcgcattagcgggaactacctgatcctagatggatatgaccctgtgcaagaatcgagcacagacgaggaggtggcctctagccttacactgcagccaatgactggcattcctgcggtcgagtctactcaccagcagcagcactctccccagaacacccatagcgacggcgctatctcgccattcactcctgagttcctggtccagcaaagatggggtgctatggagtacagctgcttcgagatacagagcccctcctcttgcgctgacagccagtcccagatcatggaatatattcataagattgaagccgatttagagcacctgaagaaggtggaagaatcctatactatcctgtgtcaacgcctcgctggtagcgctctgacagacaagcacagcgataagtcttag

SEQ ID NO: 185812 - DNA, 4634 bp, Artificial Sequence
  derived and/or modified sequence
atgtctgggacgcaaagcaccattaccgaccggttccctctgaagaagccaattcgacatggctccattttaaatcgggagagccctactgacaagaagcaaaaagtggaacggatcgccagccacgattttgatccaacagattctagttctaagaagacaaaatcgagttccgaggaaagtagatcagaaatctacgggttggtgcaaagatgcgtcattattcagaaggacgataatggattcggtttgacagtcagtggtgacaaccctgtgttcgttcagagtgtgaaagaagatggagcagccatgcgggcaggcgtccagacgggagataggataataaaagtcaacggcacactggtgacccactcaaaccacctggaggtcgtaaagctcattaagagcggtagctatgtggccctcacagttcagggccgaccaccaggctccccccagatccccttggcagacagtgaggtggagcctagcgtgatcgggcatatgagcccaatcatgacttcacctcattcaccgggagcttcaggaaacatggaacgcatcaccagccccgtgctgatgggggaagagaataacgtggttcacaatcagaaagtggaaatccttcgtaaaatgctgcaaaaagaacaggagagactgcagctgctgcaagaggactacaacagaactcctgcgcagagactgctgaaggagatccaggaagcgaaaaaacacattccccagctccaagaacagctgagcaaagctaccggaagcgcacaagacggcgcagtggtaactccatccagacccctgggggatacgctgacagtttctgaggcagagacagaccccggagacgtgctcggccgaactgactgtagcagcggagacgcctcccggccatcgtcagacaatgccgatagcccgaagtccgggccaaaggaaagaatttacttagaagaaaaccctgaaaagagcgagaccattcaagacaccgatacccagagccttgtagggtcgccttcgacccggatcgctccccatataattggggctgaagatgatgatttcggcaccgagcacgagcagatcaacggccagtgtagctgtttccagagtattgagctcctgaagagtagacctgctcatcttgcggtttttctgcatcatgttgtctcacaatttgatcccgctacccttctgtgctacttatattcagatctctacaaacataccaacagcaaggagacaaggagaatttttctggagtttcatcagttttttctggatcggtccgcacatctgaaagtgtccgtgccagatgagatgagtgccgatctggaaaagcgccgaccagagcttatccctgaagacctgcatcggcattacattcaaaccatgcaggagcgtgtacatcccgaagtgcagaggcacttagaggattttcggcagaaacgctccatgggattaaccttagccgagtcagagttgaccaaactggacgcggaaagggataaagataggctcacattggaaaaggagcggacatgtgccgaacagatagttgccaagatcgaggaggtccttatgacagcccaggctgttgaagaggataaaagctctaccatgcagtatgttattctgatgtatatgaaacatttgggagtaaaagtgaaggagccccgtaacctcgagcataaaaggggccgaatcggcttcttaccaaagataaagcagtcaatgaaaaaagataaggagggggaagagaagggcaaaaggcgcggtttcccaagcatcttgggaccaccccgacggcctagccgtcacgacaatagcgccatcggccgagcaatggaactgcagaaagctcgccatcctaagcacctgagcaccccatcctctgtcagtccagaaccacaagattccgctaagctgcgccagtctgggctcgcgaatgagggcactgatgctggctacttgccggctaatagtatgtcgtccgtggccagcggtgcctcctttagtcaggaaggaggcaaggaaaacgacacgggttcaaaacaggtcggtgagacgagtgcacctggggacacactggacggtacccctcggacattaaatacagtgtttgatttcccgcctccccctctcgaccaggtgcaggaagaagagtgtgaggtcgaacgagtgaccgagcatggcacgcccaaaccttttaggaaatttgactctgtggcattcggagagagccagtccgaggacgaacagtttgaaaatgacctggagacggacccacctaactggcagcagctcgtaagtagggaggtgttgctcgggctgaagccttgtgagattaagcggcaggaagtgatcaatgagcttttttacaccgaaagggctcatgtgcgcacgctgaaggtcttagatcaggtgttttatcagcgcgtatccagagagggcattctgagcccttcagagctgaggaagatattctctaacttagaggacatcctgcaattgcacatcggcctcaacgagcaaatgaaggctgttaggaaaaggaatgaaactagtgtgatcgatcaaattggagaagaccttctgacatggttttccggacctggcgaggaaaaactcaagcacgctgctgcaactttttgtagcaatcagcccttcgctctcgaaatgattaagagccgccaaaagaaagattcaagattccagacattcgtccaagatgctgaaagtaaccccctatgtcggaggctgcagctcaaggatatcattcccacccagatgcagaggctgacaaaataccctctcctgctcgataatattgcaaagtacaccgaatggccgactgagcgcgagaaagttaaaaaagctgcggaccactgccgtcaaatcctgaactatgtcaatcaggctgtaaaagaagccgagaataaacaacggttagaggattatcaaagaagactggatacatcatccttaaaactcagtgagtacccaaatgttgaggagttaaggaacctggacctcactaagaggaagatgattcacgaagggcctctggtgtggaaagtaaatcgcgacaaaactattgacctgtacaccctgctgctggaagatattctcgttctgctccaaaagcaggacgacaggctcgtgctgcgatgccattcaaagattctggccagtactgccgactcgaaacacacatttagtccagtgatcaaactcagtaccgtcctggtgcgtcaggtggctacagataataaagccttattcgtcatttctatgagcgataatggggcacaaatctacgagctcgtagcccagacggtgagcgaaaagacagtgtggcaggacctcatctgccgaatggcagctagcgttaaagaacaatctactaagccaatcccactgcctcagtcgacccctggtgagggcgataatgacgaggaagacccgtcaaagctgaaagaggaacagcacggcatttcagtgacagggctccagtctccagatagagatctcggcctagagagtacgctgatttcctccaagccacaaagccactcattatccacatctggtaaaagcgaggttcgcgacctttttgtagccgaacgccaatttgcaaaggaacaacacaccgacggcactctgaaggaggtgggggaggactaccagattgcaattccagattctcacctgccagtgagcgaagaaaggtgggccttggacgctcttcgcaacctagggctgctaaagcaactgctcgtacagcaattgggattgacggaaaagagcgttcaggaagactggcaacattttcctaggtacaggaccgcatcccaggggccacagactgattctgtgattcagaactcggagaacataaaggcttaccatagcggggagggacacatgccgttccgtacgggcacaggagacatcgcaacctgttatagcccacgcacttcaacagaaagtttcgcaccgagggattccgttggattggcaccgcaagacagccaagcctcaaacatcctggtgatggaccacatgattatgacccctgagatgccaaccatggaacctgagggcggactggatgattcgggggaacacttcttcgatgctcgggaggcccattcggatgagaacccgagtgaaggggacggggcagtcaataaagaggagaaggacgtgaacctgcggatctccggaaattatcttatcctcgacggatatgatcctgttcaggagtcatctaccgacgaggaggtcgcctcctccttgaccctccaacctatgactggaataccagctgtcgagagcacccaccagcagcagcatagccctcagaatacccattcagacggagcgatctccccattcacaccggagttcctcgtccagcagaggtggggggcaatggagtactcctgctttgagattcagtcaccatcttcatgcgcagactcacagtcccagatcatggaatatattcacaagattgaggccgacctggagcatctgaaaaaagtggaggagagttacacaatactgtgccagcgactggcgggatccgctttaaccgacaaacacagtgataagagcta

SEQ ID NO: 185813 - DNA, 9660 bp, Artificial Sequence
  derived and/or modified sequence
gttgaccccttacagtcggatggtctagatgactgaatggagttttgagttggacttttgtgtccctgacggagttgggcctgatcccagagcactgggggtggggaggaggtgttactgtaaaatgcaagttggataaaaggaggacctctcgccaagggccccaatgagtggcacacagtctactatcaccgacaggtttcccctcaaaaaacctataaggcatggaagtattttgaaccgagagtcaccaacagataagaagcagaaagttgagcgcattgcatcacatgattttgaccccacagatagctcctccaagaagacaaagtctagttcagaggagagtagatccgagatatatggtcttgttcagcgttgcgtaatcatccagaaagatgacaatggatttgggctgacggtcagtggagacaatccagtcttcgtacagtctgtcaaagaagatggagcagccatgcgggctggagtacagacaggtgatcgaatcatcaaggtgaatggaactctggtgactcattcaaatcatctggaggtggtgaagctaatcaaatctggttcctatgtagctctcactgttcagggacgcccacctgggtcgccccagattccacttgccgactctgaagtagagccgtcagtcattggacatatgtctcccatcatgacatctcctcattcacctggagcatctgggaatatggagagaatcactagtcctgtgctcatgggggaggaaaacaatgtggttcataaccagaaagtagaaattctgagaaaaatgttacagaaagaacaggaacggctacagttattgcaggaagattacaaccgaacacctgcccaaagattgctaaaagagatccaagaggccaagaaacacattcctcagctgcaagagcagttatccaaagccacaggctctgctcaggatggagctgtagttacaccctccagacctttaggggacaccctaacagtcagtgaggcagaaacagatcctggagatgtactgggcaggactgactgtagcagtggagatgcttctcggcccagtagtgacaatgcagatagtcccaagagtggcccaaaagagagaatttatctagaggaaaacccagagaaaagtgaaacaattcaggacactgacactcaatcacttgtcggaagtccctcaacccgtatagcacctcatattattggagcagaagatgatgattttggtactgaacatgaacagatcaatggacagtgcagctgtttccagagcattgaattactaaaatctcgcccggctcatttggctgttttcttacaccatgtagtttcacaatttgaccctgcgactttgctctgttatctctattcagacctgtataaacataccaattccaaagaaactcgtcgcatcttccttgagtttcatcagttctttctagatcgatcagcacacctgaaagtttctgttcctgatgaaatgtctgcagatctagaaaagagaagacctgagctcattcctgaggatctgcatcgccactatatccaaactatgcaagaaagagtccatccagaagttcaaaggcacttagaagattttcggcagaaacgtagtatgggactgaccttggctgaaagcgagctgactaaacttgatgcagagcgagacaaggaccgattgactttggagaaggagcggacatgtgcagaacagattgttgccaaaattgaagaagtattgatgactgctcaggctgtagaggaagataagagctccaccatgcagtatgttattctcatgtatatgaagcatttgggagtaaaagtgaaagagcctcgaaatttggagcacaaacggggtcggattggatttcttcccaaaatcaagcaaagtatgaagaaagataaagaaggggaagaaaaagggaagcgaagaggattccccagcatcctgggacccccacggagaccaagccgtcatgacaacagtgcaattggcagagccatggaactacagaaggcgcgccaccctaagcacttatccacaccctcatctgtgagtcctgaacctcaggactctgccaagttgcgccagagtgggttagcaaatgaaggaacagacgctggatacctgcctgccaattccatgtcttctgtagcttcaggggcctctttttcccaggaaggagggaaagagaatgatacaggatcaaagcaagttggagaaacatcagcacctggagacaccttagatggcacacctcgtactctcaatactgtctttgatttcccaccacctccattagaccaagtgcaggaggaggaatgtgaagtagaaagggtgactgaacatgggacaccaaagccctttcgaaagtttgacagtgtagcttttggagaaagtcaaagtgaggatgaacaatttgaaaatgacttagagacagatccacccaactggcagcagcttgttagtcgagaagtgttactgggactaaaaccttgtgaaatcaaaagacaggaagtgattaatgaattgttctacactgaaagagctcatgttcgaacactgaaggttcttgatcaagtgttctatcagcgagtatccagagaaggaattctgtcaccctcagagctacggaaaattttttcaaacttggaagatattcttcaacttcatattggattgaatgaacaaatgaaggctgttcgaaagagaaatgagacctctgttatcgatcagattggggaagatttgctgacatggttcagcggaccaggagaggagaaattgaaacatgctgctgctaccttttgcagtaaccaacctttcgccctggaaatgatcaaatctcgtcagaaaaaggattctcgatttcagacttttgtgcaagatgctgaaagtaatccactgtgtcgtcgtcttcaactgaaggatattattcccactcaaatgcaaaggcttactaagtacccacttctgttggataatattgccaaatacacagaatggccaacagaaagggagaaggtgaagaaagctgcagatcactgtcgtcagatcttaaattatgtaaatcaggctgtcaaggaggcagaaaacaagcagcgcctagaagattatcagcgtcgccttgatacctccagcctgaagttgtcagagtacccaaatgttgaagagctcaggaatttggatttaacaaaaaggaagatgattcatgaagggccattggtttggaaggtgaatagagataaaactattgatttatacacgttgctgctggaagacattcttgtattgttacaaaagcaggatgatagactggttttaaggtgtcatagtaagattctggcatctacagctgatagcaaacacacgtttagccctgtcattaagttgagtacagtgttggttcgacaagtggcaacagataacaaagctttattcgtcatttccatgtcagacaatggcgctcagatttatgaactggtggcacagacagtttctgaaaagactgtctggcaggacctaatctgtcggatggctgcatcagtgaaggagcaatccacaaagccaattccattaccacagtcaacacctggcgaaggagataatgatgaagaagatccttcaaaattaaaagaggagcagcatggcatttcagtcactggtttgcagagtccagacagagatttgggattagaatctaccttaatatcgtcaaaacctcagtctcattcactgagtacctctgggaaatcagaggtacgtgatctgtttgtggctgagagacagtttgcaaaggaacaacatacagatgggacactaaaggaagttggagaagattatcaaatcgcaatcccagattcacacctgcctgtctcagaagaacggtgggcattggatgcactaagaaatttgggtttgttgaagcagttgctggtgcaacagctaggtttgactgagaagagcgttcaggaagactggcaacatttcccaagatacagaacagcctctcaggggccgcagacagacagtgtcatccagaactctgaaaatattaaggcctatcattctggtgaaggacatatgccctttagaactggaactggtgacattgcaacttgttacagtccacggacttcaactgaatcttttgctccacgggattcagtgggactggcaccccaggatagccaggcaagtaacattttagtaatggaccacatgattatgaccccagagatgcctaccatggagccagaagggggtcttgatgacagtggagagcacttttttgatgcccgtgaagcacatagtgatgagaatccatcagaaggtgatggagcagttaacaaggaagagaaggatgttaatttacgcatctcaggaaactatttgatccttgatggctatgacccagtgcaggagagttccacagatgaggaggttgcttcctcacttaccctgcagcccatgacaggcatccctgctgtggaatccacccaccagcagcaacattctcctcagaatactcactccgatggggcaatttcaccattcacccccgaatttctggtccagcagcgctggggagctatggagtattcctgttttgagatccagagtccctcctcttgtgcagattcacagagccagatcatggagtacattcataagatagaggctgaccttgaacacttaaagaaggtggaggaaagttacaccattctttgccaaaggctggctggatcagccctcacagacaagcactcagataaaagttagagccgcatgtcctggaggtgactgcaggttgttggatttggagtatcggccgtgtctcaccacatcctggctccagtgtggatgcagagagagtgtgacagaggatctgcctgtgaaccacctgggattagtcaagtcccaaggtgcccagagtgggactagttcttcacagtgtggcagctgcactaatctgtttgtgagggaatatccattccctcactctactctcctcactatcggaaattcattttgattcagaataaaaaccaaatgtatagagctttgggtgtaggatatgaaattgtacttagatttaagaaaaagagaaaatcagatgtatttatttgacttcattccgtatttgaaagcacattttaatttttatttgccttgttttgttttaattgagtagtgagagttttagacctttgtctttagtacacccaaggatcaactgctcctgaagcaaagaggtcaggatggagtatgcagaagttgggtagagaggttaagaagaggaggaagtgagacggggaagggaggagcaccttgcttcactatacagtattccaagctctctgctgtccagtaggctgcttctctgagggtcacctcaaaggtatgctatgccgtgtggctcttatgtgcccaggtggtgtggtcagagagtggatgggcttcctcccgccctgaggcaagcacctcttctctgtagctgggatcaaccacaattaataggaatcctcaacatactaaatagcaggcacttgaaaatgggtgtgttttcttccattgtcgtcttttctattgagggttgggatttgggtgggagaggaaagcaaattttattttcttgactataaatttgttattcttggtatcatttcatttttataattatacattagacattggcacttgtgtaaaactgtccctgcagattgagcaggaagtaaaaacaaatggaaatgcttcggatagtggcaggggtgggggttgctaaggaaagggtgggatgggagtgggtaaagagtttgggaaggttatctaactgaatcactactgagttgaatcatggctatcattagccacaggtactgctgattataaggccagtaaaattttagtacctggaggtttgactctaatttttgcactgatggtgccaaagggccctgagtcaaaaggatagccaagggtggagtggaaaaagatatggtgaaggcagaactgctcacaccagctccagaagcacgtcctctgacttcactgccgcagctctttccacacggggccgtgattgaccctaaaaattgcagaccagcacatacactggacactgcaggcaaggtgttggtaactgcctgctctaggatgaatagtagcgttagcagcaccctacagagggtaagtttcagaattgtaatttgagaactccttcaattatattgactttctttggttttccttgtgcattaggtatatattttttgaagtatttttgccaactaaaatgaagtctgtaaattctgttaataaacaaggagttcatccgttgctcacatctttcattggtgccctctgaactctgtgggttgctaggatgtaattttaatgcttccctgcagtccaaagatgattttttcaccacaaatggtaagggatgcccacctacttttataaacaccactgcaacttaacaagtttatttatctatgtccagatttctgtttctgtcctaaattgatctgtgtttttaggtggatcaacttggatctttagacctcatctataaattgaaattatatttttagtcataagccaagtacaatctaactcagaatgggattaaaaattttagaagcagaagctaatatataaatgaagtttgggatttggaactttctgtatctcttaggaggaacaagtaaaaaccaaatggttacattgtgctgctagaaataatgtcattctcaattaaaagggttacacctgtagccacttgacactaacaccatcgagggcaattaatcaggagaaaagtaaatataaaaactttgctcttaacgtcacacactacagggtaattatgtaattctctagcactcaattaagaagcttgtaggttagcaaaatttcagtttctctagttcagccagtgtcttgtccttagtaattatttgctttccctgcagttcaatttctccttggaactctaacaggactaactggaaaaatactttgaccatagctctagtacttccaaataaattcatatctagattttcaaacaaagccccaagatgaagtctaattctgaaaatatctcacaatttttgaatgttctttttatcttaccgacctaacttctcttttccctcccaacttggcctcccacacgttccatttcattttggccattatagtcacatccgtttgactttggttgtgacatcttcctttcaggatgatggaattagatgcagtctgtctttgagtgagactggtcaccatcagaggagttttttctaagtgacgtgactagaagttgaaatctacttccctgctaaagggcacaggggtggtgtacaaagaaagctaccttcccagagcaagcaggctgcattttagctatggaagtgacctgctgtgacactgtgctctcttctgtgggcttaatggttcctttgctatgaagtggcaaattacatgtagagtgtctccttccttttcagagaacagttaatcaaggcaaatcagcaagcccccaaagtgctgtaatttaacatcatgattaccaccttcgaagctatatattttgcatactttaaaatcacctaacttggactgcttgaattacattggcttttagaaccgaaattgtaactatgtattgtatttcatgggaggtatattttatgagctttttggctttcttttttcccacagcaactgccaatgaaggatgaatcccctttttaaaaagttgttgttgttgttgtttatttgattttgagttaggagggataatagagaagtccatttaaaaattatttttagaagctaaagaaagtaattatgcttcctgtgaattgtcttttactggcatctttgttttcctctttgatgttagtaaatttggtgtaatacgtggggcttccatatttcaaagtggaagctttcttctctgaagtcgatatatggttttgaattactagagctttggtcagtatttccttccctatatgtcacagagggcaccactgagaactgcgtgcataggacctcaaaatacaaaattagcagggcctcacagtcagcttcctcatggctagtttttcccccttatattacaatttttgttttataagtcatttttttcctgatatttccaccacttttcagagtcatctacaaaatttttctttcctcaagaaaagagttccttttgccttattccttatgccttccccactggtattgagggttttgataataaattggtaggaaaaaaaagtacctcctagaaggaagccttccccaccatttccaggtgccaactgctaagcagatatattccaaaaatggtaactgtcatgtgcacactgttggttatttttaataagcctcttcctactagaacattttattttccttgttcaccatacaatcatgtactctttaacagaaattgcttttaaaaaatatctggaactatctttaaaaaaactttattaataatcatgtatttttactgatcacattttgaaatgcctaaaagactttattgttctaattatccagatgtacctttgtaaaatagctcttttatgaattagctgataaggctgtatgtttctggaacaaaatattggtcatctaaaaactttctgttttctggggtctgggaaaatagaaaataagatttcaaatattaaataagcttaaaggaaccaagcatgtgactttttatttgtattctggttgatttgtcttgtccaagttatattagaaaagttgaggagtcgaggagcctgtaattaattttcctgtcagtgactgtcagacatcttcctgcttattagagcatccctagcaacaaggctaaaccttcatgacagtgctggcaggtgggcttgccctagcatgtggggcaggtttgttgtttttttaatagctttattgagatattcacatatcatataattcatccatttaaagtgtataatcagatgggttttggtatattattgatttttaattgtggtgaaatatatatataacaaaatttgctattgtaactatttttaagtataaagttcagtgaggtaggccagcttttatgacgcacctgaagataactttggttttaatcctaccctaaatgaagcatatgcctctatttttcctgtccccagtgctgggcttcttcacataccaacatttctgtgcttttaccaacagcattttagctcagaaggctcgcttactttgggcatttgctgtattttggttttgaaatacttgtaatttgacttattcttgggataatattttagttttcagtcattcaagggcacatttggctgacggagctaataagcgtaataaaatgcttagtagtttataccatcttttagttaaacattttaaagattaagactattcaaatgtactttgcggaaattaacctgtttgtatgcctggctttgtttacaaacatatatctatatctatatatatagatacagatacagatacatatctggtggaacaaagaaatacctgtaccattcccacttgctctttgatagccacctcctaggaatggagacaataaaactctgtatttgcatgtg

SEQ ID NO: 185814 - DNA, 4635 bp, Artificial Sequence
  derived and/or modified sequence
atgagcggcacccagagcaccatcaccgacagattccccctgaagaagcccatcagacacggcagcatcctgaacagagagagccccaccgacaagaagcagaaggtggagagaatcgccagccacgacttcgaccccaccgacagcagcagcaagaagaccaagagcagcagcgaggagagcagaagcgagatctacggcctggtgcagagatgcgtgatcatccagaaggacgacaacggcttcggcctgaccgtgagcggcgacaaccccgtgttcgtgcagagcgtgaaggaggacggcgccgccatgagagccggcgtgcagaccggcgacagaatcatcaaggtgaacggcaccctggtgacccacagcaaccacctggaggtggtgaagctgatcaagagcggcagctacgtggccctgaccgtgcagggcagaccccccggcagcccccagatccccctggccgacagcgaggtggagcccagcgtgatcggccacatgagccccatcatgaccagcccccacagccccggcgccagcggcaacatggagagaatcaccagccccgtgctgatgggcgaggagaacaacgtggtgcacaaccagaaggtggagatcctgagaaagatgctgcagaaggagcaggagagactgcagctgctgcaggaggactacaacagaacccccgcccagagactgctgaaggagatccaggaggccaagaagcacatcccccagctgcaggagcagctgagcaaggccaccggcagcgcccaggacggcgccgtggtgacccccagcagacccctgggcgacaccctgaccgtgagcgaggccgagaccgaccccggcgacgtgctgggcagaaccgactgcagcagcggcgacgccagcagacccagcagcgacaacgccgacagccccaagagcggccccaaggagagaatctacctggaggagaaccccgagaagagcgagaccatccaggacaccgacacccagagcctggtgggcagccccagcaccagaatcgccccccacatcatcggcgccgaggacgacgacttcggcaccgagcacgagcagatcaacggccagtgcagctgcttccagagcatcgagctgctgaagagcagacccgcccacctggccgtgttcctgcaccacgtggtgagccagttcgaccccgccaccctgctgtgctacctgtacagcgacctgtacaagcacaccaacagcaaggagaccagaagaatcttcctggagttccaccagttcttcctggacagaagcgcccacctgaaggtgagcgtgcccgacgagatgagcgccgacctggagaagagaagacccgagctgatccccgaggacctgcacagacactacatccagaccatgcaggagagagtgcaccccgaggtgcagagacacctggaggacttcagacagaagagaagcatgggcctgaccctggccgagagcgagctgaccaagctggacgccgagagagacaaggacagactgaccctggagaaggagagaacctgcgccgagcagatcgtggccaagatcgaggaggtgctgatgaccgcccaggccgtggaggaggacaagagcagcaccatgcagtacgtgatcctgatgtacatgaagcacctgggcgtgaaggtgaaggagcccagaaacctggagcacaagagaggcagaatcggcttcctgcccaagatcaagcagagcatgaagaaggacaaggagggcgaggagaagggcaagagaagaggcttccccagcatcctgggcccccccagaagacccagcagacacgacaacagcgccatcggcagagccatggagctgcagaaggccagacaccccaagcacctgagcacccccagcagcgtgagccccgagccccaggacagcgccaagctgagacagagcggcctggccaacgagggcaccgacgccggctacctgcccgccaacagcatgagcagcgtggccagcggcgccagcttcagccaggagggcggcaaggagaacgacaccggcagcaagcaggtgggcgagaccagcgcccccggcgacaccctggacggcacccccagaaccctgaacaccgtgttcgacttcccccccccccccctggaccaggtgcaggaggaggagtgcgaggtggagagagtgaccgagcacggcacccccaagcccttcagaaagttcgacagcgtggccttcggcgagagccagagcgaggacgagcagttcgagaacgacctggagaccgacccccccaactggcagcagctggtgagcagagaggtgctgctgggcctgaagccctgcgagatcaagagacaggaggtgatcaacgagctgttctacaccgagagagcccacgtgagaaccctgaaggtgctggaccaggtgttctaccagagagtgagcagagagggcatcctgagccccagcgagctgagaaagatcttcagcaacctggaggacatcctgcagctgcacatcggcctgaacgagcagatgaaggccgtgagaaagagaaacgagaccagcgtgatcgaccagatcggcgaggacctgctgacctggttcagcggccccggcgaggagaagctgaagcacgccgccgccaccttctgcagcaaccagcccttcgccctggagatgatcaagagcagacagaagaaggacagcagattccagaccttcgtgcaggacgccgagagcaaccccctgtgcagaagactgcagctgaaggacatcatccccacccagatgcagagactgaccaagtaccccctgctgctggacaacatcgccaagtacaccgagtggcccaccgagagagagaaggtgaagaaggccgccgaccactgcagacagatcctgaactacgtgaaccaggccgtgaaggaggccgagaacaagcagagactggaggactaccagagaagactggacaccagcagcctgaagctgagcgagtaccccaacgtggaggagctgagaaacctggacctgaccaagagaaagatgatccacgagggccccctggtgtggaaggtgaacagagacaagaccatcgacctgtacaccctgctgctggaggacatcctggtgctgctgcagaagcaggacgacagactggtgctgagatgccacagcaagatcctggccagcaccgccgacagcaagcacaccttcagccccgtgatcaagctgagcaccgtgctggtgagacaggtggccaccgacaacaaggccctgttcgtgatcagcatgagcgacaacggcgcccagatctacgagctggtggcccagaccgtgagcgagaagaccgtgtggcaggacctgatctgcagaatggccgccagcgtgaaggagcagagcaccaagcccatccccctgccccagagcacccccggcgagggcgacaacgacgaggaggaccccagcaagctgaaggaggagcagcacggcatcagcgtgaccggcctgcagagccccgacagagacctgggcctggagagcaccctgatcagcagcaagccccagagccacagcctgagcaccagcggcaagagcgaggtgagagacctgttcgtggccgagagacagttcgccaaggagcagcacaccgacggcaccctgaaggaggtgggcgaggactaccagatcgccatccccgacagccacctgcccgtgagcgaggagagatgggccctggacgccctgagaaacctgggcctgctgaagcagctgctggtgcagcagctgggcctgaccgagaagagcgtgcaggaggactggcagcacttccccagatacagaaccgccagccagggcccccagaccgacagcgtgatccagaacagcgagaacatcaaggcctaccacagcggcgagggccacatgcccttcagaaccggcaccggcgacatcgccacctgctacagccccagaaccagcaccgagagcttcgcccccagagacagcgtgggcctggccccccaggacagccaggccagcaacatcctggtgatggaccacatgatcatgacccccgagatgcccaccatggagcccgagggcggcctggacgacagcggcgagcacttcttcgacgccagagaggcccacagcgacgagaaccccagcgagggcgacggcgccgtgaacaaggaggagaaggacgtgaacctgagaatcagcggcaactacctgatcctggacggctacgaccccgtgcaggagagcagcaccgacgaggaggtggccagcagcctgaccctgcagcccatgaccggcatccccgccgtggagagcacccaccagcagcagcacagcccccagaacacccacagcgacggcgccatcagccccttcacccccgagttcctggtgcagcagagatggggcgccatggagtacagctgcttcgagatccagagccccagcagctgcgccgacagccagagccagatcatggagtacatccacaagatcgaggccgacctggagcacctgaagaaggtggaggagagctacaccatcctgtgccagagactggccggcagcgccctgaccgacaagcacagcgacaagagctag

SEQ ID NO: 185815 - protein, 1019 aa, Artificial Sequence
  derived and/or modified sequence
MLWRVLLSKRPPFPHPELDFQEAPIPSCPGRLPGRKNSVALAAAPRKEPTGDREKPLPFPVLAPFSNPEHSAPAKVVRAAVPKQRKGSKVGDFGDAINWPTPGEIAHKSVQPQSHKPQPTRKLPPKKDMKEQEKGEGSDSKESPKTKSDESGEEKNGDEDCQRGGQKKKGNKHKWVPLQIDMKPEVPREKLASRPTRPPEPRHIPANRGEIKGSESATYVPVAPPTPAWQPEIKPEPAWHDQDETSSVKSDGAGGARASFRGRGRGRGRGRGRGRGGTRTHFDYQFGYRKFDGVEGPRTPKYMNNITYYFDNVSSTELYSVDQELLKDYIKRQIEYYFSVDNLERDFFLRRKMDADGFLPITLIASFHRVQALTTDISLIFAALKDSKVVEIVDEKVRRREEPEKWPLPPIVDYSQTDFSQLLNCPEFVPRQHYQKETESAPGSPRAVTPVPTKTEEVSNLKTLPKGLSASLPDLDSENWIEVKKRPRPSPARPKKSEESRFSHLTSLPQQLPSQQLMSKDQDEQEELDFLFDEEMEQMDGRKNTFTAWSDEESDYEIDDRDVNKILIVTQTPHYMRRHPGGDRTGNHTSRAKMSAELAKVINDGLFYYEQDLWAEKFEPEYSQIKQEVENFKKVNMISREQFDTLTPEPPVDPNQEVPPGPPRFQQVPTDALANKLFGAPEPSTIARSLPTTVPESPNYRNTRTPRTPRTPQLKDSSQTSRFYPVVKEGRTLDAKMPRKRKTRHSSNPPLESHVGWVMDSREHRPRTASISSSPSEGTPTVGSYGCTPQSLPKFQHPSHELLKENGFTQHVYHKYRRRCLNERKRLGIGQSQEMNTLFRFWSFFLRDHFNKKMYEEFKQLALEDAKEGYRYGLECLFRYYSYGLEKKFRLDIFKDFQEETVKDYEAGQLYGLEKFWAFLKYSKAKNLDIDPKLQEYLGKFRRLEDFRVDPPMGEEGNHKRHSVVAGGGGGEGRKRCPSQSSSRPAAMISQPPTPPTGQPVREDAKWTSQHSNTQTLGK

SEQ ID NO: 185816 - DNA, 3060 bp, Artificial Sequence
  derived and/or modified sequence
atgctgtggcgggtcttgcttagtaagcgccctcctttcccccaccctgaactggattttcaggaagcccccatcccgagctgtccaggacgcctaccaggacgaaaaaacagcgtggctctcgcggcggcgccacgcaaagagcctaccggtgaccgcgaaaaaccattgccgttcccagtactggcgccctttagtaatccagagcactccgcaccggcaaaagtggtccgcgccgccgtgcccaagcagaggaaaggatccaaggtcggggatttcggtgacgccatcaactggcctacacccggcgaaatcgctcataagagtgtccagccccaatcccacaagccccagccaacacgcaagctgccgcctaagaaggatatgaaggaacaggagaaaggcgaagggagcgattcaaaggagagccccaagacgaaaagcgatgagtctggtgaggaaaaaaacggcgatgaagattgtcagcgaggtggccaaaaaaaaaaaggcaacaagcacaagtgggtgcccctgcagatagatatgaagccagaagtcccccgcgagaaactagcatctcgcccaactagacctccagagccccgacacatcccagctaataggggcgagataaagggatcagagtcagcaacatatgtgccagttgctccacctacacccgcctggcagcctgaaattaagcctgagcctgcctggcatgatcaggatgagactagcagcgtgaaatccgacggtgctggtggcgcgcgggcctcttttagaggccggggtaggggtcggggcaggggcagaggcagaggccgaggtggaacacggacacactttgattaccagttcggatacagaaaatttgacggagtcgaaggtccgagaacaccgaagtacatgaataacatcacatattatttcgataatgtgtctagcactgagctgtactccgtggatcaggaacttctgaaggactacattaagcggcagattgagtattacttcagtgtcgacaaccttgaaagagatttcttccttcgaaggaagatggacgccgacggtttcttgccgattacactcatcgcaagttttcaccgggtccaggcccttacaacagacataagcctcatattcgccgcgctgaaggattccaaagtggtggaaatagtcgacgaaaaggtgagacgccgggaagaacctgagaagtggccactccctcctattgtggattatagccagacggacttttcacagctcctcaactgtccggagtttgttccgcgccagcattaccagaaagagaccgagagcgctcccggcagtcccagggccgtgacccccgtacccaccaaaactgaggaagtgagcaacttaaagacgctgccgaagggcctatcagcaagcctcccggatttggactccgagaattggatcgaggtgaaaaagcggcctcgcccttctcctgcccgacccaagaaatccgaggaatctcgcttcagtcatctcacctcactaccacaacaactgcccagtcaacaactgatgtctaaggatcaagacgaacaggaggaattggactttctatttgatgaggaaatggaacaaatggatggtaggaaaaacaccttcactgcgtggagtgacgaggagtcagactacgagatagacgatcgagacgtaaacaagatccttatcgtgactcaaaccccacattacatgaggcgacacccggggggagacagaaccgggaaccacacctcccgggctaagatgtctgctgaactggccaaggtgattaatgatgggcttttttactacgagcaagacctatgggccgagaagttcgagcctgagtacagccagatcaaacaggaagtggaaaacttcaagaaagtgaatatgatttcaagggagcagttcgatactttgactcccgagcctccggtggaccccaaccaggaggtgcctcccggccctccccgattccagcaggtgccaaccgatgctttagccaacaagctgttcggagccccagaaccctcaacaatcgctcgaagtttgccgacgaccgtgccagaatcgccgaactacagaaatacacgcacaccccgtacgccacggacgccccaactgaaagactcctcccaaacatcaagattctatccagttgttaaggaggggcgaactttggatgctaaaatgccaaggaaacgaaaaacccggcacagctcaaatcccccactcgaatcccatgtgggatgggtgatggattctagggagcacaggccaaggaccgcctcaatttcatcaagtccgagcgagggcacacctacagtgggatcatacggctgcacaccccagagcctgccgaagtttcagcaccccagtcatgagctcttgaaagagaatgggttcacccagcacgtgtatcataaatatcggcgccgctgcttgaacgaacggaaaaggttaggcatcggccagagtcaagagatgaatactctttttcgcttctggagcttttttttgcgcgaccattttaacaagaaaatgtatgaggaattcaagcagcttgccttggaagacgcaaaggagggctaccgttacggtctggaatgcctctttcgttattattcctacggcctcgaaaagaagtttagactcgatattttcaaggactttcaagaggagactgttaaggactacgaagctggtcagctgtacggccttgagaagttctgggcgtttctgaagtactccaaagctaagaatttagacattgatccgaaacttcaggagtatctgggaaaattcaggcggttggaggattttcgcgttgaccccccaatgggcgaggagggcaaccacaagaggcatagtgtagtggctggcggcggggggggggaagggcggaaaaggtgtccttcccagtcgagctcaagacccgcagcaatgatatctcaacctcccacaccgcccactggtcaacccgttcgggaagacgcgaagtggacctcacagcattctaacactcagaccctgggaaaatag

SEQ ID NO: 185817 - DNA, 1836 bp, Artificial Sequence
  derived and/or modified sequence
atgaaagaacaggagaagggtgagggcagtgattctaaggagtcaccaaaaaccaaaagcgatgagtcaggcgaagaaaaaaatggcgacgaggactgccagcgaggtggacagaaaaagaagggaaataaacacaagtgggtccctttacagattgacatgaagcctgaggtgcctagggaaaagttagcgtctcgacccacacgaccgccagagccgcgccatatccccgcgaatagaggagagattaaaggatccgaatctgcaacctatgtgcccgtggccccccctaccccggcctggcagcctgagataaaacctgaacctgcctggcatgaccaggatgagacatcctcggtaaaatcggacggcgcaggaggagctagggcctcttttagagggcgaggtcgcgggagaggtcgtggcaggggtcggggaagaggtggtacaagaacacactttgactaccagttcggctatcgcaaattcgatggggtggaaggtcctagaacccccaaatatatgaataacataacgtattacttcgacaatgttagttctaccgaattgtatagtgttgaccaggaactgttgaaggattacataaagcggcagatcgagtattacttttccgtggataatctcgagcgtgacttcttccttaggcgtaagatggacgctgacggcttccttccaatcaccctcattgccagcttccatcgggttcaggcattaacaaccgatatcagtcttatattcgctgctctgaaggactctaaggtggtagagattgtggacgagaaagtgcgcagacgagaagaaccggaaaaatggccactgcctcctattgtggactattctcaaaccgatttctctcaactactgaactgtcccgaattcgtgccccgccagcattaccagaaggagaccgagagtgcccccggcagccctcgcgctgtgacgcccgtcccgacgaagaccgaagaggtcagcaatctgaaaactctccctaagggactctccgccagtctgccggatctggattcagaaaactggattgaggtgaagaaaaggcctcgtccaagtcctgcccggcctaaaaagtcagaagaatctcggttcagccatctgacttcccttccacaacagctcccatcacagcagctcatgagcaaggaccaggacgaacaggaggagctcgattttttgtttgacgaggaaatggaacagatggacggtcgcaaaaacacatttaccgcatggtcagatgaggagtccgactatgaaatcgacgaccgagacgtaaacaaaattctgattgtgacacagacaccacattacatgcgccgtcatcccggaggggatcggacagggaatcacacctcaagagcgaaaatgagcgcagaactggcgaaggtcatcaacgacggactgttctattatgaacaagatctgtgggccgagaagttcgaaccagagtactcacagatcaaacaggaagtagaaaacttcaaaaaagtgaacatgatctcaagggaacaattcgatacacttacacccgagccccccgtggaccccaatcaagaggtgcccccgggacccccaagatttcagcaggtgcccacagatgcactggccaacaagctgtttggtgcacccgagccatctacaatcgccaggagtttgcccacgaccgttcctgagagccccaactatcggaataccaggacccctagaacccctcgtactcctcagctcaaggactcatctcagactagccgattctacccggttgttaaagaagggcgtacactggatgcgaaaatgcccagatag

SEQ ID NO: 185818 - DNA, 6595 bp, Artificial Sequence
  derived and/or modified sequence
gtgaccccaggccctggtcactccatgctttggagggtgcttttgtcaaagaggcctcctttccctcacccagagctggatttccaagaggctcccatacctagctgccctggcagactcccagggaggaaaaacagcgtggccttggcagctgccccgaggaaggagcccacaggtgacagggagaagccattgccattccctgtcctggcccccttcagcaaccctgaacactctgctccagccaaggtggtgagggcagctgttcctaaacagcgcaaaggcagcaaggttggtgactttggagatgcaatcaattggcccacacctggagagatagcccacaagagtgttcagccacagtcccacaagcctcagcctacccgtaaactgccacccaagaaggacatgaaggaacaggagaaaggagaagggagtgatagtaaggagagtccaaaaaccaaatcagatgaatcaggggaggaaaagaatggagatgaggattgccagcgaggcgggcagaagaagaaaggaaacaaacacaagtgggttccattacaaatagacatgaagcctgaagtgcccagagagaaactggcttcacgccccactcgcccaccggagcctagacacatacctgccaatcgcggagagatcaaagggtctgagtctgccacctacgtgcccgtggccccccccaccccagcctggcaaccagagatcaaaccggagcctgcctggcacgaccaggatgagacatcgagtgtgaagagtgatggggctggtggggcgcgggcttccttccgtggccgtggacgggggcgtggtcgcggccggggacgcggccggggtggcactcgaacccattttgactaccagtttggctaccgaaagtttgatggtgtggaggggcctcgtacgcccaagtacatgaacaacatcacctactactttgacaatgtcagcagcaccgagctttacagtgtggatcaggaactgctcaaagactacatcaagcgccagattgaatactacttcagcgtggacaatttagagcgagacttcttcctgcgaaggaaaatggatgctgatggtttcctacccatcacccttattgcttccttccaccgagtgcaggcccttaccactgacatttcactcatctttgcggccctaaaggacagcaaggtggtggagatcgttgatgagaaagttcgtaggagggaggaaccagaaaagtggcctcttcccccaatagtggattattcacagactgatttctcccagcttctcaactgccctgaatttgttccccgtcagcactaccaaaaggagacagagtcggcacctggctctcctcgtgcagtcaccccagtgccaaccaaaacagaggaggtcagcaacctaaagacactacccaagggcctgtctgccagcctgcctgacctggattctgagaactggattgaagtgaagaagaggcctcggccatccccagcacggcccaagaagtcagaggagtccagattttcccacctgacctctctgcctcagcagctgccttcccagcagctgatgtccaaggatcaggatgagcaagaggaactggattttctgtttgacgaggagatggagcagatggatgggcggaagaacaccttcactgcctggtctgatgaggaatctgactatgagattgatgacagggatgtcaacaagatcctcattgtcacccagacaccacattacatgcgccggcacccagggggggaccgcacaggcaaccacacctcgcgtgccaagatgagcgccgaactggccaaggtcattaatgatggcctcttctactatgagcaggacctgtgggctgaaaagtttgaacctgagtattcccagatcaagcaagaagtcgagaacttcaaaaaggtcaatatgatcagccgggagcagtttgacacactgacccctgagccccctgtggatcccaaccaggaagttcctcctgggccacctcggttccagcaagttcctacggatgccctggccaacaagttgtttggtgctcctgagccctccaccatcgcccgctctctaccaaccactgtcccagagtcaccaaactaccgcaacaccaggacccctcgcactccccggacaccacagctcaaagactcaagccagacatcacggttttacccagtggtgaaagaaggacggacactggatgccaagatgcctcgaaaaagaaagacaagacacagttcaaacccacccttggagagccatgtgggctgggtgatggattcccgtgagcacaggccccgtactgcttccatcagctccagcccctcagaagggacgcctacagttggcagctatggctgtacccctcagtcattgcccaagttccagcatccttcccatgaactgctcaaggaaaatggcttcacacaacacgtctaccataagtatcgtaggcgctgccttaatgagcggaaacgcttgggcattggccagtctcaggagatgaacacactcttccgcttctggtccttcttcctccgagatcacttcaacaaaaagatgtatgaggagttcaagcagctggctctggaggacgccaaagaaggctacagatatggtttggagtgcctttttcgatactacagttatggcctggaaaagaagttccggctggacatattcaaggattttcaggaggaaacggtgaaggactatgaagctggccaactgtatgggctggagaagttctgggccttcttgaaatattccaaagccaaaaatttggacattgaccccaaactgcaagaatacctcggcaaattccgacgtcttgaagacttccgagtagatccccccatgggtgaggagggcaaccacaagcgacactcagtggtagcaggaggtggcggcggtgagggcaggaagcggtgcccctcccagtcttccagcaggcctgctgccatgatcagccaaccccctacaccacccaccggccagcctgtccgggaagatgccaaatggacaagccagcactcgaacacacagactttgggaaagtgaaaagctccttagccctggggcttgaggggggaaaggggtagggtgggtaagagtccatgggggtgcccagtcccaggaaaggggacaatgaagggacaggcctggagttactaggacaggcctttgtgctgagtagcaatgtatacaccatttgggctatcagaggtacccctgggcaggagcctctacatccccttccccctcctctctccatgactcttgacatcctagcttcttctaaggggggagggaaaggggggagatttttatatatatatacatatatatatatcaagttttaaattattgatagttcatctggattaccaaaatcactctgcagccctgcccgaggctagtaggctgcaaccctggtccccacccctaacctcctgctccccctcaagccaactatgcagcccacaagaaggccctgcgggcccccccattgcccagcactgtctcatagaaggctctggtggtacctctgggccccaggagcatcagccccttgatcatctggggtttgtcatcaccatattttctccctgctgttcccaccatgcccttctgccatcttctgggagaaggaaaccaaaggatctaaaactggggtttgggggaaggtttcagcctctccccactccccttgccccacaccctttactccccagcccagagagacgctgcttttaccaggaaagactattgaaagatgttttattttatttttctctgacctttccatccttgaaaaaatggggaaaaaagaagaaaaaagacaaaatcgaccataaaagaccaaaaaaaaaaaaaaaatcagaaaacccccacctaatccacagaaagtaatgtctttcccctccccttggaatttttgttttgtttttggaaataatatttttttaaaagttgccttattgtggagcgggaatctgaaatacccaaatgcctgttttcctcggtggagtcaacccgaagagctcccaccttctctggatgtgcctgggcttggactggctagaatctttctctggactgttgcatgtacagtgcctccatcctggaggcaagagagttgggagtggctcgaatcagagccgtgcccaagatatccctgctgttgcatcgtttgaagctgacgtcctgtgtctgtacactgctgccactgttgtgtcctcgctctgcttgctgttgcctcacgccaggccccgtcctgccgtgacacccttcatcctacccttggaaccccaaggccaagttggttcaaactgttggagaacagagttggcctgcatctggaacacacttgtcctcagcttaccatctcctcacaccccagagtggaaaggtgaacacctgcagctgaggcttggaaacgtttcttgtgttgccctgaaaaatctttgagacctcagggaggctctgtctctcttaaaaggtggagaaagatgccattctctccctaaggtctggtggagtctccccatcttgcatacccttctgcaagccatctatctctgctcactctccaattgacccgcctgggaacaagggatgaggaggagttgggggctggggggaatcctgccagttggtgaagccctgtggcaggaaggtatatgtggacatagagtatacctgattctctttcttcagccactgactgcttgggttgggctgtgaatgataatggaatggctggagtctgctgttgtcagaaggcagggagggtgatgaaggactgacccacatggactgggatgtgtgtcggttatgggcatgactgcacgttcactctcagtgggatctgggcaacatggagttcattgtcctgttgcttacttactgcaatgtctttggccctccttttcaactggttcctctgttgggcccaaaggttgggagtaggagacagtatcccaggctgacaagggcttgccctttaccttgggcaccttgttaatttttagcctgtgcccttccccacctttgccctcccagtggttggtatgtgggaagcccatctcagttcctgtgacttcatgtctcaaaccaaggatgagcgtctggtctctgctatgatggtggtatccgaggcctttccctgcccagtctggtgcctgccccacattgtaccggacactggattcctggacccccttctcctttcctttctttccttcaggtcacgcagccctgtactgtatccagcaccacagaaacctcagtgtttttcctctgctggtttggggcacaaggaagccttagggtatggggaaaggctgttattacctagagtttactcccaggccagggggctgccatcttcttcacagacatccctgaaaggaagcccctttggggcagggaggtgaggacttcatctcaacatcggctggtggttggtaggggagctttttcttttctttcctttttttttgtttttgtttttgtttttgtttttggtaacatgttaggagttaatgttgcaaagagtagtttacatcttcactttctgaagacacttgaatttaggaccgatgtatctgtgacaagcatgccagaagtggcaggggccatcagggctaaccacttcacacctaccatcgtcccatggggatccaagacctgagataaagcaacagcctgcccagatccctctgttcatcctatcccttccaaggttggtccatgccaacataacctctgggcatcagacatcagcaggtctgtgtgcctcagccctgttaaggggcaggtttctctttagccctcttcctgcacttgggagcaaaggcactaccagtagagaagggccatccagccgtgccccagcctggacccctggggctcagatagaggtgctgagcccctgtgtcaaagttgttaaatgtttttgttttgttccattgtagctctttttttttttttttcccctttcctggtgattgattttacaaaagaaagtaagctgcttagaaggccctggaagggaagtgaggaggagggacaaggaagatgactagttacggagggtgagggttgttttttgccaaaaagcctgggtagagtgatctgaattatctggcaccctcctgaatggaaccccagagtacctcctgtgtggaagggtccctggattttccctaacacccaccctctcccccttcagccatgctgatggcagagaagataagaacttggagcccatttctcactggagaggaaaacttgtcatctggctttgcggagaaggttccaccttacgctcgtagtacattatctttactatgtgctaggatatcatatttaaaaggacaaaaaaatgtaaaatacttgaatgagcttgtattataacattaatattattgagagtatctgctttccaggctgaagtgattcattcattattctagtcctgctttagtcctttgtaatttgtggtaattatgcttttctttttaatacaaaaaaatgtataaaaataaacacttgaaaaggcaaaata

SEQ ID NO: 185819 - DNA, 2128 bp, Artificial Sequence
  derived and/or modified sequence
acgtggtgcctccccgcgcggggagcggcatgtgactgccgaccggcgctccgcgagtcctccctctccctcctccgcgttttggtccttttggaccgtgcccctttccggggggagaacactctgctccagccaaggtggtgagggcagctgttcctaaacagcgcaaaggcagcaaggttggtgactttggagatgcaatcaattggcccacacctggagagatagcccacaagagtgttcagccacagtcccacaagcctcagcctacccgtaaactgccacccaagaaggacatgaaggaacaggagaaaggagaagggagtgatagtaaggagagtccaaaaaccaaatcagatgaatcaggggaggaaaagaatggagatgaggattgccagcgaggcgggcagaagaagaaaggaaacaaacacaagtgggttccattacaaatagacatgaagcctgaagtgcccagagagaaactggcttcacgccccactcgcccaccggagcctagacacatacctgccaatcgcggagagatcaaagggtctgagtctgccacctacgtgcccgtggccccccccaccccagcctggcaaccagagatcaaaccggagcctgcctggcacgaccaggatgagacatcgagtgtgaagagtgatggggctggtggggcgcgggcttccttccgtggccgtggacgggggcgtggtcgcggccggggacgcggccggggtggcactcgaacccattttgactaccagtttggctaccgaaagtttgatggtgtggaggggcctcgtacgcccaagtacatgaacaacatcacctactactttgacaatgtcagcagcaccgagctttacagtgtggatcaggaactgctcaaagactacatcaagcgccagattgaatactacttcagcgtggacaatttagagcgagacttcttcctgcgaaggaaaatggatgctgatggtttcctacccatcacccttattgcttccttccaccgagtgcaggcccttaccactgacatttcactcatctttgcggccctaaaggacagcaaggtggtggagatcgttgatgagaaagttcgtaggagggaggaaccagaaaagtggcctcttcccccaatagtggattattcacagactgatttctcccagcttctcaactgccctgaatttgttccccgtcagcactaccaaaaggagacagagtcggcacctggctctcctcgtgcagtcaccccagtgccaaccaaaacagaggaggtcagcaacctaaagacactacccaagggcctgtctgccagcctgcctgacctggattctgagaactggattgaagtgaagaagaggcctcggccatccccagcacggcccaagaagtcagaggagtccagattttcccacctgacctctctgcctcagcagctgccttcccagcagctgatgtccaaggatcaggatgagcaagaggaactggattttctgtttgacgaggagatggagcagatggatgggcggaagaacaccttcactgcctggtctgatgaggaatctgactatgagattgatgacagggatgtcaacaagatcctcattgtcacccagacaccacattacatgcgccggcacccagggggggaccgcacaggcaaccacacctcgcgtgccaagatgagcgccgaactggccaaggtcattaatgatggcctcttctactatgagcaggacctgtgggctgaaaagtttgaacctgagtattcccagatcaagcaagaagtcgagaacttcaaaaaggtcaatatgatcagccgggagcagtttgacacactgacccctgagccccctgtggatcccaaccaggaagttcctcctgggccacctcggttccagcaagttcctacggatgccctggccaacaagttgtttggtgctcctgagccctccaccatcgcccgctctctaccaaccactgtcccagagtcaccaaactaccgcaacaccaggacccctcgcactccccggacaccacagctcaaagactcaagccagacatcacggttttacccagtggtgaaagaaggacggacactggatgccaagatgcctcg

SEQ ID NO: 185820 - DNA, 3060 bp, Artificial Sequence
  derived and/or modified sequence
atgctgtggagggtgctgctgagcaagaggcctcccttcccccaccctgagctggacttccaggaggcccccatccccagctgccccggccgcctgcccggcaggaagaacagcgtggccctggccgccgcccccaggaaggagcccaccggggaccgggagaagcccctgcccttccctgtgctggcccccttcagcaaccctgagcacagcgccccagccaaggtggtgcgggctgctgtgcccaagcagaggaagggcagcaaggtgggggactttggagatgccatcaactggcccaccccaggagaaattgcccacaagtctgtgcagccccagagccacaagccccagcccaccaggaagctgccccccaagaaggacatgaaggagcaggagaagggggagggcagtgacagcaaggagagccccaagaccaagagtgatgaaagtggagaggagaagaatggagatgaggactgccagaggggcggccagaagaagaagggcaacaagcacaagtgggtgcccctgcagattgacatgaagccagaggtgccccgggagaagctggccagccggcccacccggcccccagagcccaggcacatcccagccaacagaggagagatcaagggcagcgagagcgccacctacgtgcctgtggccccacccaccccagcctggcagcctgagatcaagccagagcccgcctggcatgaccaggatgagaccagctctgtgaagagtgatggagctggaggagcccgggccagcttccggggccggggccggggccggggccggggccggggccggggccggggcggcaccaggacccactttgactaccagtttggctacaggaagtttgatggagtggagggccccaggacccccaagtacatgaacaacatcacctactactttgacaacgtgagcagcacagagctgtacagcgtggaccaggagctgctgaaggactacatcaagaggcagatcgagtactacttctctgtggacaacctggagcgggacttcttcctgcggaggaagatggatgctgatggcttcctgcccatcaccctcatcgccagcttccaccgggtgcaggccctgaccacagacatcagcctcatctttgctgccctgaaggacagcaaggtggtggagatcgtggatgagaaggtgagaagaagagaggagcctgagaagtggcccctgccccccatcgtggactacagccagacagacttcagccagctgctgaactgcccagagtttgtgccccggcagcactaccagaaggagacagagagcgcccctggcagccccagggctgtgacccctgtgcccaccaagacagaggaggtgagcaacctgaagaccctgcccaagggcctgagcgccagcctgcctgacctggacagcgagaactggattgaggtgaagaagaggccccggcccagccctgcccggcccaagaagtctgaggagagccgcttcagccacctgaccagcctgccccagcagctgcccagccagcagctgatgagcaaggaccaggatgagcaggaggagctggacttcctgtttgatgaggagatggagcagatggatggcaggaagaacaccttcaccgcctggagcgatgaggagagtgactatgaaattgatgacagagatgtgaacaagatcctgattgtgacccagaccccccactacatgagaagacaccctggaggagacagaactggaaaccacaccagccgggccaagatgtctgctgagctggccaaggtgatcaatgatggcctcttctactatgagcaggacctgtgggccgagaagtttgagcctgagtacagccagatcaagcaggaggtggagaacttcaagaaggtgaacatgatcagccgggagcagtttgacaccctgaccccagagccccctgtggaccccaaccaggaggtgcccccaggccccccacgcttccagcaggtgcccacagatgccctggccaacaagctgtttggagcccctgagcccagcaccatcgcccggagcctgcccaccaccgtgcctgagagccccaactacagaaacaccaggacccccaggacccccaggaccccccagctgaaggacagcagccagaccagccgcttctaccctgtggtgaaggagggccgcaccctggatgccaagatgcccaggaagaggaagaccaggcacagcagcaacccccccctggagagccacgtgggctgggtgatggacagccgggagcaccggcccaggacagccagcatcagcagcagccccagcgagggcacccccaccgtgggcagctatggctgcaccccccagagcctgcccaagttccagcaccccagccatgagctgctgaaggaaaatggcttcacccagcacgtgtaccacaagtacagaagacgctgcctgaatgaaaggaagaggctgggcatcggccagagccaggagatgaacaccctcttccgcttctggagcttcttcctgcgggaccacttcaacaagaagatgtatgaggagttcaagcagctggccctggaggatgccaaggagggctaccgctatggcctggagtgcctcttccgctactacagctatggcctggagaagaagttccggctggacatcttcaaggacttccaggaggagaccgtgaaggactatgaagctggccagctgtatggcctggagaagttctgggccttcctgaagtacagcaaggccaagaacctggacatcgaccccaagctgcaggagtacctgggcaagttccggcggctggaggacttccgggtggacccccccatgggagaggagggcaaccacaagaggcacagcgtggtggccggcggcggcggcggggagggcaggaagcgctgccccagccagagcagcagcaggcctgctgccatgatcagccagccccccaccccacccaccggccagcctgtgagagaagatgccaagtggaccagccagcacagcaacacccagaccctgggcaagtag

SEQ ID NO: 185821 - DNA, 1836 bp, Artificial Sequence
  derived and/or modified sequence
atgaaggagcaggagaagggggagggcagtgacagcaaggagagccccaagaccaagagtgatgaaagtggagaggagaagaatggagatgaggactgccagaggggcggccagaagaagaagggcaacaagcacaagtgggtgcccctgcagattgacatgaagccagaggtgccccgggagaagctggccagccggcccacccggcccccagagcccaggcacatcccagccaacagaggagagatcaagggcagcgagagcgccacctacgtgcctgtggccccacccaccccagcctggcagcctgagatcaagccagagcccgcctggcatgaccaggatgagaccagctctgtgaagagtgatggagctggaggagcccgggccagcttccggggccggggccggggccggggccggggccggggccggggccggggcggcaccaggacccactttgactaccagtttggctacaggaagtttgatggagtggagggccccaggacccccaagtacatgaacaacatcacctactactttgacaacgtgagcagcacagagctgtacagcgtggaccaggagctgctgaaggactacatcaagaggcagatcgagtactacttctctgtggacaacctggagcgggacttcttcctgcggaggaagatggatgctgatggcttcctgcccatcaccctcatcgccagcttccaccgggtgcaggccctgaccacagacatcagcctcatctttgctgccctgaaggacagcaaggtggtggagatcgtggatgagaaggtgagaagaagagaggagcctgagaagtggcccctgccccccatcgtggactacagccagacagacttcagccagctgctgaactgcccagagtttgtgccccggcagcactaccagaaggagacagagagcgcccctggcagccccagggctgtgacccctgtgcccaccaagacagaggaggtgagcaacctgaagaccctgcccaagggcctgagcgccagcctgcctgacctggacagcgagaactggattgaggtgaagaagaggccccggcccagccctgcccggcccaagaagtctgaggagagccgcttcagccacctgaccagcctgccccagcagctgcccagccagcagctgatgagcaaggaccaggatgagcaggaggagctggacttcctgtttgatgaggagatggagcagatggatggcaggaagaacaccttcaccgcctggagcgatgaggagagtgactatgaaattgatgacagagatgtgaacaagatcctgattgtgacccagaccccccactacatgagaagacaccctggaggagacagaactggaaaccacaccagccgggccaagatgtctgctgagctggccaaggtgatcaatgatggcctcttctactatgagcaggacctgtgggccgagaagtttgagcctgagtacagccagatcaagcaggaggtggagaacttcaagaaggtgaacatgatcagccgggagcagtttgacaccctgaccccagagccccctgtggaccccaaccaggaggtgcccccaggccccccacgcttccagcaggtgcccacagatgccctggccaacaagctgtttggagcccctgagcccagcaccatcgcccggagcctgcccaccaccgtgcctgagagccccaactacagaaacaccaggacccccaggacccccaggaccccccagctgaaggacagcagccagaccagccgcttctaccctgtggtgaaggagggccgcaccctggatgccaagatgcccaggtag

SEQ ID NO: 185822 - DNA, 3060 bp, Artificial Sequence
  derived and/or modified sequence
atgctgtggcgggtgctgctgagcaagcggccccccttcccccaccctgaactggacttccaggaagcccccataccatcatgtccgggcaggctgcctgggaggaagaactcggtggctcttgcagccgcacctcgcaaggaacctactggcgacagggagaagcctctgccatttccagtgttggcaccgttcagcaatcccgagcattcggcccccgctaaggttgtgagggcagccgtgcctaagcaacggaagggcagcaaagtaggagactttggagacgctattaattggcctactccaggcgaaattgctcataagtcagtgcaaccccagtctcacaagccacagcccactcggaagttgcctcctaaaaaggatatgaaagaacaagagaaaggcgaaggcagcgattccaaggagtcccccaaaactaagagtgatgagagcggcgaggagaagaacggcgatgaggattgccagcgcggtgggcagaagaagaaaggcaacaagcacaaatgggtccctctccagattgatatgaagccagaagtgccgcgcgaaaaactcgcttccaggcctacaagacctccagagccacggcacattcctgctaataggggggaaatcaaaggaagtgaatccgccacctacgttcccgtcgcgccacccacgccagcttggcagccagaaattaagcccgagcccgcttggcacgatcaggatgagacaagtagcgtgaagtccgacggcgccggaggggcccgggcgtcgtttagaggccggggacggggccgcggcaggggcaggggaaggggaagaggtggcacccgtactcacttcgactatcagtttgggtatcgaaagtttgacggagtcgagggtcctagaacacccaagtatatgaataacattacatattattttgataatgtgagctcgactgagctctacagcgtggaccaagagctgctgaaggactatattaagcgccagattgagtattatttcagtgtcgacaacttggaaagagacttctttcttcgccggaaaatggacgctgatgggttcctacctatcactctgatagcaagcttccaccgggtacaggctctcactactgacatatcactgatttttgcagctttaaaggattccaaagtggttgaaatcgtggacgagaaggtgaggaggcgcgaggagcccgaaaaatggcctctgccccctatcgttgattattcccagacggatttttcccagcttctaaactgtccagagtttgtaccacgtcagcattaccaaaaagagactgagagtgcaccaggatctccacgcgctgtgacaccagtgccaaccaaaaccgaagaggtgtcaaatcttaagaccctgcccaagggcctctctgcttccctgcccgacctggactctgagaattggatcgaggtgaaaaagagaccaaggcccagcccagctcggcccaagaagtcagaggagagccgcttttcccacttgacctctttacctcagcagctccccagccagcagctcatgtccaaagatcaagatgaacaggaggaactggactttttgttcgacgaagaaatggaacagatggacggaagaaaaaacaccttcaccgcgtggtctgacgaggagtctgactacgaaatagacgatcgcgatgtaaataaaatactcattgtcacccaaactccacactatatgaggagacaccctggtggagaccggacgggaaaccacacgagccgggctaagatgtccgccgaattggccaaggtcattaacgacggattattctattacgaacaggatctatgggccgagaaatttgagcccgagtactcccagataaagcaggaggtcgagaatttcaaaaaagtaaacatgatatctcgggagcagttcgacactctgactccagagccacccgtcgatccaaaccaggaggtgcctccaggacccccaaggttccagcaggtgcccaccgacgccctggcaaacaaactgtttggggcccccgagccatctaccattgcaaggagcctgcctactaccgtgcccgagtcccccaactacaggaatacccggacccctcgcacccccagaaccccccagcttaaagactccagccagacatctcggttctaccccgtcgtcaaggaaggacgtacactcgatgccaaaatgcctaggaagcgtaagacccgccattcatcgaatccccccctcgagagtcacgtggggtgggtcatggacagcagagagcatcggcctagaacagcatcgatatctagctccccttcggagggaacccccacggtggggagttacgggtgcacgccgcagagtctaccaaaattccagcatccttcccatgaactgttgaaggagaatggcttcacccaacatgtgtaccataagtaccgcagacgttgtctgaatgagcgaaaacggcttggtattggacagtctcaggagatgaatacactgtttaggttttggagttttttcctccgtgatcacttcaataagaaaatgtatgaagagtttaagcagctggctttggaagatgcaaaggagggctaccgctacggtctggagtgcctctttcgctactacagttacggactcgaaaagaaattcagactggacatatttaaagatttccaggaggagacagttaaagattacgaggctggacagctgtatggattagaaaagttttgggccttcttgaagtactctaaggctaagaatctggacatcgatcctaagcttcaggaatacttgggtaagttccgccgtcttgaggatttcagggttgatccacccatgggagaggaaggtaaccacaaaagacactccgttgtggcaggaggaggcgggggggaaggaaggaaacgctgcccctcccagtcatccagccgccccgctgccatgatatcacagcctcccactcctccaaccggacagcccgtgcgagaagacgccaaatggacttcacagcactcaaacacccagacgctgggcaaatag

SEQ ID NO: 185823 - DNA, 1836 bp, Artificial Sequence
  derived and/or modified sequence
atgaaggagcaggagaagggcgagggcagcgacagcaaggagagcccaaagacaaagtccgatgaaagcggcgaggagaagaacggcgacgaggactgtcaaaggggcggccagaagaagaaaggaaacaagcacaagtgggttcccctccaaattgatatgaaacccgaggtcccacgcgaaaagctggcgtcaaggccgactcggccccctgagccccgtcatatcccagccaacaggggcgaaatcaagggaagcgagtccgcaacatacgttccagtggcgcccccaacccccgcgtggcagcctgaaattaagcccgagcctgcctggcacgatcaggacgaaacttccagcgtgaagtcggacggtgctgggggagcaagggcttcttttcgggggaggggtagaggaaggggccggggccggggacgaggcagagggggtacccgcacgcacttcgattaccagtttggctatcgcaagtttgacggagtcgaagggccgaggacacccaagtatatgaataatattacatattacttcgacaacgtgtcctctacagaactgtactcagttgaccaagagcttttgaaggactacattaaacggcaaattgaatattacttcagtgtagataacctggaacgcgattttttcctaaggcgaaaaatggacgctgatggcttcctgccaattactctgatagccagtttccatagggtgcaggccctgaccaccgacatctccttgatttttgcagccttgaaagattctaaggtggtggagatcgtggacgaaaaagtaaggcggcgcgaggaacccgaaaagtggccattacccccaatcgtggattactcccaaactgacttctcacagctgttgaactgccctgagtttgttcctcgacagcactaccagaaggagactgagagcgcgcccggcagccctagagcagttacgccggtacccacaaagacagaagaagtgtccaatttaaagacacttccgaaaggactctcagcgtcactcccagacctggattcagaaaactggatagaagttaagaagcgcccgcggcccagtcctgcaagaccaaagaaaagtgaagaatctcgctttagtcatctgacaagcttgccgcagcagttgccttcccagcaactgatgagcaaggaccaggatgagcaagaggagctggattttttgttcgatgaggagatggagcagatggacgggaggaaaaatactttcacagcgtggagcgatgaggaaagcgattacgagattgacgacagggatgtcaataaaatcctcattgtaacacaaaccccccattacatgcgccggcacccaggcggtgataggactggcaatcacacaagtagggccaagatgagtgccgaactcgctaaggtcatcaatgacggcctgttctattatgagcaggacttgtgggccgagaagttcgagccagagtactctcaaatcaaacaggaggtggagaactttaagaaagtgaacatgatcagccgtgagcaatttgacactcttaccccagaaccccctgttgaccctaatcaggaggtgccacccgggccccccaggttccagcaagtccccaccgatgccctggctaataagctttttggcgccccggagccatcaaccattgctcggtctctgcctacaactgtccccgagtcacccaactatcggaatacgcgcactccaaggacgccacggactcctcagctcaaggattcgtctcagaccagccggttctatcctgtggtcaaagagggtcggacactggatgcaaagatgcctcggtag

SEQ ID NO: 185824 - DNA, 3060 bp, Artificial Sequence
  derived and/or modified sequence
atgctgtggcgagtcctgctgagcaaaaggccgccattcccgcacccggagcttgatttccaggaggccccaattccaagctgtcccggtaggctcccagggcgtaagaactcagtcgccctggccgctgctcctagaaaggagccgactggcgatcgagagaagccactgccctttccagtcctggctccattctctaaccctgagcattcggctcccgcaaaggtggtccgcgcagcggtgccgaagcaaagaaaagggtcgaaggtgggcgatttcggcgacgcaattaactggcccacccccggtgagatcgctcacaaatctgtgcaaccacaaagccacaagcctcagcctactcgcaagctccctccaaagaaggatatgaaggagcaggagaagggcgagggcagcgattcaaaggagagtccaaagacaaagagcgacgagtccggtgaagagaaaaatggtgacgaggattgccagagaggaggacagaaaaagaagggaaacaaacataagtgggtccccctgcagatcgatatgaagccagaggttcctagggagaagcttgcatctcggcctacacggccaccagagccacgccacattccagctaaccgcggagagatcaaagggtcagagagcgctacatacgtccctgtcgccccacctacccccgcttggcagccagagataaaaccggaacccgcatggcacgatcaagatgagacgtcctccgtgaaatctgatggggctggcggtgctagggcttcatttcggggacgagggcgtgggaggggacggggaaggggcagggggcgtggcggaaccagaacacactttgactaccagttcggttataggaagttcgacggggttgaagggcctcggaccccaaagtacatgaataacattacctattacttcgataatgtctctagcactgagctgtattccgtcgatcaagaactcctcaaagactatataaaaaggcaaattgaatactatttttcagttgataacctggagcgggatttttttttgcgacgtaaaatggatgccgacggctttctgccaattacacttatcgctagctttcacagagtgcaggcactgaccacagacattagcctgatctttgcggcactgaaggacagcaaagtcgtggaaatagttgatgagaaagttaggcgccgtgaggagcccgagaagtggcccctccccccaatcgtcgactattcgcagaccgactttagccaactgctgaactgccctgaatttgtgccccgacaacattaccagaaggagactgaaagcgcaccgggaagcccgcgtgctgttaccccagtccctactaaaaccgaagaggtatctaatctgaagaccttacccaaaggattgagcgcttccctgcccgatctggactcagaaaactggattgaggtgaagaaaagaccacgtccctcccctgccagacctaagaagagtgaagagagtagattttcacacttgacttctctaccccagcagcttcccagccagcagctaatgtcaaaggatcaggatgaacaagaagagcttgacttcctgtttgatgaagagatggaacagatggacggcagaaaaaacaccttcactgcctggagcgatgaagaatcagattacgaaatcgacgatagagatgttaacaagattctcattgtcacacagactcctcattatatgcggaggcaccccggtggtgatagaacagggaaccacacctcaagggcgaaaatgtctgcagaattagctaaggtgatcaacgacggccttttttactacgagcaagatctttgggccgaaaagtttgagcccgagtacagccagatcaagcaggaggtcgaaaactttaagaaagtgaatatgatatccagagaacaatttgacactctgactcccgagcccccagtcgaccctaaccaggaggtgcctccaggcccaccacgttttcagcaagttccaaccgacgccctcgccaataaattgtttggagcccctgaaccatcaacaatcgccagatccctgcctaccacagttcccgagagcccaaactaccgaaatacacgtacaccacgaacccctagaaccccccagttaaaggactcctcccagacatctaggttttatcctgtcgtgaaggaggggaggacgttagacgctaaaatgccacgcaagcggaaaacaagacactcatcaaatccaccactagaatctcatgtcggctgggtaatggactcgcgagaacatcgtccgagaactgcctccatctcctcttcccccagtgagggcaccccaactgtaggcagctatggttgtaccccccagagcctcccaaagttccagcatcccagccacgaactcctcaaggagaacggattcacacagcatgtctaccataaataccgaagaagatgtctgaacgaacggaagcgactaggcataggtcagtcccaggaaatgaataccctgttccggttctggtctttcttccttcgggaccatttcaataaaaaaatgtatgaggagtttaaacaacttgcattggaggatgctaaggagggttacaggtatgggctcgagtgtctcttcaggtattacagttacggccttgagaaaaagttcaggttggacattttcaaggattttcaggaggagaccgtaaaggattatgaggccggacagctgtatggacttgaaaaattctgggcatttttaaaatatagtaaagccaaaaacctcgacatcgacccaaagctacaggaatacctcggcaaatttcgcaggttagaagatttcagggtcgatcccccaatgggcgaggaaggcaaccacaagagacattcagttgtggccggaggaggtggtggagagggccgaaagaggtgtccttcccagagctcctcacgcccagcagccatgatcagtcagccaccgacccctcctaccggacagccagtcagagaagacgcgaagtggacctcacagcactcaaatacacagactctaggtaaatag

SEQ ID NO: 185825 - DNA, 1836 bp, Artificial Sequence
  derived and/or modified sequence
atgaaggagcaggaaaagggggaaggctctgactcaaaggagagccccaagacaaagagtgatgaaagcggcgaggagaaaaatggcgacgaagactgtcagagagggggacaaaagaaaaaggggaacaaacacaaatgggttccactgcagatcgatatgaaacctgaggtacctagggagaagctggcgtcccgtcctactcgtcctccagaaccccgacacattcccgctaacagaggggagattaagggctccgagtcagccacatatgttcctgttgcccctcctaccccagcctggcagccagaaattaagcccgagcccgcatggcatgaccaggacgaaacttcctccgttaagagcgacggggcaggaggcgctcgggcttcattcaggggacggggaagaggacgagggaggggccgtggacgtggccgaggcggaactcgtacccatttcgattatcaattcggctatcgtaagtttgatggtgttgagggcccacgaacccctaaatatatgaacaacatcacgtactatttcgacaacgtttccagtactgaactgtactctgtagaccaggagctgttgaaggattatattaagcgtcaaatcgagtattacttcagtgttgataacctggaaagagattttttcctgcgcaggaagatggacgctgatggattcttacctataacattgatcgccagcttccatcgcgttcaagccttgacgaccgatatttccctcatttttgccgctttgaaggatagcaaggtggtggaaatcgtggacgagaaggtgcgccgtcgtgaggaaccagagaagtggccacttccccctattgtggactactcacagactgacttttcacagctgctgaactgtccagagttcgtgcctcgacagcactatcagaaggaaacggaatccgcacccggtagcccgagagctgtcacccctgtccccaccaaaaccgaggaagtctcaaacctgaagaccttgcctaaaggactcagtgcctcacttccagatctggatagcgagaactggatcgaggtcaaaaagcgcccaagaccttctcctgcacgccctaaaaagagtgaggaaagtcgattcagccatctaacaagcttgccccaacagctcccaagccagcagctgatgagtaaagatcaggatgagcaggaagaacttgacttcctctttgacgaggaaatggagcagatggacggacgcaagaacacttttaccgcttggagcgatgaggaatccgactacgaaatcgatgatcgggacgtgaataaaatcttaatagtaacgcagacaccccattatatgcggcgacaccctggaggggatagaactggcaatcatactagcagagcgaaaatgagtgcagagctcgctaaagtgatcaatgatggcctgttttactacgagcaagacttgtgggctgagaagttcgaacccgagtactcacagatcaaacaggaagtggaaaacttcaagaaggtgaatatgatctctcgtgaacagtttgacaccctgactcccgagccccctgttgaccccaatcaggaagtccctccaggccctcctagatttcagcaggtgccaactgacgctttagccaacaagctcttcggtgcacctgagccgagtaccattgcacgcagcttacctaccacggttcctgagagtcccaactatcgcaacacacgcacccccagaacacctaggacacctcaactgaaagactcctctcagacatcacgtttctatcccgtggtgaaagagggcaggactctagacgccaaaatgccgcgttag

SEQ ID NO: 185826 - DNA, 3060 bp, Artificial Sequence
  derived and/or modified sequence
atgctgtggagagtgctgctgagcaagagaccccccttcccccaccccgagctggacttccaggaggcccccatccccagctgccccggcagactgcccggcagaaagaacagcgtggccctggccgccgcccccagaaaggagcccaccggcgacagagagaagcccctgcccttccccgtgctggcccccttcagcaaccccgagcacagcgcccccgccaaggtggtgagagccgccgtgcccaagcagagaaagggcagcaaggtgggcgacttcggcgacgccatcaactggcccacccccggcgagatcgcccacaagagcgtgcagccccagagccacaagccccagcccaccagaaagctgccccccaagaaggacatgaaggagcaggagaagggcgagggcagcgacagcaaggagagccccaagaccaagagcgacgagagcggcgaggagaagaacggcgacgaggactgccagagaggcggccagaagaagaagggcaacaagcacaagtgggtgcccctgcagatcgacatgaagcccgaggtgcccagagagaagctggccagcagacccaccagaccccccgagcccagacacatccccgccaacagaggcgagatcaagggcagcgagagcgccacctacgtgcccgtggccccccccacccccgcctggcagcccgagatcaagcccgagcccgcctggcacgaccaggacgagaccagcagcgtgaagagcgacggcgccggcggcgccagagccagcttcagaggcagaggcagaggcagaggcagaggcagaggcagaggcagaggcggcaccagaacccacttcgactaccagttcggctacagaaagttcgacggcgtggagggccccagaacccccaagtacatgaacaacatcacctactacttcgacaacgtgagcagcaccgagctgtacagcgtggaccaggagctgctgaaggactacatcaagagacagatcgagtactacttcagcgtggacaacctggagagagacttcttcctgagaagaaagatggacgccgacggcttcctgcccatcaccctgatcgccagcttccacagagtgcaggccctgaccaccgacatcagcctgatcttcgccgccctgaaggacagcaaggtggtggagatcgtggacgagaaggtgagaagaagagaggagcccgagaagtggcccctgccccccatcgtggactacagccagaccgacttcagccagctgctgaactgccccgagttcgtgcccagacagcactaccagaaggagaccgagagcgcccccggcagccccagagccgtgacccccgtgcccaccaagaccgaggaggtgagcaacctgaagaccctgcccaagggcctgagcgccagcctgcccgacctggacagcgagaactggatcgaggtgaagaagagacccagacccagccccgccagacccaagaagagcgaggagagcagattcagccacctgaccagcctgccccagcagctgcccagccagcagctgatgagcaaggaccaggacgagcaggaggagctggacttcctgttcgacgaggagatggagcagatggacggcagaaagaacaccttcaccgcctggagcgacgaggagagcgactacgagatcgacgacagagacgtgaacaagatcctgatcgtgacccagaccccccactacatgagaagacaccccggcggcgacagaaccggcaaccacaccagcagagccaagatgagcgccgagctggccaaggtgatcaacgacggcctgttctactacgagcaggacctgtgggccgagaagttcgagcccgagtacagccagatcaagcaggaggtggagaacttcaagaaggtgaacatgatcagcagagagcagttcgacaccctgacccccgagccccccgtggaccccaaccaggaggtgccccccggcccccccagattccagcaggtgcccaccgacgccctggccaacaagctgttcggcgcccccgagcccagcaccatcgccagaagcctgcccaccaccgtgcccgagagccccaactacagaaacaccagaacccccagaacccccagaaccccccagctgaaggacagcagccagaccagcagattctaccccgtggtgaaggagggcagaaccctggacgccaagatgcccagaaagagaaagaccagacacagcagcaacccccccctggagagccacgtgggctgggtgatggacagcagagagcacagacccagaaccgccagcatcagcagcagccccagcgagggcacccccaccgtgggcagctacggctgcaccccccagagcctgcccaagttccagcaccccagccacgagctgctgaaggagaacggcttcacccagcacgtgtaccacaagtacagaagaagatgcctgaacgagagaaagagactgggcatcggccagagccaggagatgaacaccctgttcagattctggagcttcttcctgagagaccacttcaacaagaagatgtacgaggagttcaagcagctggccctggaggacgccaaggagggctacagatacggcctggagtgcctgttcagatactacagctacggcctggagaagaagttcagactggacatcttcaaggacttccaggaggagaccgtgaaggactacgaggccggccagctgtacggcctggagaagttctgggccttcctgaagtacagcaaggccaagaacctggacatcgaccccaagctgcaggagtacctgggcaagttcagaagactggaggacttcagagtggacccccccatgggcgaggagggcaaccacaagagacacagcgtggtggccggcggcggcggcggcgagggcagaaagagatgccccagccagagcagcagcagacccgccgccatgatcagccagccccccaccccccccaccggccagcccgtgagagaggacgccaagtggaccagccagcacagcaacacccagaccctgggcaagtag

SEQ ID NO: 185827 - DNA, 1836 bp, Artificial Sequence
  derived and/or modified sequence
atgaaggagcaggagaagggcgagggcagcgacagcaaggagagccccaagaccaagagcgacgagagcggcgaggagaagaacggcgacgaggactgccagagaggcggccagaagaagaagggcaacaagcacaagtgggtgcccctgcagatcgacatgaagcccgaggtgcccagagagaagctggccagcagacccaccagaccccccgagcccagacacatccccgccaacagaggcgagatcaagggcagcgagagcgccacctacgtgcccgtggccccccccacccccgcctggcagcccgagatcaagcccgagcccgcctggcacgaccaggacgagaccagcagcgtgaagagcgacggcgccggcggcgccagagccagcttcagaggcagaggcagaggcagaggcagaggcagaggcagaggcagaggcggcaccagaacccacttcgactaccagttcggctacagaaagttcgacggcgtggagggccccagaacccccaagtacatgaacaacatcacctactacttcgacaacgtgagcagcaccgagctgtacagcgtggaccaggagctgctgaaggactacatcaagagacagatcgagtactacttcagcgtggacaacctggagagagacttcttcctgagaagaaagatggacgccgacggcttcctgcccatcaccctgatcgccagcttccacagagtgcaggccctgaccaccgacatcagcctgatcttcgccgccctgaaggacagcaaggtggtggagatcgtggacgagaaggtgagaagaagagaggagcccgagaagtggcccctgccccccatcgtggactacagccagaccgacttcagccagctgctgaactgccccgagttcgtgcccagacagcactaccagaaggagaccgagagcgcccccggcagccccagagccgtgacccccgtgcccaccaagaccgaggaggtgagcaacctgaagaccctgcccaagggcctgagcgccagcctgcccgacctggacagcgagaactggatcgaggtgaagaagagacccagacccagccccgccagacccaagaagagcgaggagagcagattcagccacctgaccagcctgccccagcagctgcccagccagcagctgatgagcaaggaccaggacgagcaggaggagctggacttcctgttcgacgaggagatggagcagatggacggcagaaagaacaccttcaccgcctggagcgacgaggagagcgactacgagatcgacgacagagacgtgaacaagatcctgatcgtgacccagaccccccactacatgagaagacaccccggcggcgacagaaccggcaaccacaccagcagagccaagatgagcgccgagctggccaaggtgatcaacgacggcctgttctactacgagcaggacctgtgggccgagaagttcgagcccgagtacagccagatcaagcaggaggtggagaacttcaagaaggtgaacatgatcagcagagagcagttcgacaccctgacccccgagccccccgtggaccccaaccaggaggtgccccccggcccccccagattccagcaggtgcccaccgacgccctggccaacaagctgttcggcgcccccgagcccagcaccatcgccagaagcctgcccaccaccgtgcccgagagccccaactacagaaacaccagaacccccagaacccccagaaccccccagctgaaggacagcagccagaccagcagattctaccccgtggtgaaggagggcagaaccctggacgccaagatgcccagatag

SEQ ID NO: 185828 - protein, 1090 aa, Artificial Sequence
  derived and/or modified sequence
MMPMILTVFLSNNEQILTEVPITPETTCRDVVEFCKEPGEGSCHLAEVWRGNERPIPFDHMMYEHLQKWGPRREEVKFFLRHEDSPTENSEQGGRQTQEQRTQRNVINVPGEKRTENGVGNPRVELTLSELQDMAARQQQQIENQQQMLVAKEQRLHFLKQQERRQQQSISENEKLQKLKERVEAQENKLKKIRAMRGQVDYSKIMNGNLSAEIERFSAMFQEKKQEVQTAILRVDQLSQQLEDLKKGKLNGFQSYNGKLTGPAAVELKRLYQELQIRNQLNQEQNSKLQQQKELLNKRNMEVAMMDKRISELRERLYGKKIQLNRVNGTSSPQSPLSTSGRVAAVGPYIQVPSAGSFPVLGDPIKPQSLSIASNAAHGRSKSANDGNWPTLKQNSSSSVKPVQVAGADWKDPSVEGSVKQGTVSSQPVPFSALGPTEKPGIEIGKVPPPIPGVGKQLPPSYGTYPSPTPLGPGSTSSLERRKEGSLPRPSAGLPSRQRPTLLPATGSTPQPGSSQQIQQRISVPPSPTYPPAGPPAFPAGDSKPELPLTVAIRPFLADKGSRPQSPRKGPQTVNSSSIYSMYLQQATPPKNYQPAAHSALNKSVKAVYGKPVLPSGSTSPSPLPFLHGSLSTGTPQPQPPSESTEKEPEQDGPAAPADGSTVESLPRPLSPTKLTPIVHSPLRYQSDADLEALRRKLANAPRPLKKRSSITEPEGPGGPNIQKLLYQRFNTLAGGMEGTPFYQPSPSQDFMGTLADVDNGNTNANGNLEELPPAQPTAPLPAEPAPSSDANDNELPSPEPEELICPQTTHQTAEPAEDNNNNVATVPTTEQIPSPVAEAPSPGEEQVPPAPLPPASHPPATSTNKRTNLKKPNSERTGHGLRVRFNPLALLLDASLEGEFDLVQRIIYEVEDPSKPNDEGITPLHNAVCAGHHHIVKFLLDFGVNVNAADSDGWTPLHCAASCNSVHLCKQLVESGAAIFASTISDIETAADKCEEMEEGYIQCSQFLYGVQEKLGVMNKGVAYALWDYEAQNSDELSFHEGDALTILRRKDESETEWWWARLGDREGYVPKNLLGLYPRIKPRQRTLA

SEQ ID NO: 185829 - protein, 627 aa, Artificial Sequence
  derived and/or modified sequence
MAARQQQQIENQQQMLVAKEQRLHFLKQQERRQQQSISENEKLQKLKERVEAQENKLKKIRAMRGQVDYSKIMNGNLSAEIERFSAMFQEKKQEVQTAILRVDQLSQQLEDLKKGKLNGFQSYNGKLTGPAAVELKRLYQELQIRNQLNQEQNSKLQQQKELLNKRNMEVAMMDKRISELRERLYGKKIQLNRVNGTSSPQSPLSTSGRVAAVGPYIQVPSAGSFPVLGDPIKPQSLSIASNAAHGRSKSANDGNWPTLKQNSSSSVKPVQVAGADWKDPSVEGSVKQGTVSSQPVPFSALGPTEKPGIEIGKVPPPIPGVGKQLPPSYGTYPSPTPLGPGSTSSLERRKEGSLPRPSAGLPSRQRPTLLPATGSTPQPGSSQQIQQRISVPPSPTYPPAGPPAFPAGDSKPELPLTVAIRPFLADKGSRPQSPRKGPQTVNSSSIYSMYLQQATPPKNYQPAAHSALNKSVKAVYGKPVLPSGSTSPSPLPFLHGSLSTGTPQPQPPSESTEKEPEQDGPAAPADGSTVESLPRPLSPTKLTPIVHSPLRYQSDADLEALRRKLANAPRPLKKRSSITEPEGPPFLPAQPLPGLHGHLGRCGQWKHQCQWKPGRAPPCPAHSPTPR

SEQ ID NO: 185830 - protein, 398 aa, Artificial Sequence
  derived and/or modified sequence
MYLQQATPPKNYQPAAHSALNKSVKAVYGKPVLPSGSTSPSPLPFLHGSLSTGTPQPQPPSESTEKEPEQDGPAAPADGSTVESLPRPLSPTKLTPIVHSPLRYQSDADLEALRRKLANAPRPLKKRSSITEPEGPGGPNIQKLLYQRFNTLAGGMEGTPFYQPSPSQDFMGTLADVDNGNTNANGNLEELPPAQPTAPLPAEPAPSSDANDNELPSPEPEELICPQTTHQTAEPAEDNNNNVATVPTTEQIPSPVAEAPSPGEEQVPPAPLPPASHPPATSTNKRTNLKKPNSERTGHGLRVRFNPLALLLDASLEGEFDLVQRIIYEVEDPSKPNDEGITPLHNAVCAGHHHIVKFLLDFGVNVNAADSDGWGAGKAGCDEQRCGVCSVGLRGPEQ

SEQ ID NO: 185831 - protein, 635 aa, Artificial Sequence
  derived and/or modified sequence
  misc_feature (1)..(1): Xaa can be any naturally occurring amino acid
XVGPYIQVPSAGSFPVLGDPIKPQSLSIASNAAHGRSKSANDGNWPTLKQNSSSSVKPVQVAGADWKDPSVEGSVKQGTVSSQPVPFSALGPTEKPGIEIGKVPPPIPGVGKQLPPSYGTYPSPTPLGPGSTSSLERRKEGSLPRPSAGLPSRQRPTLLPATGSTPQPGSSQQIQQRISVPPSPTYPPAGPPAFPAGDSKPELPLTVAIRPFLADKGSRPQSPRKGPQTVNSSSIYSMYLQQATPPKNYQPAAHSALNKSVKAVYGKPVLPSGSTSPSPLPFLHGSLSTGTPQPQPPSESTEKEPEQDGPAAPADGSTVESLPRPLSPTKLTPIVHSPLRYQSDADLEALRRKLANAPRPLKKRSSITEPEGPGGPNIQKLLYQRFNTLAGGMEGTPFYQPSPSQDFMGTLADVDNGNTNANGNLEELPPAQPTAPLPAEPAPSSDANDNELPSPEPEELICPQTTHQTAEPAEDNNNNVATVPTTEQIPSPVAEAPSPGEEQVPPAPLPPASHPPATSTNKRTNLKKPNSERTGHGLRVRFNPLALLLDASLEGEFDLVQRIIYEVEDPSKPNDEGITPLHNAVCAGHHHIVKFLLDFGVNVNAADSDGWGAGKAGCDEQRCGVCSVGLRGPEQ

SEQ ID NO: 185832 - DNA, 3273 bp, Artificial Sequence
  derived and/or modified sequence
atgatgcccatgatcctgaccgtgttcctgagcaacaacgagcagatcctgaccgaggtgcccatcacccccgagaccacctgcagagacgtggtggagttctgcaaggagcccggcgagggcagctgccacctggccgaggtgtggagaggcaacgagagacccatccccttcgaccacatgatgtacgagcacctgcagaagtggggccccagaagagaggaggtgaagttcttcctgagacacgaggacagccccaccgagaacagcgagcagggcggcagacagacccaggagcagagaacccagagaaacgtgatcaacgtgcccggcgagaagagaaccgagaacggcgtgggcaaccccagagtggagctgaccctgagcgagctgcaggacatggccgccagacagcagcagcagatcgagaaccagcagcagatgctggtggccaaggagcagagactgcacttcctgaagcagcaggagagaagacagcagcagagcatcagcgagaacgagaagctgcagaagctgaaggagagagtggaggcccaggagaacaagctgaagaagatcagagccatgagaggccaggtggactacagcaagatcatgaacggcaacctgagcgccgagatcgagagattcagcgccatgttccaggagaagaagcaggaggtgcagaccgccatcctgagagtggaccagctgagccagcagctggaggacctgaagaagggcaagctgaacggcttccagagctacaacggcaagctgaccggccccgccgccgtggagctgaagagactgtaccaggagctgcagatcagaaaccagctgaaccaggagcagaacagcaagctgcagcagcagaaggagctgctgaacaagagaaacatggaggtggccatgatggacaagagaatcagcgagctgagagagagactgtacggcaagaagatccagctgaacagagtgaacggcaccagcagcccccagagccccctgagcaccagcggcagagtggccgccgtgggcccctacatccaggtgcccagcgccggcagcttccccgtgctgggcgaccccatcaagccccagagcctgagcatcgccagcaacgccgcccacggcagaagcaagagcgccaacgacggcaactggcccaccctgaagcagaacagcagcagcagcgtgaagcccgtgcaggtggccggcgccgactggaaggaccccagcgtggagggcagcgtgaagcagggcaccgtgagcagccagcccgtgcccttcagcgccctgggccccaccgagaagcccggcatcgagatcggcaaggtgcccccccccatccccggcgtgggcaagcagctgccccccagctacggcacctaccccagccccacccccctgggccccggcagcaccagcagcctggagagaagaaaggagggcagcctgcccagacccagcgccggcctgcccagcagacagagacccaccctgctgcccgccaccggcagcaccccccagcccggcagcagccagcagatccagcagagaatcagcgtgccccccagccccacctacccccccgccggcccccccgccttccccgccggcgacagcaagcccgagctgcccctgaccgtggccatcagacccttcctggccgacaagggcagcagaccccagagccccagaaagggcccccagaccgtgaacagcagcagcatctacagcatgtacctgcagcaggccaccccccccaagaactaccagcccgccgcccacagcgccctgaacaagagcgtgaaggccgtgtacggcaagcccgtgctgcccagcggcagcaccagccccagccccctgcccttcctgcacggcagcctgagcaccggcaccccccagccccagccccccagcgagagcaccgagaaggagcccgagcaggacggccccgccgcccccgccgacggcagcaccgtggagagcctgcccagacccctgagccccaccaagctgacccccatcgtgcacagccccctgagataccagagcgacgccgacctggaggccctgagaagaaagctggccaacgcccccagacccctgaagaagagaagcagcatcaccgagcccgagggccccggcggccccaacatccagaagctgctgtaccagagattcaacaccctggccggcggcatggagggcacccccttctaccagcccagccccagccaggacttcatgggcaccctggccgacgtggacaacggcaacaccaacgccaacggcaacctggaggagctgccccccgcccagcccaccgcccccctgcccgccgagcccgcccccagcagcgacgccaacgacaacgagctgcccagccccgagcccgaggagctgatctgcccccagaccacccaccagaccgccgagcccgccgaggacaacaacaacaacgtggccaccgtgcccaccaccgagcagatccccagccccgtggccgaggcccccagccccggcgaggagcaggtgccccccgcccccctgccccccgccagccacccccccgccaccagcaccaacaagagaaccaacctgaagaagcccaacagcgagagaaccggccacggcctgagagtgagattcaaccccctggccctgctgctggacgccagcctggagggcgagttcgacctggtgcagagaatcatctacgaggtggaggaccccagcaagcccaacgacgagggcatcacccccctgcacaacgccgtgtgcgccggccaccaccacatcgtgaagttcctgctggacttcggcgtgaacgtgaacgccgccgacagcgacggctggacccccctgcactgcgccgccagctgcaacagcgtgcacctgtgcaagcagctggtggagagcggcgccgccatcttcgccagcaccatcagcgacatcgagaccgccgccgacaagtgcgaggagatggaggagggctacatccagtgcagccagttcctgtacggcgtgcaggagaagctgggcgtgatgaacaagggcgtggcctacgccctgtgggactacgaggcccagaacagcgacgagctgagcttccacgagggcgacgccctgaccatcctgagaagaaaggacgagagcgagaccgagtggtggtgggccagactgggcgacagagagggctacgtgcccaagaacctgctgggcctgtaccccagaatcaagcccagacagagaaccctggcctag

SEQ ID NO: 185833 - DNA, 1884 bp, Artificial Sequence
  derived and/or modified sequence
atggccgccagacagcagcagcagatcgagaaccagcagcagatgctggtggccaaggagcagagactgcacttcctgaagcagcaggagagaagacagcagcagagcatcagcgagaacgagaagctgcagaagctgaaggagagagtggaggcccaggagaacaagctgaagaagatcagagccatgagaggccaggtggactacagcaagatcatgaacggcaacctgagcgccgagatcgagagattcagcgccatgttccaggagaagaagcaggaggtgcagaccgccatcctgagagtggaccagctgagccagcagctggaggacctgaagaagggcaagctgaacggcttccagagctacaacggcaagctgaccggccccgccgccgtggagctgaagagactgtaccaggagctgcagatcagaaaccagctgaaccaggagcagaacagcaagctgcagcagcagaaggagctgctgaacaagagaaacatggaggtggccatgatggacaagagaatcagcgagctgagagagagactgtacggcaagaagatccagctgaacagagtgaacggcaccagcagcccccagagccccctgagcaccagcggcagagtggccgccgtgggcccctacatccaggtgcccagcgccggcagcttccccgtgctgggcgaccccatcaagccccagagcctgagcatcgccagcaacgccgcccacggcagaagcaagagcgccaacgacggcaactggcccaccctgaagcagaacagcagcagcagcgtgaagcccgtgcaggtggccggcgccgactggaaggaccccagcgtggagggcagcgtgaagcagggcaccgtgagcagccagcccgtgcccttcagcgccctgggccccaccgagaagcccggcatcgagatcggcaaggtgcccccccccatccccggcgtgggcaagcagctgccccccagctacggcacctaccccagccccacccccctgggccccggcagcaccagcagcctggagagaagaaaggagggcagcctgcccagacccagcgccggcctgcccagcagacagagacccaccctgctgcccgccaccggcagcaccccccagcccggcagcagccagcagatccagcagagaatcagcgtgccccccagccccacctacccccccgccggcccccccgccttccccgccggcgacagcaagcccgagctgcccctgaccgtggccatcagacccttcctggccgacaagggcagcagaccccagagccccagaaagggcccccagaccgtgaacagcagcagcatctacagcatgtacctgcagcaggccaccccccccaagaactaccagcccgccgcccacagcgccctgaacaagagcgtgaaggccgtgtacggcaagcccgtgctgcccagcggcagcaccagccccagccccctgcccttcctgcacggcagcctgagcaccggcaccccccagccccagccccccagcgagagcaccgagaaggagcccgagcaggacggccccgccgcccccgccgacggcagcaccgtggagagcctgcccagacccctgagccccaccaagctgacccccatcgtgcacagccccctgagataccagagcgacgccgacctggaggccctgagaagaaagctggccaacgcccccagacccctgaagaagagaagcagcatcaccgagcccgagggcccccccttcctgcccgcccagcccctgcccggcctgcacggccacctgggcagatgcggccagtggaagcaccagtgccagtggaagcccggcagagcccccccctgccccgcccacagccccacccccagatag

SEQ ID NO: 185834 - DNA, 1908 bp, Artificial Sequence
  derived and/or modified sequence
tgagtgggcccctacatccaggtgcccagcgccggcagcttccccgtgctgggcgaccccatcaagccccagagcctgagcatcgccagcaacgccgcccacggcagaagcaagagcgccaacgacggcaactggcccaccctgaagcagaacagcagcagcagcgtgaagcccgtgcaggtggccggcgccgactggaaggaccccagcgtggagggcagcgtgaagcagggcaccgtgagcagccagcccgtgcccttcagcgccctgggccccaccgagaagcccggcatcgagatcggcaaggtgcccccccccatccccggcgtgggcaagcagctgccccccagctacggcacctaccccagccccacccccctgggccccggcagcaccagcagcctggagagaagaaaggagggcagcctgcccagacccagcgccggcctgcccagcagacagagacccaccctgctgcccgccaccggcagcaccccccagcccggcagcagccagcagatccagcagagaatcagcgtgccccccagccccacctacccccccgccggcccccccgccttccccgccggcgacagcaagcccgagctgcccctgaccgtggccatcagacccttcctggccgacaagggcagcagaccccagagccccagaaagggcccccagaccgtgaacagcagcagcatctacagcatgtacctgcagcaggccaccccccccaagaactaccagcccgccgcccacagcgccctgaacaagagcgtgaaggccgtgtacggcaagcccgtgctgcccagcggcagcaccagccccagccccctgcccttcctgcacggcagcctgagcaccggcaccccccagccccagccccccagcgagagcaccgagaaggagcccgagcaggacggccccgccgcccccgccgacggcagcaccgtggagagcctgcccagacccctgagccccaccaagctgacccccatcgtgcacagccccctgagataccagagcgacgccgacctggaggccctgagaagaaagctggccaacgcccccagacccctgaagaagagaagcagcatcaccgagcccgagggccccggcggccccaacatccagaagctgctgtaccagagattcaacaccctggccggcggcatggagggcacccccttctaccagcccagccccagccaggacttcatgggcaccctggccgacgtggacaacggcaacaccaacgccaacggcaacctggaggagctgccccccgcccagcccaccgcccccctgcccgccgagcccgcccccagcagcgacgccaacgacaacgagctgcccagccccgagcccgaggagctgatctgcccccagaccacccaccagaccgccgagcccgccgaggacaacaacaacaacgtggccaccgtgcccaccaccgagcagatccccagccccgtggccgaggcccccagccccggcgaggagcaggtgccccccgcccccctgccccccgccagccacccccccgccaccagcaccaacaagagaaccaacctgaagaagcccaacagcgagagaaccggccacggcctgagagtgagattcaaccccctggccctgctgctggacgccagcctggagggcgagttcgacctggtgcagagaatcatctacgaggtggaggaccccagcaagcccaacgacgagggcatcacccccctgcacaacgccgtgtgcgccggccaccaccacatcgtgaagttcctgctggacttcggcgtgaacgtgaacgccgccgacagcgacggctggggcgccggcaaggccggctgcgacgagcagagatgcggcgtgtgcagcgtgggcctgagaggccccgagcagtag

SEQ ID NO: 185835 - DNA, 3273 bp, Artificial Sequence
  derived and/or modified sequence
atgatgccaatgatcctcacagtgttcctgtccaataacgaacagatcctgaccgaggtgcccattaccccagaaacaacctgtagggacgtcgtggaattttgcaaggagcccggagagggctcttgccacctggccgaggtttggaggggaaatgagcggcctatccccttcgatcacatgatgtacgagcacttacagaagtggggtccccgcagagaagaggtaaagttctttctgcggcatgaagattcacctacggaaaatagcgagcagggtggacgccaaactcaggagcaacggacacaaaggaacgtgattaatgttccaggagaaaagcggacagagaatggggtggggaatcctagagtggaacttaccctgtcagaactgcaggacatggcagctagacagcagcagcagattgagaatcagcagcagatgctggtggcaaaggagcaacgactccatttcttgaaacagcaggaacgcaggcagcagcagagcatctccgagaacgagaaactccagaagctaaaggagcgagtggaggcacaggagaacaagcttaagaagattagggcaatgagaggccaggtggattacagtaaaattatgaacggcaatttaagcgctgaaatcgagaggttcagtgccatgttccaagagaaaaaacaggaagtgcaaaccgccatcctgagagtggatcagttgtcacaacagctcgaggatctgaaaaaaggcaaattaaatggatttcagtcttataacgggaagctgaccgggcccgccgcagtcgagctgaagagactgtaccaggaactacaaatccgcaaccagctgaaccaggagcagaacagcaaattgcagcagcagaaggaactcctgaacaagaggaacatggaagtcgccatgatggataagagaatttccgagctgagggagaggctctacggtaagaagatacaactaaatcgggtgaatggcacctcaagtccccaatctccactgagtaccagcggccgcgttgccgctgtgggcccgtatatccaggtgccaagcgcagggagttttcctgtccttggagaccccatcaagccccagagtctgtctatcgcctccaatgccgctcacggcagaagcaaatctgccaatgatgggaactggccgaccctgaaacagaacagcagtagctcagtgaagcccgtgcaggtggccggtgccgactggaaagatccatccgtggaggggagtgtgaaacaaggcacggttagcagccagcccgtcccattcagtgcccttgggcctaccgaaaagcccggcattgaaatcggaaaggtaccgccgcctattcccggcgtcggaaagcaactgcccccttcttacgggacctatccatcccctactccgctaggcccagggtcaacttcaagcttagaacgccgaaaggaaggatccctgccccgcccgtccgccggcctgccttcaagacaacgtcctaccctacttcccgccacaggttccactccacagcctgggagctctcaacaaatccagcaaaggatatcagtgcctccaagtccaacatatcccccggccggaccccccgcgttccctgccggcgattccaagccagagctgcctctgacggtcgcaatccggccctttctcgccgacaagggttcacggccccagagcccacgcaaaggacctcagactgtaaattccagttcgatttattccatgtatctgcagcaggccacaccacctaagaactatcagcccgccgctcacagcgcgctcaataaatcagtgaaggctgtgtacggcaagcctgtactgccttcagggtctaccagccccagcccccttcctttcctgcacggtagcctttctaccggcacgccccaaccacagcccccttcggagtcaactgagaaggaacccgagcaggacggacccgctgcaccagctgacggcagtactgttgagtccctgccaaggcctttatcgcctactaagttgacccccatagtgcacagtcccctgcggtaccaatcggatgccgacctggaagccctgcggaggaagctggccaacgctcctcggccactgaagaaaaggtcgagcatcacggaacccgaaggacccgggggtccaaatatccagaaacttctgtatcagaggtttaataccctggcaggtggcatggaggggactcctttttaccagccttcgccctcccaagatttcatgggaacattggcagacgtcgataatggaaacacaaatgccaatgggaacctggaagagctgccacctgcccagccaactgctcccctgcctgcagaacctgcaccgagttccgatgctaacgacaacgaactgccttctcccgagccagaggaactgatctgcccccagacgactcaccaaactgccgaaccagccgaggataacaacaacaacgtggctactgtgccaaccacagaacagatcccctcccctgtcgccgaggccccttcaccaggcgaagaacaagttccaccagctcccttgcctcccgcaagccaccctcccgcaacgagtactaacaagcgaactaatctcaagaagccaaattcagaaaggaccgggcacgggctcagggtgcgctttaacccactagccctgctattggacgccagcttggagggcgaatttgatctggtacagagaatcatttacgaagtggaagatcccagcaagcccaatgacgagggtatcacaccacttcacaacgcagtttgcgctgggcaccatcatattgtcaagttcctgctggactttggagtgaacgtcaatgcagccgacagcgacgggtggacaccactgcactgcgccgcgtcctgtaacagcgtgcacctttgtaaacagctcgtggagtctggcgcagccatctttgccagcaccatctcagacattgaaaccgctgcggacaaatgtgaggaaatggaggaaggatacatacagtgctcccagtttttatacggggtccaagagaagctgggagttatgaacaaaggtgtggcatatgcgctatgggattatgaggcacaaaacagcgacgaactgtcttttcacgaaggagacgcactcacaattttacggaggaaggatgaaagcgaaaccgagtggtggtgggctagactgggcgaccgggagggatatgtccccaaaaacttactcggactataccccagaatcaagcccagacagcgcactctagcctag

SEQ ID NO: 185836 - DNA, 1884 bp, Artificial Sequence
  derived and/or modified sequence
atggctgcccgtcagcaacagcagatagagaaccagcaacagatgcttgtcgccaaagagcagcggctgcatttcctcaagcagcaggaacggaggcaacagcagtctattagcgaaaacgagaagcttcagaaacttaaagagcgcgtggaggcccaagagaacaagcttaagaaaatacgggccatgcgggggcaggtagactacagtaaaattatgaatgggaatttgagcgccgagatcgaaaggtttagcgcaatgttccaagagaagaaacaagaggtgcagactgcaatccttagagtggaccagctgagccagcaactggaagacctgaagaaaggcaaactgaacggctttcagtcgtacaacggcaagttgacaggacctgccgcagtagaactgaaacgtctataccaggagctccaaattcgcaatcagctcaatcaggagcagaattcaaagctgcagcagcagaaggagctcttgaataaaaggaatatggaggtcgcaatgatggacaagcggatctccgagctgcgcgaaagattgtacggcaagaagattcagctgaacagggtgaacggcacatcaagcccccagagtccactttcaaccagtggacgggtggccgctgtcgggccttatattcaggtgccctcggctggatcttttcctgtcctcggtgacccaatcaagccccagagtttatccatcgcctcaaacgccgcacacgggcgttccaagtccgcgaatgatggtaactggccaactcttaaacaaaattcatcctcttccgtgaaaccagtccaagtggcaggggccgattggaaagacccctccgtggagggctccgtcaagcaagggacggtgagctctcaacctgtgccattcagcgctcttggccccactgaaaaacctggcatagagattggaaaagtcccgcctccaatccctggcgttggaaagcagctgcctcccagctatgggacttatccgagtcctacaccactcggacctggttcaacatcatcactggaacggcggaaagagggatccctgccaaggccaagcgccggactgcctagtagacagcgcccaaccctgctgcctgcaacagggagcaccccacagcccggatcctcgcagcaaatccagcagagaatctctgtcccaccctcccctacatatccccctgcggggcctcctgcctttcctgccggtgactccaaaccggagctaccgcttacagtggccatcagaccatttttggcggataagggaagcagaccacagagtcctcgcaaggggccccagaccgtgaattcctcttctatctatagcatgtatctacagcaggccactcctccaaagaactatcagcctgcagcccattctgcactgaataagtctgtgaaagcggtctatggcaagcccgttttgccatctgggtccacaagcccatccccgcttcccttcttgcacggctcgctgtcaactgggactccccagccacagcctccctccgagtctaccgagaaggagcctgagcaggacggcccggctgctccagccgatgggagtactgtggaaagcctgccccggccattgtcaccaaccaagctgaccccgatcgttcatagcccattgcggtatcaaagcgacgccgatctcgaagcccttcggcggaagttagccaacgcaccccggccactgaaaaaaaggtcaagtattacagaacctgaagggccaccatttcttcccgcccagccactccccggcctgcatggacacttaggacgctgcggccagtggaagcatcagtgtcagtggaagccagggagagcccccccttgtcccgcccactccccaacaccgagatag

SEQ ID NO: 185837 - DNA, 1908 bp, Artificial Sequence
  derived and/or modified sequence
tgagttggtccctacattcaggtacccagcgccgggagctttcccgtcctgggcgaccctattaagcctcaatcacttagcatagcgtctaatgccgcccatggaaggtctaagtcagccaacgatggaaactggccaaccttgaagcagaacagctccagcagtgtgaaaccggttcaggtagcaggggctgattggaaagatccgtcagtcgagggcagcgtgaaacagggcactgtgagtagccagcctgtcccattttccgccttaggccctactgagaagcccggcattgagatcgggaaggtccctcccccaattcctggtgtgggtaagcaattgccaccttcctatggcacctatccctccccaacaccgctgggtccggggagtaccagctctctggagaggagaaaggaaggaagtttgccacgtccatctgccggccttcctagccgacaaagaccgactctgctgccagctaccggctcaaccccgcaaccagggtcatcacagcagattcagcagcggatctctgttcctccttcccccacatacccaccagccggaccaccggctttcccggccggcgattcaaagcctgagctgcctttaacagtggcaattcgtcccttcctggctgataaagggtccaggcctcagagccctagaaaaggaccacagaccgtgaattcttctagtatttactcaatgtacctccagcaggcgactccacctaaaaactaccagccagctgcccacagcgcgcttaacaagagcgtcaaggctgtgtatgggaaacccgtgctgccttctggaagcacgtcacccagtccactgccattcctacatgggtctctatcaaccggcacgccccagccccagcctcctagtgagagtaccgaaaaggaacccgagcaggatggccccgccgcacccgctgatggcagcactgtcgaatctctgcctagacccctgtcaccaactaagttgaccccgattgttcatagtcctctgcggtaccaatcagatgcggaccttgaggctctcagacgcaaactagccaatgccccacgccccctaaaaaaacgctcttctattaccgaacccgaaggccctggcgggcccaatatccagaaactcctttaccaacggtttaacaccctcgccgggggcatggaggggaccccattctatcagccctctccttcccaggactttatgggcaccctggccgacgtcgacaacggcaatacgaatgcgaatggcaaccttgaagagctgcctcccgctcagcctaccgcgccactaccagcagaacctgcgccctcctctgatgccaacgacaatgaactgccctcccccgagcccgaagaactgatctgtccccagacgacacatcaaacagctgaaccagccgaggacaataacaacaatgttgcgacagttcctaccacagagcagattccttcccctgtggccgaggcccccagtccgggtgaggagcaggtgcctcccgcacccctgccccccgctagtcacccaccagcgacttcaaccaataagcgcacaaacttgaaaaaaccaaactctgagagaactggccatgggctgcgcgtgcggttcaacccactagcgctgctgttagatgccagcctggagggcgagttcgaccttgtgcagaggatcatctatgaggttgaggatcccagcaaacccaatgacgagggtatcactcctctgcacaatgccgtatgtgcaggccatcatcatatcgttaagtttctacttgatttcggggtgaacgtgaatgccgctgattcagatggctggggagctggtaaagccggatgtgatgagcagagatgtggtgtgtgtagcgttggtttgaggggaccagagcagtag

SEQ ID NO: 185838 - DNA, 3273 bp, Artificial Sequence
  derived and/or modified sequence
atgatgcccatgatcctgactgtgttcctgagcaacaatgagcagatcctgacagaggtgcccatcaccccagagaccacctgcagagatgtggtggagttctgcaaggagcccggggagggcagctgccacctggccgaggtgtggagaggaaatgaaagacccatcccctttgaccacatgatgtatgagcacctgcagaagtggggcccccggcgggaggaggtgaagttcttcctgcggcatgaggacagccccacagagaacagcgagcagggcggccggcagacccaggagcagaggacccagagaaatgtcatcaacgtgcctggagagaagaggacagaaaatggagtgggcaacccccgggtggagctgaccctgtctgagctgcaggacatggccgcccggcagcagcagcagatcgagaaccagcagcagatgctggtggccaaggagcagaggctgcacttcctgaagcagcaggagcggcggcagcagcagagcatcagtgaaaatgagaagctgcagaagctgaaggagcgggtggaggcccaggagaacaagctgaagaagatccgggccatgaggggccaggtggactacagcaagatcatgaatggaaacctgtctgctgagattgagcgcttcagcgccatgttccaggagaagaagcaggaggtgcagacagccatcctgcgggtggaccagctgagccagcagctggaggacctgaagaagggcaagctgaatggcttccagagctacaacgggaagctgactggacctgctgctgtggagctgaagaggctgtaccaggagctgcagatccggaaccagctgaaccaggagcagaacagcaagctgcagcagcagaaggagctgctgaacaagaggaacatggaggtggccatgatggacaagaggatcagcgagctgcgggagcggctgtatggcaagaagatccagctgaacagagtgaatggcaccagcagcccccagagccccctgagcaccagcggccgggtggccgctgtgggcccctacatccaggtgcccagcgctggcagcttccctgtgctgggggaccccatcaagccccagagcctgagcatcgccagcaatgctgcccacggccgcagcaagagcgccaatgatggcaactggcccaccctgaagcagaacagcagcagctctgtgaagcctgtgcaggtggccggggctgactggaaggaccccagcgtggagggctctgtgaagcagggcaccgtgagcagccagcctgtgcccttcagcgccctgggccccacagagaagccaggcatcgagatcggcaaggtgcccccacccatccctggggtgggcaagcagctgcccccatcctatggcacctaccccagccccacccccctgggccctggcagcaccagcagcctggagaggaggaaggagggcagcctgccccggcccagcgctggcctgcccagccggcagaggcccaccctgctgcctgccaccggcagcaccccccagcccggcagcagccagcagatccagcagaggatctctgtgccccccagccccacctacccacctgctggccccccagccttccctgctggggacagcaagccagagctgcccctgactgtggccatccggcccttcctggccgacaagggcagccggccccagagccccaggaagggcccccagacagtgaacagcagcagcatctacagcatgtacctgcagcaggccaccccacccaagaactaccagcctgctgcccacagcgccctgaacaagtctgtgaaggctgtgtatggcaagcctgtgctgcccagcggcagcaccagccccagccccctgcccttcctgcacggcagcctgagcacaggcaccccccagccccagccccccagcgagagcacagagaaggagcctgagcaggacggccctgctgccccagcagatggcagcacagtggagagcctgccccggcccctgagccccaccaagctgacccccatcgtgcacagccccctgcgctaccagagtgatgctgacctggaggccctgcggaggaagctggccaatgccccccggcccctgaagaagaggagcagcatcacagagcctgagggccctgggggccccaacatccagaagctgctgtaccagcgcttcaacaccctggccggcggcatggagggcacccccttctaccagcccagccccagccaggacttcatgggcaccctggctgatgtggacaatggaaacaccaatgccaacggcaacctggaggagctgcccccagcccagcccacagcccccctgcctgctgagcccgcccccagcagtgatgccaatgacaatgagctgcccagccctgagcctgaggagctgatctgcccccagaccacccaccagacagctgagcctgctgaggacaacaacaacaacgtggccaccgtgcccaccacagagcagatccccagccctgtggccgaggcccccagccctggagaggagcaggtgcccccagcccccctgcccccagccagccaccccccagccaccagcaccaacaagaggaccaacctgaagaagcccaacagcgagaggacaggccacggcctgcgggtgcgcttcaaccccctggccctgctgctggatgccagcctggagggggagtttgacctggtgcagaggatcatctatgaggtggaggaccccagcaagcccaatgatgagggcatcacccccctgcacaatgctgtgtgtgccggccaccaccacatcgtgaagttcctgctggactttggagtgaatgtgaatgctgctgacagtgatggctggacccccctgcactgtgccgccagctgcaacagcgtgcacctgtgcaagcagctggtggagagcggggccgccatctttgccagcaccatcagtgacatcgagacagctgctgacaagtgtgaggagatggaggagggctacatccagtgcagccagttcctgtatggagtgcaggagaagctgggcgtgatgaacaagggcgtggcctatgccctgtgggactatgaggcccagaacagtgatgagctgtccttccatgaaggagatgccctgaccatcctgcggaggaaggatgaaagtgaaacagagtggtggtgggcccggctgggggaccgggagggctacgtgcccaagaacctgctgggcctgtacccccgcatcaagccccggcagaggaccctggcctag

SEQ ID NO: 185839 - DNA, 1884 bp, Artificial Sequence
  derived and/or modified sequence
atggccgcccggcagcagcagcagatcgagaaccagcagcagatgctggtggccaaggagcagaggctgcacttcctgaagcagcaggagcggcggcagcagcagagcatcagtgaaaatgagaagctgcagaagctgaaggagcgggtggaggcccaggagaacaagctgaagaagatccgggccatgaggggccaggtggactacagcaagatcatgaatggaaacctgtctgctgagattgagcgcttcagcgccatgttccaggagaagaagcaggaggtgcagacagccatcctgcgggtggaccagctgagccagcagctggaggacctgaagaagggcaagctgaatggcttccagagctacaacgggaagctgaccggccctgctgctgtggagctgaagaggctgtaccaggagctgcagatccggaaccagctgaaccaggagcagaacagcaagctgcagcagcagaaggagctgctgaacaagaggaacatggaggtggccatgatggacaagaggatcagcgagctgcgggagcggctgtatggcaagaagatccagctgaacagagtgaatggcaccagcagcccccagagccccctgagcaccagcggccgggtggccgctgtgggcccctacatccaggtgcccagcgctggcagcttccctgtgctgggggaccccatcaagccccagagcctgagcatcgccagcaatgctgcccacggccgcagcaagagcgccaatgatggcaactggcccaccctgaagcagaacagcagcagctctgtgaagcctgtgcaggtggccggggctgactggaaggaccccagcgtggagggctctgtgaagcagggcaccgtgagcagccagcctgtgcccttcagcgccctgggccccacagagaagccaggcattgaaattggcaaggtgcccccacccatccctggggtgggcaagcagctgccccccagctatggcacctaccccagccccacccccctgggccctggcagcaccagcagcctggagaggaggaaggagggcagcctgccccggcccagcgctggcctgcccagccggcagaggcccaccctgctgcctgccaccggcagcaccccccagcccggcagcagccagcagatccagcagaggatctctgtgccccccagccccacctaccccccagctggccccccagccttccctgctggggacagcaagccagagctgcccctgactgtggccatccggcccttcctggccgacaagggcagccggccccagagccccaggaagggcccccagacagtgaacagcagcagcatctacagcatgtacctgcagcaggccaccccacccaagaactaccagcctgctgcccacagcgccctgaacaagtctgtgaaggctgtgtatggcaagcctgtgctgcccagcggcagcaccagccccagccccctgcccttcctgcacggcagcctgagcacaggcaccccccagccccagcccccatctgagagcacagagaaggagcctgagcaggacggccctgctgccccagcagatggcagcacagtggagagcctgccccggcccctgagccccaccaagctgacccccatcgtgcacagccccctgcgctaccagagtgatgctgacctggaggccctgcggaggaagctggccaatgccccccggcccctgaagaagaggagcagcatcacagagcctgagggcccccccttcctgcctgcccagcccctgcccggcctgcacggccacctgggccgctgtggccagtggaagcaccagtgccagtggaagccaggccgggccccaccctgcccagcccacagccccaccccaagatag

SEQ ID NO: 185840 - DNA, 1908 bp, Artificial Sequence
  derived and/or modified sequence
tgagtgggcccctacatccaggtgcccagcgctggcagcttccctgtgctgggggaccccatcaagccccagagcctgagcatcgccagcaatgctgcccacggccgcagcaagagcgccaatgatggcaactggcccaccctgaagcagaacagcagcagctctgtgaagcctgtgcaggtggccggggctgactggaaggaccccagcgtggagggctctgtgaagcagggcaccgtgagcagccagcctgtgcccttcagcgccctgggccccacagagaagccaggcatcgagatcggcaaggtgcccccacccatccctggggtgggcaagcagctgcccccatcctatggcacctaccccagccccacccccctgggccctggcagcaccagcagcctggagaggaggaaggagggcagcctgccccggcccagcgctggcctgcccagccggcagaggcccaccctgctgcctgccaccggcagcaccccccagcccggcagcagccagcagatccagcagaggatctctgtgccccccagccccacctacccacctgctggccccccagccttccctgctggggacagcaagccagagctgcccctgactgtggccatccggcccttcctggccgacaagggcagccggccccagagccccaggaagggcccccagacagtgaacagcagcagcatctacagcatgtacctgcagcaggccaccccacccaagaactaccagcctgctgcccacagcgccctgaacaagtctgtgaaggctgtgtatggcaagcctgtgctgcccagcggcagcaccagccccagccccctgcccttcctgcacggcagcctgagcacaggcaccccccagccccagccccccagcgagagcacagagaaggagcctgagcaggacggccctgctgccccagcagatggcagcacagtggagagcctgccccggcccctgagccccaccaagctgacccccatcgtgcacagccccctgcgctaccagagtgatgctgacctggaggccctgcggaggaagctggccaatgccccccggcccctgaagaagaggagcagcatcacagagcctgagggccctgggggccccaacatccagaagctgctgtaccagcgcttcaacaccctggccggcggcatggagggcacccccttctaccagcccagccccagccaggacttcatgggcaccctggctgatgtggacaatggaaacaccaatgccaacggcaacctggaggagctgcccccagcccagcccacagcccccctgcctgctgagcccgcccccagcagtgatgccaatgacaatgagctgcccagccctgagcctgaggagctgatctgcccccagaccacccaccagacagctgagcctgctgaggacaacaacaacaacgtggccaccgtgcccaccacagagcagatccccagccctgtggccgaggcccccagccctggagaggagcaggtgcccccagcccccctgcccccagccagccaccccccagccaccagcaccaacaagaggaccaacctgaagaagcccaacagcgagaggacaggccacggcctgcgggtgcgcttcaaccccctggccctgctgctggatgccagcctggagggggagtttgacctggtgcagaggatcatctatgaggtggaggaccccagcaagcccaatgatgagggcatcacccccctgcacaatgctgtgtgtgccggccaccaccacatcgtgaagttcctgctggactttggagtgaatgtgaatgctgctgacagtgatggctggggcgccggcaaggccggctgtgatgagcagagatgtggggtgtgcagcgtgggcctgcggggccctgagcagtag

SEQ ID NO: 185841 - DNA, 3273 bp, Artificial Sequence
  derived and/or modified sequence
atgatgcccatgatcctgaccgtgttcctgagcaacaacgagcagatcctcacagaggtgcccataacacccgaaactacatgtcgtgacgttgtagagttctgtaaggaacccggcgaggggtcatgtcatctggccgaggtgtggagggggaatgagcgccccatcccttttgaccacatgatgtatgagcacctccagaagtggggcccccgcagggaagaagttaagttcttccttagacatgaggattcgcccactgagaactccgaacaaggaggacgccagactcaggaacaacgaacccaaagaaacgtcataaatgtgccaggtgaaaagcgtactgaaaacggagtaggcaatccgcgcgtggagctaactttgtctgaattacaggacatggctgcacggcaacagcagcaaatcgagaaccagcaacagatgctggttgctaaagaacaaaggttacacttcctcaaacagcaagagagacgccagcagcagtcaatatcggaaaatgaaaagttacagaagctgaaggaaagggtggaagcacaggagaataagttaaaaaagataagggccatgcggggccaggtggattattccaaaattatgaatgggaaccttagtgcagagattgagagattttcagctatgttccaggagaaaaagcaggaagtccaaacagccatcctccgcgtcgaccagttgtctcagcagcttgaagatttaaaaaagggaaaactgaatggatttcagtcttacaatggaaaattgacgggtcccgccgcagtggagctgaagaggttataccaggaactgcaaatcaggaaccagctcaaccaggaacagaatagtaagttgcagcagcagaaagaactgctgaacaaacggaatatggaggtcgccatgatggataagcgaatttcagagctgcgggaacggctgtacggcaagaagatacaactcaaccgcgtgaacgggacctcatcaccacaatcacccttaagcacttctggtagagttgccgctgttggcccatatatccaggtgccctcagctgggtctttcccggtgctgggagacccgatcaagccacaatccctgtctatagcttcaaatgccgcccatgggaggtccaagtcggcaaatgacgggaactggcccactttaaaacagaacagcagctcttctgtgaagccagtgcaagtggctggagcggactggaaggatccctccgtagaaggctctgtgaaacaggggaccgtctcctcccagcccgtgccgtttagcgccctgggtccaacggagaaaccaggtattgaaatcggtaaggtgccaccaccgattcctggcgttggcaagcaattgccgccgagctacggcacttatccctctcctacaccccttggcccgggctccactagcagccttgaacggcgcaaagaaggttctctgcctaggccttcagcgggcctgccaagccgccagcggcccactctcctgcccgcgactggatcaacccctcaaccggggtcaagtcagcagatacagcagcggatttccgtgccacccagtccaacctacccacccgcaggccctccggctttccccgcaggggactccaaacccgaattgccactcaccgttgcaattcggccatttttggctgataagggatctcgcccacagtcacctcggaaggggcctcaaactgtcaactcgagcagtatctactctatgtacctccagcaggctaccccccctaaaaattaccaacctgctgctcattcagctctgaacaaatccgttaaagccgtctacggcaaacctgtcctgccgagtggatcaacctccccaagtccactacccttcctacatggatcactctccacagggacgccgcaaccccaacctccgtctgagtctacagagaaggagcccgagcaggacggtcccgcggctcccgccgacggatccacagtggaatcacttccgcgccccttgagccctactaaattaaccccgatagtccacagtcccctacgctatcagtccgatgcggatctggaggccctcagaagaaagctggcgaatgctccccggccccttaaaaaacgaagcagtatcaccgagccggaaggaccaggcgggcccaatatacagaagctcctgtatcaacgatttaacacgttagctgggggcatggagggaaccccgttttatcagccctcaccgagtcaggatttcatggggaccttggcagatgttgacaacggaaacactaatgctaacgggaacttagaagagttgcctccagctcagccgacagccccccttcccgcagagcccgccccgagcagcgacgctaatgataatgagttaccctccccagagccagaagaactaatttgccctcagacaacccaccagaccgccgagcccgccgaggacaacaacaacaatgtcgctacggtgccaaccacagagcaaattccctcgccagttgctgaggctccttctcctggcgaggaacaggtaccccccgccccacttccgccagcatcacacccacctgcaacctctaccaataagcgaactaacttaaagaagcccaactctgagcggaccggtcacggactgcgggttagattcaacccgctcgcccttcttctcgatgccagcctggagggggaattcgacctggttcaacgaataatttacgaagtcgaagacccctcaaagccaaatgacgagggcattacgcccctacacaacgccgtctgcgctggacaccatcacatcgttaaattcctgcttgattttggcgttaatgtgaacgcggccgactccgacggctggacgccgttacactgcgcggcgagctgtaattcagtgcacctttgcaagcagcttgtggaatcaggcgcggccatattcgcttcaaccatttccgatatcgaaacagcagccgataaatgtgaggaaatggaggaaggatacattcaatgctctcagttcctgtacggtgttcaggagaaactgggggtaatgaacaagggggtagcatacgccctgtgggattacgaggctcagaactcagacgaactctcctttcacgagggggacgctttaaccattttgagaaggaaagatgagagtgaaaccgagtggtggtgggcgcggttaggtgacagggaggggtacgtaccaaagaatctgcttggcctgtacccgagaattaaacccaggcagaggacacttgcatag

SEQ ID NO: 185842 - DNA, 1884 bp, Artificial Sequence
  derived and/or modified sequence
atggccgcccggcagcagcagcagatcgagaaccagcagcagatgctggtagccaaggagcagcgacttcactttttaaaacaacaggaaagacgtcaacagcaatcaatttcagagaacgaaaaattacagaaactcaaagaacgggttgaggctcaagaaaacaaacttaagaaaattcgtgcgatgcggggacaagttgattatagcaagattatgaatggcaatttgtcggcagagatagagaggttctcagcaatgttccaggagaagaagcaagaagtacagaccgcaatcctcagagtcgaccagctttctcagcagctggaggacctgaaaaagggtaaactcaacggattccaatcatacaatggtaagttaaccggacctgccgcagtcgagttgaagcgtctgtaccaggaattgcagatccgcaaccaattgaaccaggagcagaactcgaaactccagcagcagaaggagctgcttaataagagaaatatggaggtggcgatgatggataaaagaatttcagaattacgggaacggctatacggaaaaaagatccaactgaacagggtgaacggcacctcgagccctcaatcaccattaagcacctccggacgggttgccgcagtcggaccatacatacaggtcccttcagccggctcctttcctgtattgggggaccctatcaagcctcagtccctatctatagccagcaacgcagcccacgggagatctaagagcgctaacgacgggaattggccaacccttaagcagaattcaagttcatctgtaaaacccgtccaggttgccggtgctgattggaaggatcccagcgtagaggggtctgttaaacaaggcactgtgagcagccagcccgttccgtttagtgccctcggtccaaccgaaaagccaggaattgagatcgggaaggtgcctcctcccatccctggtgtgggaaaacagctccctccatcttacggaacatatccatccccgaccccgttgggccccgggagcacatcttccctcgagcggaggaaggagggaagcctgccccgtccgagcgccggactgccaagtagacaaaggcccaccctacttcctgccaccggcagtactcctcaacctggctcctcccagcagattcagcagcgaatttccgtgcccccatctccaacgtatcccccagctgggccacctgctttccctgctggggattctaagcccgagctgcccctgacagtggctatccgtccattccttgccgacaaggggtcacggccccagtcgccacgaaaaggaccccagactgtgaacagcagtagtatttatagcatgtacttgcaacaggcaacgccccctaaaaactatcagcccgcggcacactctgccttgaataagagtgtaaaggcggtctatggaaaacctgtgctgccctccggatctactagcccatcccctctgccctttctccacgggtcattgtccacagggactccgcaacctcagccgccctctgagagcactgagaaggagccagagcaggacggacccgcagcccccgcagatggctccacagtcgagagtttacctaggcctctgtcaccaacgaaattgacaccaatagttcacagccctctcagataccaatccgacgccgaccttgaggccctgcgtcggaagctggctaacgccccaaggccccttaagaagaggtcaagcataaccgaacctgagggccctccctttctcccagcacagcctctacccgggcttcatggacacctcgggcgatgtgggcagtggaagcatcagtgccaatggaagcctggccgcgctcccccttgtcccgcccacagtcccacccctcgatag

SEQ ID NO: 185843 - DNA, 1908 bp, Artificial Sequence
  derived and/or modified sequence
tgagtgggcccctacatccaggtgcccagcgccggcagcttccccgttctcggggaccctattaaaccccagtcgttatccatcgctagcaatgcagcccacggtcggagtaaaagcgccaatgacggaaactggccaactctaaaacaaaacagttcttctagtgttaaacccgtccaggtggcaggcgcagactggaaggatccctcagtggaaggttcagttaagcaaggcacagtgagctcccagccagtgcctttcagtgccctggggcccactgaaaagccagggattgaaatcggcaaggtgccaccacctatccctggcgtaggcaagcagctaccaccctcctacgggacctatccaagtccaactcccttgggtcccggtagcacgagttccttggagagacggaaggaaggatcccttccacgtccatcggctggccttccaagccggcagcggccaacactgttacctgctaccggcagcacccctcaaccaggaagttcccagcagatccagcagcgaatctcggtgcctcccagcccaacgtacccaccggcgggaccaccagcatttcccgcaggagacagcaagccagagttgccactgactgttgctatcagaccattccttgctgacaagggttctcgcccacagagtcccaggaagggaccgcaaacagtgaattcctcaagtatctacagcatgtacttgcaacaggccactccacccaaaaactatcagcccgccgcccactcagctctgaacaaatcagtgaaggcggtttatggtaaaccagtcctgcctagtggcagtacctcgccttctcctctgccgttcctgcatgggtctctctcaaccggcacaccccagccgcagccaccaagtgagtccacagagaaggagcctgagcaggacggccctgcggcccccgcagacggaagtactgtagaaagtctcccccgcccactgtccccaactaagctgacacccatagtccatagccctctacgataccagtccgatgccgatcttgaagcgctccggcgaaagctggcaaatgctcctagacccctgaaaaagcgttcctcaatcaccgaaccagaggggccaggcgggccaaatatccagaagttgctgtaccagagattcaatacactcgcggggggtatggagggaacccctttttaccaaccatccccatcccaggactttatgggaactcttgcagatgtggacaacggaaataccaacgcgaacggaaaccttgaagaactgccccctgctcagcctacggccccgctccctgccgagcctgctccatcttccgacgccaatgataacgagttaccctcccctgagccagaggaactgatttgtccccagaccacacaccaaacggccgaaccagctgaagataataacaataacgtggcaactgtgccaacaactgaacaaatccctagccccgtggctgaggccccaagcccaggagaagagcaggttccgcccgcacccctcccacctgcaagccatccgcccgctaccagtacaaataagaggacaaatctcaagaaacccaattctgaacggacaggccacggattgcgcgtccgcttcaaccctcttgcgctgctgttggatgcctccctggagggcgagtttgacctggtgcagagaatcatctatgaagtcgaggatccctcaaagccaaacgacgaaggcataaccccattgcacaacgcagtgtgtgcagggcaccaccacattgtgaagttcctcctggacttcggggtgaacgtaaacgcagcagattcggacggttggggggctggcaaggctggttgtgacgagcaacgctgcggagtgtgttcagtgggactaaggggaccagagcaatag

SEQ ID NO: 185844 - DNA, 4958 bp, Artificial Sequence
  derived and/or modified sequence
gggcgggcgggccgcaggctgtcgggctggggctgaggctgaggctgaggttgaggcggcggcggcggcggccgggtgcccgggacagcgacgcagcgcgccggcggccgcgacagggccagcgagagccccgcagcccgccgcagctgccgcctcgccgcggccgggccggagagcacggcggcgggagcgcggccttaggaggcggccggagcggtgggcacagctcggcgcggagcgtcctgtcaggcggcggccgagggcgtcgcggactctccccgcgatgatgccgatgatattaactgttttcttgagcaacaatgaacagattttaacagaagttcctataacaccggaaacaacctgtcgagatgttgtagaattttgcaaggaacctggagaaggcagctgccatttagctgaagtgtggaggggaaatgaacgtcccataccctttgatcatatgatgtacgaacatcttcagaaatggggtccacggagggaagaagtgaaatttttccttcgacacgaggactccccaactgagaacagtgaacaaggtggccgtcagacccaagagcaacgaactcagagaaatgtaataaatgtacctggagaaaaacgtactgaaaatggggttgggaatccacgtgttgaacttaccctctcagagctccaagatatggcagctaggcaacagcagcagattgaaaatcagcagcagatgttggttgccaaggaacagcgtttacattttctaaagcaacaggagcgccgtcagcagcagtctatttctgaaaatgaaaagcttcagaaattgaaagaacgagttgaagcccaggagaacaagctgaagaaaattcgtgcaatgagaggacaagtcgactacagcaaaatcatgaacggcaatctgtctgctgaaatagaaaggttcagtgccatgttccaggaaaagaagcaggaagtacagactgcaattttaagggttgatcagcttagtcagcaattggaagatttaaagaaaggaaaactgaatgggttccagtcttacaatggcaaattgacgggaccagcggcggtggagttaaaaagactgtaccaagaactacagattcgtaaccaacttaaccaggaacaaaattcaaaacttcagcagcagaaggaactcttaaataagcgcaacatggaggtggccatgatggacaagcgaatcagtgaactgcgtgaacgtctctatgggaaaaaaattcagctgaaccgtgtgaatggcacgtcatcaccacagtcccctctgagcacatcgggcagggtcgctgctgtggggccttatatccaggttcccagtgccggaagctttcctgtgctgggggaccctataaagccccagtctctcagtattgcctcaaatgctgctcatggaagatccaaatccgctaatgatggaaactggccaacattaaaacagaattctagctcttccgtgaaaccagtgcaggtggccggtgcagactggaaggatccgagcgtggaggggtctgtcaagcagggcactgtctccagccagcctgtgcccttctcagcactgggacccacggagaagccgggcatcgagattggtaaagtgccacctcccatcccgggtgtaggcaagcagctgcctccaagctatgggacatacccaagtcctacacctctgggtcctgggtcgacaagctccctggaaaggaggaaggaaggcagcttgcccaggcccagtgcaggcctgccaagtcgacagaggcccaccctgctgcccgccacaggcagcaccccccagccaggctcctcacaacagattcagcagaggatttccgtaccgccaagtcccacgtacccgccagcgggaccacctgcatttccagctggggacagcaagcctgaactcccactgacagtggccattaggcctttcctggctgataaagggtcaaggccacagtctcccaggaaaggaccccagacagtgaattcaagttccatatactccatgtacctccagcaagccacaccacctaagaattaccagccggcagcacacagcgccttaaataagtcagttaaagcagtgtatggtaagcccgttttaccttcgggttcaacctctccatcgccgctgccgtttcttcacgggtcactgtccacgggcacaccacagcctcagccaccttcagaaagtactgagaaagagcctgagcaggatggccccgccgcccccgcagatggcagcaccgtggagagcctgccacggccactcagccccaccaagctcacgcccatcgtgcattcgccactgcgctaccagagtgatgcagacctggaggccctccgcaggaagctggccaacgcgccccggcccctgaaaaagcgcagctccatcacagagcccgagggccccggcgggcccaacatccagaagctgctgtaccagcgcttcaacaccctggccggtggcatggagggcacccctttctaccagcccagcccctcccaggacttcatgggcaccttggccgatgtggacaatggaaacaccaatgccaatggaaacctggaagagctcccccctgcccagcccacagccccactccccgctgagcctgccccgtcatcagatgccaatgataatgagttaccttcccccgaaccagaggagctcatctgtccccaaaccacccaccaaactgccgagccggcagaggacaataacaacaacgtggccacggtccccaccacggagcagatcccgagtcctgtggctgaggccccatctccaggggaagagcaggtccctccagcacctcttccccctgccagccaccctcctgccacctccacgaacaagcggaccaacttgaagaagcccaactcggagcggacggggcacgggctgagagtccggtttaaccccctggcactgctcctagacgcgtctctggaaggagagttcgatctggtgcagaggatcatctatgaggtggaagatcccagcaagcccaacgacgaagggatcaccccactgcacaacgccgtctgcgccggccaccatcacatcgtgaagttcctgctggattttggtgtcaacgtgaatgctgctgatagtgatggatggacgccgctgcactgcgctgcctcttgtaacagcgttcacctctgcaaacagctggtggagagtggtgccgccatttttgcctcaaccataagcgacattgaaactgctgcagacaagtgtgaggagatggaggaaggctacatccagtgctcccagtttctatatggggtgcaggaaaagctgggtgtgatgaacaaaggtgtggcgtatgctctgtgggactacgaggcccagaacagtgacgagctgtccttccacgaaggggacgccctcaccatcctgaggcgcaaggacgaaagcgagactgagtggtggtgggctcgccttggagaccgggagggctatgtgcccaaaaacctgctggggctgtatccacggatcaaaccccgacagcgaacactcgcctgaacttccttttggagcaccgcatggtcttgccagctaccaggagccacttaagagattattgtgctgttttccaggaaagctgcagctagaaaatggtcttaatggtgctcactttagcagacagcgtccacaatgtgaatcctacagtttccaggtgaggccctttctccagtttgcccattaactgggagaggtactttcgcctccaaggactgaattttgccaattactataaatccaaataaatacccactttcaaaacacccacccctcttgccattaagaagtcccataacccccggttggttgccagtgaagacagaagctcttactgacttggccccgaggccatcaccccctccagcagtgaacactgtccgccgctgtgaggcctgctcccctgcgaccgccctgccccccgtcaccgaatcggacactcatcctttctcacacttcccacacatgatccttcttcccttcatcaccaaaggagcctctgtatggaaacatgtccagtgttgctgcccagtgtgtatgcctcccagtacccactctgctcggccgccttgggggttccgcttcctgttccagttcacctaaaggctgattgtgcaggcccagcactgtggctggactgccgcgccacgggcaccaggacccctaagaccaagtgacaactgggagagcctcagcatatactcttctcctccgatctcacagcctgtcatgctgctcagtgtggttctcacccctgcaagctcaaattcagttccctgaatggagtcaggtgctggaggccgtggcagcggagggtggttggggttggggctgggggtggactggtgtgagggcagaccagggccaggtagacggggctgtttggtgcctgaaggatggcagacgcctggtgtcaggaggggccgccaccaaggagcagcagctggggcagaggagctggggtcaggggccacccctctctgccgatctccctgcctgggctggctgtgaggccacctttgtcccaggcccagcctcaaggcaaggagggcgcttcactgaggtgtgaattgtacgtacaggctttttatataccaaaagtattttttgactagaccattcaaagctacccgaactatgttggaaattttttttttctcattaaaatacaggcccttaggctctatttttcatgtatgagtcgtgtgtaatttatgtaaaaatgtgtgtacagactcactgatgcagcactgtagcccatcaccttggagcactgactgtacatagtgtggtgaagaaaagtgaacgcccttgtagagcagcccgaccacaggagcatggccgctgccagcccagacgctgctgacgctgtgtaaatgtgcacaataaacccgtctcaccccgg

SEQ ID NO: 185845 - DNA, 2566 bp, Artificial Sequence
  derived and/or modified sequence
gggcgggcgggccgcaggctgtcgggctggggctgaggctgaggctgaggttgaggcggcggcggcggcggccgggtgcccgggacagcgacgcagcgcgccggcggccgcgacagggccagcgagagccccgcagcccgccgcagctgccgcctcgccgcggccgggccggagagcacggcggcgggagcgcggccttaggaggcggccggagcggtgggcacagctcggcgcggagcgtcctgtcaggcggcggccgagggcgtcgcggactctccccgcgatgatgccgatgatattaactgttttcttgagcaacaatgaacagattttaacagaagttcctataacaccggaaacaacctgtcgagatgttgtagaattttgcaaggaacctggagaaggcagctgccatttagctgaagtgtggaggggaaatgaacgtcccataccctttgatcatatgatgtacgaacatcttcagaaatggggtccacggagggaagaagtgaaatttttccttcgacacgaggactccccaactgagaacagtgaacaaggtggccgtcagacccaagagcaacgaactcagagaaatgtaataaatgtacctggagaaaaacgtactgaaaatggggttgggaatccacgtgttgaacttaccctctcagagctccaagatatggcagctaggcaacagcagcagattgaaaatcagcagcagatgttggttgccaaggaacagcgtttacattttctaaagcaacaggagcgccgtcagcagcagtctatttctgaaaatgaaaagcttcagaaattgaaagaacgagttgaagcccaggagaacaagctgaagaaaattcgtgcaatgagaggacaagtcgactacagcaaaatcatgaacggcaatctgtctgctgaaatagaaaggttcagtgccatgttccaggaaaagaagcaggaagtacagactgcaattttaagggttgatcagcttagtcagcaattggaagatttaaagaaaggaaaactgaatgggttccagtcttacaatggcaaattgacgggaccagcggcggtggagttaaaaagactgtaccaagaactacagattcgtaaccaacttaaccaggaacaaaattcaaaacttcagcagcagaaggaactcttaaataagcgcaacatggaggtggccatgatggacaagcgaatcagtgaactgcgtgaacgtctctatgggaaaaaaattcagctgaaccgtgtgaatggcacgtcatcaccacagtcccctctgagcacatcgggcagggtcgctgctgtggggccttatatccaggttcccagtgccggaagctttcctgtgctgggggaccctataaagccccagtctctcagtattgcctcaaatgctgctcatggaagatccaaatccgctaatgatggaaactggccaacattaaaacagaattctagctcttccgtgaaaccagtgcaggtggccggtgcagactggaaggatccgagcgtggaggggtctgtcaagcagggcactgtctccagccagcctgtgcccttctcagcactgggacccacggagaagccgggcatcgagattggtaaagtgccacctcccatcccgggtgtaggcaagcagctgcctccaagctatgggacatacccaagtcctacacctctgggtcctgggtcgacaagctccctggaaaggaggaaggaaggcagcttgcccaggcccagtgcaggcctgccaagtcgacagaggcccaccctgctgcccgccacaggcagcaccccccagccaggctcctcacaacagattcagcagaggatttccgtaccgccaagtcccacgtacccgccagcgggaccacctgcatttccagctggggacagcaagcctgaactcccactgacagtggccattaggcctttcctggctgataaagggtcaaggccacagtctcccaggaaaggaccccagacagtgaattcaagttccatatactccatgtacctccagcaagccacaccacctaagaattaccagccggcagcacacagcgccttaaataagtcagttaaagcagtgtatggtaagcccgttttaccttcgggttcaacctctccatcgccgctgccgtttcttcacgggtcactgtccacgggcacaccacagcctcagccaccttcagaaagtactgagaaagagcctgagcaggatggccccgccgcccccgcagatggcagcaccgtggagagcctgccacggccactcagccccaccaagctcacgcccatcgtgcattcgccactgcgctaccagagtgatgcagacctggaggccctccgcaggaagctggccaacgcgccccggcccctgaaaaagcgcagctccatcacagagcccgagggccccccctttctaccagcccagcccctcccaggacttcatgggcaccttggccgatgtggacaatggaaacaccaatgccaatggaaacctggaagagctcccccctgcccagcccacagccccactccccgctga

SEQ ID NO: 185846 - DNA, 3473 bp, Artificial Sequence
  derived and/or modified sequence
tgtggggccttatatccaggttcccagtgccggaagctttcctgtgctgggggaccctataaagccccagtctctcagtattgcctcaaatgctgctcatggaagatccaaatccgctaatgatggaaactggccaacattaaaacagaattctagctcttccgtgaaaccagtgcaggtggccggtgcagactggaaggatccgagcgtggaggggtctgtcaagcagggcactgtctccagccagcctgtgcccttctcagcactgggacccacggagaagccgggcatcgagattggtaaagtgccacctcccatcccgggtgtaggcaagcagctgcctccaagctatgggacatacccaagtcctacacctctgggtcctgggtcgacaagctccctggaaaggaggaaggaaggcagcttgcccaggcccagtgcaggcctgccaagtcgacagaggcccaccctgctgcccgccacaggcagcaccccccagccaggctcctcacaacagattcagcagaggatttccgtaccgccaagtcccacgtacccgccagcgggaccacctgcatttccagctggggacagcaagcctgaactcccactgacagtggccattaggcctttcctggctgataaagggtcaaggccacagtctcccaggaaaggaccccagacagtgaattcaagttccatatactccatgtacctccagcaagccacaccacctaagaattaccagccggcagcacacagcgccttaaataagtcagttaaagcagtgtatggtaagcccgttttaccttcgggttcaacctctccatcgccgctgccgtttcttcacgggtcactgtccacgggcacaccacagcctcagccaccttcagaaagtactgagaaagagcctgagcaggatggccccgccgcccccgcagatggcagcaccgtggagagcctgccacggccactcagccccaccaagctcacgcccatcgtgcattcgccactgcgctaccagagtgatgcagacctggaggccctccgcaggaagctggccaacgcgccccggcccctgaaaaagcgcagctccatcacagagcccgagggccccggcgggcccaacatccagaagctgctgtaccagcgcttcaacaccctggccggtggcatggagggcacccctttctaccagcccagcccctcccaggacttcatgggcaccttggccgatgtggacaatggaaacaccaatgccaatggaaacctggaagagctcccccctgcccagcccacagccccactccccgctgagcctgccccgtcatcagatgccaatgataatgagttaccttcccccgaaccagaggagctcatctgtccccaaaccacccaccaaactgccgagccggcagaggacaataacaacaacgtggccacggtccccaccacggagcagatcccgagtcctgtggctgaggccccatctccaggggaagagcaggtccctccagcacctcttccccctgccagccaccctcctgccacctccacgaacaagcggaccaacttgaagaagcccaactcggagcggacggggcacgggctgagagtccggtttaaccccctggcactgctcctagacgcgtctctggaaggagagttcgatctggtgcagaggatcatctatgaggtggaagatcccagcaagcccaacgacgaagggatcaccccactgcacaacgccgtctgcgccggccaccatcacatcgtgaagttcctgctggattttggtgtcaacgtgaatgctgctgatagtgatggatggggtgcaggaaaagctgggtgtgatgaacaaaggtgtggcgtatgctctgtgggactacgaggcccagaacagtgacgagctgtccttccacgaaggggacgccctcaccatcctgaggcgcaaggacgaaagcgagactgagtggtggtgggctcgccttggagaccgggagggctatgtgcccaaaaacctgctggggctgtatccacggatcaaaccccgacagcgaacactcgcctgaacttccttttggagcaccgcatggtcttgccagctaccaggagccacttaagagattattgtgctgttttccaggaaagctgcagctagaaaatggtcttaatggtgctcactttagcagacagcgtccacaatgtgaatcctacagtttccaggtgaggccctttctccagtttgcccattaactgggagaggtactttcgcctccaaggactgaattttgccaattactataaatccaaataaatacccactttcaaaacacccacccctcttgccattaagaagtcccataacccccggttggttgccagtgaagacagaagctcttactgacttggccccgaggccatcaccccctccagcagtgaacactgtccgccgctgtgaggcctgctcccctgcgaccgccctgccccccgtcaccgaatcggacactcatcctttctcacacttcccacacatgatccttcttcccttcatcaccaaaggagcctctgtatggaaacatgtccagtgttgctgcccagtgtgtatgcctcccagtacccactctgctcggccgccttgggggttccgcttcctgttccagttcacctaaaggctgattgtgcaggcccagcactgtggctggactgccgcgccacgggcaccaggacccctaagaccaagtgacaactgggagagcctcagcatatactcttctcctccgatctcacagcctgtcatgctgctcagtgtggttctcacccctgcaagctcaaattcagttccctgaatggagtcaggtgctggaggccgtggcagcggagggtggttggggttggggctgggggtggactggtgtgagggcagaccagggccaggtagacggggctgtttggtgcctgaaggatggcagacgcctggtgtcaggaggggccgccaccaaggagcagcagctggggcagaggagctggggtcaggggccacccctctctgccgatctccctgcctgggctggctgtgaggccacctttgtcccaggcccagcctcaaggcaaggagggcgcttcactgaggtgtgaattgtacgtacaggctttttatataccaaaagtattttttgactagaccattcaaagctacccgaactatgttggaaattttttttttctcattaaaatacaggcccttaggctctatttttcatgtatgagtcgtgtgtaatttatgtaaaaatgtgtgtacagactcactgatgcagcactgtagcccatcaccttggagcactgactgtacatagtgtggtgaagaaaagtgaacgcccttgtagagcagcccgaccacaggagcatggccgctgccagcccagacgctgctgacgctgtgtaaatgtgcacaataaacccgtctcaccccg

SEQ ID NO: 185847 - DNA, 3273 bp, Artificial Sequence
  derived and/or modified sequence
atgatgcctatgattctcacagtgttcctgtcgaacaacgagcagattctgactgaagtgcccattactcctgagacaacttgcagagacgtagtggagttttgtaaagaacccggagagggatcctgccatttggcagaagtgtggcggggaaacgagcgaccaataccattcgaccacatgatgtatgagcacttacagaaatggggacctagaagagaggaggtgaagttctttctgcgtcacgaagattcccctacggaaaatagtgaacagggcggacgccagacacaggagcaacgaacccagagaaatgtgattaacgttcccggtgagaaaagaactgagaatggggtcgggaacccaagggtggagctgacgctgtctgagcttcaggatatggctgctaggcagcagcagcagattgagaaccagcagcagatgctggtcgctaaggaacaaaggttacatttccttaagcagcaagagcgtagacagcaacagtcaatctcagaaaatgaaaagctgcagaaactgaaagaaagggtagaagcgcaggagaataagttgaagaagatacgcgctatgagaggccaggttgattatagcaaaatcatgaacggcaatctgagtgccgaaattgagcgtttctccgccatgttccaagagaaaaagcaggaggtgcagactgccatcttacgtgtcgatcagttaagtcagcagctcgaggatttaaagaagggcaaattaaacgggttccagagctataacggaaagcttacaggaccagcggctgtcgaattaaagcgcctgtaccaggaacttcagatacggaaccaactgaaccaggaacagaatagtaagctccagcagcaaaaagaactcctgaacaaacgcaatatggaggtggctatgatggacaagcgcatctccgaactgcgtgagcgcctgtacgggaaaaagatccagctgaaccgcgttaacggtacctccagccctcaatcacctctgagcacctccggaagagttgccgcagtgggcccatatatccaggtgccttcggcagggagcttccccgttctcggggacccaatcaaaccgcagtctctatctattgcgtcaaatgcagcccacgggcgatccaagagcgccaacgatgggaactggccaaccttaaagcaaaactcgtccagctccgtcaagcccgtacaggttgcaggagccgactggaaggatccaagtgtggagggttctgtcaagcagggaaccgtttcctcccagccagtgccttttagcgccctgggccctactgaaaaacccggaatcgaaatcggaaaggtcccgcctccgatacccggagtgggaaagcagcttccgccttcctatggaacgtaccctagccccaccccgctcggaccaggatcaacgtctagcctagaaaggaggaaagagggtagcctcccacgacccagtgcaggcttacctagtcgacagaggccgactctgctccctgccacaggctcaacaccacaaccaggatcttcgcagcagatacagcaaagaatcagtgtccccccttcacctacatacccccctgccggaccaccagcgttcccagccggtgattcaaagcccgaattgcccctaactgtcgccattaggccattcctcgctgacaagggctctcggcctcagagccccagaaagggacctcagaccgtgaacagctcaagcatctattcgatgtatctgcagcaggcaactccacctaaaaattaccaacctgctgcacactcagcactgaacaagtccgtgaaggcagtctatgggaagcctgttctccccagcggcagcactagcccttctcctctgccattcctgcatggatccctttccaccggcactccacaaccacagccacctagtgagtcgactgagaaggagcctgagcaggatggtccggcagcccctgccgatgggtctactgtcgaaagtttgcccaggcctctgtcacctacaaaactgaccccgatcgtgcactcccccctaaggtaccaaagcgatgcagacttggaggccctcagacgaaagctggctaacgcccctagacccctgaaaaagcggtcttcaatcacggagccggagggcccaggcggtcctaacattcagaaactgctctaccagagattcaataccctcgctgggggaatggaaggtacacctttttatcagccgtcccctagccaggatttcatggggacactggctgatgtggacaatgggaataccaatgcaaatggtaatctggaagaactccctcctgcacagccgacagctcctcttcctgccgagccggctccctcaagtgacgcgaacgacaacgaactgccctcccccgagccggaagagctgatctgccctcagaccacccatcagaccgcagagccggctgaagataacaacaataacgtggctaccgttcccaccactgaacagattcccagcccagtcgccgaggcgccttctcctggagaggagcaggtcccacccgcacctctcccgcctgcatcccacccaccggcaaccagcaccaacaaacgcaccaatctgaagaagcctaactcagaacgcacaggtcacggccttagggttcgattcaacccactggcgctccttctggacgcaagcttagaaggtgagttcgatctggtgcagagaatcatctatgaggtggaggatcccagcaaacctaacgatgagggaatcacaccacttcataatgccgtatgcgcagggcatcatcacatcgtgaagttcctgctggattttggagtgaacgtcaacgccgctgactccgatggctggactccactccattgcgccgcttcctgcaatagcgtgcacctgtgcaaacagctcgtggagtccggagccgcaattttcgcctccacgatttcggatatcgagaccgctgccgacaagtgcgaggagatggaagagggatatattcagtgttcacagtttctgtacggtgtgcaggagaaattgggagttatgaacaagggggttgcctacgccctttgggattatgaggcccagaactctgatgaattgtcattccatgaaggggatgccttgaccatactaaggcgaaaagatgagagtgagactgaatggtggtgggcaaggctgggcgacagagaaggctacgttccgaaaaacttgctgggcctgtaccctagaatcaaacctcggcaacggacccttgcatag

SEQ ID NO: 185848 - DNA, 1884 bp, Artificial Sequence
  derived and/or modified sequence
atggcggctcgccagcagcaacagattgagaatcagcagcagatgttggtggcaaaggaacagaggctccacttccttaaacagcaggagagaagacagcaacaaagcatatcggaaaacgaaaaacttcagaaattaaaagagcgcgtggaagcacaggagaataagcttaaaaaaatacgggctatgcgtggtcaggtggattattctaagatcatgaatggaaacctatcagccgagatcgagcggttctccgcgatgttccaggaaaaaaagcaggaagtgcagactgcaatattaagggtggatcagctgagtcagcagctagaggaccttaaaaaagggaaattgaatggatttcaatcgtacaatggtaagctgacaggaccagccgcagtagagctcaaaagactttaccaggaactgcaaatcaggaaccaactaaaccaagagcagaattccaagctgcagcaacaaaaagaattgttaaacaaaaggaacatggaggtcgcaatgatggacaagcgtatttctgagctacgagagaggctgtacggcaagaaaatccaattgaacagggttaacgggacatctagcccacagtctcccctgtccacttctgggcgtgtggccgcagtaggcccttacatacaggtaccatcagctggaagcttcccggtcctcggtgacccaatcaagcctcaaagcttatctattgcttccaacgctgcccatgggagatccaaaagtgcaaacgacgggaactggccaacactcaaacagaacagtagttcttccgtgaagcccgtgcaggtggcaggcgcagactggaaagaccccagtgtggagggcagcgtaaaacaagggacagtctcatctcaacctgtacctttctcagcactgggtcccaccgagaagccgggaattgagataggcaaggtgccccctcctatccccggtgtgggtaagcagctgccaccatcctacggtacctacccctcaccaacccctctcgggcctgggtctacttcctccctggaacgcaggaaggaaggctccctcccccgtccatctgcagggctgccatctaggcaaagaccaacactgctgcccgctactgggtccactcctcagccagggtcatcacagcaaatacaacagaggatcagtgttccgcctagtcccacttacccgcctgcgggaccgcctgctttccctgcaggagactcgaaacccgaattaccactgacagtagctatccgccctttcctcgccgacaagggatctcgcccacagagtccgcgtaagggtccgcagactgtgaattcaagctctatctattccatgtatttgcagcaagctaccccacctaagaactaccaaccagccgctcattctgcactaaacaaatctgttaaggccgtatatggaaagcctgtccttccctcaggctctactagtcccagccctctacccttcctccatggatctctctccactggtactccacagccacagcccccttcagaaagcacagagaaagagcccgaacaggacggtcccgcagctccagccgatgggtccacggtggaatctcttcctcgacccctaagccctaccaagttaaccccaatcgtacatagcccactgaggtatcagagtgacgcggatcttgaggcactacgacggaagctcgccaacgcccctaggccattaaagaagcgctcttccattaccgagccagagggcccacccttcctgcccgctcagcccctgccgggtctgcatggacaccttgggaggtgtggccagtggaagcaccagtgccagtggaagcctggaagagcgccaccctgccctgcacattctcccactcctagatag

SEQ ID NO: 185849 - DNA, 1908 bp, Artificial Sequence
  derived and/or modified sequence
tgagtggggccatacatacaagtcccatccgccggtagttttccagtcctgggagacccaatcaaacctcagagcctgagtatcgcatctaatgccgcacacgggcgttctaagtcagctaacgacgggaactggcctacacttaagcagaacagcagttcctcagtgaagccagtacaggtcgccggagccgattggaaagacccctctgttgaagggtctgtgaagcagggaacggttagcagccagccagtgcccttctcggccttagggccaactgaaaaacccggtatcgaaattggcaaggtcccgccacccatccccggtgttggtaagcagctgccaccaagctatggcacctatccatctccaaccccccttgggcctggctcaacctcctctcttgagagaagaaaggagggttccctgcccaggccgagcgccggtctaccttctcggcagcgtccaacgttactaccagctaccggatctaccccccaaccaggctcatctcagcagatccagcagaggataagtgtaccaccatccccgacctatcccccagccggtccacctgcctttccggctggggattccaagccagaattgcccctgacggtggccataaggccttttctggcggataaggggtctaggcctcagtccccaaggaaagggccacagacagtgaattctagctcgatttactccatgtacctacaacaggccacgccaccaaagaattatcaacctgccgctcattcagcactgaataaatctgtgaaagctgtttacgggaagcccgttttgccctctggctctacaagccctagcccactgccctttttacatggctcattatccaccggaacacctcagccccaaccccctagcgagtcaacagagaaagagcctgagcaggatggaccagccgctccagctgacggaagtacagtggagtcccttcccaggcccctgtccccaacaaaactaactcccatcgtgcactctccacttagatatcagagcgacgccgatctggaggccctcagaaggaagctggctaacgccccacgaccactgaagaaacgctcttccatcaccgagccggaagggcctggaggcccaaatatccagaagctgttgtaccagaggttcaacacccttgcgggagggatggagggcacgcccttctaccaaccaagtccatcccaagacttcatgggaactcttgctgacgttgacaatgggaataccaatgcgaacgggaatttagaggagctgccccctgcccagcctaccgcccctctgcccgcagaacccgcacccagtagtgatgcgaacgacaacgagcttccttcacccgagcctgaggaactgatctgtccacaaacaactcatcagacagcggaacccgctgaagacaacaacaacaatgtcgccacggtgcccacgactgaacagatcccctctcctgtcgccgaagcgccaagtcctggcgaagagcaggtacctcctgccccactgccccctgccagccatcctcccgctacctcaaccaataagagaactaatcttaagaagccaaatagcgaaaggactggacacgggctgagagtccgctttaacccgctggctctgctgctcgacgcatctctggagggggaatttgacctggtacagagaattatttatgaggtggaagacccgtctaaaccaaacgatgaaggaatcacgcccctgcacaatgcagtgtgtgcaggccaccatcacattgtgaagttcttgctagattttggcgtgaacgtaaacgccgcagactcggacgggtggggcgcaggcaaggctggctgtgatgaacagaggtgcggcgtatgctccgtaggattgaggggacctgaacagtag

SEQ ID NO: 185850 - protein, 1064 aa, Artificial Sequence
  derived and/or modified sequence
MNHDFQALALESRGMGELLPTKKFWEPDDSTKDGQKGIFLGDDEWRETAWGASHHSMSQPIMVQRRSGQGFHGNSEVNAILSPRSESGGLGVSMVEYVLSSSPADKLDSRFRKGNFGTRDAETDGPEKGDQKGKASPFEEDQNRDLKQGDDDDSKINGRGLPNGMDADCKDFNRTPGSRQASPTEVVERLGPNTNPSEGLGPLPNPTANKPLVEEFSNPETQNLDAMEQVGLESLQFDYPGNQVPMDSSGATVGLFDYNSQQQLFQRTNALTVQQLTAAQQQQYALAAAQQPHIAGVFSAGLAPAAFVPNPYIISAAPPGTDPYTAAGLAAAATLAGPAVVPPQYYGVPWGVYPANLFQQQAAAAANNTASQQAASQAQPGQQQVLRAGAGQRPLTPNQGQQGQQAESLAAAAAANPTLAFGQGLATGMPGYQVLAPTAYYDQTGALVVGPGARTGLGAPVRLMAPTPVLISSAAAQAAAAAAAGGTASSLTGSTNGLFRPIGTQPPQQQQQQPSTNLQSNSFYGSSSLTNSSQSSSLFSHGPGQPGSTSLGFGSGNSLGAAIGSALSGFGSSVGSSASSSATRRESLSTSSDLYKRSSSSLAPIGQPFYNSLGFSSSPSPIGMPLPSQTPGHSLTPPPSLSSHGSSSSLHLGGLTNGSGRYISAAPGAEAKYRSASSTSSLFSSSSQLFPPSRLRYNRSDIMPSGRSRLLEDFRNNRFPNLQLRDLIGHIVEFSQDQHGSRFIQQKLERATPAERQMVFNEILQAAYQLMTDVFGNYVIQKFFEFGSLDQKLALATRIRGHVLPLALQMYGCRVIQKALESISSDQQSEMVKELDGHVLKCVKDQNGNHVVQKCIECVQPQSLQFIIDAFKGQVFVLSTHPYGCRVIQRILEHCTAEQTLPILEELHQHTEQLVQDQYGNYVIQHVLEHGRPEDKSKIVSEIRGKVLALSQHKFASNVVEKCVTHASRAERALLIDEVCCQNDGPHSALYTMMKDQYANYVVQKMIDMAEPAQRKIIMHKIRPHITTLRKYTYGKHILAKLEKYYLKNSPDLGPIGGPPNGML

SEQ ID NO: 185851 - protein, 1008 aa, Artificial Sequence
  derived and/or modified sequence
MSQPIMVQRRSGQGFHGNSEVNAILSPRSESGGLGVSMVEYVLSSSPADKLDSRFRKGNFGTRDAETDGPEKGDQKGKASPFEEDQNRDLKQGDDDDSKINGRGLPNGMDADCKDFNRTPGSRQASPTEVVERLGPNTNPSEGLGPLPNPTANKPLVEEFSNPETQNLDAMEQVGLESLQFDYPGNQVPMDSSGATVGLFDYNSQQQLFQRTNALTVQQLTAAQQQQYALAAAQQPHIAGVFSAGLAPAAFVPNPYIISAAPPGTDPYTAAGLAAAATLAGPAVVPPQYYGVPWGVYPANLFQQQAAAAANNTASQQAASQAQPGQQQVLRAGAGQRPLTPNQGQQGQQAESLAAAAAANPTLAFGQGLATGMPGYQVLAPTAYYDQTGALVVGPGARTGLGAPVRLMAPTPVLISSAAAQAAAAAAAGGTASSLTGSTNGLFRPIGTQPPQQQQQQPSTNLQSNSFYGSSSLTNSSQSSSLFSHGPGQPGSTSLGFGSGNSLGAAIGSALSGFGSSVGSSASSSATRRESLSTSSDLYKRSSSSLAPIGQPFYNSLGFSSSPSPIGMPLPSQTPGHSLTPPPSLSSHGSSSSLHLGGLTNGSGRYISAAPGAEAKYRSASSTSSLFSSSSQLFPPSRLRYNRSDIMPSGRSRLLEDFRNNRFPNLQLRDLIGHIVEFSQDQHGSRFIQQKLERATPAERQMVFNEILQAAYQLMTDVFGNYVIQKFFEFGSLDQKLALATRIRGHVLPLALQMYGCRVIQKALESISSDQQSEMVKELDGHVLKCVKDQNGNHVVQKCIECVQPQSLQFIIDAFKGQVFVLSTHPYGCRVIQRILEHCTAEQTLPILEELHQHTEQLVQDQYGNYVIQHVLEHGRPEDKSKIVSEIRGKVLALSQHKFASNVVEKCVTHASRAERALLIDEVCCQNDGPHSALYTMMKDQYANYVVQKMIDMAEPAQRKIIMHKIRPHITTLRKYTYGKHILAKLEKYYLKNSPDLGPIGGPPNGML

SEQ ID NO: 185852 - DNA, 3195 bp, Artificial Sequence
  derived and/or modified sequence
atgaaccatgattttcaggcactggcactcgagtccagagggatgggggaactgctccctactaagaagttctgggagccagatgactcaacaaaggatggccagaaaggaatcttcctcggagatgatgagtggcgagaaacagcatggggggccagccaccactcaatgagtcagcccatcatggtgcaaagacggagcggccagggattccacgggaatagcgaggttaacgcaatcctaagcccacgctctgagtctggcggtctgggtgtgagcatggtcgagtacgtactgtcatctagtccagcagataagctggattctaggttccggaagggtaacttcggcacaagagatgctgagactgacggcccggagaagggagatcagaaaggaaaggcgtcccctttcgaagaggaccagaaccgggatcttaagcagggggatgatgacgactccaagataaacggccgaggattacctaacggcatggacgcggactgtaaggatttcaatagaacgcctggcagtagacaggcgagccctactgaggtcgtagaaagactgggtcctaataccaacccatcagaggggctaggtccccttcctaatcctacagcaaataaacctctcgtggaggaattttcaaatcctgagacacagaatctcgatgcaatggagcaagtgggcctcgaaagtctgcagtttgattaccctggaaatcaggtccccatggattcctcgggagcgaccgtggggctgttcgattataattctcagcagcagctcttccagagaacaaacgctctaaccgttcaacagctcaccgctgcacagcagcaacagtacgcactcgctgcagcccagcaaccccatattgccggggtgtttagcgcaggacttgcccccgccgcattcgttccaaatccatatatcattagcgccgcaccccccggcaccgacccctacaccgcagcagggctggctgcggccgctacccttgcaggccccgcagttgttccaccccaatattacggggtgccctggggcgtgtatcccgcgaacctcttccagcagcaggcagcagccgcagccaacaacacagcgagccagcaggcagcatcccaggcacaacctggacagcaacaggtgctgcgagcaggcgccgggcaacggccgctaaccccaaatcagggccaacagggacagcaggctgagtccctggctgccgccgccgccgctaaccctaccctggcattcggacagggtctcgccactggaatgccaggctatcaggtgctcgctccaaccgcatactacgaccagacaggcgccctagtggttggacccggtgcccgaaccggactcggagcgccagttaggttgatggctccaacacccgtgctgatctctagcgccgctgcgcaagctgctgcagccgcagctgcgggcggcactgcctcctcactcaccgggagtaccaacgggttattcagacccatcggtacccaaccacctcagcagcagcagcagcagccgagtacaaacttgcagtcaaacagcttttacggctcatctagccttactaacagctcccagagcagctccctgttttctcatgggcccggacagcctggttccacgtctctggggtttggctccggcaatagtctaggagctgctatcgggtcagctctgtctgggttcggctcttctgttgggtcctccgcttctagtagcgctacccgccgagagagcctctccacatccagcgatctgtacaagagatcctcatccagcttggcgccaatcgggcagccattttacaacagtttggggttttcgagctccccttcaccgattgggatgcctctgcccagccagacacctggacatagtctcacacctccccccagtctgagctcccacgggtcctctagcagcctacacctggggggtctcacgaacggctcaggccgatacatcagcgcagcaccaggcgctgaggcaaaataccggagtgcctctagtacttcatctttattttcctcttcctctcagctttttccaccatctcggctacgatataataggtcggatatcatgcctagcggcagatctaggctcctggaagactttcgcaataaccggtttcctaacttacagcttcgggacctgatcgggcacatcgttgagttctctcaggaccagcacggttctcgcttcatccagcaaaaactggagagagctacacccgcagagaggcagatggtgttcaacgagattttacaggctgcgtatcagcttatgacagacgtgttcggtaactatgtaatccagaaattttttgaattcggtagcctcgatcaaaagttggctttggcaaccagaattagaggccacgtgctcccacttgctttacaaatgtatggttgtcgggtgatccagaaagcccttgagagcatatcctccgatcagcaatcagaaatggtgaaagagctggacggacatgtcctgaaatgtgtaaaggatcaaaatgggaaccacgtcgtgcagaagtgcatcgaatgcgtgcaaccccaatccctgcagtttattattgatgcattcaagggacaagtgtttgtcctgagtacacacccgtacgggtgtcgggttatccagagaatcctggaacactgtacagccgagcagactcttcccattctcgaggaactccaccagcacaccgaacagttggtgcaggaccagtatggaaactacgtgatccaacacgtgttggagcatggtaggcccgaggataagtccaagatagtgtctgagatccgaggtaaagttttggcattgagccagcataagttcgcttcaaacgtggtggaaaagtgcgtgacgcacgcttcccgcgcggagcgtgcattgctgatcgacgaggtttgctgtcagaacgatggcccacattccgctttatatactatgatgaaggatcaatacgctaattacgtggtccagaaaatgattgacatggccgagcctgcgcaacgcaagattataatgcataaaatccgacctcatatcaccaccctaaggaaatacacctatggaaagcatatccttgccaagttggaaaaatattacctcaaaaattctccggacctagggccaataggggggcccccaaacggaatgctgtag

SEQ ID NO: 185853 - DNA, 3195 bp, Artificial Sequence
  derived and/or modified sequence
atgaaccatgacttccaggcgctcgcactggagagcagaggaatgggcgaactgctgccgacgaagaaattctgggagccagatgactccacaaaggatggacagaaagggatcttcctgggcgacgatgagtggcgggagacagcgtggggggccagtcatcatagcatgagccagccaattatggttcagagacgctccggacaggggttccatggcaatagcgaggtcaacgcgatactgtcccctcgctccgaaagcggcggcctgggggtgtccatggtggagtatgtcctcagcagctcgcccgccgataagctagattcccggttcaggaagggaaacttcggcaccagggatgccgagactgacggcccggagaagggtgaccagaagggaaaggcttcgcctttcgaggaagaccagaaccgggacctcaagcagggcgatgacgatgactctaaaattaatggaaggggcctgccaaatggaatggatgctgactgtaaggactttaatagaacacctggctccaggcaggcatcaccaacagaagtggtagaaaggctcggcccaaacaccaatccatccgaggggctgggtccgctgcccaatcctaccgctaataagccactggtggaggagttctccaaccccgagactcagaacctggatgcgatggagcaagtaggactcgaatcccttcagttcgattatcctggaaaccaggtgcccatggacagttctggcgccacggtggggctattcgactataattcccagcaacagctctttcagcggacgaacgcattaaccgtgcagcagctcacagctgcccagcagcagcagtatgctttggctgccgcccaacagcctcatattgccggggtattttccgcagggcttgcaccggccgcgttcgtgccaaatccctacatcatcagcgctgctccacccggaacggatccttataccgcagccggcctggcagctgctgccactcttgctggccccgcggtcgtgccaccccagtattacggggtaccatggggggtgtaccctgcaaacctgtttcagcagcaggctgctgcagcagccaacaatacagcttcccagcaggccgcctctcaggcccagccaggacagcaacaggtcctgagagctggagctgggcagagacccctaacaccgaatcagggacagcagggccagcaagctgagtctcttgcagctgcggcagcagccaaccccactcttgccttcgggcagggactagcaactggcatgcctggctatcaagtgttggccccaacagcttactatgaccagacaggagcgctagttgtggggcccggagcccggacgggcctcggagcgcctgtaagacttatggctccaacccccgtgctgattagctcggctgctgcccaggcagccgccgccgcagcagccggcgggacagcttcctctctaacaggaagcacgaacggcctattccgcccaataggaacacagccaccccagcagcagcagcagcaaccatcaactaacctgcagagtaacagcttttacggcagtagctcattgacgaactcctcccagtcttcctcacttttcagccatggcccagggcagcccggatcaacatctctgggcttcggctctggaaacagtctaggagctgccattggatcagctcttagcgggttcggatcatccgtgggttcttcagcatccagcagtgccacccgtcgagaaagcctttcaacgagcagcgatctgtacaaacgctctagtagcagcctggctcccatcggccagccattctacaatagcttgggtttcagcagcagcccctcccctattggcatgccactacccagccagacccctggccattccctgactcctcccccaagtctgagctcacacgggtcctcctcctccctgcatctcgggggtctgaccaacggcagtggtaggtatattagcgccgcgccaggagccgaggccaaatacagaagcgcatcttccacttcatctctcttctcctccagcagtcaactgttcccaccgtcacgtctgcggtataatagatctgatattatgccctcaggccgatcacgcctgctggaggacttcaggaacaatagatttcccaacctccagcttcgggacttaataggccacattgttgaattttcccaggatcaacacggctctcgattcatccagcagaagctggagcgtgccacaccagcagagcgccagatggtgttcaatgaaatactccaggctgcttatcaattgatgactgatgtgtttggaaattacgtcatccagaaattctttgagtttgggtctcttgaccaaaagctagctctggcaacgaggatccggggccacgtgttacccctggccctccaaatgtatggatgccgcgtcatccagaaagcactcgaatctatctcatctgatcagcagagcgaaatggttaaggaattagatggacacgtcttaaaatgcgtgaaggaccagaacggaaaccatgtcgtccaaaagtgcattgagtgcgtacagcctcaatcattgcaattcatcattgatgcgttcaaggggcaggtgtttgtcctttctacacacccttatggttgtagagtgattcaacgtattctggaacactgcactgccgaacaaacactgccaatcctggaggagctgcaccaacatacagagcagcttgtccaggaccagtatggtaactatgtcatccagcacgtgctggaacatggccggcctgaagataaaagcaagattgtgtccgaaataaggggtaaagtgcttgcgctaagtcagcacaaattcgcgagcaacgtggtcgagaaatgtgttacgcacgctagccgagcagagcgcgcattattaattgatgaagtatgttgtcagaatgacggcccacattctgccctatatacaatgatgaaggatcagtatgccaattatgtggtacaaaagatgattgacatggcggagccagcccaaaggaaaatcatcatgcacaaaattcgaccacatatcaccacactgaggaaatacacttacggtaaacacatcctggccaaactagaaaagtactacttaaagaatagcccagatttgggcccaatcggaggccccccaaatggaatgctgtag

SEQ ID NO: 185854 - DNA, 3195 bp, Artificial Sequence
  derived and/or modified sequence
atgaaccacgacttccaggccctggccctggagagccggggcatgggagagctgctgcccaccaagaagttctgggagccagatgacagcaccaaggatggccagaagggcatcttcctgggagatgatgagtggagggagacagcctggggcgccagccaccacagcatgagccagcccatcatggtgcagaggagaagtggccagggcttccacggcaacagcgaggtgaatgccatcctgagccccaggtctgagagcggcggcctgggcgtgtccatggtggagtatgtgctgagcagcagccctgctgacaagctggacagccgcttcagaaaaggaaactttggcaccagagatgctgagacagatggccctgagaagggggaccagaagggcaaggccagcccctttgaggaggaccagaacagagacctgaagcagggagatgatgatgacagcaagatcaatggccggggcctgcccaacggcatggatgctgactgcaaggacttcaacagaacacctggcagccggcaggccagccccacagaggtggtggagcggctgggccccaacaccaaccccagcgagggcctgggccccctgcccaaccccacagccaacaagcccctggtggaggagttcagcaaccctgagacccagaacctggatgccatggagcaggtgggcctggagagcctgcagtttgactacccaggcaaccaggtgcccatggacagcagcggggccaccgtgggcctgtttgactacaacagccagcagcagctgttccagaggaccaatgccctgactgtgcagcagctgacagctgcccagcagcagcagtatgccctggccgccgcccagcagccccacatcgccggggtcttctctgctggcctggccccagctgcctttgtgcccaacccctacatcatctctgctgcccctcctggaacagacccctacacagctgctggcctggccgccgccgccaccctggccggccctgctgtggtgcccccccagtactacggcgtgccctggggcgtgtacccagccaacctcttccagcagcaggccgctgctgctgccaacaacacagccagccagcaggccgccagccaggcccagcccggccagcagcaggtgctgcgggccggggccggccagaggcccctgacccccaaccagggccagcagggccagcaggccgagagcctggccgctgctgctgctgccaaccccaccctggccttcggccagggcctggccaccggcatgcctggctaccaggtgctggcccccacagcctactatgaccagacaggagccctggtggtgggccctggggccaggacaggcctgggcgcccctgtgcggctgatggcccccacccctgtgctgatcagcagcgctgctgcccaggccgctgctgctgctgctgctgggggcacagccagcagcctgaccggcagcaccaacggcctcttccggcccatcggcacccagcccccccagcagcagcagcagcagcccagcaccaacctgcagagcaacagcttctacggcagcagcagcctgaccaacagcagccagagcagcagcctcttcagccacggccctggccagcccggcagcaccagcctgggctttggaagtggcaacagcctgggcgccgccatcggcagcgccctgagcggcttcggcagctctgtgggcagcagcgccagcagcagcgccacccggcgggagagcctgagcaccagcagtgacctgtacaagaggagcagcagcagcctggcccccatcggccagcccttctacaacagcctgggcttcagcagcagccccagccccatcggcatgcccctgcccagccagaccccaggccacagcctgaccccaccacccagcctgagcagccacggcagcagcagcagcctgcacctgggcggcctgaccaatggaagtggccgctacatctctgctgcccctggagctgaggccaagtacagaagtgccagcagcaccagcagcctcttcagcagcagcagccagctgtttcctcccagccggctgcgctacaacagaagtgacatcatgcccagcggccgcagccggctgctggaggacttcaggaacaaccgcttccccaacctgcagctgcgggacctgattggccacatcgtggagttcagccaggaccagcacggcagccgcttcatccagcagaagctggagcgggccaccccagctgagcggcagatggtgttcaatgagatcctgcaggccgcctaccagctgatgacagatgtgtttggaaactacgtgatccagaagttctttgaatttggcagcctggaccagaagctggccctggccacccgcatccggggccacgtgctgcccctggccctgcagatgtatggctgcagggtcatccagaaggccctggagagcatcagcagtgaccagcagagcgagatggtgaaggagctggatggccacgtgctgaagtgtgtgaaggaccagaatggaaaccacgtggtgcagaagtgcattgaatgtgtgcagccccagagcctgcagttcatcattgatgccttcaagggccaggtgtttgtgctgagcacccacccctacggctgcagggtcatccagaggatcctggagcactgcacagctgagcagaccctgcccatcctggaggagctgcaccagcacacagagcagctggtgcaggaccagtatggcaactacgtgatccagcacgtgctggagcacggccggcctgaggacaagagcaagatcgtgtctgagatccggggcaaggtgctggccctgagccagcacaagtttgccagcaatgtggtggagaagtgtgtgacccacgccagcagagctgagcgggccctgctgattgatgaggtgtgctgccagaatgatggcccccacagcgccctgtacaccatgatgaaggaccagtatgccaactacgtggtgcagaagatgattgacatggccgagcccgcccagaggaagatcatcatgcacaagatccggccccacatcaccaccctgaggaagtacacctacggcaagcacatcctggccaagctggagaagtactacctgaagaacagcccagacctgggccccatcggcggccccccaaatggcatgctgtag

SEQ ID NO: 185855 - DNA, 3195 bp, Artificial Sequence
  derived and/or modified sequence
atgaaccacgacttccaggccctggccctggagagccggggcatgggcgaactgctgccaacgaagaaattttgggagccagacgactccacaaaagacggccagaaaggcattttcctgggtgacgatgagtggcgcgagaccgcatggggagcaagtcatcactctatgagccagccaataatggtccagaggagatccggacagggctttcacggcaactctgaagtgaatgccattctcagtccacgttctgagagcggcggtttgggagtgagcatggtggagtacgtcctgtcttcctccccggccgacaagctcgactctcgcttcaggaaaggcaatttcgggacacgagacgccgagactgatggacctgagaagggcgaccagaaaggcaaggccagtccattcgaagaagaccagaatagggacctgaagcagggggacgatgacgattccaaaattaacgggaggggtctgccaaacggcatggatgctgactgtaaagactttaatcgaacaccagggtctcggcaggcaagccctactgaggtggtggagcgcttaggacccaataccaatccatcagagggcctgggtcctctgcccaatcccaccgctaacaagccactggtcgaggagttctctaaccctgagactcagaaccttgacgcaatggagcaggtaggacttgagagtctgcagttcgactacccaggtaatcaagtgcccatggatagctctggagcaacagtcggcctgtttgactataatagtcagcagcagctctttcagagaactaatgcactgacagtccaacagctgacagcggcacagcagcagcagtatgcactggctgccgcacagcaaccccacattgcaggagtctttagcgccggactcgccccagcagcctttgtacctaacccgtatataatctctgctgcccctccaggtaccgatccgtatactgcagcaggacttgctgcagctgccaccctggccggtccagcggtggtcccaccccagtactatggagtcccctggggagtctatccggcaaacttgtttcagcagcaggctgccgccgccgccaataatacagcaagccagcaagcagctagccaggcacagcctggacagcaacaggttcttcgagctggtgccggacagcggcccctaaccccgaatcaaggccaacaggggcagcaggcagagtcactggccgccgcagccgccgctaatcccacgttggcgttcgggcagggcctcgctacgggaatgcctggctaccaggtgctcgctcccactgcctactatgaccagaccggagctctggtcgttggaccaggagcaagaaccggcctgggtgcacccgtgagactaatggcaccaacacccgtgctgatatcttcagctgccgctcaggccgcagcggcggctgcggctggggggaccgcctccagtctcaccggttctacgaacgggctgttccgtcccattggaacccagcctccccagcagcaacagcagcagccatccaccaatttgcagtccaactctttctacgggtcgagttcattaactaactctagtcagtcctcttctctgttttcccacgggcccggccagcctggctcaacctctcttggctttgggtctggcaatagtctcggcgccgcgatcggcagtgctcttagcggatttggttcaagcgtgggctcctctgccagcagctcagcaactcgccgcgaatctctttccacttctagtgacctatacaaaagatcctcctcgtcactggcgcctattggtcagccattttacaacagtctgggcttcagtagtagcccctccccaataggcatgcctctcccgtcgcagacacctgggcacagtctgacacctccgccctccctgtcgtcgcacggctctagctctagccttcatctcgggggactgactaacgggtccggtaggtatatttcagccgcccccggcgcagaggctaagtacaggagtgcatcctccacttcttccctgttctcctcatctagccagctgttcccccccagtcgtctgcgctataatagaagcgatatcatgccaagcggaagatcacggctgctggaggacttcagaaacaatagattcccaaaccttcagctgcgggacctcatagggcacatcgtagaattcagccaggatcagcacgggagccggttcatccagcagaagctagaaagggctactcccgcagaaagacaaatggtgtttaatgagatcctgcaagctgcgtatcagctgatgacagacgtgtttggcaactatgttatccagaaattcttcgagttcggctccctggatcaaaaactcgcactggcaacgcgaattcgtggccacgtccttccacttgcactgcagatgtatgggtgtagggtcatccagaaagcgctagagagcatctcttctgaccaacagtccgaaatggtcaaggaactagacggacacgtgctgaagtgtgtgaaggaccagaatggcaaccatgtcgttcaaaaatgcatcgagtgtgtgcagccacagagcctgcagttcattattgatgcatttaagggccaggtgttcgttctgtctacccatccctatggatgccgtgtgattcagaggatcctcgagcactgtaccgccgaacagaccctgccaatactggaggagctgcaccagcacaccgagcaactggtgcaggaccagtacgggaactatgtgatccagcatgttctggagcatggacgaccggaggacaaatctaagatcgtgtctgagatcagaggcaaggtcctggccctgagccaacacaaatttgcgtctaatgtcgtcgaaaaatgcgtcacccatgcgagcagggcggagagagccctcctaattgacgaagtgtgctgccagaacgacgggccacactctgccctttatactatgatgaaggatcaatacgccaactacgtcgttcagaagatgattgatatggccgagcccgctcagagaaaaataatcatgcataagattcgccctcacataaccactctgcgcaagtacacatacggaaagcacattctggccaaattggaaaagtactacttgaaaaacagcccggacttagggccaattggggggcccccaaacggcatgctgtag

SEQ ID NO: 185856 - DNA, 3195 bp, Artificial Sequence
  derived and/or modified sequence
atgaaccacgacttccaggccctggccctggagagccggggcatgggcgaactgcttccaacaaaaaagttttgggagccagatgattcaactaaggacgggcagaaagggatctttcttggagacgacgaatggcgtgagacagcatggggcgctagccaccattctatgtctcaaccaattatggtgcagcgaaggtctggacagggatttcacggaaattcggaggtaaatgctattctgtcccccaggagcgaatccggcgggctgggcgtgagtatggttgaatatgttctgtcaagtagccccgccgacaaattagacagccggttccggaagggcaacttcggaacccgggatgctgagaccgacgggcccgagaagggtgatcagaagggcaaggcgtcacctttcgaggaggatcagaacagagacttaaagcagggcgacgatgatgactctaagattaatgggagggggctgcccaacgggatggacgcggactgcaaagatttcaatcgaacccccggcagccggcaagcgtcgcccactgaggtagtcgaacgcttgggaccaaatacaaacccttcagaggggctcggacctctgccaaaccccaccgctaataaaccgctcgtggaagaattctccaacccggagacacagaatcttgatgctatggagcaggtgggcctggagtctttacagtttgactacccgggaaaccaggtgcctatggattccagtggcgccaccgtcgggctcttcgattacaacagtcagcagcagctcttccaacgcacaaacgctcttactgttcagcagctaacggccgctcagcagcaacaatatgccttggccgcggcccagcagcctcatatcgcaggcgtgttcagcgccggtcttgcgcctgccgcatttgtgccgaacccatatatcatctcagcagccccccctggtacagacccctatactgctgcagggttggctgctgccgccaccctcgcggggccggcagtagtcccaccgcagtattacggcgtgccctggggagtataccctgcaaacttatttcaacagcaggcagccgcagccgctaacaacacagctagtcagcaagcggctagccaggcccagccgggtcagcagcaggtgttacgagcaggggctggccagcgcccactaaccccaaaccagggccagcaggggcaacaggccgagtcactggccgcagccgcagcggccaacccaacgctagcttttggccaggggctcgccaccggaatgccaggttatcaggtcctggctcctacagcgtactacgaccaaaccggcgcgctggtggtgggccctggggcccgcacaggcctgggcgctcccgtgaggctgatggcaccgacgcccgtactcatcagttcagccgctgcacaggccgccgccgccgcagccgctggtggaacagccagctcactgactggaagtactaacggactgttccgccccatagggactcaacctccccagcaacaacagcagcaacctagcactaacctccaatctaacagtttttatggctccagttctctgactaacagcagccagagttcttctttattcagtcacgggccaggacaacccggatctacctctttgggatttggttccggcaattctctaggagctgccatcggatctgccttatccggatttggatcttctgttgggtctagcgcttcctccagtgcaacgcggagagagtcactgtcaactagtagcgatttgtataaacgctcaagcagctctttagcaccaatcggccaaccattttataactccctgggcttctcttcctcaccatcgcctatcggaatgcctttaccctcccagactcctgggcattccctgaccccgcccccctcattaagtagtcacggcagctccagctccctgcacctgggtggcttgaccaacggctcagggcgatatatatcagctgcgcctggcgcagaagcaaagtatagatctgcatctagtacttcttcactgttctcaagtagttctcagctgtttccacctagccgtctcaggtacaatagaagtgacattatgccctctggtcggagcaggttgctggaggattttaggaataaccgcttccctaacctgcagctgcgggaccttattgggcacattgttgagttttcacaggatcagcatggaagtcggtttattcagcaaaagctggaaagagccactcctgccgaaaggcagatggtgtttaacgaaatcctgcaggcagcttaccaactgatgacagatgtcttcgggaattacgtgatccagaaattctttgaattcggctccctcgatcagaagctggccctggccacccgtatccgagggcatgtgctacctcttgccctgcaaatgtatggatgccgcgtaatccagaaggccctggaatccatttctagcgaccaacagtccgagatggtgaaagagttggacggtcatgtcctgaagtgcgttaaggatcagaacgggaaccatgtcgtgcagaaatgcatcgagtgcgttcaaccacaatccctccaatttatcatcgatgcctttaaggggcaggtatttgtgctgtccactcatccctacgggtgcagggtcattcagcggattctggaacactgcaccgctgaacagaccctgcccattctcgaggagcttcatcagcacaccgagcagctggtccaggaccaatatgggaattacgtgatccagcacgtactcgagcacggaagacctgaggacaagagcaaaatcgtgagcgagatacgggggaaagtactggctctttctcagcataagtttgcgagcaacgttgttgagaagtgcgttacccacgccagccgcgcagaacgggctcttctgatcgatgaggtgtgttgccagaacgatggtccacattctgcactctatactatgatgaaagaccagtacgctaactacgtcgtgcagaagatgattgacatggccgagcccgcacagcgcaaaatcataatgcacaagattaggccacacataaccactctgagaaagtatacttacggcaagcacattcttgcgaagctggagaagtactacctgaagaactcccccgacctgggtccaattggggggccccctaatggtatgctgtag

SEQ ID NO: 185857 - DNA, 3195 bp, Artificial Sequence
  derived and/or modified sequence
atgaaccacgacttccaagctctggccttggagtctcgcggtatgggcgagctcttgccaaccaaaaagttctgggaaccggatgattcgaccaaggatggacaaaaggggatttttctgggcgatgatgagtggcgggaaaccgcctggggcgcttctcatcatagcatgtcacagcccatcatggtccagcgcaggagcggtcaaggatttcatggaaattctgaggttaatgccattttgtccccgagatccgagagcggaggtctgggagttagtatggtggagtacgtactttccagctcgccagcggataaattggattcacggttccgaaaggggaatttcggcacaagagacgcagagaccgacggacctgagaagggtgatcagaaagggaaggcgtccccttttgaggaagaccagaaccgcgacttaaagcagggcgacgacgacgatagtaaaatcaatggcaggggcctgcctaacggaatggacgccgactgtaaagattttaacaggacacctgggtccagacaggcgtcccctacagaggtggtcgaacggttggggcctaacacgaacccatccgaaggacttggacccctgcctaatcccacagcgaacaagcctctcgtcgaagagttctctaaccctgagacccaaaatctggatgcaatggaacaagtcggactagagtccctgcagttcgattaccctggtaaccaagtgcctatggactcttccggagctaccgtggggctgtttgattacaactcacagcagcaactgtttcagagaacaaacgcgctgaccgtgcagcaacttacagccgctcagcaacagcaatacgcgctcgcagccgcacaacagccccatatcgctggcgtcttctccgcagggttagctccagccgcattcgtgcccaacccatacataatctctgccgcacctcccggtaccgacccttatacggccgctggtctggcagcagcagccactctggcaggtccagctgtggtcccaccacagtattacggtgttccttggggggtctaccctgccaatctgttccaacagcaagctgccgctgccgcaaataataccgcctcgcaacaagctgcctctcaggctcaacctggccagcagcaggtgctgagagcaggagctggacagagacctctcactccgaaccagggccagcaaggccaacaggcagagtcgctggctgctgccgcagctgccaaccccacactggcctttggacagggcctcgccacagggatgccagggtaccaagtgctggcaccaaccgcttattacgaccagacaggtgcactggttgtagggccaggggctagaactggcctgggtgcccctgtgcgactgatggcaccaactcccgtcttgatatcttctgccgcagctcaggccgctgctgctgcagctgcagggggaacggcttcctctttaaccgggtcaactaacggtcttttccggccaatcggcacccagccccctcagcagcagcagcaacagccttccactaacctgcagagtaactctttttatgggagttcaagcctgacgaactcgtcgcaatcatcttccctgttttctcatggcccaggccaacctggtagcaccagtctgggcttcggtagcggcaattctcttggcgcagctatcggcagcgccctgtctggattcggatctagcgtgggcagctctgccagctcatctgccacccggcgagaatccctgtccactagctctgacttgtataagcgatcctcctcctcactggcgcctattggacaaccattctacaactctctggggttcagctcatcaccaagccccataggaatgcctctgccatctcagacaccaggacactctctcacgcctccaccctcattaagttcacatggttcctctagctcactgcatctgggtggattgactaacggcagcgggcgttatataagtgccgctccaggcgctgaagccaagtatcggtcagcttcctctacttctagtctgttctcctcctcctctcagttgttcccgccaagccgactgcgttataaccggagtgacattatgcccagcggtcggtcacgtctgctggaagacttccgcaacaatcgctttcctaacctgcagctccgagacctgattggccacatcgttgagttttcccaggatcagcacggctccaggttcatccaacagaagctcgagcgagccacccccgcagagaggcagatggtctttaacgaaatacttcaggccgcttatcaactcatgaccgacgtcttcgggaactacgtgattcagaagtttttcgagttcggcagtcttgatcagaaactggctcttgctactaggattcgcggacatgtgttgccactggccctgcagatgtacggctgtcgagtcattcagaaagccctggaatctattagttcagaccaacagtcagagatggtgaaagagctcgacggacacgtgctgaaatgtgtgaaggaccaaaatggaaatcacgtggtgcagaagtgcattgagtgcgtgcagccccaaagcctgcagttcatcattgatgcatttaaggggcaagtcttcgtcctcagcacgcatccgtacggctgcagagtcattcagcgaatactggaacactgcacagccgaacagaccctgcctatcctggaagagctgcaccagcataccgaacagctggtacaagaccagtacggcaactacgtcattcagcacgtgctcgagcatggtcgaccggaagacaagtccaagatcgtgtctgaaatcaggggcaaagtcctggccctcagtcagcataaatttgcctcaaatgtcgtggagaaatgtgtgacacacgcctcccgagctgaacgcgcactgctcatcgacgaggtgtgttgccagaatgatggaccacacagtgcgctctatactatgatgaaggatcaatacgctaactacgtggtgcagaagatgattgacatggcagagcccgctcaacgtaagatcataatgcacaagattaggccccatatcaccaccttgcggaagtacacttatggaaaacacattttggccaagttagaaaaatactacctgaagaatagccccgatctgggaccaatcgggggtcccccaaatggaatgctgtag

SEQ ID NO: 185858 - DNA, 3195 bp, Artificial Sequence
  derived and/or modified sequence
atgaatcatgattttcaggctttagccctggagagtcgtggtatgggggagctgctcccaactaagaagttttgggagcccgatgactccaccaaggacgggcaaaagggcatattcctgggggatgacgaatggcgggaaaccgcatggggggcaagccaccactcgatgtcccagcccataatggttcagcggagaagcggccagggctttcatgggaacagtgaggttaatgcaattctgagtcccagaagcgaatctgggggtcttggagtgagtatggtggaatatgttttgtcttcgagccccgcagacaagctggactcaagattccgcaaaggtaactttgggaccagagacgcagagaccgacggccctgaaaaaggcgaccagaaggggaaagcaagtccctttgaagaagaccagaatcgggatctgaaacagggtgatgatgacgactccaaaattaacggacgaggtcttcctaacggcatggacgctgattgcaaggacttcaatagaacccccggatcccggcaggcttcaccaactgaggttgtggaaaggctcggcccaaatactaatcctagtgaggggctggggccactgcccaatccaacagcaaacaaaccattggttgaggagtttagcaatcctgagactcagaatcttgacgcaatggagcaggttggactggagtcacttcagtttgattatccaggtaaccaggtccctatggactcaagcggcgctacagtgggactgttcgactacaactcacagcaacagctcttccaaaggactaatgctctcaccgtccagcagttaacggccgctcagcaacagcagtatgcactggccgcagctcagcagcctcacatcgccggagtcttcagtgccggacttgctccggctgcctttgtgcctaatccatacatcatcagtgctgctcccccagggacggatccctatacagctgcagggttggcagccgcagccacgctggccggacccgctgtagtccccccacagtattacggggtcccctggggggtctatccagctaacctgtttcaacaacaggcggcagccgcagctaataataccgcatcacaacaggctgcatcacaggcccagcctgggcagcagcaggtgcttagagcgggtgccggtcagcggccactgacgccaaaccaggggcagcagggacaacaggcagagtccctagccgctgcagccgctgctaaccctaccctcgcgtttggccagggcctggccaccggcatgcccggatatcaggttctcgctcccactgcttattacgatcagaccggagcccttgtggtgggtccaggtgcacggaccggactgggtgcccctgttaggctgatggcccctacccctgttcttatctcatcggcagccgctcaggcagcagccgcagcagcagccggaggaactgccagcagccttactggaagtaccaatggtctctttagacctataggaacccagccaccccagcagcagcagcagcaaccaagtactaatctgcaaagcaatagcttctacggctcaagttcactgaccaactcgtcacagtcttcaagcctcttctcgcacggtccaggacagcccggatcaaccagcttgggcttcggctcaggtaattccctgggagcagctatcggttctgctcttagtgggttcgggtcctcagtggggtcctctgcgtctagttctgcaaccaggagggaatctctgtccacgtcctcagacttatacaagaggtcttccagcagcctggcacccatcggccagcctttttacaattccttgggctttagttcaagcccttcccctatcggaatgccattaccaagtcagacacccggtcactctctcactccaccaccaagcctgtcctcccatgggtcttctagctcactgcatcttggcggactgactaacggatccggacgttatatatccgcagctcccggtgcagaagccaaatatcgctccgccagctctaccagcagcctttttagctcttcctctcagttatttccaccatcaaggctgcgctacaaccgatcagatataatgccatctggccgaagtagactcctggaagactttagaaataatcggttccccaatctgcagctgcgcgatttgatcggccacattgtagagttcagccaggaccagcatggctcccgatttattcaacagaaactcgaaagagccacccccgctgaacgccagatggtgttcaatgagatacttcaggctgcctatcagctgatgaccgacgtattcgggaactatgtgatacaaaagtttttcgagttcggatctctagaccaaaaattagctctggcaactcgcatacgcggacacgtgttgcctttagcgttacaaatgtacgggtgccgggtcattcaaaaagccttggaaagcatcagcagcgaccagcagtccgagatggttaaggagctggacggtcacgttttaaaatgcgtgaaggaccagaacgggaaccacgtcgtgcaaaaatgcatcgagtgcgtgcagccccaatcgctgcaattcatcattgatgcctttaaggggcaggtcttcgtattatccacccacccatacggctgtagggttatccagcggattctcgagcattgtaccgcagaacagacattaccaatcctggaagagctccatcagcataccgaacagttggtccaggatcagtatggcaactatgtgatacagcatgtccttgaacacgggcgaccggaggataagtcaaagattgtgtctgagatccggggaaaggtcttggctttgtcccagcacaaattcgcgtcgaacgtcgtggaaaaatgtgtcacacacgcatcccgcgcagaacgggctctactgatcgacgaagtatgttgtcagaatgacggacctcattccgcactgtacaccatgatgaaggaccaatatgcaaactatgtcgttcaaaagatgatcgatatggcggaacctgcacagcggaaaattattatgcataagatccgaccccacatcacgacacttaggaagtatacttatgggaagcacatcctggcaaaactcgagaagtattaccttaaaaactcacctgacctgggccctattggcggtccgcctaacggaatgctgtag

SEQ ID NO: 185859 - DNA, 6112 bp, Artificial Sequence
  derived and/or modified sequence
aacaggtttgatctgtggatgaaatgaatcatgattttcaagctcttgcattagaatctcggggaatgggagagcttttgcctaccaaaaagttttgggaacctgatgattcaacaaaagatggacaaaaaggcatatttcttggggatgatgaatggagagagactgcatggggagcttctcaccattcaatgtcccagcctattatggtacagagaagatctggacagggttttcatggaaacagtgaagtaaatgcaatactgtctccgcgatcagaaagtggaggccttggtgtgagcatggtagaatatgtattaagttcttctcctgctgataaattggattctcgatttaggaagggaaattttggcactagagatgctgaaacagatggacctgagaaaggagatcaaaaaggcaaggcttctccatttgaggaggaccaaaacagagatcttaaacaaggagatgatgatgattctaaaataaatggcagaggtttgccaaatggaatggatgccgattgcaaagattttaatcgtactcctggaagtcgtcaagcctctccaactgaagtagttgagcgcttgggccccaatactaatccctcagaaggactggggcctcttcctaatcctacagctaataaaccacttgttgaagaattttcaaatcctgaaactcagaatctggatgccatggaacaagttggtctggaatccttacagtttgactatcctggtaatcaggtaccaatggactcttcaggagctactgtaggcctttttgactacaattcccagcagcagctctttcagaggactaatgcactaacagttcaacagttaactgcagctcaacagcagcaatatgcattagcagcagctcagcagccacatatagctggtgtattctcagcaggccttgctccagctgcatttgtgccaaatccatacattattagtgctgctcctccagggaccgatccgtatactgcagcaggattggctgcagcagctacattagcaggtccagcagtggttccacctcagtattacggcgttccatggggggtgtatccagccaacttatttcagcagcaagctgcagctgcggcaaataacacagccagtcagcaagcagcatcacaagctcagcctggacagcaacaggttctccgtgctggagcaggtcagcgtcctcttactcccaatcagggtcagcaagggcagcaagcagaatcacttgcggcagctgcagcagcaaatccaacattggcttttggtcagggtcttgctactggcatgccaggctatcaagtactagctccaactgcctattatgatcagactggtgccttagtggttggccctggagcaaggactggccttggagctccagttcggttaatggctccaacacctgttttaattagttcagcagcagcacaagctgcagcagcagcagcagctggaggaactgcaagtagccttacaggcagcacaaatggtctgtttcggccaattggcactcagccaccacagcagcagcaacagcagccaagcactaatctgcaatctaattcattttatggaagcagttctttgactaatagctcccagagtagttctttattttctcatggacctggtcaacctggaagtacatctcttggctttggaagtggtaactctttgggtgctgctataggctcagccctcagtggatttggttcatcagttggcagttctgcaagtagtagtgccacaaggagagagtctctatctactagctctgacttgtacaaaagatctagtagcagcctagcacccatagggcaaccattttacaatagtctgggattttcctcctctccaagtccaataggcatgcctctgccaagccaaactccaggacattcacttacgccaccgccatcactttcatcacatggatcctcatccagtttgcatttaggaggactgacaaatggtagtggtcgatatatctctgcagcacctggagcagaagcaaaatatcgaagtgcttcaagcacttccagtctatttagctccagcagccagctctttcctccttcccggcttcggtataataggtctgatattatgccttctggccgcagtagattattggaagatttcagaaacaaccgcttcccaaaccttcagcttagagacttgattggacatatagttgagttttctcaagaccagcatggttctagattcatacagcaaaaactagagagagctactccagctgagcgacagatggtatttaatgaaattctgcaagcagcctatcaattaatgactgatgtttttggcaactatgttatacagaagttttttgagtttgggagtctggatcaaaaattagccctggctactcgtattcgtggtcatgttctacccttagccttgcagatgtatggctgccgcgttattcagaaagcattagaatctatttcttctgaccagcagagtgaaatggtaaaggagctggatggtcatgtgctcaaatgtgtgaaagatcagaatggaaaccatgttgtacaaaaatgtatcgaatgtgttcagccacagtcactacagttcatcattgatgctttcaagggacaagtatttgtgctttcaactcatccttatggctgcagagtaattcagcgcatcctagagcattgcactgcagaacagaccttacctatcttagaagaactccaccaacatacagagcagttggtacaggatcagtatggcaattatgttattcagcatgtactggaacacggtcgacctgaagacaagagcaaaattgtttccgaaatcaggggaaaggttttagccctgagtcaacacaaatttgccagcaatgtagtagaaaagtgtgttactcatgcctcccgtgctgagagagctttactgattgacgaggtttgctgccagaatgatggtcctcacagtgccttatacaccatgatgaaggaccagtatgccaattacgtggttcaaaagatgattgatatggctgaacctgctcagagaaagataatcatgcacaagattcgacctcacattactactttgcgcaaatacacatacgggaagcatatactggccaagttggaaaagtattatttgaagaatagcccggacctaggacctattggaggaccaccaaatggaatgctgtaaattacaggagcaagagaaagaagataatttaaccatgtgaaaagaatttttttgtgtgtgaattatcaaaacacaactcaactatgaatcttcaatttttttttaaagcaaaactatttattgactttattcatccatttgtaaattttttaaggttcttgtgtatatttggggggtgggggatgaattataaattatattcagccctgagtggagacctatcagattggattgctggcaaagcacagaatgcctgtatatgatgtaactgtatcaaaaataaaaagctgtcacatattttgtaaatttttaccttgtaaagtcacaaaaatagtttttaaaggaaaaagtacagtattcttttaataaactggctcacagtctggtaggtctacaaccccatagcacaacaggtttatagagatgtatatagaattatagtccttatttttttcctttgcgtgaaaccttttataacagattaacaatcaactgcataaatattattaatattttaaaaagagttaagttgtattttgataattcacaaactatcatgcaaataacgagtaagtagacaagaataaagtggtttgagatgaaaagaacctaacattatttacagtagatgtggttttaatacaattactgccctaaaatgtctctggcaatgtacagaaatattgtatatacttacatatgtaattgttgtaagagttaaatacaaaatcatggtgacacttccaattaagtgcactaaatgaaaagttaagtcacttattaacttttcagtttggtttgcaatgagaaagagtggaaatttgtattttgttttgcttatagaattacagacatgttgaggaagtgttgagctttattttgctttttcatagaggcagaaagtaggaaccagatagagatgaaaaggggccactgaaaagtgaatttgatagctcagcatttaagcatgattacatattcagatagctctttttgctttctataaatatatgcattgtgtgtgtagtaatagatgtaagtttacactttgaaaggaaatcttgtttcaatgtttattataaaagccttgctaatttagtagtgatgctttccttggttgtacaggtgtacatttgtaaaccttcatgctgtaaatggaatttgttttatctctttgggatacatttgcattttagtgtacatttacgtccctgccctctttgacctggcaatatagtgttgtataatgtaaatttatttctccaaatcgagagtgattttttaaaaattttttatctttatatggtttcagaagtatgaaccagctttctttttattattgtgagatcattttgttttataacatagttgttgactgttaatatggacctgctagaatttggatcactttcaattgaagtcagggtattgtgcataatagaaagtattggactgagatatttggttaccatggaggccaatgcttttttcatcttattaaatgtgatgtgacttttttctttgtacagaagagtactgtatttttgaatagcctactcccaagtaagagcaaatctgtatgataacattttttcctctggacataagacataacagtaacacgatgtacatttacaagcggccttatgtacatttcccaacaatctttttaaggcaaaattgtgaccatatgtgtataattaaaatcgtttttaatcctttgcctatgaaaatattttggaaaaaaacttgctgtgtatattcagtttctgaaagataaagaaagtgctttgtattttgttgaagtcagtattttgtataaacatttatgttgacccacttatgttcagtgctgaaaactaaaatgaacatgctattctgtcagctgaatatggaagagatctttttttactagagatctgcagaagaaacgcaatcttctgagcacaatatggaatctaaaggttttatcacttagttgttcatattatgaacctaaaaataatggcataaagtttggggatgccaggcatactttttcatgtttggtgttgagttattttacttttctaacccaacattccttggtgagaccattaaatccaaacacttgtcaccgttccttctcatagtcactctgggtcatcagcatgtcccagtcactgcagcaacgccttgtgtttgtttcatttttttaaaacccacacaaagccgctgtctcactttttcctactttaccaacctcagagtatttcggcccgtatcgaacttttgttctcagtatcagcccatggtttcaggatcaaagctgtcatgttggagattggtaatggctttcctgtctttgtacagttgaattcctagtcttccttcatccttgccctctgttggcacaggcattatctctgcaattttagaaaatgacaagtagagaatactacattgagaaactaaaccctcttcttggggtcctgatactcattcccatttgtcccagtgctgacaacccaatcttcccaatactttcaggcctgctctacaaaagtacctgttcttgtagaaattttacagtctgccattttgggtgcccaccccaatttttaccttttagtaagttggcatgaaattttggtaaaatctgaaaatcacatttcagaataaaacaattgggcaaaactacctaggctttactcttgagtgtctccttttgatagggattgtttctggaccagtttgtctaagtcctggctcttattggttcatatgaaataatgttaacttcacttctttgtatattatgtataaattagaaaatgaaaaatgtgtgaataacattgtatgaaataaacctggtcttgtgtttttctctagataaaatacccctctgtacctca

SEQ ID NO: 185860 - DNA, 3594 bp, Artificial Sequence
  derived and/or modified sequence
attgccgccaccgaaggcggaggagggggaggaccgccaagagcgacgccgccgtgtgcccaacggtcggtgtccccggctgaggcagcgcggccgcagcagccctgtttgatctgtggatgaaatgaatcatgattttcaagctcttgcattagaatctcggggaatgggagagcttttgcctaccaaaaagttttgggaacctgatgattcaacaaaagatggacaaaaaggcatatttcttggggatgatgaatggagagagactgcatggggagcttctcaccattcaatgtcccagcctattatggtacagagaagatctggacagggttttcatggaaacagtgaagtaaatgcaatactgtctccgcgatcagaaagtggaggccttggtgtgagcatggtagaatatgtattaagttcttctcctgctgataaattggattctcgatttaggaagggaaattttggcactagagatgctgaaacagatggacctgagaaaggagatcaaaaaggcaaggcttctccatttgaggaggaccaaaacagagatcttaaacaaggagatgatgatgattctaaaataaatggcagaggtttgccaaatggaatggatgccgattgcaaagattttaatcgtactcctggaagtcgtcaagcctctccaactgaagtagttgagcgcttgggccccaatactaatccctcagaaggactggggcctcttcctaatcctacagctaataaaccacttgttgaagaattttcaaatcctgaaactcagaatctggatgccatggaacaagttggtctggaatccttacagtttgactatcctggtaatcaggtaccaatggactcttcaggagctactgtaggcctttttgactacaattcccagcagcagctctttcagaggactaatgcactaacagttcaacagttaactgcagctcaacagcagcaatatgcattagcagcagctcagcagccacatatagctggtgtattctcagcaggccttgctccagctgcatttgtgccaaatccatacattattagtgctgctcctccagggaccgatccgtatactgcagcaggattggctgcagcagctacattagcaggtccagcagtggttccacctcagtattacggcgttccatggggggtgtatccagccaacttatttcagcagcaagctgcagctgcggcaaataacacagccagtcagcaagcagcatcacaagctcagcctggacagcaacaggttctccgtgctggagcaggtcagcgtcctcttactcccaatcagggtcagcaagggcagcaagcagaatcacttgcggcagctgcagcagcaaatccaacattggcttttggtcagggtcttgctactggcatgccaggctatcaagtactagctccaactgcctattatgatcagactggtgccttagtggttggccctggagcaaggactggccttggagctccagttcggttaatggctccaacacctgttttaattagttcagcagcagcacaagctgcagcagcagcagcagctggaggaactgcaagtagccttacaggcagcacaaatggtctgtttcggccaattggcactcagccaccacagcagcagcaacagcagccaagcactaatctgcaatctaattcattttatggaagcagttctttgactaatagctcccagagtagttctttattttctcatggacctggtcaacctggaagtacatctcttggctttggaagtggtaactctttgggtgctgctataggctcagccctcagtggatttggttcatcagttggcagttctgcaagtagtagtgccacaaggagagagtctctatctactagctctgacttgtacaaaagatctagtagcagcctagcacccatagggcaaccattttacaatagtctgggattttcctcctctccaagtccaataggcatgcctctgccaagccaaactccaggacattcacttacgccaccgccatcactttcatcacatggatcctcatccagtttgcatttaggaggactgacaaatggtagtggtcgatatatctctgcagcacctggagcagaagcaaaatatcgaagtgcttcaagcacttccagtctatttagctccagcagccagctctttcctccttcccggcttcggtataataggtctgatattatgccttctggccgcagtagattattggaagatttcagaaacaaccgcttcccaaaccttcagcttagagacttgattggacatatagttgagttttctcaagaccagcatggttctagattcatacagcaaaaactagagagagctactccagctgagcgacagatggtatttaatgaaattctgcaagcagcctatcaattaatgactgatgtttttggcaactatgttatacagaagttttttgagtttgggagtctggatcaaaaattagccctggctactcgtattcgtggtcatgttctacccttagccttgcagatgtatggctgccgcgttattcagaaagcattagaatctatttcttctgaccagcagagtgaaatggtaaaggagctggatggtcatgtgctcaaatgtgtgaaagatcagaatggaaaccatgttgtacaaaaatgtatcgaatgtgttcagccacagtcactacagttcatcattgatgctttcaagggacaagtatttgtgctttcaactcatccttatggctgcagagtaattcagcgcatcctagagcattgcactgcagaacagaccttacctatcttagaagaactccaccaacatacagagcagttggtacaggatcagtatggcaattatgttattcagcatgtactggaacacggtcgacctgaagacaagagcaaaattgtttccgaaatcaggggaaaggttttagccctgagtcaacacaaatttgccagcaatgtagtagaaaagtgtgttactcatgcctcccgtgctgagagagctttactgattgacgaggtttgctgccagaatgatggtcctcacagtgccttatacaccatgatgaaggaccagtatgccaattacgtggttcaaaagatgattgatatggctgaacctgctcagagaaagataatcatgcacaagattcgacctcacattactactttgcgcaaatacacatacgggaagcatatactggccaagttggaaaagtattatttgaagaatagcccggacctaggacctattggaggaccaccaaatggaatgctgtaaattacaggagcaagagaaagaagataatttaaccatgtgaaaagaatttttttgtgtgtgaattatcaaaacacaactcaactatgaatcttcaatttttttttaaagcaaaactatttattgactttattcatccatttgtaaattttttaaggttcttgtgtatatttggggggtgggggatgaattataaattatattcagccctgagtggagacctatcagattggattgctggcaaagcacagaatgcctgtatatgatgtaactgtatc

SEQ ID NO: 185861 - DNA, 3404 bp, Artificial Sequence
  derived and/or modified sequence
gaggcagcgcggccgcagcagccctgtttgatctgtggatgaaatgaatcatgattttcaagctcttgcattagaatctcggggaatgggagagaccattcaatgtcccagcctattatggtacagagaagatctggacagggttttcatggaaacagtgaagtaaatgcaatactgtctccgcgatcagaaagtggaggccttggtgtgagcatggtagaatatgtattaagttcttctcctgctgataaattggattctcgatttaggaagggaaattttggcactagagatgctgaaacagatggacctgagaaaggagatcaaaaaggcaaggcttctccatttgaggaggaccaaaacagagatcttaaacaaggagatgatgatgattctaaaataaatggcagaggtttgccaaatggaatggatgccgattgcaaagattttaatcgtactcctggaagtcgtcaagcctctccaactgaagtagttgagcgcttgggccccaatactaatccctcagaaggactggggcctcttcctaatcctacagctaataaaccacttgttgaagaattttcaaatcctgaaactcagaatctggatgccatggaacaagttggtctggaatccttacagtttgactatcctggtaatcaggtaccaatggactcttcaggagctactgtaggcctttttgactacaattcccagcagcagctctttcagaggactaatgcactaacagttcaacagttaactgcagctcaacagcagcaatatgcattagcagcagctcagcagccacatatagctggtgtattctcagcaggccttgctccagctgcatttgtgccaaatccatacattattagtgctgctcctccagggaccgatccgtatactgcagcaggattggctgcagcagctacattagcaggtccagcagtggttccacctcagtattacggcgttccatggggggtgtatccagccaacttatttcagcagcaagctgcagctgcggcaaataacacagccagtcagcaagcagcatcacaagctcagcctggacagcaacaggttctccgtgctggagcaggtcagcgtcctcttactcccaatcagggtcagcaagggcagcaagcagaatcacttgcggcagctgcagcagcaaatccaacattggcttttggtcagggtcttgctactggcatgccaggctatcaagtactagctccaactgcctattatgatcagactggtgccttagtggttggccctggagcaaggactggccttggagctccagttcggttaatggctccaacacctgttttaattagttcagcagcagcacaagctgcagcagcagcagcagctggaggaactgcaagtagccttacaggcagcacaaatggtctgtttcggccaattggcactcagccaccacagcagcagcaacagcagccaagcactaatctgcaatctaattcattttatggaagcagttctttgactaatagctcccagagtagttctttattttctcatggacctggtcaacctggaagtacatctcttggctttggaagtggtaactctttgggtgctgctataggctcagccctcagtggatttggttcatcagttggcagttctgcaagtagtagtgccacaaggagagagtctctatctactagctctgacttgtacaaaagatctagtagcagcctagcacccatagggcaaccattttacaatagtctgggattttcctcctctccaagtccaataggcatgcctctgccaagccaaactccaggacattcacttacgccaccgccatcactttcatcacatggatcctcatccagtttgcatttaggaggactgacaaatggtagtggtcgatatatctctgcagcacctggagcagaagcaaaatatcgaagtgcttcaagcacttccagtctatttagctccagcagccagctctttcctccttcccggcttcggtataataggtctgatattatgccttctggccgcagtagattattggaagatttcagaaacaaccgcttcccaaaccttcagcttagagacttgattggacatatagttgagttttctcaagaccagcatggttctagattcatacagcaaaaactagagagagctactccagctgagcgacagatggtatttaatgaaattctgcaagcagcctatcaattaatgactgatgtttttggcaactatgttatacagaagttttttgagtttgggagtctggatcaaaaattagccctggctactcgtattcgtggtcatgttctacccttagccttgcagatgtatggctgccgcgttattcagaaagcattagaatctatttcttctgaccagcagagtgaaatggtaaaggagctggatggtcatgtgctcaaatgtgtgaaagatcagaatggaaaccatgttgtacaaaaatgtatcgaatgtgttcagccacagtcactacagttcatcattgatgctttcaagggacaagtatttgtgctttcaactcatccttatggctgcagagtaattcagcgcatcctagagcattgcactgcagaacagaccttacctatcttagaagaactccaccaacatacagagcagttggtacaggatcagtatggcaattatgttattcagcatgtactggaacacggtcgacctgaagacaagagcaaaattgtttccgaaatcaggggaaaggttttagccctgagtcaacacaaatttgccagcaatgtagtagaaaagtgtgttactcatgcctcccgtgctgagagagctttactgattgacgaggtttgctgccagaatgatggtcctcacagtgccttatacaccatgatgaaggaccagtatgccaattacgtggttcaaaagatgattgatatggctgaacctgctcagagaaagataatcatgcacaagattcgacctcacattactactttgcgcaaatacacatacgggaagcatatactggccaagttggaaaagtattatttgaagaatagcccggacctaggacctattggaggaccaccaaatggaatgctgtaaattacaggagcaagagaaagaagataatttaaccatgtgaaaagaatttttttgtgtgtgaattatcaaaacacaactcaactatgaatcttcaatttttttttaaagcaaaactatttattgactttattcatccatttgtaaattttttaaggttcttgtgtatatttggggggtgggggatgaattataaattatattcagccctgagtggagacctatcagattggattgctggcaaagcacagaatgcctgtatatgatgtaactgtatc

SEQ ID NO: 185862 - DNA, 3195 bp, Artificial Sequence
  derived and/or modified sequence
atgaaccacgacttccaggccctggccctggagagcagaggcatgggcgagctgctgcccaccaagaagttctgggagcccgacgacagcaccaaggacggccagaagggcatcttcctgggcgacgacgagtggagagagaccgcctggggcgccagccaccacagcatgagccagcccatcatggtgcagagaagaagcggccagggcttccacggcaacagcgaggtgaacgccatcctgagccccagaagcgagagcggcggcctgggcgtgagcatggtggagtacgtgctgagcagcagccccgccgacaagctggacagcagattcagaaagggcaacttcggcaccagagacgccgagaccgacggccccgagaagggcgaccagaagggcaaggccagccccttcgaggaggaccagaacagagacctgaagcagggcgacgacgacgacagcaagatcaacggcagaggcctgcccaacggcatggacgccgactgcaaggacttcaacagaacccccggcagcagacaggccagccccaccgaggtggtggagagactgggccccaacaccaaccccagcgagggcctgggccccctgcccaaccccaccgccaacaagcccctggtggaggagttcagcaaccccgagacccagaacctggacgccatggagcaggtgggcctggagagcctgcagttcgactaccccggcaaccaggtgcccatggacagcagcggcgccaccgtgggcctgttcgactacaacagccagcagcagctgttccagagaaccaacgccctgaccgtgcagcagctgaccgccgcccagcagcagcagtacgccctggccgccgcccagcagccccacatcgccggcgtgttcagcgccggcctggcccccgccgccttcgtgcccaacccctacatcatcagcgccgccccccccggcaccgacccctacaccgccgccggcctggccgccgccgccaccctggccggccccgccgtggtgcccccccagtactacggcgtgccctggggcgtgtaccccgccaacctgttccagcagcaggccgccgccgccgccaacaacaccgccagccagcaggccgccagccaggcccagcccggccagcagcaggtgctgagagccggcgccggccagagacccctgacccccaaccagggccagcagggccagcaggccgagagcctggccgccgccgccgccgccaaccccaccctggccttcggccagggcctggccaccggcatgcccggctaccaggtgctggcccccaccgcctactacgaccagaccggcgccctggtggtgggccccggcgccagaaccggcctgggcgcccccgtgagactgatggcccccacccccgtgctgatcagcagcgccgccgcccaggccgccgccgccgccgccgccggcggcaccgccagcagcctgaccggcagcaccaacggcctgttcagacccatcggcacccagcccccccagcagcagcagcagcagcccagcaccaacctgcagagcaacagcttctacggcagcagcagcctgaccaacagcagccagagcagcagcctgttcagccacggccccggccagcccggcagcaccagcctgggcttcggcagcggcaacagcctgggcgccgccatcggcagcgccctgagcggcttcggcagcagcgtgggcagcagcgccagcagcagcgccaccagaagagagagcctgagcaccagcagcgacctgtacaagagaagcagcagcagcctggcccccatcggccagcccttctacaacagcctgggcttcagcagcagccccagccccatcggcatgcccctgcccagccagacccccggccacagcctgacccccccccccagcctgagcagccacggcagcagcagcagcctgcacctgggcggcctgaccaacggcagcggcagatacatcagcgccgcccccggcgccgaggccaagtacagaagcgccagcagcaccagcagcctgttcagcagcagcagccagctgttcccccccagcagactgagatacaacagaagcgacatcatgcccagcggcagaagcagactgctggaggacttcagaaacaacagattccccaacctgcagctgagagacctgatcggccacatcgtggagttcagccaggaccagcacggcagcagattcatccagcagaagctggagagagccacccccgccgagagacagatggtgttcaacgagatcctgcaggccgcctaccagctgatgaccgacgtgttcggcaactacgtgatccagaagttcttcgagttcggcagcctggaccagaagctggccctggccaccagaatcagaggccacgtgctgcccctggccctgcagatgtacggctgcagagtgatccagaaggccctggagagcatcagcagcgaccagcagagcgagatggtgaaggagctggacggccacgtgctgaagtgcgtgaaggaccagaacggcaaccacgtggtgcagaagtgcatcgagtgcgtgcagccccagagcctgcagttcatcatcgacgccttcaagggccaggtgttcgtgctgagcacccacccctacggctgcagagtgatccagagaatcctggagcactgcaccgccgagcagaccctgcccatcctggaggagctgcaccagcacaccgagcagctggtgcaggaccagtacggcaactacgtgatccagcacgtgctggagcacggcagacccgaggacaagagcaagatcgtgagcgagatcagaggcaaggtgctggccctgagccagcacaagttcgccagcaacgtggtggagaagtgcgtgacccacgccagcagagccgagagagccctgctgatcgacgaggtgtgctgccagaacgacggcccccacagcgccctgtacaccatgatgaaggaccagtacgccaactacgtggtgcagaagatgatcgacatggccgagcccgcccagagaaagatcatcatgcacaagatcagaccccacatcaccaccctgagaaagtacacctacggcaagcacatcctggccaagctggagaagtactacctgaagaacagccccgacctgggccccatcggcggcccccccaacggcatgctgtag

SEQ ID NO: 185863 - protein, 1419 aa, Artificial Sequence
  derived and/or modified sequence
MDGGGVCVGRGDLLSSPQALGQLLRKESRPRRAMKPRKAEPHSFREKVFRKKPPVCAVCKVTIDGTGVSCRVCKVATHRKCEAKVTSACQALPPVELRRNTAPVRRIEHLGSTKSLNHSKQRSTLPRSFSLDPLMERRWDLDLTYVTERILAAAFPARPDEQRHRGHLRELAHVLQSKHRDKYLLFNLSEKRHDLTRLNPKVQDFGWPELHAPPLDKLCSICKAMETWLSADPQHVVVLYCKGNKGKLGVIVSAYMHYSKISAGADQALATLTMRKFCEDKVATELQPSQRRYISYFSGLLSGSIRMNSSPLFLHYVLIPMLPAFEPGTGFQPFLKIYQSMQLVYTSGVYHIAGPGPQQLCISLEPALLLKGDVMVTCYHKGGRGTDRTLVFRVQFHTCTIHGPQLTFPKDQLDEAWTDERFPFQASVEFVFSSSPEKIKGSTPRNDPSVSVDYNTTEPAVRWDSYENFNQHHEDSVDGSLTHTRGPLDGSPYAQVQRPPRQTPPAPSPEPPPPPMLSVSSDSGHSSTLTTEPAAESPGRPPPTAAERQELDRLLGGCGVASGGRGAGRETAILDDEEQPTVGGGPHLGVYPGHRPGLSRHCSCRQGYREPCGVPNGGYYRPEGTLERRRLAYGGYEGSPQGYAEASMEKRRLCRSLSEGLYPYPPEMGKPATGDFGYRAPGYREVVILEDPGLPALYPCPACEEKLALPTAALYGLRLEREAGEGWASEAGKPLLHPVRPGHPLPLLLPACGHHHAPMPDYSCLKPPKAGEEGHEGCSYTMCPEGRYGHPGYPALVTYSYGGAVPSYCPAYGRVPHSCGSPGEGRGYPSPGAHSPRAGSISPGSPPYPQSRKLSYEIPTEEGGDRYPLPGHLASAGPLASAESLEPVSWREGPSGHSTLPRSPRDAPCSASSELSGPSTPLHTSSPVQGKESTRRQDTRSPTSAPTQRLSPGEALPPVSQAGTGKAPELPSGSGPEPLAPSPVSPTFPPSSPSDWPQERSPGGHSDGASPRSPVPTTLPGLRHAPWQGPRGPPDSPDGSPLTPVPSQMPWLVASPEPPQSSPTPAFPLAASYDTNGLSQPPLPEKRHLPGPGQQPGPWGPEQASSPARGISHHVTFAPLLSDNVPQTPEPPTQESQSNVKFVQDTSKFWYKPHLSRDQAIALLKDKDPGAFLIRDSHSFQGAYGLALKVATPPPSAQPWKGDPVEQLVRHFLIETGPKGVKIKGCPSEPYFGSLSALVSQHSISPISLPCCLRIPSKDPLEETPEAPVPTNMSTAADLLRQGAACSVLYLTSVETESLTGPQAVARASSAALSCSPRPTPAVVHFKVSAQGITLTDNQRKLFFRRHYPVNSITFSSTDPQDRRWTNPDGTTSKIFGFVAKKPGSPWENVCHLFAELDPDQPAGAIVTFITKVLLGQRK

SEQ ID NO: 185864 - DNA, 4260 bp, Artificial Sequence
  derived and/or modified sequence
atggacggcggcggcgtgtgcgtgggcagaggcgacctgctgagcagcccccaggccctgggccagctgctgagaaaggagagcagacccagaagagccatgaagcccagaaaggccgagccccacagcttcagagagaaggtgttcagaaagaagccccccgtgtgcgccgtgtgcaaggtgaccatcgacggcaccggcgtgagctgcagagtgtgcaaggtggccacccacagaaagtgcgaggccaaggtgaccagcgcctgccaggccctgccccccgtggagctgagaagaaacaccgcccccgtgagaagaatcgagcacctgggcagcaccaagagcctgaaccacagcaagcagagaagcaccctgcccagaagcttcagcctggaccccctgatggagagaagatgggacctggacctgacctacgtgaccgagagaatcctggccgccgccttccccgccagacccgacgagcagagacacagaggccacctgagagagctggcccacgtgctgcagagcaagcacagagacaagtacctgctgttcaacctgagcgagaagagacacgacctgaccagactgaaccccaaggtgcaggacttcggctggcccgagctgcacgccccccccctggacaagctgtgcagcatctgcaaggccatggagacctggctgagcgccgacccccagcacgtggtggtgctgtactgcaagggcaacaagggcaagctgggcgtgatcgtgagcgcctacatgcactacagcaagatcagcgccggcgccgaccaggccctggccaccctgaccatgagaaagttctgcgaggacaaggtggccaccgagctgcagcccagccagagaagatacatcagctacttcagcggcctgctgagcggcagcatcagaatgaacagcagccccctgttcctgcactacgtgctgatccccatgctgcccgccttcgagcccggcaccggcttccagcccttcctgaagatctaccagagcatgcagctggtgtacaccagcggcgtgtaccacatcgccggccccggcccccagcagctgtgcatcagcctggagcccgccctgctgctgaagggcgacgtgatggtgacctgctaccacaagggcggcagaggcaccgacagaaccctggtgttcagagtgcagttccacacctgcaccatccacggcccccagctgaccttccccaaggaccagctggacgaggcctggaccgacgagagattccccttccaggccagcgtggagttcgtgttcagcagcagccccgagaagatcaagggcagcacccccagaaacgaccccagcgtgagcgtggactacaacaccaccgagcccgccgtgagatgggacagctacgagaacttcaaccagcaccacgaggacagcgtggacggcagcctgacccacaccagaggccccctggacggcagcccctacgcccaggtgcagagaccccccagacagaccccccccgcccccagccccgagcccccccccccccccatgctgagcgtgagcagcgacagcggccacagcagcaccctgaccaccgagcccgccgccgagagccccggcagacccccccccaccgccgccgagagacaggagctggacagactgctgggcggctgcggcgtggccagcggcggcagaggcgccggcagagagaccgccatcctggacgacgaggagcagcccaccgtgggcggcggcccccacctgggcgtgtaccccggccacagacccggcctgagcagacactgcagctgcagacagggctacagagagccctgcggcgtgcccaacggcggctactacagacccgagggcaccctggagagaagaagactggcctacggcggctacgagggcagcccccagggctacgccgaggccagcatggagaagagaagactgtgcagaagcctgagcgagggcctgtacccctacccccccgagatgggcaagcccgccaccggcgacttcggctacagagcccccggctacagagaggtggtgatcctggaggaccccggcctgcccgccctgtacccctgccccgcctgcgaggagaagctggccctgcccaccgccgccctgtacggcctgagactggagagagaggccggcgagggctgggccagcgaggccggcaagcccctgctgcaccccgtgagacccggccaccccctgcccctgctgctgcccgcctgcggccaccaccacgcccccatgcccgactacagctgcctgaagccccccaaggccggcgaggagggccacgagggctgcagctacaccatgtgccccgagggcagatacggccaccccggctaccccgccctggtgacctacagctacggcggcgccgtgcccagctactgccccgcctacggcagagtgccccacagctgcggcagccccggcgagggcagaggctaccccagccccggcgcccacagccccagagccggcagcatcagccccggcagccccccctacccccagagcagaaagctgagctacgagatccccaccgaggagggcggcgacagataccccctgcccggccacctggccagcgccggccccctggccagcgccgagagcctggagcccgtgagctggagagagggccccagcggccacagcaccctgcccagaagccccagagacgccccctgcagcgccagcagcgagctgagcggccccagcacccccctgcacaccagcagccccgtgcagggcaaggagagcaccagaagacaggacaccagaagccccaccagcgcccccacccagagactgagccccggcgaggccctgccccccgtgagccaggccggcaccggcaaggcccccgagctgcccagcggcagcggccccgagcccctggcccccagccccgtgagccccaccttcccccccagcagccccagcgactggccccaggagagaagccccggcggccacagcgacggcgccagccccagaagccccgtgcccaccaccctgcccggcctgagacacgccccctggcagggccccagaggcccccccgacagccccgacggcagccccctgacccccgtgcccagccagatgccctggctggtggccagccccgagcccccccagagcagccccacccccgccttccccctggccgccagctacgacaccaacggcctgagccagccccccctgcccgagaagagacacctgcccggccccggccagcagcccggcccctggggccccgagcaggccagcagccccgccagaggcatcagccaccacgtgaccttcgcccccctgctgagcgacaacgtgccccagacccccgagccccccacccaggagagccagagcaacgtgaagttcgtgcaggacaccagcaagttctggtacaagccccacctgagcagagaccaggccatcgccctgctgaaggacaaggaccccggcgccttcctgatcagagacagccacagcttccagggcgcctacggcctggccctgaaggtggccacccccccccccagcgcccagccctggaagggcgaccccgtggagcagctggtgagacacttcctgatcgagaccggccccaagggcgtgaagatcaagggctgccccagcgagccctacttcggcagcctgagcgccctggtgagccagcacagcatcagccccatcagcctgccctgctgcctgagaatccccagcaaggaccccctggaggagacccccgaggcccccgtgcccaccaacatgagcaccgccgccgacctgctgagacagggcgccgcctgcagcgtgctgtacctgaccagcgtggagaccgagagcctgaccggcccccaggccgtggccagagccagcagcgccgccctgagctgcagccccagacccacccccgccgtggtgcacttcaaggtgagcgcccagggcatcaccctgaccgacaaccagagaaagctgttcttcagaagacactaccccgtgaacagcatcaccttcagcagcaccgacccccaggacagaagatggaccaaccccgacggcaccaccagcaagatcttcggcttcgtggccaagaagcccggcagcccctgggagaacgtgtgccacctgttcgccgagctggaccccgaccagcccgccggcgccatcgtgaccttcatcaccaaggtgctgctgggccagagaaagtag

SEQ ID NO: 185865 - DNA, 4260 bp, Artificial Sequence
  derived and/or modified sequence
atggatggaggcggcgtctgcgttgggcggggggatctgctgtcatcacctcaggctctagggcagttactgcggaaggaatccaggccacgacgggcgatgaagcccagaaaagcagagccccacagctttagggagaaagtgtttcgcaaaaagcctccagtatgcgctgtgtgtaaagtaaccatcgacgggaccggggtaagctgccgcgtctgcaaagtagccactcaccggaaatgcgaggccaaggtgacatcggcatgccaggcactgccacccgtggagctacgtaggaacacagcacccgttcgacggatagagcaccttggttcaactaagtccctaaaccacagcaagcaacggtcaactctccccaggtctttctccctagatccgctaatggagaggcgctgggatctggacctgacctacgttaccgagaggatcttagccgctgccttcccagccagaccagacgagcagcgccacaggggccatctgcgggagctggcacacgtgttacaatcgaagcaccgagataaatatctcttattcaatttatccgaaaaacggcacgatcttacccgcctgaatcccaaggtacaggattttgggtggcccgagttgcacgcccctcccctcgataaactatgcagcatctgtaaggccatggagacctggctgagcgctgatccacagcatgttgtggtcctgtactgtaaggggaacaagggcaagctgggagtgattgtctctgcgtatatgcactattcaaagattagcgccggtgcagaccaggcactggctacactaaccatgagaaagttctgcgaggataaagtggctacagaactccagccatctcaaagaagatatatcagctatttttctggcctgctgtccggatccatacgaatgaactcgagccctctgtttctgcattatgtgttgattcccatgctacctgcatttgaacccggcactggatttcagcccttcttgaagatatatcagagcatgcagctggtttataccagtggcgtctaccatattgctggtccaggtccccagcaactctgtatctccctcgagccagccttgcttctcaaaggagatgtgatggtgacctgctatcataaaggaggtcgggggaccgatcgcacgctggtgttcagggttcaattccacacatgcacaatccacggaccacagttaacattccctaaggatcagttagatgaggcctggacggacgaaaggtttcccttccaagcaagtgtggagtttgtcttttctagctcgcctgaaaagattaagggctccacaccgaggaacgacccttcagtttcagttgattacaacacgacggagcccgctgttcgatgggattcatatgagaatttcaatcaacatcacgaggactccgtggatggatcgctaacccacaccagaggtccactggacggctcgccctatgcacaagttcagaggcctcccaggcagacaccaccggccccgtctcctgaaccgccaccaccaccaatgctgtctgtgtcaagcgactccggacacagcagtactcttactacagagcccgccgcggagtcgccaggtagaccccccccgaccgctgccgagcggcaagagttggatcgtctattgggggggtgcggtgtggcaagcgggggacgaggcgccgggagggaaaccgccattcttgatgatgaggagcagccaactgtcgggggaggaccacatctcggcgtgtacccgggccatcgaccagggctcagccgccactgttcttgtcgtcagggctaccgcgagccctgtggggtgcccaatgggggatactacaggcctgagggtacacttgagcggagacggctggcctacggcggatacgaaggctccccgcagggctacgccgaagcctcgatggaaaaacggcggctctgcaggagccttagcgagggtctctatccctacccaccggaaatgggaaagccagctactggagatttcggctacagggccccagggtaccgcgaagttgtgattttagaagacccgggtctccccgctctgtacccctgccccgcgtgcgaggagaagctggccctcccgacagccgccttgtacggactgaggctggagcgtgaggccggggaggggtgggcaagtgaggcaggcaaaccattactccacccagtcaggccaggtcatcctctgcccctgctactgccggcctgtggtcatcaccacgctcccatgccggattatagttgcctgaagcctccgaaggctggagaggaaggccacgagggatgcagttacaccatgtgtcctgagggtagatacggtcaccctggttatccggctctagtaacttatagttacggcggcgccgtgccgtcatactgccctgcttatggccgtgtcccacacagctgcggatccccaggggagggacgtggctatccatcccctggtgctcactcacctcgtgccggatctatctctccgggatcacccccataccctcagagccgaaagctttcctacgaaatccctaccgaggaggggggcgaccggtaccctctcccaggacacctggcctccgcgggtccgctcgcatccgccgagtctctggaaccagtgagttggcgggaaggcccttccggccatagcacactacccagaagccctagagacgctccctgttctgcaagctccgagctgtcaggcccttccacccccctgcatacctcttctccagtccaaggaaaagaatctactcgaagacaagatactaggtctcctaccagtgcccctacccagcgattaagccctggcgaggccttgccccctgtgtcgcaggccggtactggtaaagctccggagttacctagcggttccgggcccgagcccttggcaccatctccagtaagtcccaccttccccccgtcctcaccgtccgattggcctcaggaacggtcacctggcggccatagtgacggtgcttcaccgaggtctccagtccccaccaccctgcctgggctgcggcacgccccctggcagggccctagagggccacctgactcacccgatggatccccactcactccagtgcccagccaaatgccttggctcgttgcatccccagagcccccgcagtccagtccaacccccgcctttcctctcgccgcttcttatgacaccaatgggttgtcacaaccacccctgccggaaaagcgacatctgcccggacccgggcagcagcccggcccctggggacctgagcaagccagcagcccagccagaggcattagtcaccacgttaccttcgctccactgctatcagacaacgtcccacagacacctgaaccaccaacacaagagtcccagagtaatgtcaaattcgtgcaggatacatccaagttctggtacaaaccacatttatctcgggaccaggctattgcactactcaaggataaagaccctggcgcgtttctgattcgagacagccactcctttcagggcgcctatgggcttgctttaaaggtggctacacctcccccatcggctcagccctggaaaggcgatcccgtggagcaactggtgcggcactttcttatcgaaaccggacccaagggtgtcaagatcaaggggtgcccctccgagccttatttcggaagtctctcggccttggtgtcacaacactctattagccccatttcactgccctgctgcctgcgaattccctccaaagacccactggaagagactcctgaggcacctgttcctaccaacatgagcaccgcggctgatctgctgcggcagggagcggcctgttccgtgctgtacctgacctccgtggaaacggagtcactcacaggaccacaggcagtggcgcgggcaagtagcgcagcactcagctgcagcccgcgtccaacacccgctgtcgtacatttcaaggtgtcagcacagggcattaccctcactgataatcagcggaaactgttttttagacgccattatcccgtgaatagcataacattttcatcaacggacccccaggaccgcaggtggacaaatccagacggaaccacatctaaaatttttgggtttgtggctaagaaaccaggttcgccttgggaaaacgtttgccacctgttcgctgagctggaccctgatcaacctgctggcgcaatcgtgacctttattaccaaggtcctgctcggccagaggaagtag

SEQ ID NO: 185866 - DNA, 4260 bp, Artificial Sequence
  derived and/or modified sequence
atggatggcggcggcgtgtgtgtgggccgcggggacctgctgagcagcccccaggccctgggccagctgctgaggaaggagagccggccccggcgggccatgaagcccaggaaggccgagccccacagcttccgggagaaggtgttcaggaagaagccccctgtgtgtgctgtgtgcaaggtgaccattgatggcaccggggtgtcctgccgggtgtgcaaggtggccacccacaggaaatgtgaggccaaggtgaccagcgcctgccaggccctgccccctgtggagctgcggaggaacacagcccctgtgagaagaattgagcacctgggcagcaccaagagcctgaaccacagcaagcagaggagcaccctgcccaggagcttcagcctggaccccctgatggagcggcgctgggacctggacctgacctacgtgacagagcgcatcctggccgccgccttccctgcccggccagatgagcagaggcaccggggccacctgcgggagctggcccacgtgctgcagagcaagcaccgggacaagtacctgctcttcaacctgtctgagaagagacatgacctgacccggctgaaccccaaggtgcaggactttggctggccagagctgcacgccccacccctggacaagctgtgcagcatctgcaaggccatggagacctggctgtctgctgacccccagcacgtggtggtgctgtactgcaagggcaacaagggcaagctgggcgtgattgtgtctgcctacatgcactacagcaagatctctgctggagctgaccaggccctggccaccctgaccatgaggaagttctgtgaggacaaggtggccacagagctgcagcccagccagaggcgctacatctcctacttcagcggcctgctgagcggcagcatccgcatgaacagcagccccctcttcctgcactacgtgctgatccccatgctgcctgcctttgagcccggcaccggcttccagcccttcctgaagatctaccagagcatgcagctggtgtacaccagcggcgtgtaccacatcgccggccctggcccccagcagctgtgcatcagcctggagcccgccctgctgctgaagggagatgtgatggtgacctgctaccacaagggcggccggggcacagacaggaccctggtgttccgggtgcagttccacacctgcaccatccacggcccccagctgaccttccccaaggaccagctggatgaggcctggacagatgagcgcttccccttccaggcctctgtggagtttgtgttcagcagcagccctgagaagatcaagggcagcaccccaagaaatgaccccagcgtgtctgtggactacaacaccacagagcctgctgtgcgctgggacagctatgagaacttcaaccagcaccacgaggacagcgtggatggcagcctgacccacacccggggccccctggatggcagcccctatgcccaggtgcagaggcctccccggcagaccccaccagcccccagccctgagcccccacctccacccatgctgtctgtgtccagtgacagcggccacagcagcaccctgaccacagagcctgctgctgagagccctggccggcccccacccacagctgctgagcggcaggagctggaccggctgctgggcggctgcggcgtggccagcggcggcagaggagctggccgggagacagccatcctggatgatgaggagcagcccaccgtgggcggcggcccccacctgggcgtgtacccaggccaccggcccggcctgagccgccactgcagctgccggcagggctaccgggagccctgtggggtgcccaacggcggctactacagacctgagggcaccctggagcggcggcggctggcctatggaggctatgagggcagcccccagggctacgccgaggcctccatggagaagaggcggctgtgccgcagcctgtctgagggcctgtacccctacccacctgagatgggcaagccagccactggagactttggctaccgggcccctggctaccgggaggtggtgatcctggaggaccccggcctgcctgccctgtacccctgcccagcctgtgaggagaagctggccctgcccacagctgccctgtatggcctgcggctggagcgggaggccggggagggctgggccagcgaggccggcaagcccctgctgcaccctgtgcggcccggccaccccctgcccctgctgctgcctgcctgtggccaccaccacgcccccatgccagactacagctgcctgaagccacccaaggccggggaggagggccacgagggctgcagctacaccatgtgcccagagggccgctatggccaccctggctacccagccctggtgacctacagctatggaggagctgtgcccagctactgcccagcctacggccgggtgccccacagctgtggcagccctggagagggccggggctaccccagccctggggcccacagcccccgggccggcagcatcagccctggcagccccccctacccccagagcaggaagctgtcctatgagatccccacagaggagggcggggaccgctaccccctgcccggccacctggccagcgctggccccctggccagcgctgagagcctggagcctgtgtcctggagggagggccccagcggccacagcaccctgcccaggagccccagagatgccccctgcagcgccagcagcgagctgagcggccccagcacccccctgcacaccagcagccctgtgcagggcaaggagagcacccggcggcaggacaccaggagccccaccagcgcccccacccagaggctgagccctggagaggccctgccccctgtgtcccaggccggcaccgggaaggcccctgagctgcccagcggcagcggccctgagcccctggcccccagccctgtgagccccaccttcccccccagcagccccagcgactggccccaggagaggagccctgggggccacagtgatggagccagccccaggagccctgtgcccaccaccctgcccggcctgcggcatgccccctggcagggcccccggggccccccagacagcccagatggcagccccctgacccctgtgcccagccagatgccctggctggtggccagccctgagcccccccagagcagccccaccccagccttccccctggccgccagctatgacaccaacggcctgagccagccccccctgcctgagaagaggcacctgcccggccctggccagcagcccggcccctggggccctgagcaggccagcagccctgcccggggcatcagccaccacgtgacctttgcccccctgctgagtgacaacgtgccccagaccccagagccccccacccaggagagccagagcaatgtgaagtttgtgcaggacaccagcaagttctggtacaagccccacctgagccgggaccaggccatcgccctgctgaaggacaaggaccccggggccttcctgatccgggacagccacagcttccagggcgcctacggcctggccctgaaggtggccaccccaccacccagcgcccagccctggaagggggaccctgtggagcagctggtgcgccacttcctgattgagaccggccccaagggcgtgaagatcaagggctgccccagcgagccctacttcggcagcctgagcgccctggtgtcccagcacagcatcagccccatcagcctgccctgctgcctgcgcatccccagcaaggaccccctggaggagaccccagaggcccctgtgcccaccaacatgagcacagctgctgacctgctgcggcagggcgccgcctgcagcgtgctgtacctgacctctgtggagacagagagcctgaccggcccccaggccgtggcccgggccagcagcgctgccctgagctgcagcccccggcccaccccagctgtggtgcacttcaaggtgtctgcccagggcatcaccctgacagacaaccagaggaagctgttcttcagaagacactaccctgtgaacagcatcaccttcagcagcacagacccccaggaccggcgctggaccaacccagatggcaccaccagcaagatcttcggctttgtggccaagaagccaggcagcccctgggagaatgtgtgccacctgtttgctgagctggaccctgaccagcctgctggggccatcgtgaccttcatcaccaaggtgctgctgggccagaggaagtag

SEQ ID NO: 185867 - DNA, 4260 bp, Artificial Sequence
  derived and/or modified sequence
atggacggcggcggcgtgtgcgtgggccggggcgacctgctgagcagcccccaggctttgggacagttattgcggaaggaatctagacctcgaagagcaatgaagccccgcaaggcagaaccacactccttcagggaaaaggtctttcggaaaaagccccctgtctgcgcagtttgcaaagtaacaattgatggcactggggtgtcgtgtagggtctgcaaggtggcaacccacaggaagtgtgaggctaaggtcacgtctgcctgccaggccttgccacctgtggaactaaggagaaacacagccccagtgcggcggatcgagcacctgggctcaacaaagagcctcaaccacagtaaacaaaggagcacgctccctcgctccttttccctcgatcctttgatggagaggagatgggatctcgacctgacctacgtgaccgagaggatcctcgccgctgcatttcccgcgagaccagatgaacagaggcaccgtgggcacctgagagaactggcgcacgtgctgcagtccaaacacagagacaagtacctgctgtttaatttgtccgagaaacgccacgatcttacacgactcaacccgaaggttcaggatttcgggtggcccgaacttcatgcccctccgctggataagttgtgctctatctgtaaagccatggaaacttggctgtctgccgatcctcagcacgttgtggtgctttattgtaaggggaataagggtaaactaggagtgattgtgagtgcttacatgcattactcaaaaatttccgcgggagcggaccaggcactcgcgactctaacaatgagaaagttctgcgaggataaggtggcaactgaactgcagcccagtcagcgccggtacatttcctatttctccggcctgttgagcgggtctatcagaatgaactctagccccctgttcctccactacgtcctgataccaatgctccccgctttcgagcccggcacaggctttcagccattcttgaagatctatcagtccatgcagctggtgtacacttccggcgtgtatcacatcgccggcccaggtccacagcaactgtgtattagcctcgaaccggctcttctcctaaagggggacgtcatggtgacctgctaccataagggcggacgggggaccgaccggacactggtcttcagggttcagtttcacacctgcacaatccacggaccccaattaactttcccgaaggaccagctggacgaagcttggaccgacgaaaggttcccgtttcaggcatcagtggaattcgtcttttcaagctctcccgaaaagattaagggatcgaccccccgcaatgacccttccgtaagtgtggattataacaccactgagccagctgtacggtgggattcctatgaaaatttcaatcaacaccacgaagactcggtggacggatccctgacccatacccgcggacctctcgatggaagtccatatgcgcaagtgcagcgaccgcctcggcagaccccaccagcaccgagccccgagccgcctccccctccaatgttgtcggtgtcctctgattccggtcactcgagtaccctcactactgagcctgctgctgagtctccgggacggccccctccgaccgcggccgaacgccaggaattggatagactcttgggcggctgcggcgtggccagtggcggaagaggagccgggcgagagactgccattcttgacgatgaggagcagccgacagtgggcggtggccctcacctgggcgtgtatcctgggcatcggcccggactctctaggcattgttcatgtaggcaggggtaccgggagccatgtggcgttcccaacggcggctactaccggcctgaaggaacacttgagaggagacgcctcgcatacggggggtatgagggatctccacaaggatacgccgaggcctcaatggagaaacgccgcttatgcaggtccctcagcgagggactttatccttatccacctgagatgggaaagccggccactggcgacttcgggtatcgagcaccgggctaccgggaggtcgtgatactggaggatcccggtttacccgctctgtatccttgccccgcttgtgaggagaagctcgctctgccgacagcagctctgtatgggctgcgactcgagagagaggctggagagggatgggcttccgaggctggtaaaccgttactgcacccagtccggcccggacatcccctccctcttctattaccagcttgtggacatcaccacgctccaatgcccgactatagctgcctgaagccaccaaaggccggtgaggaggggcacgagggctgttcctatacgatgtgtcccgaagggagatacggccacccaggataccccgccctcgtcacttatagctatggcggtgccgtgccgtcatactgtccagcctacggtcgtgtaccccacagttgtgggagcccaggcgaagggcgcgggtaccctagtcccggtgctcatagtccacgggcaggctctatctctcccggctctcctccctatccgcaaagccgcaagctcagttacgagattcctacagaggaagggggtgatcggtaccccctgcctggacacctggccagcgccgggccccttgctagcgccgagtcattggagcccgtcagctggagagagggccctagcggccatagcaccctgccccgttctccgcgagatgccccctgcagcgccagctcggaactgagcggcccctcaacccctttacatactagctcacctgtgcagggcaaggaatcaacccgtcgccaagatacgagatcccctacatctgcgccaactcaaaggctctcccccggcgaggccttgccgcccgtgtcccaagctgggacaggaaaggcacccgagctgccgtccggcagcgggcctgagccgctggccccatcccctgtgtctccaactttcccccctagctctccttccgattggccacaggagcgaagccccggggggcattcagacggcgccagccctcggagccctgtgccgacgacattgccaggcctccggcacgccccgtggcaaggaccaagaggaccaccagactccccagatgggagccccctgacacctgtaccaagtcagatgccttggcttgttgcaagtccggaacccccacaaagcagcccaacgcctgccttcccactggcagcaagctacgatactaacgggctctcacagcccccattgccagaaaagagacacctgccagggcccggtcaacagccagggccatggggtcctgaacaggcttcctcccccgcccggggcatttctcaccatgtcacctttgccccattactgagcgacaacgtgccacagacccctgagcccccaacccaggaaagtcaaagcaatgtcaaatttgtgcaagataccagcaagttctggtacaaaccacacttatcccgcgaccaagccattgcacttctgaaagataaggaccctggtgcgtttctcatccgagattcccattcctttcaaggcgcctacggccttgcactgaaagtggccaccccacccccatccgcccagccttggaagggtgatccagtggagcagttagtgcgtcatttcctgatagagacaggccctaagggggtgaagattaaagggtgtccgtctgagccctacttcggatccctatccgctctcgtgagccagcacagcatcagccccatttcattgccttgctgcctccgtattccctccaaggaccctctggaggagaccccagaggcccctgtccccacgaacatgagcacagccgccgatttactgaggcagggggccgcttgcagcgtgctatacctcacctctgtggaaacggagtctttaaccggtccccaagctgtggcgcgcgcgtctagcgctgcgttgtcctgttcgccccgcccaacaccagcggttgtgcattttaaagtttctgcgcagggcatcaccctgacagataatcagcgcaagctattttttagacgacattaccctgtgaacagcataaccttctcctctactgaccctcaggataggcggtggaccaatcctgatggtacgactagtaaaatttttggttttgtggcgaaaaagcccggaagcccttgggagaatgtgtgtcatctctttgccgagttggatcctgatcaacctgccggtgcaatcgtcaccttcattacgaaggtgcttcttggacagaggaagtag

SEQ ID NO: 185868 - DNA, 4260 bp, Artificial Sequence
  derived and/or modified sequence
atggatggagggggagtttgcgtgggcaggggagatctgttatcttctccccaggcccttggccagcttttgcgcaaggagagccgccctcgtagggccatgaagcccaggaaggctgaacctcacagtttcagggagaaggtgttccgcaaaaagccaccagtttgcgcagtgtgtaaggtaactatcgacggcactggggtgagctgcagagtctgtaaggtggccactcatcgcaagtgcgaggccaaggttacgtcagcgtgccaagcattaccaccagtggaactccgcaggaatactgccccagtgcggaggattgaacacctcggctctactaagtcactaaaccacagtaagcagcgctcaactttgcctaggtcattttctctggatccactgatggagcgcaggtgggatctcgatttgacatacgttactgagagaattctcgctgcagccttccctgccagacctgatgagcagaggcacaggggccatctcagagagcttgcccacgttttacagtccaagcaccgggacaagtatctgctctttaacctctcagaaaagcggcacgacttaacccgcctgaacccaaaggtgcaggacttcggttggcctgagttgcacgccccacccctcgataaactttgctccatatgcaaggctatggagacctggctcagcgccgacccacaacatgtagtggtgctatattgcaagggaaataaaggcaagctgggtgttatagtcagtgcctacatgcattactctaaaatcagcgctggtgccgatcaagccctggctacccttaccatgcgtaagttctgtgaggacaaggtggcaaccgaactccaacctagccagcgacggtatatatcttactttagcggactgctctccggatccattcgcatgaactcgagccctctgttcctgcactacgtgttgatccctatgctccctgcattcgaacccggtacaggattccagcctttcctgaagatctaccaatccatgcagcttgtttacactagcggggtgtatcacattgctggacccggacctcagcaactatgtattagcctggagccagcactgttacttaagggtgatgtgatggtgacttgttaccataagggcggacgcggtactgataggacgcttgtgtttcgcgtgcaattccacacatgtactatacacggccctcagttgacgtttccaaaagatcagctggatgaagcatggaccgatgagcggttccctttccaggcgtccgtggagttcgtcttcagctcctcaccagagaaaatcaaaggttccactccacggaacgatccaagtgtgtcagtggattacaatactacggaacctgctgtgaggtgggactcttacgagaatttcaatcagcaccatgaagatagcgtggacggaagcttgacccatactcggggaccactagacgggtcaccttacgcccaagtccagagaccacctagacagacccctccggctcccagtcctgaaccaccgcctccgccaatgctgtctgtgtcgagcgatagcggccattctagcactctcacaaccgagcctgcagctgaatctccaggaaggcctccccctaccgccgctgagcgtcaagagctggaccgcttactgggcggatgcggggtggccagtggtggcagaggtgctggtagagagacggcgatccttgacgatgaggaacagcctaccgtcggcggtggccctcaccttggcgtttaccctgggcaccgacccggactcagccgccactgtagttgtagacagggctatagggaaccttgtggcgtgccaaatggcggatactatcggccagagggcaccttagagcggaggcgccttgcgtatggtggatatgagggatctccccagggttacgcagaagctagcatggagaagcggagactgtgcagaagtctctcggaggggctctatccgtatcctccagagatgggaaagccagccacaggggacttcgggtatcgagccccaggctacagggaagtcgtgatccttgaggatcccggactgccagccctgtatccatgcccggcttgtgaggaaaaacttgctctgccaactgcagctctctatggtctgcggctggaacgcgaggcgggtgaaggctgggcctcagaagccggtaaacccctcctccatcccgtgcggcctggccaccctctgcctcttttgctgccagcttgtggccaccatcacgccccaatgcccgactactcctgtctaaaacccccaaaggccggtgaagagggccacgaagggtgctcttatactatgtgccctgagggcagatacgggcatccaggataccccgctttggtcacgtatagctacggtggagccgttccaagctactgcccagcatatggaagagttccccactcctgcggctcacccggtgaaggcagggggtaccccagccctggcgctcactctcctcgagccggttctatttcacccggaagccctccttatcctcagagccgtaagctaagttatgagatacctaccgaggaagggggagaccgatatcccttgcccggacacctggcaagtgcgggtccgctggccagtgccgagagtttggagccagtgtcatggagggaaggcccaagcggccattcaaccctacctcgctctccacgggacgccccatgttcggccagttcagaattgagtgggccttcaacgcccctgcacacgagttcccccgtccagggtaaggaaagcacacggagacaagatacgcgaagtcccacctccgcgccaacacagagattatctccaggagaggccttaccccctgtcagtcaagctggaaccggcaaagcaccagagctccccagtgggagcggacccgagccattggcgccttcccccgtgtccccaacctttcctccatccagtccttctgactggccccaggagcgcagtcccggtgggcactctgatggcgcttctccgagatccccagtgccaaccacattgcctggactgagacacgcgccatggcaggggccaagaggaccccctgactcccccgatggaagtcctttaacacccgtaccatctcaaatgccgtggctggttgcgtcaccagaacccccacagtcaagccccaccccagcattccctttggccgcttcttacgacacgaacgggttatcacagcctccactgccggaaaaacggcacctccccggtcccggacaacagcctggaccctggggtcctgagcaggcatcaagccccgcacgtgggatctcccaccacgtgacatttgcgcctctgcttagcgacaatgtgccccagacccctgaacctcctacccaagaatcccaatctaacgtcaagttcgtccaggatactagcaaattttggtataaaccccacctgtcccgggatcaggctatagcgttactcaaggataaagatcctggcgctttcctcatccgagactctcactcctttcagggggcttacggactggctctaaaggtagctaccccccctcccagcgcccagccctggaaaggcgatccagttgaacagctagtccgccacttcctgatcgaaacaggacctaaaggggtgaagatcaagggttgtccatcggagccttacttcgggagcctgtcggccctggtcagtcagcactcgatctcacccatctccctcccatgctgtttacggattccttcgaaggatcctttagaagaaacccctgaggcacccgtgcccacaaatatgagcacggccgctgaccttttgagacagggagccgcatgttcagtgctttatctaacatctgtagagaccgagtcgctgactggacctcaagccgttgctagggcctctagcgccgctctctcctgcagcccacgccctacccctgccgtcgttcacttcaaggtgtcagcccagggcatcaccctcacggacaatcagcgaaaactgttctttagaaggcattaccctgtgaacagcataacattttcttccaccgatccccaggatagacgatggacaaaccctgacgggactacttctaaaattttcggctttgtagcgaaaaagccgggttctccgtgggagaacgtatgtcatctgtttgcagaactggacccagatcaacctgcgggagcaatagtaacgttcattacgaaggtgctcctggggcaacgaaaatag

SEQ ID NO: 185869 - DNA, 4944 bp, Artificial Sequence
  derived and/or modified sequence
gcacattctttcaagtgacagctatagcctgtcccaggggctgctgtccacagcttggggctgaagactcccaggccattaaccccttagcttttaggaagattactccccctttttcaaggccccatccacctccctcccttgactcccaggacgggaagttggccatgttcccaggagggaggccggaggcccatggatgggggtggagtatgtgttgggaggggggacctcctgtccagtcctcaggccctgggacagctgctgaggaaggagagcagacccaggagagccatgaagcctaggaaagctgagcctcatagcttccgggagaaggttttccggaagaaacctccagtctgtgcagtatgtaaggtgaccatcgatgggacaggcgtttcgtgcagagtctgcaaggtggcgacgcacagaaaatgtgaagcaaaggtgacttcagcctgtcaggccttgcctcccgtggagttgcggcgaaacacggccccagtcaggcgcatagagcacctgggatccaccaaatctctgaaccactcaaagcagcgcagcactctgcccaggagcttcagcctggacccgctcatggagcggcgctgggacttagacctcacctacgtgacggagcgcatcttggccgccgccttccccgcgcggcccgatgaacagcggcaccggggccacctgcgcgagctggcccatgtgctgcaatccaagcaccgggacaagtacctgctcttcaacctttcagagaaaaggcatgacctgacccgcttaaaccccaaggttcaagacttcggctggcctgagctgcatgctccacccctggacaagctgtgctccatctgcaaagccatggagacatggctcagtgctgacccacagcacgtggtcgtactatactgcaagggaaacaagggcaagcttggggtcatcgtttctgcctacatgcactacagcaagatctctgcaggggcggaccaggcactggccactcttaccatgcggaaattctgcgaggacaaggtggccacagaactgcagccctcccagcgtcgatatatcagctacttcagtgggctgctatctggctccatcagaatgaacagcagccctctcttcctgcactatgtgctcatccccatgctgccagcctttgaacctggcacaggcttccagcccttccttaaaatctaccagtccatgcagcttgtctacacatctggagtctatcacattgcaggccctggtccccagcagctttgcatcagcctggagccagccctcctcctcaaaggcgatgtcatggtaacatgttatcacaagggtggccggggcacagaccggaccctcgtgttccgagtccagttccacacctgcaccatccacggaccacagctcactttccccaaggaccagcttgacgaggcctggactgatgagaggttccccttccaagcctccgtggagtttgtcttctcctccagccccgagaagatcaaaggcagcactccacggaacgacccctcggtctctgtcgactacaacaccactgagccagccgtgcgctgggactcctatgagaacttcaaccagcaccacgaggacagtgtggatggctccttgacccacacccggggtcccctggatggcagtccttatgcccaggtgcagcggcctccccggcagacccccccggcaccctctccagagcctccaccaccccccatgctctctgtcagcagcgactcaggccattcctccacgctgaccacagagccggctgctgagtcccctggccggccgccccctacagctgctgaacggcaggagctggatcgcctcctaggaggctgcggagtggccagtgggggccggggagctgggcgcgagacggccatcctagatgacgaagagcagcccactgtgggcggaggcccccacctcggagtgtatccaggccataggcctggcctcagccgccactgctcctgccgccagggctaccgggagccctgcggggttcccaatgggggctactaccggccagagggaaccctggagaggaggcgactggcctacgggggctatgagggatccccccagggctacgccgaggcctcgatggagaagaggcgcctctgccgatcgctgtcagaggggctatacccctacccacctgagatggggaaaccagccactggggactttggctaccgcgccccaggctaccgggaggtggtcatcctggaggaccctgggctgcctgccctatacccatgcccagcctgcgaggagaagctggcgctgcctacagcagccttgtatggactgcggctggagagggaggctggagaagggtgggcaagtgaggctggcaagcctctcctgcacccagtgcggcctgggcacccgctgcctctgctcttgcctgcctgtgggcatcaccatgccccgatgcctgactacagctgcctgaagccacccaaggcaggcgaggaagggcacgagggctgctcctacaccatgtgccccgaaggcaggtatgggcatccagggtaccctgccctggtgacatacagctatggaggagcagttcccagttactgcccagcatatggccgtgtgcctcatagctgtggctctccaggagagggcagagggtatcccagccctggtgcccactccccacgggctggctccatttccccgggcagcccgccctatccacaatctaggaagctgagctacgagatccctacggaggagggaggggacaggtacccattgcctgggcacctggcctcagcaggacctttggcatctgcagagtcgctggagccggtgtcctggagggagggccccagtgggcacagcacactgcctcggtctccccgagatgccccatgcagtgcttcgtcagagttgtctggtccctccacgcccctgcacaccagcagtccagtccagggcaaggaaagcacccggcgacaggacaccaggtcccccacctcagcgcccactcagagactgagtcctggcgaggccttgccccctgtttcccaggcaggcaccggaaaggcccctgagctgccgtcgggaagtgggcctgagcctctggcccctagcccagtctctccgaccttccctcccagctcgcccagtgactggcctcaggaaaggagtccagggggccactcagatggcgccagtcctcggagccctgtgcccaccacacttcctggcctccgccacgccccctggcaaggccctcgaggcccccccgacagcccagatgggtctcccctcactcctgtgccttcccagatgccctggcttgtggccagcccagagccgcctcagagctcacctacacctgctttccccctggctgcctcctatgacaccaatggccttagccagcccccacttcctgagaaacgccacctgcccgggccggggcaacagccaggaccctggggcccagagcaggcatcatcgccagccagaggcatcagtcaccatgtcaccttcgcacctctgctctcagataatgtcccccaaaccccagagcctcctacacaagagagccaaagcaatgtcaagtttgtccaggatacatccaagttctggtacaagccacacctgtcccgtgaccaagccattgccctgctgaaggacaaggaccctggggccttcctgatcagggacagtcattcattccaaggagcttatgggctggccctcaaggtggccacaccgccacccagtgcccagccctggaaaggggaccccgtggaacagctggtccgccatttcctcatcgagactgggcccaaaggggtgaagatcaagggctgccccagtgagccctactttggcagcctgtccgccttggtctcccagcactccatctcccccatctccctgccctgctgcctgcgcattcccagcaaagatcctctggaagagaccccagaggctccagtgcccaccaacatgagcacagcggcagacctcctgcgtcagggtgctgcctgcagcgtgctctacttgacctcagtggagacagagtcactgacgggcccccaagctgtggcccgggccagctctgcagctctgagctgtagcccccgcccgacaccagctgttgtccacttcaaggtgtcagcccagggcattacactgacggacaaccaaaggaagctcttctttcgccgccattatccagtgaacagcatcaccttctccagcactgaccctcaagaccggagatggaccaacccagacgggaccacctccaagatctttggtttcgtggccaagaagccgggaagcccctgggagaatgtgtgtcacctctttgcagagcttgacccagatcagcctgctggcgccattgtcaccttcatcaccaaagttctactgggccagagaaaatgaaggaaggccacaagctcagagcccacatcaacactgcccccctcccagcaccccacagccctcacatcccctggcctggacccaggagacccaggagaaagcaccctcccttaggaatgaggagtgggcatcaggcctgggacactgctctccttccccgcccccagcctgctaagttaagtggacaggcccacaagatgaccttgcatgtgagcagatggcagagatgggtgtgtgaggggtgaggaggcatcagcagttgagccccgaaggagatcaggcagccccacctgcaggagaacgtcagccctccaggggatcagcccctgccagttccacccagctgcaggtgccagcacggcagggatgggagaggggtggggagcgagtcactgcctcctctgagcagagattcagagtaggatcacatgaataggggaaaaaagagagtctatttttgtctaataataaagaatttctataaacttt

SEQ ID NO: 185870 - protein, 192 aa, Artificial Sequence
  derived and/or modified sequence
MPWEEPAGEKPSCSHSQKAFHMEPAQKPCFTTDMVTWALLCISAETVRGEAPSQPRGIPHRSPVSVDDLWLEKTQRKKLQKQAHVERRLHIGAVHKDGVKCWRKTIITSPESLNLPRRSHPLSQSAPTGLNHMGWPEHTPGTAVGRPCYLTRQKHPALPSNRPQQQVLVLAEPRRKPSTFWHSISRLAPFRK

SEQ ID NO: 185871 - DNA, 2073 bp, Artificial Sequence
  derived and/or modified sequence
atgccgtgggaggagccagccggcgagaagccttcatgcagccattcccagaaagcttttcatatggaaccagcccagaagccatgcttcacaaccgacatggtgacatgggcactcctgtgtatctccgccgaaaccgtgaggggggaagcaccgtcccaaccacgtggaattccccatcggagccctgtctccgtcgatgatctttggctcgaaaagacgcagagaaaaaagttacagaaacaggctcacgtggagagacgcctgcatatcggtgccgttcacaaggacggtgttaagtgttggagaaaaactattattacctcccctgagagcctgaatctccccaggagatcacatcccctttcccagagcgcccctactggactgaaccacatgggttggccagaacatacccccggaaccgccatgccagacggcgcattagatactgcggtgtgcgccgatgaggtaggatctgaggaggatctctacgatgatttgcactccagctctcatcactattcccatccagggggcgggggtgaacaactggccattaatgagctcatttcagatggaagcgtggtctgcgccgaggccctgtgggatcacgtcacgatggatgatcaggagttgggattcaaggctggggatgttatcgaagtgatggacgcgaccaatagagaatggtggtgggggcgagttgctgacggagaagggtggttccccgcctcttttgttcggctcagagttaatcaggacgagccagccgacgacgacgccccgctcgctggcaatagcggagccgaagatggcggggcagaagctcaatcttctaaggatcagatgcgtactaatgttattaatgagatcctttccaccgagcgggactacatcaagcaccttcgcgatatctgcgagggatatgttagacagtgccggaaacgggctgacatgttcagcgaagagcagctgcgaacaattttcggcaacatcgaggatatttataggtgtcagaaggcctttgtcaaggcgctggagcagcggttcaacagagagcgaccccatttgtcagaattgggcgcctgtttcctcgagcaccaggcagattttcagatctactccgagtactgtaacaatcaccccaatgcctgtgtggagctatcccggctgacgaaattgtcaaagtatgtttacttcttcgaggcctgccgactccttcagaagatgatcgacatatccctggatggctttctgctcacacccgtacagaaaatttgcaagtatccgttgcaattggccgaactcctgaaatatacacacccgcagcaccgtgatttcaaagatgtggaggctgcccttcacgctatgaaaaatgttgcacagcttatcaatgaacgaaagcggcggctggagaacatcgacaagattgctcaatggcagagctccatcgaagactgggaaggtgaagacctgctggtgagaagcagcgagctgatctactctggtgagctgacccgcgtgacgcagccgcaagccaaatcgcagcagagaatgtttttcctgttcgatcaccagctgatttattgcaaaaaagatctgctcaggagggacgttctctattataaaggccgattggacatggacggtctcgaagtggttgacctcgaggacgggaaggaccgggacctgcacgtttcaatcaagaatgcattccgactgcatcggggagctacgggtgactctcatctcttatgcacaagaaagccagaacagaagcagagatggctgaaagccttcgcgagggagcgggagcaggttcagttagaccaggagaccgggttctctattacagagcttcaacggaagcaggcaatgctgaacgcttctaaacagcaagtcacgggtaaaccaaaagccgtggggcgaccatgctacctcacacgccagaagcatcctgcgcttccttcaaacagaccccaacagcaggtgctggtgttggcagagcctcgccgcaaacccagcaccttttggcacagcatcagtcgtctggccccctttcgtaaatag

SEQ ID NO: 185872 - DNA, 1860 bp, Artificial Sequence
  derived and/or modified sequence
atgcggcctgacggtcagcaggcacttgacgccgtggtgcgctcatttgactgccattctgaggccgctctccgccagcgtaacgacgtcatttactgtagcttacctcgtacggcacagggcattgtccaacgtgaagaccaactggaggttctggtgagcctccgcgaagtatggggcaggagacgtgggcgcgacggaacatgcaccggggcaatgccagacggggcgttagacacggctgtgtgcgccgatgaggtcggctctgaggaagacctgtacgatgacctgcatagctcctcccatcactatagccaccctgggggcgggggcgaacaacttgccataaacgaactgatctcagatggctctgtggtgtgcgccgaagccctctgggaccacgtcacaatggacgatcaggaacttggctttaaagcgggggatgtgatagaggtgatggacgcaacaaaccgggaatggtggtgggggcgcgttgcagacggagagggttggtttcccgcctcatttgtccgtctgcgagtcaatcaggatgagccggctgatgatgatgcccctctagccggaaatagcggtgccgaggatggtggagcagaggctcagtcgtccaaggatcagatgcgaacaaatgttataaacgagattcttagtactgagagggattacataaaacatctgcgcgacatttgtgagggctatgttcggcagtgcagaaagcgcgcggacatgtttagtgaggagcagctgcgcactattttcggtaatattgaggacatatacaggtgccagaaagccttcgtaaaggcactggagcagcggtttaatcgcgagaggccccatcttagtgagctgggcgcctgcttcttggagcaccaggcggactttcagatatattcagaatattgtaacaatcatcccaacgcctgcgttgagctcagccgcctgacgaagcttagtaagtacgtgtacttctttgaggcctgtcggctgttgcagaaaatgatcgatataagcctggacggcttcctgcttactcccgttcagaagatatgtaaatatccattgcagctggccgaacttctgaaatatacacacccccagcatagggacttcaaagacgtggaagcagctctgcatgccatgaaaaatgtggcccagctcattaatgagagaaaacgtaggttggaaaacatcgataaaattgctcagtggcagtcatccatcgaggattgggaaggagaagacttgcttgtccgcagcagtgagttgatttactctggggagctgactagggtaacccagccacaggccaagtcccagcagcgcatgtttttcctttttgatcaccaactgatttactgcaagaaggatctgttaaggcgtgatgtgctttattataaaggacgcctggatatggatggccttgaggtggtcgacttagaggacggtaaggaccgggatctgcacgtcagtatcaaaaatgcgttccggctgcacaggggtgctacgggtgactcccatttgctgtgtacacgcaagccagagcagaaacagcgctggttgaaagcgtttgcaagggaacgggagcaggtccagctggatcaggaaacaggcttttccataacagaactacaacgaaaacaggcgatgctcaatgcaagtaagcaacaggtgacggggaaacctaaagccgtaggcaggccatgctacttgaccaggcaaaagcatccggcactgccatctaaccgacctcaacagcaggtgctagtgctcgccgagccccggaggaaacctagtactttctggcattcaataagtcgcctggccccctttagaaagtag

SEQ ID NO: 185873 - DNA, 1893 bp, Artificial Sequence
  derived and/or modified sequence
atgccttgggaagagccagcaggcgaaaagcccagttgcagtcactcacagaaagcctttcacatggaacccgcgcaaaagccatgttttacgacagatatggtgacgtgggctctgctgtgtattagcgctgagacagtacgaggagaagcaccgtctcaaccccgcgggattccccataggagcccggttagtgtcgacgacctgtggcttgaaaaaacccagagaaagaagttgcaaaagcaggcccacgtggaacggcggctccacataggagccgtgcataaagatggagttaaatgctggagaaaaacaatcattactagtcctgagtccctcaatttgccacggaggtcacaccccctgagccagagcgctccaaccggactgaatcacatggggtggcccgaacatacccctggtacagccatgcctgacggagctttggacacagctgtttgtgcggacgaagtaggctccgaagaagacttgtatgacgaccttcactcatcctcacaccactacagccaccctggcggcgggggggaacaactggccattaacgagttgatcagcgacggtagcgtcgtctgtgcggaagccctttgggatcacgtaaccatggatgatcaggagttaggattcaaagctggagacgttattgaggtaatggatgctaccaacagagagtggtggtggggccgagtggcagatggtgaggggtggttccctgcgtcctttgtgaggctccgggttaatcaagatgagccggcagatgatgatgcaccactggcgggcaactctggagcagaagacgggggcgctgaggctcagtctagcaaggatcagatgcggacaaatgtaatcaatgagatcctgagtactgaaagggattacatcaaacacttgagggacatatgtgaacaggctgactttcagatttattctgagtactgtaacaatcatcctaatgcctgtgtggagctttcgagattaaccaagttgtctaaatacgtctattttttcgaagcatgtcgcctcctgcagaagatgatagatatcagcctggacgggtttctgctgactccagtacagaagatctgcaaataccctctgcagttggctgaactcctgaaatacacacacccccaacaccgggattttaaagacgtcgaagctgcactgcacgccatgaagaatgtcgcacagttgatcaacgagcgcaaacggaggttggagaatattgacaagatcgcccaatggcaaagctcaatcgaggactgggagggagaggatctgttggtgagatcttcggaactgatttattcaggggagctcaccagggtaacgcaaccccaggctaagagtcagcagaggatgtttttcctttttgatcaccagctcatctactgtaagaaagaccttctccgcagagatgtgttgtattacaaaggacgacttgacatggatgggctggaggtggtggacctggaagacgggaaggaccgtgacctgcacgtgtcaatcaaaaatgcgttcagattgcatcgcggagccaccggagatagccatttactgtgcacccggaaaccagagcaaaaacagaggtggctaaaggcttttgcgcgggagcgtgagcaagtgcagctcgatcaagagaccggattttctatcacagagctccagcgcaagcaagctatgctgaatgctagcaaacagcaagtgactggtaaaccgaaggccgtgggcagaccctgttacctgacccgacagaaacaccccgcactgccgagcaataggccacagcagcaggtgctggtgctggctgagcctcggaggaaaccaagtacgttctggcacagcatcagtaggctggccccctttagaaaatag

SEQ ID NO: 185874 - DNA, 2073 bp, Artificial Sequence
  derived and/or modified sequence
atgccctgggaggagcctgctggggagaagcccagctgcagccacagccagaaggccttccacatggagcccgcccagaagccctgcttcaccacagacatggtgacctgggccctgctgtgcatctctgctgagaccgtgcggggggaggcccccagccagccccggggcatcccccacaggagccctgtgtctgtggatgacctgtggctggagaagacccagaggaagaagctgcagaagcaggcccacgtggagcggcggctgcacatcggggctgtgcacaaggatggagtgaagtgctggaggaagaccatcatcaccagccctgagagcctgaacctgcccaggaggagccaccccctgagccagagcgcccccaccggcctgaaccacatgggctggccagagcacaccccaggcacagccatgccagatggagccctggacacagctgtgtgtgctgatgaggtgggcagcgaggaggacctgtatgatgacctgcacagcagcagccaccactacagccaccctgggggcggcggggagcagctggccatcaatgagctgatcagtgatggctctgtggtgtgtgccgaggccctgtgggaccacgtgaccatggatgaccaggagctgggcttcaaggctggagatgtgattgaggtgatggatgccaccaaccgggagtggtggtggggccgggtggctgatggagagggctggttccctgccagctttgtgcggctgcgggtgaaccaggatgagccagcagatgatgatgcccccctggccggcaacagcggggctgaagatggcggcgctgaggcccagagcagcaaggaccagatgaggaccaacgtcatcaatgagatcctgagcacagagcgggactacatcaagcacctgcgggacatctgtgagggctacgtgcggcagtgcaggaagagagctgacatgttcagcgaggagcagctgcggaccatcttcggcaacatcgaggacatctaccgctgccagaaggcctttgtgaaggccctggagcagcgcttcaaccgggagcggccccacctgtctgagctgggcgcctgcttcctggagcaccaggccgacttccagatctacagcgagtactgcaacaaccaccccaatgcctgtgtggagctgagccggctgaccaagctgagcaaatatgtgtacttctttgaggcctgccgcctgctgcagaagatgattgacatcagcctggatggcttcctgctgacccctgtgcagaagatctgcaagtaccccctgcagctggccgagctgctgaagtacacccacccccagcaccgggacttcaaggatgtggaggccgccctgcacgccatgaagaatgtggcccagctgatcaatgaaaggaagaggcggctggagaacatcgacaagatcgcccagtggcagagcagcattgaggactgggagggggaggacctgctggtgcgcagcagcgagctgatctacagcggggagctgaccagggtgacccagccccaggccaagagccagcagaggatgttcttcctgtttgaccaccagctgatctactgcaagaaggacctgctgcggagagatgtgctgtactacaagggccgcctggacatggatggcctggaggtggtggacctggaggatggcaaggaccgggacctgcacgtgtccatcaagaatgccttccggctgcacagaggagccaccggggacagccacctgctgtgcaccaggaagccagagcagaagcagcgctggctgaaggcctttgcccgggagcgggagcaggtgcagctggaccaggagaccggcttcagcatcacagagctgcagaggaagcaggccatgctgaatgccagcaagcagcaggtgacaggcaagcccaaggctgtgggccggccctgctacctgacccggcagaagcacccagccctgcccagcaaccggccccagcagcaggtgctggtgctggccgagcccaggaggaagcccagcaccttctggcacagcatcagccggctggcccccttcaggaagtag

SEQ ID NO: 185875 - DNA, 1860 bp, Artificial Sequence
  derived and/or modified sequence
atgaggccagatggccagcaggccctggatgctgtggtgcgcagctttgactgccacagcgaggccgccctgcggcagagaaatgatgtgatctactgcagcctgcccaggacagcccagggcatcgtgcagcgggaggaccagctggaggtgctggtgtccctgcgggaggtgtggggcagaagaagaggaagagatggcacctgcaccggggccatgccagatggagccctggacacagctgtgtgtgctgatgaggtgggcagcgaggaggacctgtatgatgacctgcacagcagcagccaccactacagccaccctgggggcggcggggagcagctggccatcaatgaactcatcagtgatggctctgtggtgtgtgccgaggccctgtgggaccacgtgaccatggatgaccaggagctgggcttcaaggctggagatgtgattgaggtgatggatgccaccaaccgggagtggtggtggggccgggtggctgatggagagggctggttccctgccagctttgtgcggctgcgggtgaaccaggatgagccagcagatgatgatgcccccctggccggcaacagcggggctgaagatggaggagctgaggcccagagcagcaaggaccagatgaggaccaacgtcatcaatgagatcctgagcacagagcgggactacatcaagcacctgcgggacatctgtgagggctacgtgcggcagtgcaggaagagagctgacatgttttctgaggagcagctgcggaccatctttggaaatattgaggacatctaccgctgccagaaggcctttgtgaaggccctggagcagcgcttcaaccgggagcggccccacctgtctgagctgggcgcctgcttcctggagcaccaggccgacttccagatctacagcgagtactgcaacaaccaccccaatgcctgtgtggagctgagccggctgaccaagctgagcaaatatgtgtacttctttgaggcctgccgcctgctgcagaagatgattgacatcagcctggatggcttcctgctgacccctgtgcagaagatctgcaagtaccccctgcagctggccgagctgctgaagtacacccacccccagcaccgggacttcaaggatgtggaggccgccctgcacgccatgaagaatgtggcccagctgatcaatgaaaggaagaggcggctggagaacatcgacaagatcgcccagtggcagagcagcattgaggactgggagggggaggacctgctggtgcgcagcagcgagctgatctacagcggggagctgaccagggtgacccagccccaggccaagagccagcagaggatgttcttcctgtttgaccaccagctgatctactgcaagaaggacctgctgcggagagatgtgctgtactacaagggccgcctggacatggatggcctggaggtggtggacctggaggatggcaaggaccgggacctgcacgtgtccatcaagaatgccttccggctgcacagaggagccactggagacagccacctgctgtgcaccaggaagccagagcagaagcagcgctggctgaaggcctttgcccgggagcgggagcaggtgcagctggaccaggagaccggcttcagcatcacagagctgcagaggaagcaggccatgctgaatgccagcaagcagcaggtgacaggcaagcccaaggctgtgggccggccctgctacctgacccggcagaagcacccagccctgcccagcaaccggccccagcagcaggtgctggtgctggccgagcccaggaggaagcccagcaccttctggcacagcatcagccggctggcccccttcaggaagtag

SEQ ID NO: 185876 - DNA, 1893 bp, Artificial Sequence
  derived and/or modified sequence
atgccctgggaggagcctgctggggagaagcccagctgcagccacagccagaaggccttccacatggagcccgcccagaagccctgcttcaccacagacatggtgacctgggccctgctgtgcatctctgctgagaccgtgcggggggaggcccccagccagccccggggcatcccccacaggagccctgtgtctgtggatgacctgtggctggagaagacccagaggaagaagctgcagaagcaggcccacgtggagcggcggctgcacatcggggctgtgcacaaggatggagtgaagtgctggaggaagaccatcatcaccagccctgagagcctgaacctgcccaggaggagccaccccctgagccagagcgcccccaccggcctgaaccacatgggctggccagagcacaccccaggcacagccatgccagatggagccctggacacagctgtgtgtgctgatgaggtgggcagcgaggaggacctgtatgatgacctgcacagcagcagccaccactacagccaccctgggggcggcggggagcagctggccatcaatgagctgatcagtgatggctctgtggtgtgtgccgaggccctgtgggaccacgtgaccatggatgaccaggagctgggcttcaaggctggagatgtgattgaggtgatggatgccaccaaccgggagtggtggtggggccgggtggctgatggagagggctggttccctgccagctttgtgcggctgcgggtgaaccaggatgagccagcagatgatgatgcccccctggccggcaacagcggggctgaagatggcggcgctgaggcccagagcagcaaggaccagatgaggaccaacgtcatcaatgagatcctgagcacagagcgggactacatcaagcacctgcgggacatctgtgagcaggccgacttccagatctacagcgagtactgcaacaaccaccccaatgcctgtgtggagctgagccggctgaccaagctgagcaaatatgtgtacttctttgaggcctgccgcctgctgcagaagatgattgacatcagcctggatggcttcctgctgacccctgtgcagaagatctgcaagtaccccctgcagctggccgagctgctgaagtacacccacccccagcaccgggacttcaaggatgtggaggccgccctgcacgccatgaagaatgtggcccagctgatcaatgaaaggaagaggcggctggagaacatcgacaagatcgcccagtggcagagcagcattgaggactgggagggggaggacctgctggtgcgcagcagcgagctgatctacagcggggagctgaccagggtgacccagccccaggccaagagccagcagaggatgttcttcctgtttgaccaccagctgatctactgcaagaaggacctgctgcggagagatgtgctgtactacaagggccgcctggacatggatggcctggaggtggtggacctggaggatggcaaggaccgggacctgcacgtgtccatcaagaatgccttccggctgcacagaggagccaccggggacagccacctgctgtgcaccaggaagccagagcagaagcagcgctggctgaaggcctttgcccgggagcgggagcaggtgcagctggaccaggagaccggcttcagcatcacagagctgcagaggaagcaggccatgctgaatgccagcaagcagcaggtgacaggcaagcccaaggctgtgggccggccctgctacctgacccggcagaagcacccagccctgcccagcaaccggccccagcagcaggtgctggtgctggccgagcccaggaggaagcccagcaccttctggcacagcatcagccggctggcccccttcaggaagtag

SEQ ID NO: 185877 - DNA, 2073 bp, Artificial Sequence
  derived and/or modified sequence
atgccctgggaggagcccgccggcgagaagcccagctgcagccactctcagaaggcctttcacatggaacctgcgcagaaaccctgcttcaccactgatatggtgacatgggccctgttgtgtatcagcgccgagacagtgcggggggaggcacccagtcagccccggggtattccgcatagatctccagtgagcgtggatgatttatggctcgaaaaaacgcaaaggaaaaagttgcaaaaacaggcgcatgtggagcgtcggctacatataggggcagtccataaagatggagtgaaatgctggcgtaagacgattattactagccccgaatcccttaacctcccccggcgctcccaccccctttcacaatccgctcctactggtctcaatcacatggggtggccagagcatacgcccgggacagctatgccagacggcgctcttgataccgcagtgtgtgctgatgaggtaggatccgaggaggacctctatgacgaccttcattcgtccagtcaccactattcacatccaggaggcgggggggagcagcttgctatcaatgaattgatctcagatgggtccgtagtgtgtgccgaggccctctgggatcatgtgactatggatgaccaggagctcggctttaaagcgggtgacgttatcgaagttatggatgctacaaaccgtgagtggtggtggggccgggtggcagatggtgaaggatggtttcctgcgtctttcgtccggttgcgggttaaccaggatgagccagctgatgatgatgcccccttagccggtaattcaggcgcagaagacgggggagctgaagcacaaagttccaaagatcagatgcggacaaacgtgatcaacgaaatcctctccacagagcgcgactacatcaagcacctgcgcgacatttgcgaaggttacgttaggcagtgccgcaaacgtgctgatatgttcagcgaggaacagctcagaactatctttgggaatatcgaagatatttacagatgtcagaaagctttcgtgaaagccctagaacagcgctttaatagggagcggccacatctcagtgaattgggggcttgttttcttgagcatcaggcggacttccagatctattctgaatattgcaacaaccatcccaatgcttgcgttgagctctcgcgcctaacaaaattgtccaagtacgtctatttctttgaggcctgcagactcttgcagaagatgatcgacatcagcctggacggatttttgttaacccccgtccaaaagatttgcaagtatcccttgcagcttgcagaattacttaagtacactcacccccagcatcgggactttaaagatgtggaagccgctcttcacgcgatgaaaaatgtcgctcagttgattaacgagcggaaacgcaggctggagaatattgataagatcgctcaatggcagtcctcaatcgaggactgggagggagaagacctgctggtcaggtctagcgagctgatctactcaggcgagcttacccgtgttacccagccgcaggccaagagccagcagcgaatgttttttctatttgatcaccaactcatttattgcaagaaggatctcctgaggcgcgacgtcctatattacaagggacggctggatatggatggcctggaagtggtggacctggaagatggcaaggatcgagacctgcacgttagcatcaaaaacgctttccgcctccaccggggagctaccggtgacagccacctgttgtgtacaaggaaacctgaacagaagcagcgctggcttaaggcattcgcccgcgagcgagaacaagtgcagctggaccaggagactgggtttagtattactgagctccaacgtaaacaggcaatgcttaacgctagcaaacagcaggtgaccggaaagcctaaggccgtcggaagaccgtgttatctgacgcgccagaagcaccctgcattgccctcgaatcgtccacaacaacaggttctggtgctcgctgaacctcgtcgtaaaccgtccacgttctggcattctatcagccgactcgctccattccgcaaatag

SEQ ID NO: 185878 - DNA, 1860 bp, Artificial Sequence
  derived and/or modified sequence
atgcggcccgacggccagcaggccctggacgccgtggtgcggagcttcgattgtcatagtgaggccgctctacgccaaagaaacgacgtgatctattgttccctacctcgaacagcccagggaatagtccagagagaggaccagctggaggtgctggtttccctcagggaggtttggggtagacggagagggagagacggtacttgcaccggcgcaatgcccgatggggctctcgataccgcagtctgcgccgacgaggtcggcagtgaggaggacctatacgacgatctccattcttcctctcatcactactcacaccctggtggcggaggagaacagttggccatcaatgagctaatttctgacggctcagtggtgtgcgccgaggcgttgtgggaccacgtgactatggatgatcaagagcttggttttaaggccggcgacgtaatcgaagtgatggacgctaccaacagagagtggtggtggggtagagtggctgacggggaaggatggtttcccgccagttttgtgcggctgcgcgtcaaccaagacgaaccggccgacgacgatgcccccctcgcgggcaactcaggggccgaggatggaggagctgaggcgcagagttctaaggaccagatgaggacgaacgtcattaatgagatcttatcgactgagcgtgattacataaaacacctgcgggatatttgcgaggggtacgtgagacagtgtagaaaaagagccgacatgtttagcgaggagcagctgagaactatctttgggaatatagaggatatctatcgatgtcagaaagcttttgtgaaggcactggaacagaggttcaaccgcgaacggccacacttgagcgaactcggggcgtgcttcctcgagcaccaggcggacttccaaatctacagcgaatactgcaacaaccacccaaacgcatgcgtggaattatcacggctgaccaaactttcgaagtatgtttatttcttcgaggcctgtcgcctcctccagaaaatgatcgatatttccttagatggtttcttgttaacacctgtgcaaaagatatgtaaatatcctctgcagctggccgagcttctgaaatacactcaccctcaacacagggattttaaagatgttgaggcagcccttcatgccatgaaaaacgtagcccagcttattaacgagagaaaacgcagactggagaacattgacaagatcgcgcagtggcagagcagtattgaagattgggagggggaggacctcttggttcgttcttctgagttaatctacagcggcgagctgactcgcgttacacagccccaggccaagtcccagcagagaatgttcttcctgttcgaccatcagctgatttattgcaaaaaggacctgctcaggcgggatgtcctctactacaaggggagactcgatatggacggcctggaggtggtagatctcgaagatggcaaggatcgagacctacacgtgagcattaagaatgccttccgcctccatagaggggcaaccggcgattcacacctactctgtacacgcaaacccgaacaaaagcagcgctggctaaaagcatttgctcgcgaaagggagcaagtgcagctcgaccaagaaacagggttcagcattaccgagctgcagcggaaacaggctatgctgaacgcatccaaacagcaggtaacaggaaagcccaaggcagtcggccgtccatgctacctcacaagacagaaacatccggctcttccaagtaaccgccctcagcagcaggtcctggtgcttgccgagcctagacgaaaaccgtctacgttctggcacagcatatcgcggttagctcctttccgcaaatag

SEQ ID NO: 185879 - DNA, 1893 bp, Artificial Sequence
  derived and/or modified sequence
atgccctgggaggagcccgccggcgagaagcccagctgcagccacagccagaaagcctttcacatggaaccggcccaaaagccctgcttcacaactgatatggttacatgggcactcctctgcatatccgctgaaactgtacgtggggaggcgccatcacagcctcgcggtattccacaccgatctccggtgagtgtcgatgacctgtggttagaaaaaacacagcgaaaaaaactccagaaacaggcccacgtggagcggaggctacacatcggagcggtccacaaggatggcgtgaaatgctggaggaagacaataatcacctcaccagagtctctcaacttgcccaggcgctcccatcctctgtctcagagcgctcctaccggactgaaccatatggggtggcccgagcataccccaggcaccgccatgccagacggggctctggatacagctgtgtgtgctgacgaggttggaagtgaggaggatctgtacgacgatcttcactcgtcttctcaccactactctcaccccggcgggggcggtgaacagctggcaatcaacgagctgatcagcgacggttctgtggtgtgtgccgaggccctctgggaccacgtcaccatggatgaccaggagcttggttttaaggccggtgacgtaatcgaagtgatggatgcaacaaaccgagaatggtggtgggggcgagtcgccgatggcgaaggatggtttccagcatcctttgtccggttaagagttaatcaggacgaaccggcagacgatgacgccccactggccggaaattctggagccgaagatgggggcgcggaggcccagtcttccaaagaccaaatgaggaccaatgtcattaacgaaatcctgtcaaccgaacgcgactacatcaagcacctgagggacatctgtgagcaggcagacttccagatctattctgagtactgcaataatcaccctaatgcatgtgtggagctgtccagactaaccaagctgtctaaatatgtctacttctttgaagcctgtagattgctgcaaaagatgatagatatctccctggacggctttctgctcacacccgtccagaaaatttgtaagtatcctctacagctggcagagctgctgaaatatacccatccgcagcatagggacttcaaagacgtagaggccgcactccatgctatgaagaacgtggcacagttgatcaatgagcgtaaaagacgtctcgagaacatcgataagatcgcacagtggcaatcctccatcgaggactgggagggggaggatctgctggtgcgatcttccgagctgatatacagcggggagctgacaagggtgacccaaccgcaggctaaatcccagcagcggatgttctttcttttcgatcatcagctgatctattgcaaaaaggatcttctacgaagagacgtgctctattacaagggacggctggacatggatggcttggaagtggttgacctggaggacgggaaagaccgcgacctacatgtttcgatcaagaatgcctttagactgcacagaggagcaactggcgactcccacctcctttgtactcgcaagcctgaacaaaagcaaaggtggctcaaagctttcgctcgggagagggaacaagtgcagctagatcaggagaccggatttagtataaccgagctgcaaagaaaacaagccatgctgaacgcttctaagcaacaggtgactggcaaaccaaaggccgtcgggaggccgtgttatcttacgcggcagaagcaccctgctttgccctcgaataggcctcagcagcaagtcctggtcctcgctgagcctaggcgcaagccttccaccttctggcatagcatttcgagattggcgccattcagaaaatag

SEQ ID NO: 185880 - DNA, 2073 bp, Artificial Sequence
  derived and/or modified sequence
atgccttgggaagaacctgctggggagaagccatcatgcagccacagtcaaaaggctttccatatggagcccgctcagaagccctgctttaccactgatatggtaacgtgggcactgttatgtatctccgcggagactgtgcgcggagaggctccttctcagcctcggggtattccacaccgctcaccagtgtccgtagacgatttatggttggaaaagactcaacgcaagaaattgcaaaaacaggcccacgtggaaagaaggctccatattggcgcagtgcataaagatggcgtgaaatgctggcgaaagacaattatcacaagccctgagtcgctgaatctgcccaggaggtcacatcccctgtcacagtccgccccaaccggattgaaccacatgggttggcccgaacatacaccaggcacagccatgcctgatggcgctctggacaccgccgtttgcgctgacgaggtggggagtgaggaggacctatatgacgacttgcactccagttcccaccactattcccaccctggcggtggtggcgagcagttggctatcaacgagctcatctctgatggttctgtggtttgcgccgaagccctgtgggaccacgtgactatggacgaccaggaactagggtttaaagccggagacgtgatcgaagttatggatgccactaacagggaatggtggtggggtcgcgtcgccgatggtgagggctggttccctgcttctttcgtgaggctgagagtcaatcaggatgagcctgctgatgacgatgccccactggcaggcaactcaggggctgaggacggcggagccgaagcccagtcatctaaagatcagatgagaaccaacgtgatcaatgagattctgagcaccgagagggattacatcaaacacctgcgggatatatgcgaggggtacgtgcgtcaatgcagaaaacgagctgatatgttcagcgaggagcagcttcgaacaatattcggcaacatcgaggacatctatcgttgccagaaagcatttgttaaggcactggaacagagattcaatagggaacgcccacacctgagtgagttaggcgcatgcttcttagagcatcaggccgatttccagatctactcggagtattgcaataaccaccccaatgcatgcgtagaactgagcagactgaccaagctgtccaaatatgtctattttttcgaggcatgtagactgctacagaagatgatcgatatttctcttgatgggttcctgttgacgcctgtgcagaagatttgtaagtacccccttcaactggctgagttactcaaatacactcacccacagcatagagactttaaggacgtggaggctgctctccacgccatgaagaacgttgcgcaactgattaatgagcggaaacgcaggctcgagaacatcgacaaaatcgcacagtggcagagctcaatcgaggactgggaaggtgaggatctcttagtacgatcctcagagctaatctactcgggtgagctgactagagtgacccagcctcaggcgaagtctcagcagaggatgttctttttatttgaccaccagttaatttattgtaagaaagacttactgcggcgtgacgtgctctactacaaggggagactcgatatggatggcctggaagtggtagatctggaggatggcaaggaccgggatctgcatgtttcaatcaagaacgcctttcggctgcatcgtggtgctacaggtgactcccaccttctgtgcaccagaaagcctgagcagaagcaaagatggcttaaggctttcgctagggaaagagaacaggtgcagctcgaccaggagacgggtttctctataacagagttacagcgaaagcaagccatgctgaatgcttcaaagcagcaggtcacaggcaagcctaaggctgtggggagaccatgctacctcactaggcagaagcacccagcactgccttcaaaccgaccccaacaacaggtactcgtgcttgctgaaccgagacgcaaaccatcgactttttggcattccatcagtcgtcttgccccattcaggaagtag

SEQ ID NO: 185881 - DNA, 1860 bp, Artificial Sequence
  derived and/or modified sequence
atgcggccagatggccaacaggcactggacgctgtggtgcggagcttcgactgccactcagaggctgccctgcgccagcgcaacgacgtgatatactgttcactgcctaggactgcacaaggtattgttcagcgcgaggatcagctcgaggtcctggtgtcattaagggaggtctgggggagaagacgcggtagagatgggacctgtaccggtgctatgccggacggggctctcgacaccgcagtgtgtgccgatgaagtagggtctgaggaggacttgtatgatgatctgcatagttcgtcacatcattacagccatccgggtggagggggtgaacaattggcaatcaacgagttgatctccgacggtagtgtcgtatgcgctgaggcactatgggaccacgtcactatggacgaccaagaactggggtttaaggctggtgatgtgatcgaggtgatggacgctactaaccgtgaatggtggtgggggcgtgttgcagatggcgaagggtggttcccggcttcattcgtccggctaagagtgaaccaagacgagccagctgacgacgacgccccattagccggtaactcaggcgctgaagatggtggggcagaggcacagtcatccaaggatcagatgcggacaaatgtaatcaatgagatcctgtccaccgaaagggactatattaaacatttgcgcgacatctgcgaaggctatgtccggcaatgccgcaaaagggctgacatgttttccgaggaacaattgcgcactatctttggaaatatagaggatatttatcgctgccagaaagccttcgtgaaagcgctggaacagcgatttaaccgggaaaggccacacctttctgaactgggagcctgcttcctcgaacatcaggcggactttcaaatttactccgagtattgcaacaatcaccctaacgcctgcgtggaactcagccgcctgaccaaactgtccaagtatgtctatttctttgaggcttgtcggctcctccaaaagatgatcgacatcagcctggacgggttcctactcaccccggttcagaaaatctgtaaatatcctctgcagctggcagaactgcttaagtacactcaccctcaacaccgggacttcaaagacgtggaggcggcactgcatgcaatgaagaacgttgcccagctgatcaacgaacgaaaacgaaggctggaaaacattgataaaatcgcccagtggcagtcttctatcgaggattgggagggggaggacctgctggttcggtcttccgagctgatttactccggagagttgaccagggtgacccagccacaagctaagtctcagcagcgcatgttcttcttgttcgaccaccagctgatttactgtaaaaaggacctcctgaggcgtgatgtcctctattataaagggcgacttgacatggacgggctggaggttgtcgacctggaagatggaaaagatagggaccttcacgtcagcattaagaatgcgttccgccttcataggggcgctactggagattcacatctgctttgcacacggaaacccgaacagaagcagagatggcttaaagcctttgcaagagagagggagcaagtgcagctcgaccaagaaacagggttcagcataacggaactgcagaggaaacaggccatgttgaacgcatcaaaacaacaggtaactggaaagccgaaagcggtcgggagaccgtgctatctgactagacagaagcatcctgccctcccgtcaaacagaccacagcagcaggtcctggtgcttgcggagccacgccgaaaaccaagtactttttggcatagcattagcaggctggctcccttccgtaaatag

SEQ ID NO: 185882 - DNA, 1893 bp, Artificial Sequence
  derived and/or modified sequence
atgccctgggaagaacctgccggagagaagccaagctgctcccacagtcagaaggcattccatatggagcctgcccagaagccctgctttactacagacatggtcacctgggccctgttatgtatctctgccgagacagttcgcggagaagcaccttcccagccccgaggcatcccacacagatcccctgtgtctgtggacgatctctggttggaaaagacgcaacgaaagaaactccagaagcaagcccacgtcgagcggaggctgcacatcggggcagtccataaagacggggtgaaatgctggcgaaagaccataatcactagtcctgagtcccttaacctcccacggcgtagtcacccactgtcgcagtcggcccctacgggcctgaaccacatggggtggccggagcacactcctggtactgccatgcccgatggcgcactagacacagccgtgtgcgccgacgaggtcggcagcgaagaagacttgtacgacgatctgcacagctcttcgcaccactatagccaccctggcggaggcggagagcagctggccattaacgaactcatcagcgatggaagcgtggtgtgtgcggaggccctatgggatcatgtgactatggacgaccaggagctggggtttaaggccggtgacgtcatcgaagtgatggacgcaactaatcgcgaatggtggtgggggagagtggccgatggcgaggggtggtttcctgcatcatttgtacggctccgcgttaatcaggacgagcccgcagacgacgatgcccctctggcaggcaacagcggagcagaggatgggggagcagaggctcagtcttctaaggatcagatgcgtacaaatgtgattaacgaaatactttccactgagagggattacatcaaacatttacgggacatctgtgagcaggcagatttccagatttatagcgaatactgcaacaaccatcccaacgcttgtgttgaactctccaggttaaccaagctgtctaagtatgtctatttttttgaagcttgccggctactgcagaagatgattgacatcagcttggacgggtttctcctgacacctgttcagaaaatttgtaagtacccgctacaacttgccgaactcttaaaatatactcacccccagcatcgggacttcaaggacgtcgaggctgccctgcacgctatgaagaacgtggctcagctgatcaatgaaaggaaacgaaggttggagaacatagataaaatcgcccagtggcagtcgagcattgaagattgggagggcgaagacctgctcgttcgctcttcagagctgatctacagcggcgaactcacccgggtcactcaaccccaggccaaatcccagcagcggatgttttttctgtttgaccatcagctcatatactgcaagaaggacctgctccggagggacgtgctgtactacaagggcagactagatatggatgggttagaagtagtggatttagaagatggaaaggatagggacttgcatgtgagtattaaaaacgcctttaggctccatcgcggtgccacgggagacagccacctgctgtgcactcgaaagccagagcagaaacagagatggctgaaagcctttgccagggagcgggagcaggtccaactggatcaagaaacgggcttcagtatcactgagctgcagaggaaacaggccatgctgaacgcttctaaacagcaagtcaccggcaagcccaaagccgtcggaagaccttgttacctgacaaggcaaaaacaccctgctcttccttcaaacagacctcagcaacaagtgctcgtgctggcggagcctagaaggaagccctccactttttggcacagcatctccagactcgccccatttaggaagtag

SEQ ID NO: 185883 - DNA, 1872 bp, Artificial Sequence
  derived and/or modified sequence
tagagagaggaaatgaggccagatgggcagcaagctttggatgctgtggtaaggagttttgactgtcactctgaagcagctctcaggcagaggaatgatgtgatttattgtagtttaccaaggaccgctcagggtattgtgcagagggaagaccagctggaggttcttgtgtcactccgtgaagtgtgggggcggcggaggggcagagatgggacctgcactggagccatgcctgatggagctctggacacagctgtctgcgctgacgaagtggggagcgaggaggacctgtatgatgacctgcacagctccagccaccactacagccaccctggagggggtggggagcagctggctatcaatgagctcatcagcgatggcagtgtggtctgcgctgaagcactctgggaccatgtcaccatggacgaccaggagctgggcttcaaagctggggacgtcatcgaagtgatggatgccaccaacagagagtggtggtggggccgggtcgccgatggcgagggctggtttccagccagcttcgttcggctgagggtgaatcaggacgagcccgcggatgacgacgcccctctggccgggaacagcggagcggaggacggcggggcggaggcgcagagcagcaaggaccagatgcggaccaacgtcatcaacgagatcctcagcactgagcgggactacatcaagcacctgcgcgacatctgcgagggctacgtccggcagtgccgcaagcgcgcagacatgttcagcgaggagcagctgcgtaccatcttcgggaacatcgaggacatctaccgctgccagaaggccttcgtgaaggccctggagcagaggttcaaccgcgagcgcccacacctgagcgagctgggtgcctgcttcctggagcatcaagccgacttccagatctactcggagtactgcaataaccaccccaacgcctgcgtggagctctcccggctcaccaagctcagcaagtacgtgtacttcttcgaggcctgccggctgctgcagaagatgattgacatctccctggatggcttcctgctgactccggtgcagaagatctgcaagtaccctctgcagctggccgagctgctcaaatacacgcacccccagcacagggacttcaaggatgttgaagccgccttgcatgccatgaagaacgtggcccagctcatcaacgagcggaagcggagacttgagaacatcgacaagattgctcagtggcagagctccatagaggactgggagggagaagatctcttggtcaggagctcagaactcatctactcgggggagctgactcgagttacacagcctcaagccaaaagccagcagcgaatgttctttctctttgaccaccagctcatctactgtaagaaggacctgctccgccgcgacgtgttgtactacaagggccggctggacatggacggcctggaggtggtggacctggaggacgggaaggacagagacctccatgtgagcatcaagaacgccttccggctgcaccgtggcgccacaggggacagccacctgctgtgcaccaggaagcccgagcagaagcagcgctggctcaaggcctttgccagggagagggagcaggtgcagctggaccaggagacaggcttctccatcactgaactgcagaggaagcaggccatgctgaatgccagcaagcagcaggtcacagggaagcccaaagctgttggccggccctgctacctgacgcgccagaagcacccagccctgcccagcaaccggccccagcagcaggtcctggtgctggcggagcccaggcgcaagccatctaccttctggcacagcatcagccggctggcacccttccgcaagtga

SEQ ID NO: 185884 - DNA, 1893 bp, Artificial Sequence
  derived and/or modified sequence
atgccctgggaagaaccagcaggtgagaagcccagttgctctcacagtcagaaggcgttccacatggagcctgcccagaagccctgcttcaccactgacatggtgacatgggccctcctctgcatctctgcagagactgtgcgtggggaggctccttcacagcctaggggcatccctcaccgctcgcccgtcagtgtggatgacctgtggctggagaagacacagagaaagaagttgcagaagcaggcccacgtcgaaaggaggctgcacataggggcagtgcacaaagatggagtcaagtgctggagaaagacgatcattacctctccagagtctttgaatctccctagaagaagccatccactctcccagagtgctccaacgggactgaaccacatgggctggccagagcacacaccaggcactgccatgcctgatggagctctggacacagctgtctgcgctgacgaagtggggagcgaggaggacctgtatgatgacctgcacagctccagccaccactacagccaccctggagggggtggggagcagctggctatcaatgagctcatcagcgatggcagtgtggtctgcgctgaagcactctgggaccatgtcaccatggacgaccaggagctgggcttcaaagctggggacgtcatcgaagtgatggatgccaccaacagagagtggtggtggggccgggtcgccgatggcgagggctggtttccagccagcttcgttcggctgagggtgaatcaggacgagcccgcggatgacgacgcccctctggccgggaacagcggagcggaggacggcggggcggaggcgcagagcagcaaggaccagatgcggaccaacgtcatcaacgagatcctcagcactgagcgggactacatcaagcacctgcgcgacatctgcgagcaagccgacttccagatctactcggagtactgcaataaccaccccaacgcctgcgtggagctctcccggctcaccaagctcagcaagtacgtgtacttcttcgaggcctgccggctgctgcagaagatgattgacatctccctggatggcttcctgctgactccggtgcagaagatctgcaagtaccctctgcagctggccgagctgctcaaatacacgcacccccagcacagggacttcaaggatgttgaagccgccttgcatgccatgaagaacgtggcccagctcatcaacgagcggaagcggagacttgagaacatcgacaagattgctcagtggcagagctccatagaggactgggagggagaagatctcttggtcaggagctcagaactcatctactcgggggagctgactcgagttacacagcctcaagccaaaagccagcagcgaatgttctttctctttgaccaccagctcatctactgtaagaaggacctgctccgccgcgacgtgttgtactacaagggccggctggacatggacggcctggaggtggtggacctggaggacgggaaggacagagacctccatgtgagcatcaagaacgccttccggctgcaccgtggcgccacaggggacagccacctgctgtgcaccaggaagcccgagcagaagcagcgctggctcaaggcctttgccagggagagggagcaggtgcagctggaccaggagacaggcttctccatcactgaactgcagaggaagcaggccatgctgaatgccagcaagcagcaggtcacagggaagcccaaagctgttggccggccctgctacctgacgcgccagaagcacccagccctgcccagcaaccggccccagcagcaggtcctggtgctggcggagcccaggcgcaagccatctaccttctggcacagcatcagccggctggcacccttccgcaagtga

SEQ ID NO: 185885 - DNA, 2073 bp, Artificial Sequence
  derived and/or modified sequence
atgccctgggaggagcccgccggcgagaagcccagctgcagccacagccagaaggccttccacatggagcccgcccagaagccctgcttcaccaccgacatggtgacctgggccctgctgtgcatcagcgccgagaccgtgagaggcgaggcccccagccagcccagaggcatcccccacagaagccccgtgagcgtggacgacctgtggctggagaagacccagagaaagaagctgcagaagcaggcccacgtggagagaagactgcacatcggcgccgtgcacaaggacggcgtgaagtgctggagaaagaccatcatcaccagccccgagagcctgaacctgcccagaagaagccaccccctgagccagagcgcccccaccggcctgaaccacatgggctggcccgagcacacccccggcaccgccatgcccgacggcgccctggacaccgccgtgtgcgccgacgaggtgggcagcgaggaggacctgtacgacgacctgcacagcagcagccaccactacagccaccccggcggcggcggcgagcagctggccatcaacgagctgatcagcgacggcagcgtggtgtgcgccgaggccctgtgggaccacgtgaccatggacgaccaggagctgggcttcaaggccggcgacgtgatcgaggtgatggacgccaccaacagagagtggtggtggggcagagtggccgacggcgagggctggttccccgccagcttcgtgagactgagagtgaaccaggacgagcccgccgacgacgacgcccccctggccggcaacagcggcgccgaggacggcggcgccgaggcccagagcagcaaggaccagatgagaaccaacgtgatcaacgagatcctgagcaccgagagagactacatcaagcacctgagagacatctgcgagggctacgtgagacagtgcagaaagagagccgacatgttcagcgaggagcagctgagaaccatcttcggcaacatcgaggacatctacagatgccagaaggccttcgtgaaggccctggagcagagattcaacagagagagaccccacctgagcgagctgggcgcctgcttcctggagcaccaggccgacttccagatctacagcgagtactgcaacaaccaccccaacgcctgcgtggagctgagcagactgaccaagctgagcaagtacgtgtacttcttcgaggcctgcagactgctgcagaagatgatcgacatcagcctggacggcttcctgctgacccccgtgcagaagatctgcaagtaccccctgcagctggccgagctgctgaagtacacccacccccagcacagagacttcaaggacgtggaggccgccctgcacgccatgaagaacgtggcccagctgatcaacgagagaaagagaagactggagaacatcgacaagatcgcccagtggcagagcagcatcgaggactgggagggcgaggacctgctggtgagaagcagcgagctgatctacagcggcgagctgaccagagtgacccagccccaggccaagagccagcagagaatgttcttcctgttcgaccaccagctgatctactgcaagaaggacctgctgagaagagacgtgctgtactacaagggcagactggacatggacggcctggaggtggtggacctggaggacggcaaggacagagacctgcacgtgagcatcaagaacgccttcagactgcacagaggcgccaccggcgacagccacctgctgtgcaccagaaagcccgagcagaagcagagatggctgaaggccttcgccagagagagagagcaggtgcagctggaccaggagaccggcttcagcatcaccgagctgcagagaaagcaggccatgctgaacgccagcaagcagcaggtgaccggcaagcccaaggccgtgggcagaccctgctacctgaccagacagaagcaccccgccctgcccagcaacagaccccagcagcaggtgctggtgctggccgagcccagaagaaagcccagcaccttctggcacagcatcagcagactggcccccttcagaaagtag

SEQ ID NO: 185886 - DNA, 1860 bp, Artificial Sequence
  derived and/or modified sequence
atgagacccgacggccagcaggccctggacgccgtggtgagaagcttcgactgccacagcgaggccgccctgagacagagaaacgacgtgatctactgcagcctgcccagaaccgcccagggcatcgtgcagagagaggaccagctggaggtgctggtgagcctgagagaggtgtggggcagaagaagaggcagagacggcacctgcaccggcgccatgcccgacggcgccctggacaccgccgtgtgcgccgacgaggtgggcagcgaggaggacctgtacgacgacctgcacagcagcagccaccactacagccaccccggcggcggcggcgagcagctggccatcaacgagctgatcagcgacggcagcgtggtgtgcgccgaggccctgtgggaccacgtgaccatggacgaccaggagctgggcttcaaggccggcgacgtgatcgaggtgatggacgccaccaacagagagtggtggtggggcagagtggccgacggcgagggctggttccccgccagcttcgtgagactgagagtgaaccaggacgagcccgccgacgacgacgcccccctggccggcaacagcggcgccgaggacggcggcgccgaggcccagagcagcaaggaccagatgagaaccaacgtgatcaacgagatcctgagcaccgagagagactacatcaagcacctgagagacatctgcgagggctacgtgagacagtgcagaaagagagccgacatgttcagcgaggagcagctgagaaccatcttcggcaacatcgaggacatctacagatgccagaaggccttcgtgaaggccctggagcagagattcaacagagagagaccccacctgagcgagctgggcgcctgcttcctggagcaccaggccgacttccagatctacagcgagtactgcaacaaccaccccaacgcctgcgtggagctgagcagactgaccaagctgagcaagtacgtgtacttcttcgaggcctgcagactgctgcagaagatgatcgacatcagcctggacggcttcctgctgacccccgtgcagaagatctgcaagtaccccctgcagctggccgagctgctgaagtacacccacccccagcacagagacttcaaggacgtggaggccgccctgcacgccatgaagaacgtggcccagctgatcaacgagagaaagagaagactggagaacatcgacaagatcgcccagtggcagagcagcatcgaggactgggagggcgaggacctgctggtgagaagcagcgagctgatctacagcggcgagctgaccagagtgacccagccccaggccaagagccagcagagaatgttcttcctgttcgaccaccagctgatctactgcaagaaggacctgctgagaagagacgtgctgtactacaagggcagactggacatggacggcctggaggtggtggacctggaggacggcaaggacagagacctgcacgtgagcatcaagaacgccttcagactgcacagaggcgccaccggcgacagccacctgctgtgcaccagaaagcccgagcagaagcagagatggctgaaggccttcgccagagagagagagcaggtgcagctggaccaggagaccggcttcagcatcaccgagctgcagagaaagcaggccatgctgaacgccagcaagcagcaggtgaccggcaagcccaaggccgtgggcagaccctgctacctgaccagacagaagcaccccgccctgcccagcaacagaccccagcagcaggtgctggtgctggccgagcccagaagaaagcccagcaccttctggcacagcatcagcagactggcccccttcagaaagtag

SEQ ID NO: 185887 - DNA, 1893 bp, Artificial Sequence
  derived and/or modified sequence
atgccctgggaggagcccgccggcgagaagcccagctgcagccacagccagaaggccttccacatggagcccgcccagaagccctgcttcaccaccgacatggtgacctgggccctgctgtgcatcagcgccgagaccgtgagaggcgaggcccccagccagcccagaggcatcccccacagaagccccgtgagcgtggacgacctgtggctggagaagacccagagaaagaagctgcagaagcaggcccacgtggagagaagactgcacatcggcgccgtgcacaaggacggcgtgaagtgctggagaaagaccatcatcaccagccccgagagcctgaacctgcccagaagaagccaccccctgagccagagcgcccccaccggcctgaaccacatgggctggcccgagcacacccccggcaccgccatgcccgacggcgccctggacaccgccgtgtgcgccgacgaggtgggcagcgaggaggacctgtacgacgacctgcacagcagcagccaccactacagccaccccggcggcggcggcgagcagctggccatcaacgagctgatcagcgacggcagcgtggtgtgcgccgaggccctgtgggaccacgtgaccatggacgaccaggagctgggcttcaaggccggcgacgtgatcgaggtgatggacgccaccaacagagagtggtggtggggcagagtggccgacggcgagggctggttccccgccagcttcgtgagactgagagtgaaccaggacgagcccgccgacgacgacgcccccctggccggcaacagcggcgccgaggacggcggcgccgaggcccagagcagcaaggaccagatgagaaccaacgtgatcaacgagatcctgagcaccgagagagactacatcaagcacctgagagacatctgcgagcaggccgacttccagatctacagcgagtactgcaacaaccaccccaacgcctgcgtggagctgagcagactgaccaagctgagcaagtacgtgtacttcttcgaggcctgcagactgctgcagaagatgatcgacatcagcctggacggcttcctgctgacccccgtgcagaagatctgcaagtaccccctgcagctggccgagctgctgaagtacacccacccccagcacagagacttcaaggacgtggaggccgccctgcacgccatgaagaacgtggcccagctgatcaacgagagaaagagaagactggagaacatcgacaagatcgcccagtggcagagcagcatcgaggactgggagggcgaggacctgctggtgagaagcagcgagctgatctacagcggcgagctgaccagagtgacccagccccaggccaagagccagcagagaatgttcttcctgttcgaccaccagctgatctactgcaagaaggacctgctgagaagagacgtgctgtactacaagggcagactggacatggacggcctggaggtggtggacctggaggacggcaaggacagagacctgcacgtgagcatcaagaacgccttcagactgcacagaggcgccaccggcgacagccacctgctgtgcaccagaaagcccgagcagaagcagagatggctgaaggccttcgccagagagagagagcaggtgcagctggaccaggagaccggcttcagcatcaccgagctgcagagaaagcaggccatgctgaacgccagcaagcagcaggtgaccggcaagcccaaggccgtgggcagaccctgctacctgaccagacagaagcaccccgccctgcccagcaacagaccccagcagcaggtgctggtgctggccgagcccagaagaaagcccagcaccttctggcacagcatcagcagactggcccccttcagaaagtag

SEQ ID NO: 185888 - protein, 634 aa, Artificial Sequence
  derived and/or modified sequence
MATSNNPRKFSEKIALHNQKQAEETAAFEEVMKDLSLTRAARLQLQKSQYLQLGPSRGQYYGGSLPNVNQIGSGTMDLPFQTPFQSSGLDTSRTTRHHGLVDRVYRERGRLGSPHRRPLSVDKHGRQADSCPYGTMYLSPPADTSWRRTNSDSALHQSTMTPTQPESFSSGSQDVHQKRVLLLTVPGMEETTSEADKNLSKQAWDTKKTGSRPKSCEVPGINIFPSADQENTTALIPATHNTGGSLPDLTNIHFPSPLPTPLDPEEPTFPALSSSSSTGNLAANLTHLGIGGAGQGMSTPGSSPQHRPAGVSPLSLSTEARRQQASPTLSPLSPITQAVAMDALSLEQQLPYAFFTQAGSQQPPPQPQPPPPPPPASQQPPPPPPPQAPVRLPPGGPLLPSASLTRGPQPPPLAVTVPSSLPQSPPENPGQPSMGIDIASAPALQQYRTSAGSPANQSPTSPVSNQGFSPGSSPQHTSTLGSVFGDAYYEQQMAARQANALSHQLEQFNMMENAISSSSLYSPGSTLNYSQAAMMGLTGSHGSLPDSQQLGYASHSGIPNIILTVTGESPPSLSKELTSSLAGVGDVSFDSDSQFPLDELKIDPLTLDGLHMLNDPDMVLADPATEDTFRMDRL

SEQ ID NO: 185889 - DNA, 1905 bp, Artificial Sequence
  derived and/or modified sequence
atggcaacttccaacaatcccaggaaattctccgagaagattgctttacataatcagaaacaggccgaggagaccgcagccttcgaggaagtgatgaaggacctgtctttgaccagagcagctcgcttgcagctgcagaagtcacagtacctacagctggggccgtcacggggccaatactacggggggtccctccccaacgtgaatcagatcgggagcggtacaatggacctgccatttcaaacgccctttcagagctcaggtctggatacatcacgcactaccaggcaccacggactcgttgacagggtgtacagggaacgtgggcgcctggggtctcctcatcggagacccttaagtgtcgacaagcatggccggcaggctgattcttgcccatacggcactatgtatctttcacctccggccgacacctcttggagacggactaatagcgactcagccctgcatcagagcacaatgacacctacgcagcctgagtcgttttcttccggcagccaggacgttcatcaaaaaagggtcctacttctcactgtgcccggcatggaggagactaccagtgaggctgataagaatttgtcaaagcaggcctgggacactaagaaaaccggctcacgtcccaagagctgcgaggtcccaggaattaatatattcccaagcgccgatcaagagaacactacagccttgattccagctacacataatacaggtggctcccttcctgacctaactaacattcacttcccctcacctctgccaacacccttagaccctgaggaacccacattccccgctctgtcttcttcttcaagcacaggcaacctggccgccaacctaactcaccttggcattggcggcgctgggcaaggcatgtctacacctggctcttccccccaacataggcccgccggtgtgagccccctcagcctgtcaacagaggctcgcaggcaacaggcctccccgaccttgagtcctttgtccccaattacccaagccgtggccatggatgctctcagtctcgaacagcagttgccatacgcgtttttcacccaagccggaagccagcagcctccacctcagccacagcctcccccaccaccaccacccgcttcccagcaacccccccctccccccccgccccaagcccccgtgcgcctcccacctggcggtccgcttcttccttccgcgtccctcacaagaggcccacaacccccccctctggccgttaccgtccctagctctcttcctcagtctccacccgagaaccctggccaaccgagcatggggatcgacatagcgagtgcccccgctctgcagcagtacaggacctccgcaggttcccccgccaatcaatcccccacctcccctgtgtcgaaccagggcttttcaccagggtcctcaccacaacatacatcaactttgggttcagtcttcggggacgcttactacgagcagcaaatggccgctcgccaggccaatgctctgtcccatcagctggagcagttcaacatgatggaaaacgcaattagttcatccagcctttactcacctggctcaaccctgaactacagtcaggcggcaatgatgggtctgactgggagtcacggcagcctgcctgactctcagcagctggggtacgccagccatagcgggataccaaacattattctcaccgtgactggagagtcaccacctagtctcagcaaggaactaacgagttctctggccggagtgggcgacgtcagtttcgatagtgacagtcagttccccctggacgagttgaagattgatcctctaaccctcgacgggttgcacatgctgaatgacccagacatggtcctggcagatccagccactgaggacacatttcgcatggacaggttatag

SEQ ID NO: 185890 - DNA, 1905 bp, Artificial Sequence
  derived and/or modified sequence
atggccaccagcaacaaccccaggaagttcagcgagaagatcgccctgcacaaccagaagcaggccgaggagacagctgcctttgaggaggtgatgaaggacctgagcctgacccgggccgcccggctgcagctgcagaagagccagtacctgcagctgggccccagccggggccagtactatggaggcagcctgcccaacgtgaaccagatcggcagcggcaccatggacctgcccttccagacccccttccagagcagcggcctggacaccagcaggaccaccaggcaccacggcctggtggacagagtgtaccgggagcggggccgcctgggcagcccccaccggcggcccctgtctgtggacaagcacggccggcaggccgacagctgcccctacggcaccatgtacctgagccccccagctgacacctcctggaggaggaccaacagcgacagcgccctgcaccagagcaccatgacccccacccagcctgagagcttcagcagcggcagccaggatgtgcaccagaagagggtgctgctgctgactgtgcccggcatggaggagaccaccagcgaggccgacaagaacctgagcaagcaggcctgggacaccaagaagacaggcagccggcccaagagctgtgaggtgcccggcatcaacatcttccccagcgctgaccaggagaacaccacagccctgatcccagccacccacaacacaggaggcagcctgcctgacctgaccaacatccacttccccagccccctgcccacccccctggaccctgaggagcccaccttccctgccctgagcagcagcagcagcacaggcaacctggccgccaacctgacccacctgggcatcggcggggccggccagggcatgagcaccccaggcagcagcccccagcacaggcctgctggggtgagccccctgagcctgagcacagaggcccggcggcagcaggccagccccaccctgagccccctgagccccatcacccaggccgtggccatggatgccctgagcctggagcagcagctgccctatgccttcttcacccaggccggcagccagcagcccccaccccagccccagcccccacctcctcctcctccagccagccagcagcccccacctcctcctccaccccaggcccctgtgcggctgcccccaggcggccccctgctgcccagcgccagcctgacccggggcccccagcccccacccctggccgtgacagtgcccagcagcctgccccagagccccccagaaaatcctggccagcccagcatgggcatcgacatcgccagcgccccagccctgcagcagtaccgcaccagcgctggcagccctgccaaccagagccccaccagccctgtgagcaaccagggcttcagccctggcagcagcccccagcacaccagcaccctgggctctgtgtttggagatgcctactatgagcagcagatggccgcccggcaggccaatgccctgagccaccagctggagcagttcaacatgatggagaatgccatcagcagcagcagcctgtacagccctggcagcaccctgaactacagccaggccgccatgatgggcctgaccggcagccacggcagcctgcctgacagccagcagctgggctacgccagccacagcggcatccccaacatcatcctgactgtgactggagagagcccccccagcctgagcaaggagctgaccagcagcctggccggcgtgggagatgtgtcctttgacagcgacagccagttccccctggatgagctgaagattgaccccctgaccctggatggcctgcacatgctgaatgaccctgacatggtgctggccgaccctgccacagaggacaccttcaggatggaccggctgtag

SEQ ID NO: 185891 - DNA, 1905 bp, Artificial Sequence
  derived and/or modified sequence
atggccaccagcaacaacccccggaagttcagcgagaagatcgccctccataaccagaagcaggcagaagaaaccgctgcttttgaggaggtgatgaaggatttatctttgacgcgtgcggcgcgattacaactccagaagtcccaatatctccaacttgggccaagcagaggccagtactacggggggtcccttcctaacgtgaatcagattggttcaggaaccatggacctccctttccaaacccccttccaaagttctggactcgacaccagccggacaactagacatcacggactggtggaccgcgtgtaccgagagagaggccggctcggctctccccatcgccgccccctctctgtggataagcacggtagacaggcagattcctgcccttatggcacaatgtacctgagcccgcccgctgacacatcttggcggcgtactaacagcgacagcgccttgcaccaatccacaatgacacccacccagccggaaagctttagcagtgggtctcaggatgtacaccagaaacgcgtgctcctgcttaccgtccccggcatggaggaaactacgtcagaagctgacaagaatctaagcaaacaagcctgggacaccaaaaaaactggatcacgtcctaagtcctgcgaagtgccaggaatcaatatcttcccctcagccgatcaagaaaataccaccgctctcatccccgctacacataataccggcggttctctgcctgatctgacgaacattcacttccctagccccctgcctactcccctggaccccgaggaacccactttcccagcactaagctcgagttcttccaccggaaacctcgccgcaaacctcacccatttaggcattggaggagcgggacaggggatgtcgacgccgggatcatctccacagcatcgcccagccggcgtctcccctctcagcctgtcaactgaagctaggcggcaacaggctagccctacactgagtccattgtcaccaatcactcaggcggtagcaatggacgcactgtcactcgaacaacagctgccttatgctttcttcactcaagcgggctcccaacagccgcccccacagccgcaacctcccccccccccccctcctgccagccagcaacctccacccccacccccaccccaggcaccggttaggcttccacccggagggccattgctcccaagcgctagccttactagagggccacagccgccccctttagccgtgaccgtgccatcatcgctcccgcagtcccccccagaaaaccccggtcagccctctatgggcatagatattgccagcgctccagccctgcagcaataccggacttcggcagggagccctgcaaaccagagtccgacatcccccgtctccaaccagggcttttcaccaggctcttccccccagcatacaagcacactgggatcagtatttggcgacgcctactacgaacagcagatggcagcccggcaggctaacgctctcagccatcagctggaacagtttaatatgatggagaacgctattagcagtagttcactgtatagccctggaagcactctgaactactcccaagcagcgatgatgggcttaactggtagtcatggctccctgcctgacagtcagcagctgggttatgcatctcacagtgggatcccaaatattattctcacagtgaccggcgagtctccacctagcctttcgaaggagctgacctcctcactggccggcgtcggcgatgtgtctttcgactctgatagccagttcccgctcgatgaactgaaaatcgatcccctcaccctggacggcctgcacatgctcaacgaccccgatatggttctggccgatcccgctaccgaggacaccttcagaatggaccgcctatag

SEQ ID NO: 185892 - DNA, 1905 bp, Artificial Sequence
  derived and/or modified sequence
atggccacctccaataaccctagaaaattctctgagaaaatagctcttcataaccaaaaacaggcggaagagacagcggcatttgaggaggtcatgaaggatctatctctcaccagagcagcccgattacaattacaaaagtctcagtatctgcagctagggcctagtaggggccagtactacggcggatccttacccaacgtcaatcagataggatcaggaaccatggatctgccttttcagacaccgtttcagagctcaggcctagatacttctcgcactacccgacaccatggtctcgtggaccgagtttatcgggagcggggtagattgggcagcccgcaccgtcggccactcagcgtcgataagcatggtagacaggcagattcctgcccttacggcactatgtacctgagtccccctgctgacacttcctggaggagaactaattccgattccgctctgcaccagagcacaatgacaccaacccaacccgagtccttttcctcaggatcccaagatgtgcaccagaagcgcgtgctgctgctaactgtgcccggaatggaagaaacaacttccgaagctgataaaaacctctccaagcaggcgtgggataccaagaaaaccggatcgcggccaaaaagctgcgaggtcccaggtataaatattttcccatccgccgatcaggaaaacacaacagctctgattccggctacacacaacacaggaggatccctccctgacctcacgaatatccactttccgtctcctctccctacaccgctggacccggaggagccaacattcccagcattgagttctagtagctctactggcaatctggcagctaatctaacccatctgggcataggtggcgctggacagggaatgtccacaccgggatcatccccacaacatcgccctgccggtgtatccccattgtcgctgtcgacagaagctagaagacagcaggcgtccccaaccctctcacccctgtcacctattacccaggccgtcgctatggatgccctcagccttgagcagcaactgccatatgctttctttacacaggccggttctcagcagccgccacctcaacctcagccaccacctcccccaccaccagcttcacagcaaccaccacccccacctccccctcaagcccctgtccgacttcctcctggcggacccttactccctagcgccagtctcacgagaggcccacaacctcccccattggccgtcacggttccaagcagcctaccgcagtcaccccctgagaacccagggcagccctcgatgggcatcgatattgcatctgcacctgctctgcaacaatataggacctccgctggcagccccgcaaatcagtctccaacctctcccgtgtctaaccaaggatttagccctggctcaagcccacagcatacatcaacgctaggcagtgtcttcggggatgcctactatgagcagcagatggcagcacgccaagctaacgccctatcgcaccagctggaacaattcaacatgatggaaaacgccatttctagctcctccttatacagccctggttccacgcttaactattctcaggccgcaatgatgggtctgacaggcagccacggttcactccctgactctcagcaattaggttacgcaagccattcaggaatacccaatatcattttgacagtcaccggagagtcgcctccatcgctgtccaaagaattgacctcttcactggctggggtgggggacgttagttttgattcggactcgcagttcccgcttgatgaattaaagatcgaccctctcaccctagacggattacacatgctcaatgacccagacatggtgcttgcagaccctgcgaccgaagacaccttcaggatggatcgcctttag

SEQ ID NO: 185893 - DNA, 6943 bp, Artificial Sequence
  derived and/or modified sequence
ccagccggcgcttgcgcggtggcacgggcgagtgggggggcgaggaggtggaggaggaggaggaggaggaggaggtggcggcgagaagatggcgacttcgaacaatccgcggaaattcagcgagaagatcgcgctgcacaatcagaagcaggcggaggagacggcggccttcgaggaggtcatgaaggacctgagcctgacgcgggccgcgcggctccagctccagaaatcccagtacctgcaactgggccccagccgaggccagtactatggcgggtccctgcccaacgtgaaccagatcgggagtggcaccatggacctgcccttccagacccccttccaatcctcgggcctggacaccagccggaccacccggcaccatgggctggtggacagggtgtaccgggagcgtggccggctcggctccccacaccgccggcccctgtcagtggacaaacacggacggcaggccgacagctgcccctatggcaccatgtacctctcaccacccgcggacaccagctggagaaggaccaattctgactccgccctgcaccagagcacaatgacgcccacgcagccagaatcctttagcagtgggtcccaggacgtgcaccagaaaagagtcttactgttaacagtcccaggaatggaagagaccacatcagaggcagacaaaaacctttccaagcaagcatgggacaccaagaagacggggtccaggcccaagtcctgtgaggtccccggaatcaacatcttcccgtctgccgaccaggaaaacactacagccctgatccccgccacccacaacacaggggggtccctgcccgacctgaccaacatccacttcccctccccgctcccgaccccgctggaccccgaggagcccaccttccctgcactgagcagctccagcagcaccggcaacctcgcggccaacctgacgcacctgggcatcggtggcgccggccagggaatgagcacacctggctcctctccacagcaccgcccagctggcgtcagccccctgtccctgagcacagaggcaaggcgtcagcaggcatcgcccaccctgtccccgctgtcacccatcactcaggctgtagccatggacgccctgtctctggagcagcagctgccctacgccttcttcacccaggcgggctcccagcagccaccgccgcagccccagcccccgccgcctcctccacccgcgtcccagcagccaccacccccgccacccccacaggcgcccgtccgcctgccccctggtggccccctgttgcccagcgccagcctgactcgtgggccacagccgcccccgcttgcagtcacggtaccgtcctctctcccccagtcccccccagagaaccctggccagccatcgatggggatcgacatcgcctcggcgccggctctgcagcagtaccgcactagcgccggctccccggccaaccagtctcccacctcgccagtctccaatcaaggcttctccccagggagctccccgcaacacacttccaccctgggcagcgtgtttggggacgcgtactatgagcagcagatggcggccaggcaggccaatgctctgtcccaccagctggagcagttcaacatgatggagaacgccatcagctccagcagcctgtacagcccgggctccacactcaactactcgcaggcggccatgatgggcctcacgggcagccacgggagcctgccggactcgcagcaactgggatacgccagccacagtggcatccccaacatcatcctcacagtgacaggagagtccccccccagcctctctaaagaactgaccagctctctggccggggtcggcgacgtcagcttcgactccgacagccagtttcccctggacgaactcaagatcgaccccctgaccctcgacggactgcacatgctcaacgaccccgacatggttctggccgacccagccaccgaggacaccttccggatggaccgcctgtgagcgggcacgccggcaccctgccgctcagccgtcccgacggcgcctccccagcccggggacggccgtgctccgtccctcgccaacggccgagcttgtgattctgagcttgcaatgccgccaagcgccccccgccagcccgcccccggttgtccacctcccgcgaagcccaatcgcgaggccgcgagccgggccgtccacccacccgcccgcccagggctgggctgggatcggaggccgtgagcctcccgcccctgcagaccctccctgcactggctccctcgcccccagccccggggcctgagccgtcccctgtaagatgcgggaagtgtcagctcccggcgtggcgggcaggctcaggggaggggcgcgcatggtccgccagggctgtgggccgtggcgcattttccgactgtttgtccagctctcactgccttccttggttcccggtcccccagcccatccgccatccccagcccgtggtcaggtagagagtgagccccacgccgccccagggaggaggcgccagagcgcggggcagacgcaaagtgaaataaacactattttgacggctgtcttttatatttctgagcacacacagagccctggcgtccaccggggcaggcgcaaagtggacagagcatgcagggcggcggacccccccacgaccctcctcgccctgtctccatcccctcgaagccctgcctcaccgcaggcaggcccatcggtggccacctttgccgggaagtgaccggaaggccccgtgaggggtcgaacgcggaggcaggggttacctcttggggctttacaatccgtggcccctcctgtcctgcactgtggtcaccggtcctgtcatagatgctgttaatttaaggtacaggcagaggtggccaggggagtttcattgtggtttttttttccttttagtttctagttacattttggttgtagatgactcgcttaatcttttaagccaacacttgcctgagagcatgtttttatttcagaaatccaactttacctattttttaagctaactggaaatggaggccatgcgccccaaagcagcccgccacccacctgagtgtaagaagtgagtccggcttttgggtttcaccccaagttatctcaaaacaaaagggctggtcaggctgggcagggccttgtcaggagctcacggtaggcagaggtgcctctgccagggccacagaacagacttccgggaaggggccttggcttttattgagggtctctcaaagacccagcctgccagcctctcccagaggtgcctgctagtccttagagtgtgtgtgtgaagatgccatgaccagtggcagctgagacctctctgccccaagagtgtgggggactggcagggagcgagggtccccgagacgaggaccacggtcctccctgagaacctgggtggaactggcatttcatcccctctccaccctaccctctggctcctagcccacaccccctctcttgggcagcgtggtctgctggctgccccttcttggcagctcagggtcgtggcaggtggacttggagacacacagcagtgtgtgttttagtggcaggtttcaggagcacctctaagaccagggtgacagggtacttgggagctgtcctggaccctccccataccacgggccctgcaagggaggcatcagggctggctttgttttctgctgttcttggaataggaactgctgttctgatccccccaaaactgcattgcggctctcgctcgctcctgcctgccgggacagcgccttctgctgagtccgtttatttgtagtgtcatggctgctgctttcactggggtcctgggcaccctggcttctgtcctcagagctgggtttgatcctagcaaccatcccttcctctctttgcccggcaatgcctttggcatgtgtctgagcagccaagtggccactcataggagaaggctccctggtcacgttgctcctgctgccgtcttgttccaaggtgcgggggggacactgttggtctgtccaggtcaaggtccctttctcttaccatgacagaggctgggggcagacagcggggacttttttttttttttaagaaaaactacatgtacataggagagtttcattaccattagacttgtatgtaggacttaaaaaaaaatggccttaataaaattacaagcaacccgcctggatgcggttttcaaaagaaggcattgaggaccatgctaggaaacctcataccccatccgtccaacctccggcgggcgccactgcttgtcctctggtcttcggtgtggacagataggagaggagggatgcccacctcggagcatcccaggcccgtggcccattttcagcatcctgaagccagattcacagtgacattgtgttaacgtgacgaccttggtccattatggagttctttttccaataagaacctggtggaccgaggtccgagcttgccagggacagtggggcccacgcgagtacccggggcccagccaggagccagcagccaggcgtccctgtgttccagaaggattcacgcccctcctggacctgggcgggcctcccagggggtctgtatcacggccttttgtgtgtgcgtacgtgtggtttttttaaatatcactactacatattcttgaattgccaagactttctgaaacaagacagcttaagggaatcagccttttgctttgtgatgtgaaaatactgtgatttgacgagccgcttcctgaggggcaggcccacgtggggaggttgcgccgtgtacatagacccgccgtctgtgtccttggtcaggcccggatgcttggtctacactgggttagaggctgctctccccacgcacccatgtgctcatggcttctgcagaccctctgctgggtacatcggtcccctacggcgaagttcagccagggctctccctcctgagagcatggcgtccccaccttcctgtttcgccgacgtcactacccagggtggcaagtcttgcaggcagagggtgtagcccaagttcagcctctctctgtgtcctccagagaagagggttctttgccctcatcagggccctgcttgtgggttttcggctctggggaggagagtgttggcatcagtgtgtttggcctgatttcttcagggggccaagctcccgggaggacccctagccaggagggccccccatgtccatccatccctcctgctggggcttggatgtcaggcttgggggctgtgagctgggacctcgcctgagcccggtcaggtgggacaggagcctgccagaagcccatggggggccaggccgggtggcttctattttatttttttagagatggggtcttgctgtgttgcccaggctggtctcggactcctgggctcaagcagtcctccctcctcggcctcccaaagttctggggctacaggtgtgagccacttctgcccagcatcccaggcctgaacagccttggcaggacccgtccctagagggggctctggtgcctcccttaggtgggccttgagctggtttttaaccaaacatccttccaaactcgggctgcgacctgcttcctgagttttctgtatttccaaggagccctccgaccagggagaggctggtggagtaaggtccagcggtattcgggggtcctctgtcacctcgccctgaaaacagcagctcccatcaccttcactgggtcccgatggagccgtctcagaggccgaggggccctctgtgtgggggtgggacgcaggggctctcagagcaagggccacaaagccgatggcacagatgtgcccctgggcctggcccgtcacccacatgtggtgccctgggccagggcgtgcgggcgccagagccttccctacacagcctaagagcaggggcaagactcggcccctcactcaccctgggaggcctgcctgggctacatggacacctgggtctctttctacccccattcaccatggaccaggggcctccatttcctgggggctcttgcggcatgtgatttgggggtccctgggacattctcccgtcagctccacctgagccaagtgtcctgttccctgcggcccttggccttccagggtcctggccaggcaggggtcaggcaccccatactcttccgtgtggcacaggtgtccacccacccccactggccacagacaccattctccccctgggagcaggaggtggagtaagttgtacccccaggcctgggtgctggggagttcctgagggcatgggtggggcaggagtgagtgcctcgtgatcccagcctcagtttctctcttgtcactttctcaaacctgcaggtctcagggccccgggctcctcctgggcaggatggggggcaggggctgggccttggggtggtgctggctctgatgattccagagcctgtatccaccttctgggctcctggccagcaccccacccccaggagccagggacaggtggcatgtgttggggtcgggggatggcccccatctcgaagtgttctggaatttgggggcaacccttgcccagcccagccatcaagaacttctgatctcctgcccaccaggaggggacttagccatggacttggccagtaggcctggggagggagggctttggcagccaaagtccactggccctgccgtgcccctgagtaggaaactgtcccctaggggctgggtggccccactgatatatgcaaacccgccggtccgagccctgttcctgcctgtgctcctctgtgcccaggctggctctcccccaaccctagcatgtatactctgccacggacgtcccgtgggccatgattgtgggcggccgcagcgggcgggggcaggcggctcagggcacactcggccgtccctgccccatcctctggcagggctgcttttgtctttgtacctttgcatcctttgtaatgaaacgtaataaaaatccaacgttttcgtc

SEQ ID NO: 185894 - DNA, 1905 bp, Artificial Sequence
  derived and/or modified sequence
atggccaccagcaacaaccccagaaagttcagcgagaagatcgccctgcacaaccagaagcaggccgaggagaccgccgccttcgaggaggtgatgaaggacctgagcctgaccagagccgccagactgcagctgcagaagagccagtacctgcagctgggccccagcagaggccagtactacggcggcagcctgcccaacgtgaaccagatcggcagcggcaccatggacctgcccttccagacccccttccagagcagcggcctggacaccagcagaaccaccagacaccacggcctggtggacagagtgtacagagagagaggcagactgggcagcccccacagaagacccctgagcgtggacaagcacggcagacaggccgacagctgcccctacggcaccatgtacctgagcccccccgccgacaccagctggagaagaaccaacagcgacagcgccctgcaccagagcaccatgacccccacccagcccgagagcttcagcagcggcagccaggacgtgcaccagaagagagtgctgctgctgaccgtgcccggcatggaggagaccaccagcgaggccgacaagaacctgagcaagcaggcctgggacaccaagaagaccggcagcagacccaagagctgcgaggtgcccggcatcaacatcttccccagcgccgaccaggagaacaccaccgccctgatccccgccacccacaacaccggcggcagcctgcccgacctgaccaacatccacttccccagccccctgcccacccccctggaccccgaggagcccaccttccccgccctgagcagcagcagcagcaccggcaacctggccgccaacctgacccacctgggcatcggcggcgccggccagggcatgagcacccccggcagcagcccccagcacagacccgccggcgtgagccccctgagcctgagcaccgaggccagaagacagcaggccagccccaccctgagccccctgagccccatcacccaggccgtggccatggacgccctgagcctggagcagcagctgccctacgccttcttcacccaggccggcagccagcagccccccccccagccccagcccccccccccccccccccccgccagccagcagccccccccccccccccccccccaggcccccgtgagactgccccccggcggccccctgctgcccagcgccagcctgaccagaggcccccagcccccccccctggccgtgaccgtgcccagcagcctgccccagagcccccccgagaaccccggccagcccagcatgggcatcgacatcgccagcgcccccgccctgcagcagtacagaaccagcgccggcagccccgccaaccagagccccaccagccccgtgagcaaccagggcttcagccccggcagcagcccccagcacaccagcaccctgggcagcgtgttcggcgacgcctactacgagcagcagatggccgccagacaggccaacgccctgagccaccagctggagcagttcaacatgatggagaacgccatcagcagcagcagcctgtacagccccggcagcaccctgaactacagccaggccgccatgatgggcctgaccggcagccacggcagcctgcccgacagccagcagctgggctacgccagccacagcggcatccccaacatcatcctgaccgtgaccggcgagagcccccccagcctgagcaaggagctgaccagcagcctggccggcgtgggcgacgtgagcttcgacagcgacagccagttccccctggacgagctgaagatcgaccccctgaccctggacggcctgcacatgctgaacgaccccgacatggtgctggccgaccccgccaccgaggacaccttcagaatggacagactgtag

SEQ ID NO: 185895 - protein, 627 aa, Artificial Sequence
  derived and/or modified sequence
MEGLAGYVYKAASEGKVLTLAALLLNRSESDIRYLLGYVSQQGGQRSTPLIIAARNGHAKVVRLLLEHYRVQTQQTGTVRFDGYVIDGATALWCAAGAGHFEVVKLLVSHGANVNHTTVTNSTPLRAACFDGRLDIVKYLVENNANISIANKYDNTCLMIAAYKGHTDVVRYLLEQRADPNAKAHCGATALHFAAEAGHIDIVKELIKWRAAIVVNGHGMTPLKVAAESCKADVVELLLSHADCDRRSRIEALELLGASFANDRENYDIIKTYHYLYLAMLERFQDGDNILEKEVLPPIHAYGNRTECRNPQELESIRQDRDALHMEGLIVRERILGADNIDVSHPIIYRGAVYADNMEFEQCIKLWLHALHLRQKGNRNTHKDLLRFAQVFSQMIHLNETVKAPDIECVLRCSVLEIEQSMNRVKNISDADVHNAMDNYECNLYTFLYLVCISTKTQCSEEDQCKINKQIYNLIHLDPRTREGFTLLHLAVNSNTPVDDFHTNDVCSFPNALVTKLLLDCGAEVNAVDNEGNSALHIIVQYNRPISDFLTLHSIIISLVEAGAHTDMTNKQNKTPLDKSTTGVSEILLKTQMKMSLKCLAARAVRANDINYQDQIPRTLEEFVGFH

SEQ ID NO: 185896 - DNA, 1884 bp, Artificial Sequence
  derived and/or modified sequence
atggaggggctggccgggtacgtctataaggctgcctctgaaggcaaggtgctgactttggccgcgctgcttctgaatcgctcagaatcagatattcgctatctccttggctacgtctcacagcaagggggtcagcggtcaaccccactgatcatagccgcacggaacggacacgccaaagtcgtgcgactcctgctcgagcactaccgggtccagactcagcagacaggcactgtccgctttgacggttacgtcattgacggggccaccgcactctggtgtgccgcgggcgcggggcatttcgaggtagtcaaactgctggtgtcgcatggggctaacgttaatcacaccacagtcacgaattcaaccccactgcgcgcagcttgctttgacgggagactggatattgtgaaatacttggtggaaaataatgccaatattagtattgctaataaatacgacaacacatgcctgatgatcgccgcctataagggccatactgatgtggtgcggtaccttcttgagcagcgcgccgatcctaacgcgaaagcccattgtggggccaccgccctccatttcgctgccgaggctgggcatattgacatagtcaaagaactgatcaaatggcgcgctgctattgtcgtcaatggtcatggcatgactccccttaaggttgccgctgagagttgcaaggccgatgttgtggaactgctactcagccacgccgattgtgaccgtaggagcagaatagaagctttagagcttctgggggcgtcattcgctaacgatcgagagaactatgatattatcaagacttaccactatttgtatcttgctatgttagagaggttccaggatggggataacatcctcgagaaggaggtattgcctccgattcacgcctacgggaatcgaaccgaatgccgcaacccacaagagctcgaatcaattcgacaggaccgcgacgctctgcacatggagggcctcattgttagagagcggattctgggagctgataatattgacgtgtcccaccctataatctatagaggcgcagtatatgcggacaatatggagttcgaacaatgcataaaactctggctccacgcgctgcacctgcgccagaaaggtaatcggaacacgcacaaggacttgttgcgatttgcccaagttttttctcaaatgatccacctcaatgaaacagtgaaggcacccgacattgaatgtgttctgcggtgcagtgtgctggaaatcgaacagagcatgaatcgggtgaagaatattagtgatgctgacgtgcacaatgccatggacaactacgaatgtaatctctatacctttctgtatctcgtctgcatctccacaaaaacacagtgttccgaggaagatcagtgtaaaatcaacaagcagatctataatctcattcacctggacccccgaacacgggaggggtttactctgctccacctcgccgtaaactccaacacccccgtcgatgactttcacacgaacgatgtgtgctctttccccaacgctctcgtgaccaagctcctgctggactgcggagctgaggtgaatgcggttgataacgagggtaattctgccctccacatcattgtgcaatacaataggcctattagcgactttttgacacttcatagcataatcatctcactggttgaagccggggcgcatacggacatgactaataagcaaaataagacgccactggataaatcgaccactggcgtgtcggagatactgctgaaaacccaaatgaaaatgagtttgaagtgtttggcagcaagggctgtgcgagcaaatgatatcaattaccaggaccagatccctagaaccctcgaagagtttgtgggatttcactag

SEQ ID NO: 185897 - DNA, 1884 bp, Artificial Sequence
  derived and/or modified sequence
atggagggcctggccggctacgtgtacaaggccgccagcgagggcaaggtgctgaccctggccgccctgctgctgaacagaagtgaaagtgacatccgctacctgctgggctacgtgtcccagcagggcggccagaggagcacccccctcatcatcgccgccagaaatggccacgccaaggtggtgcggctgctgctggagcactacagagtgcagacccagcagacaggcaccgtgcgctttgatggctacgtgattgatggagccacagccctgtggtgtgccgccggggccggccactttgaggtggtgaagctgctggtgagccacggggccaacgtgaaccacaccaccgtgaccaacagcacccccctgcgggccgcctgctttgatggccgcctggacatcgtgaagtacctggtggagaacaatgccaacatcagcatcgccaacaagtatgacaacacctgcctgatgattgctgcctacaagggccacacagatgtggtgcgctacctgctggagcagagagctgaccccaatgccaaggcccactgtggggccacagccctgcactttgctgctgaggccggccacatcgacatcgtgaaggagctgatcaagtggagggctgccatcgtggtgaatggccacggcatgacccccctgaaggtggccgctgagagctgcaaggcagatgtggtggagctgctgctgagccacgccgactgtgaccggcgcagccgcatcgaggccctggagctgctgggcgccagctttgccaatgacagagaaaattatgacatcatcaagacctaccactacctgtacctggccatgctggagcgcttccaggatggagacaacatcctggagaaggaggtgctgccccccatccacgcctacggcaacagaacagaatgtagaaacccccaggagctggagagcatccggcaggacagagatgccctgcacatggagggcctcatcgtgcgggagcgcatcctgggcgctgacaacattgatgtgagccaccccatcatctacagaggagctgtgtatgctgacaacatggagtttgagcagtgcatcaagctgtggctgcacgccctgcacctgcggcagaagggcaacagaaacacccacaaggacctgctgcgctttgcccaggtgttcagccagatgatccacctgaatgaaacagtgaaggccccagacattgaatgtgtgctgcgctgcagcgtgctggagattgagcagagcatgaacagagtgaagaacatcagtgatgctgatgtgcacaatgccatggacaactatgagtgcaacctgtacaccttcctgtacctggtgtgcatcagcaccaagacccagtgcagcgaggaggaccagtgcaagatcaacaagcagatctacaacctgatccacctggaccccaggacccgggagggcttcaccctgctgcacctggccgtgaacagcaacacccctgtggatgacttccacaccaatgatgtgtgcagcttccccaatgccctggtgaccaagctgctgctggactgtggggctgaggtgaatgctgtggacaatgaaggcaacagcgccctgcacatcatcgtgcagtacaaccggcccatcagtgacttcctgaccctgcacagcatcatcatcagcctggtggaggccggggcccacacagacatgaccaacaagcagaacaagacccccctggacaagagcaccaccggggtgtctgagatcctgctgaagacccagatgaagatgagcctgaagtgcctggccgcccgggctgtgcgggccaatgacatcaactaccaggaccagatccccaggaccctggaggagtttgtgggcttccactag

SEQ ID NO: 185898 - DNA, 1884 bp, Artificial Sequence
  derived and/or modified sequence
atggagggcctggccggctacgtgtacaaggccgccagcgagggcaaggtgcttaccctggcggctcttctgctgaacagaagcgaatcagatatccggtaccttcttggctacgtctcacagcagggcggtcaaagatccacacctttaatcatcgccgctagaaatggtcacgccaaagtcgtgaggctgttgttggagcactatcgcgtccagacccagcagaccggtactgtccgtttcgatggatacgttattgacggtgcaaccgctctttggtgtgcagcaggggccggccatttcgaagtggtgaagttgttggtttctcacggggccaacgtcaatcacaccaccgtcactaactccacacctctgcgggctgcttgtttcgatggcagactggacatcgttaagtacctggtagaaaacaacgccaacataagcatagccaacaagtacgacaatacctgcttgatgattgccgcatataaaggtcatactgacgtggtgaggtacctcctggaacagcgcgccgaccctaatgccaaggcacattgtggcgccacagcactccactttgccgcagaggccggtcatatcgacatcgtaaaggaattaatcaaatggcgggcggctatcgtggttaacggccatgggatgacacctctgaaggttgcggccgaaagctgcaaggcggacgtggtggaacttctgctgtctcatgcagactgcgatcgccgctccaggattgaagcactggaactgctcggcgcttcctttgctaacgaccgggaaaattatgacattatcaaaacctatcattacctctatctcgctatgctggaacgtttccaagacggggacaacatcctggagaaagaagtgcttcccccaatccatgcctacggaaatcgcacggagtgccggaatcctcaggagctggagagtattcgccaggatagggatgcattacatatggaaggcctgatcgtcagagagaggatcctgggtgccgacaacatcgatgtgtcacaccctattatttatcgcggagccgtgtatgctgataacatggagtttgagcagtgtatcaaactgtggctacatgccctgcatctgagacagaaggggaatagaaatactcacaaggatcttctgaggttcgcccaggtcttttcacaaatgattcatctgaatgaaaccgtaaaagctcctgatattgagtgtgtcctgcggtgctctgtgctggagatcgaacagtctatgaaccgggtcaagaacatcagtgacgccgacgtccataacgccatggacaactacgaatgcaacttgtatactttcctgtacctggtttgtatatccaccaagactcagtgctctgaggaagaccagtgcaagataaataaacaaatttataacttgatacacctggacccgcggaccagggagggcttcacactgctgcatctggcagtcaacagtaatacaccagtggatgactttcatacaaacgatgtatgctctttccctaatgctctggttaccaagctgttgctggactgtggagccgaggtgaatgccgtggacaacgagggtaactctgctttgcatataattgtccagtataatcgtcctatctcagactttctgactctacactccattatcattagcctggtggaggcgggcgcacatacagatatgacgaataagcagaacaagacacctctggacaaatcaacaacaggggtgtccgagatattactcaagacacagatgaagatgtctctgaaatgtcttgccgctcgggcggtcagggccaatgacataaactaccaggatcaaatacctcggaccctggaggagtttgtcgggttccactag

SEQ ID NO: 185899 - DNA, 1884 bp, Artificial Sequence
  derived and/or modified sequence
atggagggattggccggttacgtgtataaggcagcgtccgaaggaaaggtgctcactctcgctgcgttactgcttaaccgttcagagtccgatatccgctacctgttaggctacgtatctcagcaaggcggacaaaggagcactcctttgattattgccgctaggaacggccacgctaaagtggtgaggctgctacttgaacattaccgcgtgcagacccagcagaccggcaccgtaagattcgacggttatgtcattgacggtgccacagctctatggtgtgccgcaggtgcaggccactttgaggtggtgaaactgctggtgtctcacggggcaaatgtgaaccataccacagttactaactccacccctctgagggctgcttgcttcgatgggagactggacattgtaaaatacctagtcgagaacaatgctaatataagtatcgcaaacaaatatgataacacttgcctaatgattgccgcttataaaggacacaccgacgtggttcgttatcttctggaacagagggccgacccaaacgcgaaagcgcattgcggtgccactgccctgcacttcgcggctgaagcaggtcacatcgacatcgtcaaggagttaatcaagtggcgcgcagctatcgttgtcaacggacacggcatgacaccactgaaagtggcagcggagtcctgtaaagccgacgtggtcgagcttctgttgagccatgccgattgcgatagacgcagtcggatcgaggcactagagctgctgggcgcatccttcgctaacgacagagagaactatgacattatcaagacttatcactatctgtacttggccatgctggagcgctttcaggacggagacaatattctcgagaaggaagttcttccacccattcacgcttacgggaataggacagaatgccgcaatcctcaggagctagagagcatacggcaggaccgcgatgcactgcatatggaaggtctcatcgtccgggagaggatcctcggcgctgacaacattgacgtttcccacccaataatctacaggggggcagtatatgcagacaatatggagttcgagcagtgtatcaaactgtggctgcacgctctccatctacggcagaagggcaacaggaacactcacaaggatttgctcagattcgcccaggtgttctcgcagatgattcatcttaacgaaacagtaaaagctcccgatattgagtgcgttctgaggtgcagcgtgttggagatcgagcagtcaatgaatcgcgtgaaaaacatcagtgatgcggatgtccataatgcgatggacaactacgaatgtaacctgtacacatttctttatctcgtttgcatctccaccaaaacccagtgttctgaagaggatcagtgtaaaattaacaagcaaatttataaccttattcacctggaccctagaacccgggagggatttacactcctccaccttgctgttaactcgaacactcctgttgatgattttcacacaaacgatgtgtgctcctttcccaatgcccttgtcaccaagctgctcttggattgtggtgcagaagtgaacgcagtcgataatgagggaaactccgccctgcacattatagtacagtacaatagacccatatctgactttttaactctgcacagcataataataagtctggtcgaagccggtgcgcataccgacatgacgaacaaacagaacaaaacgccattggacaaaagcacgaccggtgtttccgaaattttgctgaaaacacagatgaaaatgtctctgaaatgtctggccgctagagctgtgagagccaacgatatcaactaccaagatcaaattccgaggactcttgaggaattcgtgggcttccactag

SEQ ID NO: 185900 - DNA, 7122 bp, Artificial Sequence
  derived and/or modified sequence
cgctcttgcgggagcgttccgcatcgccccgggggcccctacgcgaggatctccggggccgttggcagcgcctggcacttctgagctcggcggacgagagcctgcaggtttcctccagtcagggacggcgaagggcggaaagcgcaggaggaggcagtgttaggccttaggccgggtgggccgggtcaggagagacgcgcccatctttcgccatccggggtgcgcgaggtcctctcgggacccggccggcgacccgtagctcgggcacgcgcctgtcgcatcccgcaggaaggaggggtccggcctgaggcccggggcggcgtccgccatggagatcccctcggtccagggccggcgcctgggacctggcgggcggccctgaccgccttcctccctgcgcgggctgggtcgcggacgtgcccttcgcggcactcggcctcctctgcgtctccgccttccctgggccgcactgctgcctgggcgcggcggcggcgacggcgccctgttgaatgggctgtgagggcccaggtttaaagcgctggcgaacgcggcctccgggggcgcacggcagctgcagcggtggcgaccaaacgggtgttggagttggcggcggccatggagggcctggctggctatgtatacaaggcggccagcgagggcaaggtgctgactctggccgccttgcttctcaaccggtctgaaagcgacatccgctatctgcttggctatgtcagccagcagggagggcagcgctccacgcccctcatcatcgcagcccgcaatggacacgcaaaggtggtacgcttgctcttagaacattaccgggtgcagactcagcagactggcaccgtccgcttcgacgggtatgtcattgatggtgccactgctctttggtgtgcagctggagcaggacattttgaagttgttaaacttctagtcagccatggagccaacgtgaaccataccacagtaactaattcaacccccctgcgggcagcatgctttgatggcagactggacattgtgaaatacttggttgaaaataatgccaacatcagcattgccaacaaatatgacaacacctgcctaatgattgcggcatataagggacacactgatgtggtcagataccttttagaacaacgtgctgatcccaatgccaaagcacattgtggagccacagcattgcactttgcagctgaagctgggcacatagatattgtgaaagagctgataaaatggcgtgctgctatagtagtgaatggccatgggatgacgccattgaaagtagctgccgaaagctgtaaagctgatgtcgtagaactgttactctctcatgctgattgcgaccgaagaagtcggattgaagctttggaactcttgggtgcctcctttgcaaatgaccgtgagaactatgacatcataaagacataccactatctatatttagccatgttagagaggttccaagatggtgataacattctcgaaaaagaggttcttccaccaatccatgcttatgggaatagaactgaatgtagaaatcctcaggaactggagtccattcggcaagacagagatgctcttcatatggaaggccttatagttcgggaacggattttaggtgctgacaatattgatgtttctcatcccatcatttacagaggagctgtttatgcggataatatggaatttgagcagtgtatcaagttgtggcttcatgccctgcacctcagacaaaaaggtaacaggaacacccacaaggatcttcttcgatttgctcaagttttctcacaaatgatacatttgaatgaaactgtgaaggccccagacatagaatgtgttttgagatgcagtgttttggaaatagaacaaagtatgaacagagtgaaaaatatttcagatgctgatgtccacaatgctatggacaattatgaatgtaatctctatacctttctgtatttagtgtgcatctctaccaaaacacagtgcagcgaagaagatcagtgcaaaattaacaagcagatctacaacctgattcaccttgatcccagaactcgtgaaggtttcaccttgctgcatctggctgtcaattccaatactccagttgatgatttccacaccaatgacgtctgcagctttccaaatgcacttgtcacaaagctcctgctggactgtggtgctgaggtgaatgccgtggacaatgagggaaacagtgcccttcatattatcgttcagtacaacaggcccatcagtgattttttgaccttgcactccatcatcattagcctagttgaagccggagctcacactgacatgacgaataaacagaataagactccgctagacaaaagtacaactggggtatctgaaatactgcttaaaactcaaatgaagatgagtctcaagtgcctggctgcccgagcagttcgggctaatgacattaactaccaagaccagatccccagaactcttgaagagtttgttggatttcattaagtgactggatatgtaaagtcgtttaatgtggtgctaaaaagtaaaggacttttaatcacagacagtagaattatgtgttcataaattctgcttttctttccactacccttcctcccatcccatccttccttagttctgtatttgtttttcttgcctcatggtaattgatttcagacagactttaacaaaaccacattgttttggtgtaactataaggtatttgcatattggttacctatttgtctttcttttttttaaaggaacagatataaaatgttttgtttatgtaacaagggacatttataatttcaagttgataatgttttaaacagctgcttacaaaagtatttctgttaagcctatgtcagcatgttatccatgcagcagttttgaggattttatgaagaaaaagagctaaaaaggaacattaagaggaatgggatatccaggtgttctgcacatgccaaactgctgtagatagtttacactcttccattatttatacggagtgatgcagcacattttagcattcaggaggatttttaaaaaatagctgcagattaatctggaaaatgtgctaatttaataatagttacaaatttataaatttaaatccatttgaaattgttgcattatgctgggtagtatatacaaaatggttatcatcttaaaccaacttttcagagaatcttgatggactctgcctttaggcttgaattcttcaaagtctattttaatgaaatttatctaaattgcagcagtctatttgattcagctcatagacatgtaaaaattatgaatgctgttttcttatgaaacaaattgtcacagtgtagttatacattctatttttgtccccttttccctttttctcctgtatcttttaaaatttggaaactacttttccagaaggcattatttatgcctccctaataaggtattttacttatgacagatgaaaaggaaccaggatatgtttgaattttttcactttcttagtctgtgacaagaagtagaaatatcactagtgtggtataggaacttacatgttttttatgatgaaaataattctcaatgccacttgaaaggtaattgtgtctgagagctgcaaatttttcaaccacaaaatgtcacttattcctacaggctatacagaggtctttatggtttttttgttttgttttaatggcaacattgtaactgtcaaactaaaagggtattctgtgattatcttttaagcattacagaaattcaagtgaaagttatatgcttatttctattgatgttaaaaatgataatgaaagcaaaattagctgtatctgtaattttctctctagtgccaaatgaatgccttagctactcatagtgcatggtactgtaagtgaagacctgtagctttttttttttctttaatgaaaagcattataatgatgtagcagcatcagatataaacttaaaaaaaaaggtttcaattaacattttatatatggataatgctttgtaaagtgtaagagaaaggttgcagttggatcagtataaaacaatgaccaagccaaaatcagcaccctagggccttaaataaaatagagataccccacaaaatgaaatattttgaaggatgggaggggacagaaggggggactatcccccaaggatgcaagatactttttacagttgctatcattatactttgtcttcttgcttcagttaggaaggttttgatggtaaattctgtcatggtaatagatacctattttcctaacctgagattttacaaggaaggtttttaggttggcttaaatggaggtatttatttgagtgagccctaatttgaaaattaccagacttgatcctcctggtatgaatcaaggaaatactgtaccttgctcttagcaactctcagtggcctgaaagagaaaatgcacttcttcaaggtgagtgaatcatgctttttccacagttcagatcagaccctttatttttcaaactacaaggcctgcttattggacagtctaaggaatagctttgatacttggtattcagttggttccattattaatgtatattatttttatttaaacatcaaaacttaaaatatcagataatgttgcatgttttaaaaacacatttcatccctttggctacccaggaccagcactatttaagacactgcttatttataaaatgagaataatgattatatgtacatattcagacatcaaaatttaatgacattctattttgagaagggaagacaatgctgaagaaagtaaaactgttgattgaaatgctgacagggtggagaacgaatttgaagacagtggaataaactatgaactatgctaatggtaattagattttttgtttgtttagtatagtggtaaattgtgtagtatcttgctgagaatctaattctatcttgtaaaatcaatccaaatgtgtattgtgaaacacctgtataaaatcatttttgaaataagtgatctacatgcctgtttttttaaaatgtttttggtagaattgtttgaaaatatgtttagccagacccttccccaacttaatttttttttaaaaaaggaaaataggtaagaaaatgatagttctatatctcagccctctgtgaactctaggctgtctccattttgcagccactttggtcatttgatgtttactattggtatacttatgctttgaattgtaaatcttcattgatggtattacagattcaaccaaaacttctctgtcctgttcagtaattgttatataaatctggatgagctagggaggcccaggtggatgttttcattcgcaaatcatgagaaacttaagtgggttttatgcacttgatagagttggcaaaattgaactatgaagttaactatttaactcaaggaatgggcggcaaacccatcccctcgattgataaagaaggggaacatttttacattagaactgacactgaaaacatagctttttcagtccaccctggttgctctagtagcccacagcccaatcacgttaaggttctttgctgtgggaattttaaataaaccaaaccccaaagcagaccatctgtaagctttggtctgcttgtttctgagaagggttttatttcattatactaatagtggactaataattggtaattgtgagaacttaggtatgataacattgtttgaagtaaaatatgatttgggggcagcagctttctaaataccaactctgtttgacaaatgttttgaaaattaaaatttcaagtgagcaacaccctgttaagagttttcactatagttgaggcagctactttatgaataagaccactttgggttatttaagcagaagcgtttcttttttttttttggaatggggtgggatgaggagtgagttgccagacctttgattagtttgctggtttagaaacagccagtggctgaattagtgagtaaatgaatgaaagtataaaggacttgttttttatgatagattttctgtaagaatcttaaatgttccttttcaaattagatgtgttgatgcacacatgactattctgtttttctcactgactatataacattaaaaaggggttaaagaaaacaaaactctgccttttgtgctatgaaatatttttagtccagaggttttaagctgtgtgtccattcctactctgaaaatgcatagctttgttctggatgtcatctcttgaaagtagaaaactcctatgtgtttatcacattgcagggctttcttatgtatttctggcagacttgcccaaatctttagatgggctgggttatacagcatgccctcccccaaataagggatctgaaataaatactacactattgatagtggagatatattaatttttaaaactgtaaagtaaatgtggtctctaggtttgtggtgtgtacctttgtgttaatgtgtagggaagagacagtgacttgatggttatggggagtgtatcttgatgtgtgtataggggtaagtattgctaaattatttacagcttttattcagggtgagtcatgtgatgaatggcctaatcagaaaagtgaaggagcgaagatgcaagcttgccaaatgatgaaatgaacaagattttgtatctattttttatcaggtgttgtaaaatttgtgcatggctttttgttgttgttgcttagtaactggtagaggagaaaagatgaggaaagaaactcagctttcctcacagtcttttcaaaggtacacagttggggagtaaaatctgactggcctaatcgatggaaaagaccctgtccttttcaccccatcctgcaatcctccgtgcagaggaactacactgttgtattctagtaattcactgtgatttataacaaaccggtgatgtcattctattgtgcacttttgtcaaaccatttatgtgactttaataaacatagtaaacttgctgactgcaccagaggtccattagtgatttatatattgcatgacattttctatttgagtttgacatgtagagtcatttttagtttcatggcaattgacagtcctaataactcagctaatttgaaactaacaatcttgctgtgtaaaaggaaaaaatggtgtttgtgttcagtaaatgtttgaaaaaaacta

SEQ ID NO: 185901 - DNA, 1884 bp, Artificial Sequence
  derived and/or modified sequence
atggagggcctggccggctacgtgtacaaggccgccagcgagggcaaggtgctgaccctggccgccctgctgctgaacagaagcgagagcgacatcagatacctgctgggctacgtgagccagcagggcggccagagaagcacccccctgatcatcgccgccagaaacggccacgccaaggtggtgagactgctgctggagcactacagagtgcagacccagcagaccggcaccgtgagattcgacggctacgtgatcgacggcgccaccgccctgtggtgcgccgccggcgccggccacttcgaggtggtgaagctgctggtgagccacggcgccaacgtgaaccacaccaccgtgaccaacagcacccccctgagagccgcctgcttcgacggcagactggacatcgtgaagtacctggtggagaacaacgccaacatcagcatcgccaacaagtacgacaacacctgcctgatgatcgccgcctacaagggccacaccgacgtggtgagatacctgctggagcagagagccgaccccaacgccaaggcccactgcggcgccaccgccctgcacttcgccgccgaggccggccacatcgacatcgtgaaggagctgatcaagtggagagccgccatcgtggtgaacggccacggcatgacccccctgaaggtggccgccgagagctgcaaggccgacgtggtggagctgctgctgagccacgccgactgcgacagaagaagcagaatcgaggccctggagctgctgggcgccagcttcgccaacgacagagagaactacgacatcatcaagacctaccactacctgtacctggccatgctggagagattccaggacggcgacaacatcctggagaaggaggtgctgccccccatccacgcctacggcaacagaaccgagtgcagaaacccccaggagctggagagcatcagacaggacagagacgccctgcacatggagggcctgatcgtgagagagagaatcctgggcgccgacaacatcgacgtgagccaccccatcatctacagaggcgccgtgtacgccgacaacatggagttcgagcagtgcatcaagctgtggctgcacgccctgcacctgagacagaagggcaacagaaacacccacaaggacctgctgagattcgcccaggtgttcagccagatgatccacctgaacgagaccgtgaaggcccccgacatcgagtgcgtgctgagatgcagcgtgctggagatcgagcagagcatgaacagagtgaagaacatcagcgacgccgacgtgcacaacgccatggacaactacgagtgcaacctgtacaccttcctgtacctggtgtgcatcagcaccaagacccagtgcagcgaggaggaccagtgcaagatcaacaagcagatctacaacctgatccacctggaccccagaaccagagagggcttcaccctgctgcacctggccgtgaacagcaacacccccgtggacgacttccacaccaacgacgtgtgcagcttccccaacgccctggtgaccaagctgctgctggactgcggcgccgaggtgaacgccgtggacaacgagggcaacagcgccctgcacatcatcgtgcagtacaacagacccatcagcgacttcctgaccctgcacagcatcatcatcagcctggtggaggccggcgcccacaccgacatgaccaacaagcagaacaagacccccctggacaagagcaccaccggcgtgagcgagatcctgctgaagacccagatgaagatgagcctgaagtgcctggccgccagagccgtgagagccaacgacatcaactaccaggaccagatccccagaaccctggaggagttcgtgggcttccactag

SEQ ID NO: 185902 - protein, 794 aa, Artificial Sequence
  derived and/or modified sequence
MADAWEEIRRLAADFQRAQFAEATQRLSERNCIEIVNKLIAQKQLEVVHTLDGKEYITPAQISKEMRDELHVRGGRVNIVDLQQVINVDLIHIENRIGDIIKSEKHVQLVLGQLIDENYLDRLAEEVNDKLQESGQVTISELCKTYDLPGNFLTQALTQRLGRIISGHIDLDNRGVIFTEAFVARHKARIRGLFSAITRPTAVNSLISKYGFQEQLLYSVLEELVNSGRLRGTVVGGRQDKAVFVPDIYSRTQSTWVDSFFRQNGYLEFDALSRLGIPDAVSYIKKRYKTTQLLFLKAACVGQGLVDQVEASVEEAISSGTWVDIAPLLPTSLSVEDAAILLQQVMRAFSKQASTVVFSDTVVVSEKFINDCTELFRELMHQKAEKEMKNNPVHLITEEDLKQISTLESVSTSKKDKKDERRRKATEGSGSMRGGGGGNAREYKIKKVKKKGRKDDDSDDESQSSHTGKKKPEISFMFQDEIEDFLRKHIQDAPEEFISELAEYLIKPLNKTYLEVVRSVFMSSTTSASGTGRKRTIKDLQEEVSNLYNNIRLFEKGMKFFADDTQAALTKHLLKSVCTDITNLIFNFLASDLMMAVDDPAAITSEIRKKILSKLSEETKVALTKLHNSLNEKSIEDFISCLDSAAEACDIMVKRGDKKRERQILFQHRQALAEQLKVTEDPALILHLTSVLLFQFSTHSMLHAPGRCVPQIIAFLNSKIPEDQHALLVKYQGLVVKQLVSQSKKTGQGDYPLNNELDKEQEDVASTTRKELQELSSSIKDLVLKSRKSSVTEE

SEQ ID NO: 185903 - DNA, 2385 bp, Artificial Sequence
  derived and/or modified sequence
atggccgacgcctgggaggagatcagaagactggccgccgacttccagagagcccagttcgccgaggccacccagagactgagcgagagaaactgcatcgagatcgtgaacaagctgatcgcccagaagcagctggaggtggtgcacaccctggacggcaaggagtacatcacccccgcccagatcagcaaggagatgagagacgagctgcacgtgagaggcggcagagtgaacatcgtggacctgcagcaggtgatcaacgtggacctgatccacatcgagaacagaatcggcgacatcatcaagagcgagaagcacgtgcagctggtgctgggccagctgatcgacgagaactacctggacagactggccgaggaggtgaacgacaagctgcaggagagcggccaggtgaccatcagcgagctgtgcaagacctacgacctgcccggcaacttcctgacccaggccctgacccagagactgggcagaatcatcagcggccacatcgacctggacaacagaggcgtgatcttcaccgaggccttcgtggccagacacaaggccagaatcagaggcctgttcagcgccatcaccagacccaccgccgtgaacagcctgatcagcaagtacggcttccaggagcagctgctgtacagcgtgctggaggagctggtgaacagcggcagactgagaggcaccgtggtgggcggcagacaggacaaggccgtgttcgtgcccgacatctacagcagaacccagagcacctgggtggacagcttcttcagacagaacggctacctggagttcgacgccctgagcagactgggcatccccgacgccgtgagctacatcaagaagagatacaagaccacccagctgctgttcctgaaggccgcctgcgtgggccagggcctggtggaccaggtggaggccagcgtggaggaggccatcagcagcggcacctgggtggacatcgcccccctgctgcccaccagcctgagcgtggaggacgccgccatcctgctgcagcaggtgatgagagccttcagcaagcaggccagcaccgtggtgttcagcgacaccgtggtggtgagcgagaagttcatcaacgactgcaccgagctgttcagagagctgatgcaccagaaggccgagaaggagatgaagaacaaccccgtgcacctgatcaccgaggaggacctgaagcagatcagcaccctggagagcgtgagcaccagcaagaaggacaagaaggacgagagaagaagaaaggccaccgagggcagcggcagcatgagaggcggcggcggcggcaacgccagagagtacaagatcaagaaggtgaagaagaagggcagaaaggacgacgacagcgacgacgagagccagagcagccacaccggcaagaagaagcccgagatcagcttcatgttccaggacgagatcgaggacttcctgagaaagcacatccaggacgcccccgaggagttcatcagcgagctggccgagtacctgatcaagcccctgaacaagacctacctggaggtggtgagaagcgtgttcatgagcagcaccaccagcgccagcggcaccggcagaaagagaaccatcaaggacctgcaggaggaggtgagcaacctgtacaacaacatcagactgttcgagaagggcatgaagttcttcgccgacgacacccaggccgccctgaccaagcacctgctgaagagcgtgtgcaccgacatcaccaacctgatcttcaacttcctggccagcgacctgatgatggccgtggacgaccccgccgccatcaccagcgagatcagaaagaagatcctgagcaagctgagcgaggagaccaaggtggccctgaccaagctgcacaacagcctgaacgagaagagcatcgaggacttcatcagctgcctggacagcgccgccgaggcctgcgacatcatggtgaagagaggcgacaagaagagagagagacagatcctgttccagcacagacaggccctggccgagcagctgaaggtgaccgaggaccccgccctgatcctgcacctgaccagcgtgctgctgttccagttcagcacccacagcatgctgcacgcccccggcagatgcgtgccccagatcatcgccttcctgaacagcaagatccccgaggaccagcacgccctgctggtgaagtaccagggcctggtggtgaagcagctggtgagccagagcaagaagaccggccagggcgactaccccctgaacaacgagctggacaaggagcaggaggacgtggccagcaccaccagaaaggagctgcaggagctgagcagcagcatcaaggacctggtgctgaagagcagaaagagcagcgtgaccgaggagtag

SEQ ID NO: 185904 - DNA, 2385 bp, Artificial Sequence
  derived and/or modified sequence
atggctgacgcctgggaggagatcagaagactggcagccgactttcagcgggcacagtttgccgaggctactcaaaggctgtcagagagaaattgcatagaaatcgtcaataagctgattgcccagaagcaactggaagtcgtccatacccttgacggcaaggaatacatcactccagcacaaatatctaaggagatgcgcgacgaactccacgtgcgcggtggacgggtgaatatagtggacctccagcaggtgattaatgtcgatctgattcatattgagaatagaatcggagacataatcaaaagcgaaaaacatgtgcagctagtcctcggtcagctgatagacgagaactacctcgacaggcttgccgaagaagtgaacgataagctgcaggagtcggggcaagtaactatttctgagctatgcaagacatatgacttaccgggaaatttcctgacccaggcccttacccagcgcctcggacggatcatcagtggtcatatcgatctggataaccgcggagtgatcttcacggaggcattcgttgcaagacacaaggcgcgcatccgcggcctgttcagtgcgatcactaggccaactgcagtgaattctctgatttcaaagtacggtttccaggagcagttgctttattctgtgctcgaagaattagtcaacagcggtcgcctccgcggtacagttgttggggggaggcaggacaaggctgtctttgttccagacatctacagccggacccaaagtacctgggttgattctttctttcgccagaatggttacctcgagtttgacgctctaagccgtctgggtatccccgacgcagtgtcttatatcaagaagagatataagacaacgcagctgctgttcctgaaagctgcatgcgtgggacagggtctggtagatcaggtggaagcatctgtggaagaagcaatctcatccggaacctgggtggatatcgcaccactgctgcccacttcattgtcagtggaggacgcagccatcctgctgcagcaggtcatgagggcattcagtaaacaggcgtccactgtggttttcagcgacacggtcgtggttagtgaaaagtttatcaacgattgtaccgagctgttccgggagctgatgcaccagaaggccgaaaaggagatgaagaataacccagtccacctaattacagaggaggatctgaaacagatttcaacccttgagtccgtgtccacatctaaaaaggataaaaaagatgaaaggcgccggaaggctacagagggaagcgggagtatgagagggggggggggaggcaacgctagagagtacaagatcaagaaagtcaaaaaaaaggggagaaaagatgacgacagcgatgacgaatcacaatcctctcatacagggaagaaaaaaccggagatttcctttatgttccaagacgagattgaagactttttgaggaagcacatccaagatgcacctgaggagttcattagcgaactcgccgagtatttgattaaaccgctgaataaaacgtacctggaggttgtccgttccgtgttcatgtcttctaccactagcgctagtgggacgggcagaaagcggaccatcaaggacttgcaggaagaggtatcaaatctttataacaatattaggctattcgaaaaggggatgaaattctttgccgatgacactcaagctgcactgactaaacacttgctaaaatctgtgtgtactgatattaccaacctgatcttcaatttcctcgcatctgatttaatgatggccgtggacgatccagcagccattacctccgagataagaaagaagattctctctaaactgtcagaagaaacaaaggtggctctgacaaagctgcacaactccctgaatgaaaagagtattgaggacttcatttcttgtcttgattcggcagccgaagcctgtgacatcatggtgaagcgcggcgataaaaaacgtgaacggcagatactcttccagcatcgacaagcacttgcagagcagctgaaggttactgaagaccctgcacttattctccacttgactagcgttctgctctttcagttttctacccatagcatgcttcatgctcctggacggtgtgtaccccaaatcatcgcgttcctgaattccaagatccccgaggatcagcacgcgctcctggttaagtatcagggcctggtcgtaaaacagctggtaagtcagtcaaaaaaaacaggtcagggggattatccactgaataatgaattagacaaggaacaggaggatgttgcctcaaccactcgcaaggagttgcaggagctgtctagctccataaaggacctagtgcttaagtcgagaaagagttcggtcacagaggagtag

SEQ ID NO: 185905 - DNA, 2385 bp, Artificial Sequence
  derived and/or modified sequence
atggctgatgcctgggaggagatccggcggctggccgctgacttccagagggcccagtttgctgaggccacccagaggctgtctgagaggaactgcattgaaattgtgaacaagctgattgcccagaagcagctggaggtggtgcacaccctggatggcaaggagtacatcaccccagcccagatcagcaaggagatgagagatgagctgcacgtgcggggcggccgggtgaacatcgtggacctgcagcaggtgatcaacgtggacctgatccacatcgagaacagaattggagacatcatcaagtctgagaagcacgtgcagctggtgctgggccagctgattgatgagaactacctggaccggctggccgaggaggtgaatgacaagctgcaggagagcggccaggtgaccatcagcgagctgtgcaagacctatgacctgcccggcaacttcctgacccaggccctgacccagaggctgggccgcatcatcagcggccacatcgacctggacaacagaggagtcatcttcacagaggcctttgtggcccggcacaaggcccgcatccggggcctcttcagcgccatcacccggcccacagctgtgaacagcctcatcagcaaatatggcttccaggagcagctgctgtacagcgtgctggaggagctggtgaacagcggccgcctgcggggcaccgtggtgggcggccggcaggacaaggctgtgtttgtgcctgacatctacagcaggacccagagcacctgggtggacagcttcttccggcagaatggctacctggagtttgatgccctgagccggctgggcatcccagatgctgtgtcctacatcaagaagcgctacaagaccacccagctgctcttcctgaaggccgcctgtgtgggccagggcctggtggaccaggtggaggcctctgtggaggaggccatcagcagcggcacctgggtggacatcgcccccctgctgcccaccagcctgtctgtggaggatgctgccatcctgctgcagcaggtgatgagggccttcagcaagcaggccagcacagtggtgttcagtgacacagtggtggtgtctgagaagttcatcaatgactgcacagagctgttccgggagctgatgcaccagaaggccgagaaggagatgaagaacaaccctgtgcacctgatcacagaggaggacctgaagcagatcagcaccctggagagcgtgtccaccagcaagaaggacaagaaggatgaaagaagaaggaaggccacagagggcagcggctccatgaggggcggcggcggcggcaatgcccgggagtacaagatcaagaaggtgaagaagaagggcaggaaggatgatgacagtgatgatgagagccagagcagccacacaggcaagaagaagccagagatctccttcatgttccaggatgaaattgaggacttcctgaggaagcacatccaggatgcccctgaggagttcatcagcgagctggccgagtacctgatcaagcccctgaacaagacctacctggaggtggtgcgctctgtgttcatgagcagcaccaccagcgccagcggcactggaaggaagaggaccatcaaggacctgcaggaggaggtgagcaacctgtacaacaacatccggctgtttgagaagggcatgaagttctttgctgatgacacccaggccgccctgaccaagcacctgctgaagtctgtgtgcacagacatcaccaacctgatcttcaacttcctggccagtgacctgatgatggctgtggatgatcctgctgccatcaccagcgagatcaggaagaagatcctgagcaagctgtctgaggagaccaaggtggccctgaccaagctgcacaacagcctgaatgagaagagcattgaggacttcatcagctgcctggacagcgctgctgaggcctgtgacatcatggtgaagagaggagacaagaagcgggagcggcagatcctcttccagcaccggcaggccctggccgagcagctgaaggtgacagaggaccctgccctgatcctgcacctgacctctgtgctgctcttccagttcagcacccacagcatgctgcacgcccctggccgctgtgtgccccagatcatcgccttcctgaacagcaagatccctgaggaccagcacgccctgctggtgaagtaccagggcctggtggtgaagcagctggtgtcccagagcaagaagacaggccagggcgactaccccctgaacaatgagctggacaaggagcaggaggatgtggccagcaccaccaggaaggagctgcaggagctgagcagcagcatcaaggacctggtgctgaagagcaggaagagctctgtgacagaggagtag

SEQ ID NO: 185906 - DNA, 2385 bp, Artificial Sequence
  derived and/or modified sequence
atggccgacgcctgggaggagatccggcggctggccgccgacttccaacgggctcagttcgctgaagccacacaacgcctcagcgagagaaactgtattgagatcgtgaataaactgattgcacaaaagcagctggaagtagtccacaccctcgacggcaaagaatacataactccggctcaaatcagtaaagagatgagagatgaattgcacgtgcgcggcggtcgtgtcaatattgtcgatctccagcaggtgattaatgtcgatctgatacacatcgaaaatcgcatcggggatatcatcaagtcggaaaagcacgtccagctcgtgctcggccagctaatcgatgagaattacctggatcggttagccgaggaggtgaacgataagctgcaggaatccggacaggtgactatctctgaactgtgtaagacctatgatctgcctggcaactttttgacccaggccctgacccagagactgggaagaatcatttccgggcacattgatctcgataatcgcggagtaatctttaccgaagcgtttgtagctaggcataaggctaggattcgcggcttgttctcagctattactagaccaactgctgtgaactcgctcattagcaaatatggctttcaagaacagttactctacagcgttctggaggagctcgttaacagcggccgtttaaggggcactgtggtcggggggcggcaggacaaagcagtgtttgttccagatatttactcccgcacccagtctacgtgggtggatagtttttttaggcagaacgggtatctcgaatttgacgccctgtctagactcggaatccccgacgccgtaagctatatcaaaaagcgatacaagaccactcagctgctgtttctcaaggctgcctgtgtcgggcagggcctggttgaccaagtggaggcctccgtggaagaggcgatttcctccggtacctgggtcgacatcgcaccactgcttcctacatccctgtcggtcgaggatgcggcaatactgctgcagcaggttatgcgggccttctcaaaacaggcatctaccgtggttttctctgacactgtggtggtctcagagaagtttatcaatgattgtaccgagctgttcagggagcttatgcaccagaaggctgagaaagaaatgaaaaataaccctgtccacttgattaccgaagaagacctcaaacaaatcagcacactggagtcagtctccaccagtaagaaagataagaaggacgagcgcaggagaaaggcaaccgaggggtcgggatctatgagaggggggggtggtgggaatgctcgcgagtacaagattaagaaggtgaaaaagaagggcagaaaggatgatgactccgacgacgagtctcaatctagccataccggcaagaagaagccggaaatcagctttatgttccaggatgaaatcgaggactttctacgcaaacacatacaggatgccccagaagaattcatttccgagttggcggaatacctgattaagcccctgaacaagacttatttagaggtagtgagatctgtatttatgtcttccacgactagcgccagcggaactggccggaaacgaactatcaaagatctgcaggaggaggtttctaacttatacaacaatatccggctgtttgagaaaggcatgaaatttttcgcagacgacactcaggccgcgctgacaaagcacctgctgaaatcagtatgcactgatattaccaatttaattttcaattttttggccagcgatctgatgatggcagttgacgatcctgcagccattacctccgaaatcagaaaaaagatcctgagcaagttatctgaggaaaccaaagtggccctcacaaaactacacaacagcctcaatgagaaaagcatcgaggatttcattagctgcttagactcagcagcagaggcttgtgacatcatggtcaaaaggggggacaagaaacgcgagcggcagattctctttcagcatagacaggcattggccgagcagttaaaggttactgaggatccagcactgatcttacacttgacgtcagtgttactgttccagttcagcacccattccatgctccatgccccaggtagatgcgtaccccagataattgccttcctaaattcaaaaatccctgaagatcagcacgccctactggtaaagtatcagggtttggtagtaaagcaactggtgtcccagtccaagaaaacaggacagggtgactatcccttaaacaacgaactggacaaagagcaggaggatgtggcctctactacaagaaaagagctgcaagagctaagcagctcaataaaagacctggttttaaagtcaagaaagagtagcgtgaccgaggagtag

SEQ ID NO: 185907 - DNA, 2385 bp, Artificial Sequence
  derived and/or modified sequence
atggctgacgcctgggaagagatcaggcgtctcgccgctgattttcagagagcccagttcgctgaggccacacagcggctaagcgaaaggaactgtattgagatcgtcaacaaattgatcgctcagaagcagctggaggtcgtccatacactggacggaaaggaatacattacccctgctcagatcagtaaggaaatgagagacgaactgcacgttcgcggaggcagagtgaatatcgtggacctgcaacaggtgatcaatgtagacttaatccatattgagaatcgcattggtgatataattaagagcgagaagcatgtacaactcgtgctgggacaattaattgacgagaattatctggatcgtcttgcagaggaagttaacgacaaactccaggagtccggacaggtgaccatttcagagctgtgtaaaacttacgatctgcctggaaatttcttgacccaggcccttacccagagactagggaggatcatcagcggacacattgacctggacaaccgcggagttatattcactgaagccttcgtagcgaggcacaaagcacgtatccgtggactgttttccgcaatcactagaccaaccgcagttaatagcttgatttccaaatacgggttccaggaacagttgctgtatagtgttttagaggaactggtgaactccgggagactccgtggtactgtggtggggggacggcaagataaagcagtctttgtgccagatatatattctcggacccagtccacctgggtggactcctttttcagacagaacggctacctggaatttgatgcgctgagccgcctcggtattccagacgctgtgagttatatcaagaagagatacaagacaacccagctgctatttcttaaggccgcatgcgtcggccaagggcttgtggaccaggtcgaggcgtccgtggaagaagctatttcttcagggacatgggttgacatcgccccactgctccccaccagcctgtccgtcgaggatgccgcaatacttttgcagcaggtgatgagggccttttccaaacaggcttcaactgttgtgttctcagatactgttgttgtgtcggagaagtttatcaacgactgcacggagctctttcgtgagctgatgcaccagaaggccgagaaggagatgaaaaacaaccccgtgcatctgataacggaggaggatctgaagcagattagcacactggagagcgtcagcactagtaaaaaggataagaaagacgagaggagaaggaaggccactgagggctccgggagcatgcgcggaggagggggaggtaatgccagagagtacaaaattaaaaaggtgaaaaaaaagggtcgaaaggatgacgattcagacgacgagtcacagagctcacacacaggcaaaaaaaagccagaaatttcatttatgttccaagatgaaatcgaggacttcttgcggaaacatatacaagatgctccggaggaattcatctcagagctagcagaatacctgatcaaaccgctgaacaagacgtacctggaagtcgtgcggtctgtgttcatgagcagtacaacctctgccagcgggaccgggagaaagaggacaattaaagacctgcaggaagaagtgtcaaacctttataataatatccgcctcttcgagaaaggcatgaagtttttcgccgatgacacacaggccgctctgacgaagcaccttctgaaatccgtgtgcacagacatcaccaacttgattttcaatttccttgccagtgatctgatgatggccgtcgatgatccagccgctattacatcagagattcgcaaaaagatattgtctaaactttccgaagagaccaaggtggccctgactaaactgcacaactctctcaacgagaagtctattgaggactttataagctgcctggattccgccgcagaggcatgcgatatcatggtgaagcgcggagacaaaaagagggaaaggcagattttgtttcaacacagacaggctctagctgaacagcttaaggtgactgaagacccggcactgattttacatcttacgtccgtgttgctatttcagttcagtacgcattctatgctccatgcccctgggaggtgtgtcccacagatcatcgcattcctgaactccaagataccagaagaccaacacgccctgctggtgaaataccagggcctcgtggttaaacagctagtgagccagtccaagaaaacgggccagggagactaccccttgaacaatgagctggataaggagcaggaggacgtagcttccaccaccagaaaagagctgcaggagttatcatcaagcatcaaagaccttgtcttaaagtcccggaagtcaagcgtcaccgaggagtag

SEQ ID NO: 185908 - DNA, 4224 bp, Artificial Sequence
  derived and/or modified sequence
cttctcccaccgcctgtcggctgacgtgtctgcagttcctccgcgtctactgcgagtcaggccgtgatggcggacgcctgggaagagattaggcggttggcggccgacttccagcgggcgcagttcgccgaggccacgcagaggttgtccgagcggaactgcattgagattgttaataaattgattgctcagaaacagctagaagtagttcatacactcgatggaaaggaatatattactccagcccaaattagtaaagaaatgagagatgagctacatgtccgaggtggtcgagtaaacattgttgatctacaacaggtaattaatgtggacctgattcatattgaaaatagaattggtgacattattaaatcagaaaagcatgttcagttagtgttgggacaactgatagatgagaattatttggatcggttggcagaagaggtcaatgataaattgcaagaaagtggtcaggtcaccatatcagaactgtgtaaaacttatgatcttcctgggaactttctgacacaggcactaactcagcgacttggtagaattatcagtggacatattgatcttgataatagaggagtaatttttacggaagcttttgtagctcgacataaagcacgtatccgtggactattcagtgctattacccggcctacagctgtgaattctttgatttcaaaatatggatttcaggagcagcttctttactctgtgcttgaggaacttgttaatagcggacgcttacgaggcactgtggttggtgggagacaggataaagctgtgtttgtccctgacatctactccaggacacagagtacttgggtggattcctttttcaggcagaatggctatctagaatttgatgctttgtccagacttggaatcccagatgctgtaagctacataaagaaaagatataagactacacaactcttgtttttgaaagcagcttgtgttggtcaaggacttgtggatcaagtggaagcatcagtagaagaagccatcagctctggaacatgggttgatattgcacctctgctacccacttctttatcagttgaagatgctgccatattgcttcagcaggtgatgagggcattcagcaaacaggcctcaactgtagtctttagcgacactgttgtagtcagtgaaaaatttataaatgactgtacagaactgttccgtgagctgatgcaccagaaagctgaaaaggaaatgaaaaataatcctgtgcatttaatcactgaagaagatctgaaacaaatctccactttagaaagcgttagtacaagtaaaaaggataaaaaagatgagcgaagaaggaaagcaacagagggcagtggaagcatgagaggaggaggtgggggcaatgccagagagtacaaaattaaaaaagtcaagaagaaaggaagaaaagatgatgatagtgatgatgaatctcaatcatcccacactggaaagaagaagccagagatcagttttatgttccaggatgagattgaagattttttaagaaaacacatacaagatgcccctgaggagtttatttcggaacttgctgagtacttaataaaacctcttaataaaacttatctcgaggtggtacgttcagtattcatgtcttcaacaacttctgcttctgggacgggcagaaaacgcacaatcaaggacttgcaagaagaagtttcaaacctgtacaataacattaggttatttgaaaaagggatgaagttttttgcagatgacacacaggctgctcttaccaaacacttgctgaagtcagtgtgtactgatatcactaacctcattttcaacttcttagcttcggatttaatgatggcagtagacgatcctgcagccattacaagtgaaataagaaagaaaattttaagtaaattatcagaagaaaccaaagtagctcttacaaaactccataactctctgaatgaaaagagcatagaagactttatttcttgtctggattctgcagcagaagcttgtgatattatggtgaaaaggggagacaaaaaaagggaaagacagatactgttccaacatcgacaagcactggctgaacagctaaaggtcacagaagaccctgctcttattctgcacctcacatcagtcctgttgtttcagttttcaacccacagcatgctccatgcacctggaagatgtgtcccacagatcattgcttttcttaatagtaaaattccagaggatcagcatgctcttttggtaaagtatcaaggtttggttgtaaagcagctagtcagtcaaagtaagaagactgggcagggagattatcccttgaataatgaattagacaaagaacaagaagatgttgccagtactactcgtaaagagcttcaagaactttcttcatccattaaagaccttgttctcaaatctaggaaatcatctgtgacggaagagtaatgatcttaatttacatttgtcatatagtaagcattttcccccaaggttgaaggtgagtggtcacaaaaaagtagtcactatacaactcccctctccctgcaaaaaccacctcatacacacacaattcagttaaaacagtagtattgtattaaatgtaaatcttaaaaagatgtgaatttttgtaaattgggttcttcatggaagtttttttccacctgattttcacacaaatactatatgaaatttttcacattattttcacataattttaaaaattacatatttcaggtttgttctctttccaaatgttgaatgaaaaacaaattttccaatccatttatccctggggaaggattcatttgttgcgagtgccagtatacttaaatgtatactttatatacatttaagcagaaatttaaaatgtggtcttttttttttaaaagaaacacttctgtgtcagaaatgaaaataaatcatgttttttatttttaaatagaaagcacttcaaaactaaaatacagaaatttacaaaaaagaaaaattattactaagcccttgctcttatttttggcagaataaacattgattttggttggggctgcaaggatgcctttacaggtgcacaagaacgctagagtggcccatgcattgctgtgttctcttctaaaacaagctactaacaagagagagaacacatgcaatttattaccagtaagcataagtcatatttaacattggaataactaagcattttatacaaagatttttctttgacccagtttgcatttgtacattttatttttttagttcaacagctgctctgtcacataatactttgtaaatactagtgtgaaaaacagataggatgccttttccagtggtaggagcatctgtaagtgcatttaaatcattagaagcttttttccaaaactagaaacccttattaaaaaatagacatttttttctaaagattattagttaaaaataactaaaagagttccttagagtaatcatttcaaccaaatgaatttcaagcaacaacttacttactatttatcaaaaagggatttaattattttgaatataattataaattaaatttcaaatatttaaaaatactattttatataattccttatgacattttaaactttatattttaaaatatttgaatacgaaaagatcagtctacctctactccattctagacaaagtattaatccttagtgaaagtaattaattaaattgccaacttggcattattattaaacttgataggaacgcaacattaaatttaaaaatgttttcccgtgggtaattttctattatatattttcatatgggcaaagggaaaaaatgataaatcctctgtaatcacaaaccccaatttcgttttgtttattcagcttctaaaatattgaacacccagacttttaattcaacctttaagaaccttatcatttatgtttcagtagatatcaaagtaatccatgtttgtgtcaaatgatcatagaaaataaatagaagagacagtgaagcaagtaaaaagaaaagcattgttttaatttgtttgcattaatttttttcatttgtcaaaatgcttcttttgttgccacagtaaagaacagtttttattgttttgtaagtaaaattacgtagctgattttgtatgtaaagattaatttccataataaaaattattgtatgtttactgtgatcttaatgggcagggttaagaaagttatttaaaataaagttacctattctactaaa

SEQ ID NO: 185909 - protein, 2266 aa, Artificial Sequence
  derived and/or modified sequence
MMPGETHSAAPGTAADLSRCQGCASLQQNLNEYVEALITLKQKIINTDNLLTEYQKKCDELQFARRENSNLHHQVEEMLQKISPLQKCQEELGSLKAELEEKKSSLKLYQDTHQEYARVKEECLKSDAQKKKLEAKVKKLQEAAVKQTQDFKQLRNEKKILEKEFKKTQERLDEFSKQKNEKELRHIGTQISSDSYGSIDKRKVKLLLKELWLCVNTTHRLPGEGSRCVPEKPAKAITSSRVPGEDGTLPPTQGSPLRTSNVQTCLTKLSMEIKEDFLCQNVEKQSSSGTNCSSDHVFNENGNLEVLVQSHRDGGSTEFVDHDHFFDEDLQAAIDFFKLPPPLLSPVPSPPPMSSPHPGSLPSSFAPETYFGEYTDSSDNDSVQLRNSAECVSEDDTTESQNYFGSLRKNKGSGTWEEKPKSHEAIQALNTWEVNKVTTSGLETFTATLRESSATHSLVGEKHWTTASRSMSDRKRDILHETKTQMEVREMDKSVQTEKTIHKLTRGLCIERLSASPAQEKEAAPGKSELCSSPLGKRPLNELMESEGKTVLSKMMGSPKSEFTKWTRINEITSEPDRITVSGHFHRLSRELEKEKEDTQGFTLGESPESEDDDSGDGMDVAGLDIETSFSSSSTLVALSVGSNPQSSSGLDCGNDTDITTKVFSTEPHHSEHKLQTKTLNTLHLQSEPPECSIGGNNLENSLCALSPELGASNFNDQKSSGIEYTKVVKGLTKIHSLPRSVFMKATKDGQCESQDPRIELTLNKPDFTSLIGSQAALIKSGLGFVKSTSWHHSDLLRKGGEESLRAKSEHEQKTSHQLQKAMPFLQNRGPTPKPDLLRENNNPVEFKTTASVLPNQVSVITKQTRPEKVQSAKLEHLRPHRVEPTLVTENSGNKTGMSTVAKCDGERDDTTQNITEVAAVKSISPEVSASRRKLDFNSPGGSSPVENSDCSTNSRLSFSPENILIQNQDIVREAAVQGDGQKQRQPQATDLDSSGTHGSEMLPATEVTVSGGFSVEETSCGDTGRSGGEALAVANDSTSTPQNANGLWKLKSTTPGGALPECFGTTDTTFSSAFCRKHGETQDTSQSSLPGTLHCYTGIREGGDDTEVESEAFSCSEGSEQQDAPDDSQKNLGDTDAAVAEVRPSLEVGYLTSALQDFNISTFSELDRLSTSEVVMFLESCQLGDYSSGDSVSECSSKGTLSKEMNKELKASEIGEKYRKQPCEEETLGTCEEWIESEEDDYSLKNTSQLTQCSLETLSEVLTKIRQELQTNSEDCNGKDTGSLLLLNVNNNMTTENLKEKSPFRETTGSSSHASEPTPQAAALDTEGSSPISGMPQNENPQSRPEARSDAGRQTDGGEEDLPEPVEPSALCSDSVMEPSIEQSSNCEAETTFQCQIATVTSEVINVLINKDQNLVIEKGDNWTIISGVAVLPHVDQVTLCDIPGDIPISQDQGELEAGCIPVTSAEKSPEASHTGPAFQEAPCGNNLSCPQEDVSSSGQSTNFDKSRLRNRPVKPSIWISSQIYDQNFETQIVASDHTYYNSKLEPSGKNKNRSKISNKDQSNKPVKTSASSRVETHQSEVAQSFSGEKANTKTQRSQTQTILANADTSTPTDCSPDTLSKIRQEVGPPLPPLLAPLIATPPRTSQPLSPLISSSSPSSPASPVGQVSPFRETPVPPAMSPWPEDPRRASPPDPSPSPSAASASERVVPSPLQFCAATPKHALPVPGRLPPCASGHAAVGGPQENSVKILDTMYPELSARARTLNILKGNIQLTRGPPADCKNLPGPASAMIGFKTITSAATAFVKTGSSSGGDCNQDKSRDLGTQQDSSGKRTLSTSTLRSAKRLRLDTGSPEPETRGVTAEGIHKNLPGNLPPAEVATTNEERSCSSPAVSAVSQLPLSPKETVESHDKAIANALKKIAEFSFDLLPVIRSHVYVGNISKKPVMRDQEKEVVYEFSTTKKHLAECLLHSILSELKIQKISMDHNYIHALCRVYVGICRQLGDLERARLFCYSLLKEDFPESEKLTLFIANMWHDIFLSQSVINKAMQLVARQRAKGEVLNCLRAFLNWEKNAPVDVGFMVSKLLLTIQLCPKTEFQPSEKFGEDLSDNTWEYIFAIDLLCCHQKWIWTHDNIISKELWPVMDKWIKYRKGHANIAYTPDIIIASILRLIGRLGQLGLKEGFPSAVKNISSVIGMFIQHAHDEDIPWGIQLAAVYALCDLSPSNPAEISKILEAWRREASKSVPSAIVSCLEEVSALSTEELG

SEQ ID NO: 185910 - DNA, 6801 bp, Artificial Sequence
  derived and/or modified sequence
atgatgcccggcgagacccacagcgccgcccccggcaccgccgccgacctgagcagatgccagggctgcgccagcctgcagcagaacctgaacgagtacgtggaggccctgatcaccctgaagcagaagatcatcaacaccgacaacctgctgaccgagtaccagaagaagtgcgacgagctgcagttcgccagaagagagaacagcaacctgcaccaccaggtggaggagatgctgcagaagatcagccccctgcagaagtgccaggaggagctgggcagcctgaaggccgagctggaggagaagaagagcagcctgaagctgtaccaggacacccaccaggagtacgccagagtgaaggaggagtgcctgaagagcgacgcccagaagaagaagctggaggccaaggtgaagaagctgcaggaggccgccgtgaagcagacccaggacttcaagcagctgagaaacgagaagaagatcctggagaaggagttcaagaagacccaggagagactggacgagttcagcaagcagaagaacgagaaggagctgagacacatcggcacccagatcagcagcgacagctacggcagcatcgacaagagaaaggtgaagctgctgctgaaggagctgtggctgtgcgtgaacaccacccacagactgcccggcgagggcagcagatgcgtgcccgagaagcccgccaaggccatcaccagcagcagagtgcccggcgaggacggcaccctgccccccacccagggcagccccctgagaaccagcaacgtgcagacctgcctgaccaagctgagcatggagatcaaggaggacttcctgtgccagaacgtggagaagcagagcagcagcggcaccaactgcagcagcgaccacgtgttcaacgagaacggcaacctggaggtgctggtgcagagccacagagacggcggcagcaccgagttcgtggaccacgaccacttcttcgacgaggacctgcaggccgccatcgacttcttcaagctgcccccccccctgctgagccccgtgcccagccccccccccatgagcagcccccaccccggcagcctgcccagcagcttcgcccccgagacctacttcggcgagtacaccgacagcagcgacaacgacagcgtgcagctgagaaacagcgccgagtgcgtgagcgaggacgacaccaccgagagccagaactacttcggcagcctgagaaagaacaagggcagcggcacctgggaggagaagcccaagagccacgaggccatccaggccctgaacacctgggaggtgaacaaggtgaccaccagcggcctggagaccttcaccgccaccctgagagagagcagcgccacccacagcctggtgggcgagaagcactggaccaccgccagcagaagcatgagcgacagaaagagagacatcctgcacgagaccaagacccagatggaggtgagagagatggacaagagcgtgcagaccgagaagaccatccacaagctgaccagaggcctgtgcatcgagagactgagcgccagccccgcccaggagaaggaggccgcccccggcaagagcgagctgtgcagcagccccctgggcaagagacccctgaacgagctgatggagagcgagggcaagaccgtgctgagcaagatgatgggcagccccaagagcgagttcaccaagtggaccagaatcaacgagatcaccagcgagcccgacagaatcaccgtgagcggccacttccacagactgagcagagagctggagaaggagaaggaggacacccagggcttcaccctgggcgagagccccgagagcgaggacgacgacagcggcgacggcatggacgtggccggcctggacatcgagaccagcttcagcagcagcagcaccctggtggccctgagcgtgggcagcaacccccagagcagcagcggcctggactgcggcaacgacaccgacatcaccaccaaggtgttcagcaccgagccccaccacagcgagcacaagctgcagaccaagaccctgaacaccctgcacctgcagagcgagccccccgagtgcagcatcggcggcaacaacctggagaacagcctgtgcgccctgagccccgagctgggcgccagcaacttcaacgaccagaagagcagcggcatcgagtacaccaaggtggtgaagggcctgaccaagatccacagcctgcccagaagcgtgttcatgaaggccaccaaggacggccagtgcgagagccaggaccccagaatcgagctgaccctgaacaagcccgacttcaccagcctgatcggcagccaggccgccctgatcaagagcggcctgggcttcgtgaagagcaccagctggcaccacagcgacctgctgagaaagggcggcgaggagagcctgagagccaagagcgagcacgagcagaagaccagccaccagctgcagaaggccatgcccttcctgcagaacagaggccccacccccaagcccgacctgctgagagagaacaacaaccccgtggagttcaagaccaccgccagcgtgctgcccaaccaggtgagcgtgatcaccaagcagaccagacccgagaaggtgcagagcgccaagctggagcacctgagaccccacagagtggagcccaccctggtgaccgagaacagcggcaacaagaccggcatgagcaccgtggccaagtgcgacggcgagagagacgacaccacccagaacatcaccgaggtggccgccgtgaagagcatcagccccgaggtgagcgccagcagaagaaagctggacttcaacagccccggcggcagcagccccgtggagaacagcgactgcagcaccaacagcagactgagcttcagccccgagaacatcctgatccagaaccaggacatcgtgagagaggccgccgtgcagggcgacggccagaagcagagacagccccaggccaccgacctggacagcagcggcacccacggcagcgagatgctgcccgccaccgaggtgaccgtgagcggcggcttcagcgtggaggagaccagctgcggcgacaccggcagaagcggcggcgaggccctggccgtggccaacgacagcaccagcaccccccagaacgccaacggcctgtggaagctgaagagcaccacccccggcggcgccctgcccgagtgcttcggcaccaccgacaccaccttcagcagcgccttctgcagaaagcacggcgagacccaggacaccagccagagcagcctgcccggcaccctgcactgctacaccggcatcagagagggcggcgacgacaccgaggtggagagcgaggccttcagctgcagcgagggcagcgagcagcaggacgcccccgacgacagccagaagaacctgggcgacaccgacgccgccgtggccgaggtgagacccagcctggaggtgggctacctgaccagcgccctgcaggacttcaacatcagcaccttcagcgagctggacagactgagcaccagcgaggtggtgatgttcctggagagctgccagctgggcgactacagcagcggcgacagcgtgagcgagtgcagcagcaagggcaccctgagcaaggagatgaacaaggagctgaaggccagcgagatcggcgagaagtacagaaagcagccctgcgaggaggagaccctgggcacctgcgaggagtggatcgagagcgaggaggacgactacagcctgaagaacaccagccagctgacccagtgcagcctggagaccctgagcgaggtgctgaccaagatcagacaggagctgcagaccaacagcgaggactgcaacggcaaggacaccggcagcctgctgctgctgaacgtgaacaacaacatgaccaccgagaacctgaaggagaagagccccttcagagagaccaccggcagcagcagccacgccagcgagcccaccccccaggccgccgccctggacaccgagggcagcagccccatcagcggcatgccccagaacgagaacccccagagcagacccgaggccagaagcgacgccggcagacagaccgacggcggcgaggaggacctgcccgagcccgtggagcccagcgccctgtgcagcgacagcgtgatggagcccagcatcgagcagagcagcaactgcgaggccgagaccaccttccagtgccagatcgccaccgtgaccagcgaggtgatcaacgtgctgatcaacaaggaccagaacctggtgatcgagaagggcgacaactggaccatcatcagcggcgtggccgtgctgccccacgtggaccaggtgaccctgtgcgacatccccggcgacatccccatcagccaggaccagggcgagctggaggccggctgcatccccgtgaccagcgccgagaagagccccgaggccagccacaccggccccgccttccaggaggccccctgcggcaacaacctgagctgcccccaggaggacgtgagcagcagcggccagagcaccaacttcgacaagagcagactgagaaacagacccgtgaagcccagcatctggatcagcagccagatctacgaccagaacttcgagacccagatcgtggccagcgaccacacctactacaacagcaagctggagcccagcggcaagaacaagaacagaagcaagatcagcaacaaggaccagagcaacaagcccgtgaagaccagcgccagcagcagagtggagacccaccagagcgaggtggcccagagcttcagcggcgagaaggccaacaccaagacccagagaagccagacccagaccatcctggccaacgccgacaccagcacccccaccgactgcagccccgacaccctgagcaagatcagacaggaggtgggcccccccctgccccccctgctggcccccctgatcgccaccccccccagaaccagccagcccctgagccccctgatcagcagcagcagccccagcagccccgccagccccgtgggccaggtgagccccttcagagagacccccgtgccccccgccatgagcccctggcccgaggaccccagaagagccagcccccccgaccccagccccagccccagcgccgccagcgccagcgagagagtggtgcccagccccctgcagttctgcgccgccacccccaagcacgccctgcccgtgcccggcagactgcccccctgcgccagcggccacgccgccgtgggcggcccccaggagaacagcgtgaagatcctggacaccatgtaccccgagctgagcgccagagccagaaccctgaacatcctgaagggcaacatccagctgaccagaggcccccccgccgactgcaagaacctgcccggccccgccagcgccatgatcggcttcaagaccatcaccagcgccgccaccgccttcgtgaagaccggcagcagcagcggcggcgactgcaaccaggacaagagcagagacctgggcacccagcaggacagcagcggcaagagaaccctgagcaccagcaccctgagaagcgccaagagactgagactggacaccggcagccccgagcccgagaccagaggcgtgaccgccgagggcatccacaagaacctgcccggcaacctgccccccgccgaggtggccaccaccaacgaggagagaagctgcagcagccccgccgtgagcgccgtgagccagctgcccctgagccccaaggagaccgtggagagccacgacaaggccatcgccaacgccctgaagaagatcgccgagttcagcttcgacctgctgcccgtgatcagaagccacgtgtacgtgggcaacatcagcaagaagcccgtgatgagagaccaggagaaggaggtggtgtacgagttcagcaccaccaagaagcacctggccgagtgcctgctgcacagcatcctgagcgagctgaagatccagaagatcagcatggaccacaactacatccacgccctgtgcagagtgtacgtgggcatctgcagacagctgggcgacctggagagagccagactgttctgctacagcctgctgaaggaggacttccccgagagcgagaagctgaccctgttcatcgccaacatgtggcacgacatcttcctgagccagagcgtgatcaacaaggccatgcagctggtggccagacagagagccaagggcgaggtgctgaactgcctgagagccttcctgaactgggagaagaacgcccccgtggacgtgggcttcatggtgagcaagctgctgctgaccatccagctgtgccccaagaccgagttccagcccagcgagaagttcggcgaggacctgagcgacaacacctgggagtacatcttcgccatcgacctgctgtgctgccaccagaagtggatctggacccacgacaacatcatcagcaaggagctgtggcccgtgatggacaagtggatcaagtacagaaagggccacgccaacatcgcctacacccccgacatcatcatcgccagcatcctgagactgatcggcagactgggccagctgggcctgaaggagggcttccccagcgccgtgaagaacatcagcagcgtgatcggcatgttcatccagcacgcccacgacgaggacatcccctggggcatccagctggccgccgtgtacgccctgtgcgacctgagccccagcaaccccgccgagatcagcaagatcctggaggcctggagaagagaggccagcaagagcgtgcccagcgccatcgtgagctgcctggaggaggtgagcgccctgagcaccgaggagctgggctag

SEQ ID NO: 185911 - DNA, 6801 bp, Artificial Sequence
  derived and/or modified sequence
atgatgcccggagagacccactccgcagcacctgggactgctgccgacctgagcaggtgccaaggctgcgcctctcttcagcagaatttaaacgaatacgtcgaggctcttattaccctcaaacagaagattatcaataccgacaacctccttactgagtaccagaagaaatgcgatgagctccagttcgccagacgggaaaactccaatctgcaccatcaggtggaagagatgctgcagaaaatttcaccattgcagaagtgccaagaagagctcgggtccctgaaggccgaattagaggaaaagaaatcctctctgaaattgtatcaggacacacaccaggaatacgcaagggtgaaggaagaatgtctcaagagtgatgcacagaaaaaaaagctagaggcaaaggtgaagaagctgcaggaggcagccgttaaacaaacacaagatttcaagcaactcaggaatgagaagaaaatcctggagaaagagttcaaaaagacccaggagagattggatgagttcagcaaacagaaaaacgaaaaagaactcagacatatcggcacgcagatctcttccgacagctacgggtcaattgataagcgtaaggtcaagctgctcttgaaggaactgtggctgtgcgtgaacacgacacatagactccccggtgagggatccagatgtgtgcctgaaaaacctgccaaggccattacctcaagtagggtgcccggggaggacgggaccctgccacccactcaaggaagccctctgaggacaagtaatgtccagacctgccttactaaactcagtatggaaatcaaggaagacttcctctgccagaacgtcgagaaacagtcaagttcaggaacaaattgcagtagcgaccatgtgtttaacgagaatgggaatttagaggtcctggttcagagtcacagagacggcggttccactgaattcgtggatcacgaccacttcttcgatgaagacctccaggccgccatcgacttctttaagctgcctcctccactactttcccctgtgccttctcccccccctatgtcctccccacaccctggatccctacccagcagttttgctccagagacatattttggggagtataccgacagtagcgacaacgattccgttcagcttcggaactcagctgagtgcgtgagcgaggacgacactacggaatcccagaactactttggctcgcttcggaaaaataaaggatctggaacatgggaggagaaacccaagagccatgaagccattcaggcgctcaacacttgggaagtgaacaaggtgacgacgagcggactcgagactttcacagccaccctgagggaaagctcagccacccatagcctggtgggcgaaaaacattggacaacagcatcacgaagtatgagtgacagaaagcgagacattttacatgaaaccaaaacacagatggaagtgcgtgagatggacaagtccgtgcagactgagaagaccattcataagctcacaagaggcctctgtattgaaaggctctccgcctcccccgcgcaagaaaaagaggcggcccccggcaagagcgagctgtgctctagtcccctggggaaacgtccgctcaatgaattgatggagagcgaaggaaagaccgtcctttccaagatgatgggaagccccaagagtgagtttactaaatggactcgcattaatgaaatcactagtgaaccggacagaatcaccgtgtccggccatttccaccgcctttcaagagagcttgaaaaggaaaaagaggacacgcaagggtttactctgggggagtcacccgagtccgaagatgatgattcgggtgacggaatggacgtggcgggacttgacatagaaacttcatttagctcatcatcgacgcttgtcgcgctttcagtaggaagtaatccacaaagctcatccggcctggattgtggcaacgatactgacatcactactaaggttttctccacggagcctcatcactccgaacataagctgcagaccaaaacgctaaatacattacacctccagtcagagccccccgaatgctctatcggagggaataatctggagaacagcttgtgtgccctgtcccctgaactgggggcgtcaaactttaacgaccagaagagctctgggattgaatacactaaagtagtgaagggcctgacaaagatccactctcttccgcgctctgtttttatgaaggcgacaaaggatgggcagtgtgagtcccaggatccccgtatcgagttgaccctgaacaagccagactttacttcactcattggcagccaggctgcactgattaaatcaggtctaggattcgtgaagtcaacatcatggcaccattctgacctgcttcgcaaggggggtgaagaaagtcttagggcaaaatccgaacatgaacagaagacgtcacatcaattgcagaaagccatgccattcctgcagaaccgtggtccaaccccaaaacctgatctgctccgcgaaaataataaccccgtggagttcaagaccacagccagtgtgcttccaaaccaggtgtccgttatcacgaagcagacaagaccagagaaggtgcagtctgccaagttggagcacttgaggccccatagagtggagcccacactggtcacggaaaattctggtaataagaccgggatgtcaacagtcgctaagtgtgacggcgaacgtgacgacactacacagaacatcacagaggtggcagcagttaagtcgatctcacccgaagtgagcgcatctaggcgcaaactggacttcaattctcctggaggaagctcccctgtggagaactcagactgctcgaccaattcccgcctgtccttcagtcctgaaaacattcttattcaaaaccaggacatagtgcgagaggcagccgtgcagggggacggacagaagcagcggcagcctcaggctaccgatctggacagctctgggacccatggctcagaaatgctgccagcgaccgaagtcacagtatccggagggttttccgttgaggagacctcatgtggagataccggtaggtccggaggagaggcactcgcagtcgcgaacgatagcacctctaccccccagaatgctaacggtctttggaagctgaaatccaccactcccgggggcgccctccccgaatgtttcggtaccaccgataccacttttagcagtgccttttgcaggaagcacggggagacgcaagacacatcccagtccagtctgcctggtaccctacattgttacactgggatccgagaaggcggtgatgatacggaagtggaatccgaggcattttcttgcagcgagggctcagagcagcaagacgcacccgacgattcccagaagaatctgggcgataccgatgcggccgtggctgaagtgcgccctagcttggaggttggttatctgacaagcgccctccaggactttaatatcagcacttttagcgagctggatcgtctgagcacgtcagaggtggtgatgtttctggagagttgtcaactgggggactattccagtggagatagcgtgtcggagtgcagctctaagggtactctgagtaaagagatgaacaaggagctgaaggcctccgagattggggagaaataccggaagcagccctgtgaggaggagacgctgggtacgtgcgaggaatggattgagagtgaggaggacgattactccttgaaaaacacctcccagctgacccaatgctcactggagactctgagcgaagttctgactaagattaggcaggaactccagactaatagtgaagactgcaatgggaaggataccggctcactgctacttctaaacgtgaacaacaatatgaccacagagaacctgaaggagaagtccccattcagagagactactggatcttcctctcacgcctccgagcctacgccgcaggcagccgccctggatacggaaggttccagcccaatctcaggaatgcctcaaaacgagaacccacaatcccgtccggaagccagatctgacgctggtcggcagaccgatggcggcgaagaagatctgcctgagcccgtcgagccgagcgcactgtgttcagactctgtgatggaaccaagcatagaacagtccagtaattgcgaagccgagacaacgtttcagtgccagatcgccacagtgaccagtgaggtgataaacgttctgatcaataaggatcaaaacctggtgatcgaaaaaggggataactggactattatctccggcgtcgccgtgctgccccatgttgatcaggtgacactgtgtgatattcctggcgatatccctattagccaggatcaaggagaattagaagcagggtgcatccctgtcacgtccgcggaaaaaagcccagaggccagtcacactggtccagcttttcaggaagctccctgtgggaataatctgagctgtccccaggaggacgtgtcaagcagcgggcaaagtaccaatttcgataagtcacggctgagaaacaggcctgtaaagccttcgatatggatcagcagccagatttatgaccagaattttgagactcagatcgtggccagcgatcacacgtattataattcgaagctcgagcctagtggtaagaacaagaatagaagtaaaatttcaaacaaagatcagtctaacaaacctgtaaagacgtcagcatcatctcgggtggagacacaccaatctgaggtggcccagagcttttccggagaaaaagctaacacgaaaacacagcgatcccagacacaaactattctggccaacgctgatacaagcacccccaccgattgtagtcccgatacactgtctaaaatacggcaggaggttggtccgccactgcccccattgttagccccattaatagcaacccccccaaggacctctcagccactgtcacccttgattagcagtagttctccctcatccccagcttcgcccgtggggcaagtgagcccattcagagagactccagtaccgcctgccatgtcaccctggccagaagaccccagacgagcttctcctccggacccatctccgtccccgtcagcagctagcgcctcagaaagagtggtcccatcgcctctgcagttttgcgctgccactccaaagcacgcgctcccggttccaggtagactgccaccctgcgctagcgggcacgcggccgtaggcggacctcaagagaattctgtgaagattctcgatacgatgtatcctgagctgagcgcacgagcgagaaccctgaacattctgaagggcaatatacagttaacccgcggacctcccgccgattgcaaaaatttaccgggtccagcatctgccatgataggcttcaagaccatcacttccgcggcaacagccttcgttaagacaggcagctcttccggcggggattgcaaccaagacaaatccagggatctcggaacccagcaggattcatctggaaagcggacactttctactagcaccctccgttcagccaaaagactcagactggataccggctctcccgagccagagacccggggcgtgactgccgaagggatccacaaaaatctgcccggcaatcttcctcccgcagaggtggctaccaccaatgaagaaaggtcctgttcctctcccgcggtgtcggcagtctcccagttacccctgagcccaaaggagactgtggagagtcacgacaaagctatagcaaacgccctgaagaagatcgcggaattttcctttgacctcctgcctgtgatccggtcacacgtgtacgttggaaatatatcaaagaaacccgtgatgcgggatcaggaaaaggaggtggtttatgagttcagtacaactaaaaagcacttggctgaatgcctgctccacagcatcctttcagagctgaagatccagaagatttctatggaccacaattacattcatgccttgtgccgggtgtacgttggcatttgccgccagctcggcgatctcgagcgagcccgcctcttttgctattctctcttgaaggaggacttcccggaaagcgagaagctgaccctgttcattgctaacatgtggcacgacatcttcctgtctcagtctgttatcaacaaagctatgcagttggtagctaggcagcgggccaaaggcgaggtgctgaattgtttgcgtgcctttctgaactgggaaaagaatgctcctgtggacgttggattcatggtttcaaagctattactcactattcagctgtgccccaaaactgaatttcagcccagcgaaaagttcggagaagatctgtccgataatacctgggagtatatttttgcaatcgacctgctatgctgccatcagaaatggatttggactcatgacaacatcatctctaaggagctctggcctgtaatggacaaatggattaagtatcggaaggggcatgcgaatattgcctataccccagatattatcattgccagcattctgcgactgataggcaggctgggtcaacttggcctgaaagagggtttcccatccgcagttaagaatatcagttcagtgatcggcatgtttatccaacacgctcacgatgaagacatcccttggggaatccagcttgctgctgtctatgctctgtgtgacttgtctccatccaaccctgcagagataagcaaaatcttggaagcatggcgtagagaggcctcaaagagcgttccctcagcaattgtctcttgcctggaggaggtaagtgcgttgtccaccgaggaactaggctag

SEQ ID NO: 185912 - DNA, 6801 bp, Artificial Sequence
  derived and/or modified sequence
atgatgcctggagagacccacagcgctgcccctggaacagctgctgacctgagccgctgccagggctgtgccagcctgcagcagaacctgaatgaatatgtggaggccctgatcaccctgaagcagaagatcatcaacacagacaacctgctgacagagtaccagaagaagtgtgatgagctgcagtttgcccggcgggagaacagcaacctgcaccaccaggtggaggagatgctgcagaagatcagccccctgcagaagtgccaggaggagctgggcagcctgaaggccgagctggaggagaagaagagcagcctgaagctgtaccaggacacccaccaggagtatgcccgggtgaaggaggagtgcctgaagagtgatgcccagaagaagaagctggaggccaaggtgaagaagctgcaggaggccgctgtgaagcagacccaggacttcaagcagctgagaaatgagaagaagatcctggagaaggagttcaagaagacccaggagcggctggatgagttcagcaagcagaagaatgagaaggagctgcggcacatcggcacccagatcagcagtgacagctatggcagcattgacaagaggaaggtgaagctgctgctgaaggagctgtggctgtgtgtgaacaccacccaccggctgcccggggagggcagccgctgtgtgcctgagaagccagccaaggccatcaccagcagccgggtgcctggagaagatggcaccctgccccccacccagggcagccccctgcggaccagcaatgtgcagacctgcctgaccaagctgtccatggagatcaaggaggacttcctgtgccagaatgtggagaagcagagcagcagcggcaccaactgcagcagtgaccacgtgttcaatgaaaatggaaacctggaggtgctggtgcagagccacagagatggcggcagcacagaatttgtggaccatgaccacttctttgatgaggacctgcaggccgccatcgacttcttcaagctgcccccacccctgctgagccctgtgcccagccccccacccatgagcagcccccaccctggcagcctgcccagcagctttgcccctgagacctactttggagagtacacagacagcagtgacaatgacagcgtgcagctgaggaacagcgcagaatgtgtgtctgaagatgacaccacagagagccagaactacttcggcagcctgaggaagaacaagggcagcggcacctgggaggagaagcccaagagccatgaggccatccaggccctgaacacctgggaggtgaacaaggtgaccaccagcggcctggagaccttcaccgccaccctgcgggagagcagcgccacccacagcctggtgggggagaagcactggaccacagccagccgctccatgtctgacaggaagagggacatcctgcacgagaccaagacccagatggaggtgcgggagatggacaagtctgtgcagacagagaagaccatccacaagctgacccggggcctgtgcatcgagcggctgagcgccagccctgcccaggagaaggaggccgcccctgggaagtctgagctgtgcagcagccccctgggcaagaggcccctgaatgagctgatggagagcgagggcaagacagtgctgagcaagatgatgggcagccccaagtctgagttcaccaagtggacccgcatcaatgagatcaccagcgagccagaccgcatcaccgtgtctggccacttccaccggctgagccgggagctggagaaggagaaggaggacacccagggcttcaccctgggggagagccctgagagtgaagatgatgattctggagatggcatggatgtggccggcctggacatcgagaccagcttcagcagcagcagcaccctggtggccctgtctgtgggcagcaacccccagagcagcagcggcctggactgtggaaatgacacagacatcaccaccaaggtgttcagcacagagccccaccacagcgagcacaagctgcagaccaagaccctgaacaccctgcacctgcagagcgagcccccagaatgttccatcggcggcaacaacctggagaacagcctgtgtgccctgagccctgagctgggcgccagcaacttcaatgaccagaagagcagcggcatcgagtacaccaaggtggtgaagggcctgaccaagatccacagcctgcccaggtctgtgttcatgaaggccaccaaggatggccagtgtgagagccaggaccccagaattgagctgaccctgaacaagccagacttcaccagcctcatcggcagccaggccgccctgatcaagagcggcctgggctttgtgaagagcacctcctggcaccacagcgacctgctgaggaaaggaggagaggagagcctgcgggccaagtcagaacatgagcagaagaccagccaccagctgcagaaggccatgcccttcctgcagaacagaggccccacccccaagccagacctgctgcgggagaacaacaaccctgtggagttcaagaccacagcctctgtgctgcccaaccaggtgtctgtcatcaccaagcagaccaggcctgagaaggtgcagagcgccaagctggagcacctgcggccccaccgggtggagcccaccctggtgacagagaacagcggcaacaagacaggcatgagcacagtggccaagtgtgatggagagagagatgacaccacccagaacatcacagaggtggccgctgtgaagagcatcagccctgaggtgtctgccagcaggaggaagctggacttcaacagccctgggggcagcagccctgtggagaacagcgactgcagcaccaacagccggctgtccttcagccctgagaacatcctgatccagaaccaggacatcgtgcgggaggccgctgtgcagggagatggccagaagcagaggcagccccaggccacagacctggacagcagcggcacccacggcagcgagatgctgcctgccacagaggtgacagtgtctgggggcttctctgtggaggagaccagctgtggggacaccggccgctctggaggagaggccctggccgtggccaatgacagcaccagcaccccccagaatgccaacggcctgtggaagctgaagagcaccacccctgggggcgccctgcctgagtgcttcggcaccacagacaccaccttcagcagcgccttctgcaggaagcatggagagacccaggacaccagccagagcagcctgcccggcaccctgcactgctacacaggcatccgggagggcggagatgacacagaggtggagagcgaggccttcagctgcagcgagggcagcgagcagcaggatgccccagatgacagccagaagaacctgggggacacagatgctgctgtggccgaggtgcggcccagcctggaggtgggctacctgaccagcgccctgcaggacttcaacatcagcaccttcagcgagctggaccggctgagcaccagcgaggtggtgatgttcctggagagctgccagctgggggactacagcagcggggacagcgtgtctgaatgtagcagcaagggcaccctgagcaaggagatgaacaaggagctgaaggccagcgagattggagagaagtacaggaagcagccctgtgaggaggagaccctgggcacctgtgaggagtggattgagagcgaggaggatgactacagcctgaagaacaccagccagctgacccagtgcagcctggagaccctgtctgaggtgctgaccaagatccggcaggagctgcagaccaacagcgaggactgcaatggcaaggacaccggcagcctgctgctgctgaatgtgaacaacaacatgaccacagagaacctgaaggagaagagccccttccgggagaccaccggcagcagcagccacgccagcgagcccaccccccaggccgccgccctggacacagagggcagcagccccatcagcggcatgccccagaatgaaaacccccagagcaggcctgaggcccggagtgatgctggccggcagacagatggaggagaggaggacctgcctgagcctgtggagcccagcgccctgtgcagcgacagcgtgatggagcccagcattgagcagagcagcaactgtgaggccgagaccaccttccagtgccagatcgccaccgtgaccagcgaggtgatcaacgtgctgatcaacaaggaccagaacctggtgattgagaagggggacaactggaccatcatcagcggcgtggccgtgctgccccacgtggaccaggtgaccctgtgtgacatccctggggacatccccatcagccaggaccagggcgagctggaggccggctgcatccctgtgaccagcgctgagaagagccctgaggccagccacacaggccctgccttccaggaggccccctgtggcaacaacctgagctgcccccaggaggatgtgagcagcagcggccagagcaccaactttgacaagagccggctgaggaacagacctgtgaagcccagcatctggatcagcagccagatctatgaccagaactttgagacccagatcgtggccagtgaccacacctactacaacagcaagctggagcccagcggcaagaacaagaacagaagcaagatcagcaacaaggaccagagcaacaagcctgtgaagaccagcgccagcagccgggtggagacccaccagagcgaggtggcccagagcttcagcggggagaaggccaacaccaagacccagaggagccagacccagaccatcctggccaatgctgacaccagcacccccacagactgcagcccagacaccctgagcaagatccggcaggaggtgggcccccccctgccccccctgctggcccccctcatcgccaccccacccaggaccagccagcccctgagccccctcatcagcagcagcagccccagcagccctgccagccctgtgggccaggtgagccccttccgggagacccctgtgcccccagccatgagcccctggccagaggacccccggcgggccagccccccagaccccagccccagccccagcgctgccagcgccagcgagcgggtggtgcccagccccctgcagttctgtgccgccacccccaagcacgccctgcctgtgcccggccgcctgcccccctgtgccagcggccatgctgctgtgggcggcccccaggagaacagcgtgaagatcctggacaccatgtacccagagctgagcgcccgggcccggaccctgaacatcctgaagggcaacatccagctgacccggggccccccagctgactgcaagaacctgcccggccctgccagcgccatgattggcttcaagaccatcaccagcgctgccacagcctttgtgaagacaggcagcagcagtggaggagactgcaaccaggacaagagccgggacctgggcacccagcaggacagcagcggcaagaggaccctgagcaccagcaccctgcggagcgccaagaggctgcggctggacaccggcagccctgagcctgagacccggggcgtgacagctgagggcatccacaagaacctgcccggcaacctgcccccagctgaggtggccaccaccaatgaggagaggagctgcagcagccctgctgtgtctgctgtgtcccagctgcccctgagccccaaggagaccgtggagagccatgacaaggccatcgccaatgccctgaagaagattgctgagttctcctttgacctgctgcctgtgatccgcagccacgtgtatgtgggcaacatcagcaagaagcctgtgatgagggaccaggagaaggaggtggtgtatgagttcagcaccaccaagaagcacctggccgagtgcctgctgcacagcatcctgtctgagctgaagatccagaagatctccatggaccacaactacatccacgccctgtgccgggtgtatgtgggcatctgccggcagctgggggacctggagcgggcccggctcttctgctacagcctgctgaaggaggacttccctgagagcgagaagctgaccctcttcatcgccaacatgtggcatgacatcttcctgagccagagcgtcatcaacaaggccatgcagctggtggcccggcagagggccaagggggaggtgctgaactgcctgcgggccttcctgaactgggagaagaatgcccctgtggatgtgggcttcatggtgtccaagctgctgctgaccatccagctgtgccccaagacagagttccagcccagcgagaagtttggagaggacctgagtgacaacacctgggagtacatctttgccatcgacctgctgtgctgccaccagaagtggatctggacccatgacaacatcatcagcaaggagctgtggcctgtgatggacaagtggatcaagtacagaaaaggacatgccaacatcgcctacaccccagacatcatcatcgccagcatcctgcggctgattggccgcctgggccagctgggcctgaaggagggcttccccagcgctgtgaagaacatcagcagcgtcatcggcatgttcatccagcacgcccatgatgaggacatcccctggggcatccagctggccgctgtgtatgccctgtgtgacctgagccccagcaacccagctgagatcagcaagatcctggaggcctggaggcgggaggccagcaagtctgtgcccagcgccatcgtgtcctgcctggaggaggtgtctgccctgagcacagaggagctgggctag

SEQ ID NO: 185913 - DNA, 6801 bp, Artificial Sequence
  derived and/or modified sequence
atgatgcccggcgagacccacagcgccgcccccggcaccgccgccgatctgagcaggtgtcaaggttgtgccagcctccaacaaaacctcaatgagtatgtggaagctctgattactctaaaacagaaaataattaacacagataacctcctgactgagtaccagaagaaatgcgatgaactgcagttcgctagaagggaaaattctaacttgcaccaccaggtcgaagaaatgctccagaagataagtccattacagaagtgccaggaggagctgggctcacttaaggctgagctagaagaaaagaaaagcagtctaaagctctatcaagatactcatcaggagtacgccagagtgaaggaggagtgtctgaagagcgatgcccagaagaagaagctggaggctaaggtgaaaaagttgcaggaagcggccgtgaagcaaacccaggatttcaagcagctacgcaatgagaaaaaaatactcgagaaggagtttaagaagacacaagagcgtctagatgagtttagcaagcaaaagaatgaaaaggaattgcggcatatcggcactcagatctccagtgacagttacgggtccatcgacaaaaggaaggtaaaattgctgctgaaagaactgtggttgtgcgtgaacacaacacaccggctgcctggagaaggatcccgatgtgtccctgaaaaaccagctaaggcaatcacctcatcacgcgtgcctggcgaggacggcacgttgcctccgacacaggggtcacccctcagaaccagcaacgtgcagacatgtctgactaagctttctatggagatcaaggaggactttctgtgccagaatgtcgagaagcaatccagcagcggcactaactgcagttcagatcacgtcttcaacgaaaatggcaatctggaggtgttggtccagtctcatcgcgatggggggtccaccgaatttgtcgatcatgaccacttttttgacgaggacttgcaggcggctattgacttctttaagcttcccccgcctcttctaagtccagtcccttcaccaccaccgatgagctcaccccaccctggcagcttgccaagcagctttgcccccgagacttacttcggcgaatataccgattcaagcgataacgacagcgtccaattacggaattcagcggagtgtgtgagcgaagatgacaccaccgaatcacagaactactttgggtcactcagaaaaaataaaggtagtggcacatgggaggagaaaccaaagagccatgaggcaattcaagccttgaatacgtgggaagtgaacaaggtgaccacctcgggactggaaaccttcacagccacactgagggaatccagcgcaacccactcattggtcggggagaaacattggaccaccgcctcaagatcaatgtccgataggaaaagagatatcctgcacgagaccaagacccagatggaagtgagggagatggacaaaagtgtgcagaccgaaaaaacaatccacaagctgaccagggggctatgcattgagcgcctgagtgcatcacctgcccaggagaaggaggccgctcccggcaagtccgagctgtgttctagtcccttgggcaagagacccctgaacgagctgatggaatccgagggaaaaactgtattatcaaagatgatggggtcacccaagagcgagtttaccaagtggactcgcatcaatgaaataaccagtgagcccgaccgtataacagtgtctgggcactttcaccgcctgagccgcgaactggagaaagagaaggaggatacacaggggtttaccctgggggagtcccctgaaagtgaagatgatgacagtggggacggaatggatgtggccggcctcgacatcgaaacctcgtttagcagctcaagtaccctcgtcgcgctgtccgtcggcagcaacccccagtccagttcgggtctggactgcgggaacgacactgacatcactaccaaagtattctccactgagcctcaccatagcgaacacaagctgcagactaagacactgaacacactccacctccagtcggagcctccagaatgctccatcggagggaacaatctagagaattccctgtgtgcactgagccccgaactgggagcttccaattttaacgatcaaaagtcttccggcatcgaatatacaaaagttgtgaagggcctcacaaagattcattccctccctcggagcgtgtttatgaaggccacaaaagacgggcaatgcgaatcgcaggaccctagaatcgaattgacccttaataagccagattttaccagtttaattgggagccaggccgctctgataaaatccggcctgggttttgtcaagtctactagctggcaccacagcgacctactaaggaaaggtggggaagagtcgctgagggcaaagtcggaacatgagcagaagacaagccaccaactgcagaaggccatgcctttcctgcagaacagaggccccaccccaaagcccgaccttctccgcgaaaacaacaatcctgtggaattcaagactactgcctccgtgcttcctaatcaggtgtcggtgataactaagcagacacggccagagaaggtgcagtcagctaagctagagcatttgcgtcctcatcgggttgagccaacgctggtcacagaaaatagcgggaacaagacaggcatgtctaccgtcgcaaagtgcgacggtgagcgtgacgatacgacccagaacattacggaggtggccgctgttaaaagcatctctcctgaagtaagcgcttcgcgccgcaaacttgatttcaactccccaggcggcagcagccctgtcgagaacagcgactgcagtaccaactccagactgtcctttagccctgaaaacatcctaattcagaaccaagatatcgttagagaggctgctgtccaaggggacggtcagaaacagagacagccgcaggcaactgacctagattcttctggcacgcatggtagcgagatgctaccagctaccgaggtgaccgtaagcgggggctttagtgtggaggagaccagctgcggagacacaggacgctccggcggggaagctcttgccgtggccaatgacagcaccagcacccctcagaatgccaatggcctgtggaagcttaagtccacaaccccaggtggagccctgcctgagtgtttcggcaccaccgacacaaccttctcctctgctttctgcagaaagcacggcgagacacaagacaccagccagtctagtctgcccgggacactacactgttacacgggcatacgggagggcggggacgacacagaggtggagtccgaggctttttcctgctctgaggggtccgaacaacaggatgccccagacgactctcagaaaaatcttggtgataccgacgcagctgtggcagaagtccgcccttccctggaggtgggatatcttacatcagcccttcaggacttcaatatctcgaccttcagcgagttggacagattgtcaaccagtgaggttgtgatgtttctcgagtcttgtcagcttggggattattccagtggcgattcagtgtcggagtgttcttccaagggaactctatctaaggagatgaacaaggagcttaaagcctcagagataggtgaaaaatatagaaaacagccttgtgaggaggagacacttggaacctgcgaggaatggattgagagcgaggaggatgactattccctgaagaacacaagtcagctgactcaatgcagcctggaaactctcagcgaggttttgactaaaattcggcaggagctccagacaaactcggaagattgtaatgggaaggacacaggaagtttactgttgctgaatgttaataacaatatgactaccgaaaacttgaaggagaagtcaccttttcgggaaactaccggatcctctagtcatgcaagcgagcctacgccccaggctgctgctctcgacacggagggatcgtcccctatttccggtatgcctcagaacgaaaatccacaatcccgcccggaggcccggtccgacgctggaaggcagaccgatggcggggaggaggatttgcccgagcccgtggagccctcggcactgtgctccgacagcgtcatggaacccagtatagagcagtcttccaactgtgaagcggaaaccacttttcagtgtcaaattgctacggtaacgagtgaagttatcaacgttctaatcaacaaggaccagaacctggtcatcgaaaagggcgataattggaccatcataagtggagttgcggttctcccccatgtggatcaggttaccctgtgcgacatccccggggatattcccatcagccaggaccaaggtgagctggaggccgggtgcattccggtgacaagcgcggagaaaagtccggaggcatcacacacaggcccagcattccaggaagctccctgcggcaataacctgtcatgtcctcaagaggatgtgtcctcctcaggacagagtactaatttcgataagtctagactgcgcaatagacctgtgaagccttctatctggatctcctcccaaatctatgaccagaacttcgagacacagatagtggcgtcagaccacacttactacaacagcaagctcgaaccatctggcaaaaataagaacagatcaaaaattagcaacaaggatcagtccaataaaccagttaaaacgtctgcttcctcccgcgtggagacccaccaatccgaagtagcccagtcttttagcggagaaaaggctaatacaaaaacgcagcgatcccagacacagactattctggctaatgccgatacatcaacaccaactgattgtagtcccgacactctctcaaagatcagacaggaggtggggccgcctctccccccactattggccccattaattgccacacccccacgcacttctcaacccctgagtcctcttatttcctcgagctcacctagctctccagcatcccccgtaggccaggtctcgcctttccgcgagactcctgtgccgcccgccatgtctccctggcctgaggaccctcgacgagcaagccccccagatcccagccccagcccctcagccgccagtgcctctgagagagtggtgccaagcccactgcaattctgcgccgctactcctaagcacgctctccctgtgcccggtcggttgccgccctgcgcttcaggtcacgccgctgtgggggggcctcaagaaaattccgtcaaaattctagacacaatgtacccggaattgtccgctcgagcccggacactgaacatcctgaagggtaacatccaattgacacgcggaccccctgctgattgtaagaatctcccgggacctgccagtgccatgattgggtttaaaaccattacgagcgccgccactgccttcgtgaaaacaggcagcagctctgggggagactgtaaccaggacaagagcagggatctgggcactcagcaggatagttcaggaaaaagaaccctgtcaacctcaacactgcgctccgctaagcgcttaagacttgataccggaagccctgaaccagagacacgtggtgtgacagctgagggtattcataagaacctccctgggaatctgccccccgccgaagtggccaccacaaatgaggagagatcctgctcatctcccgccgttagcgcagtgtctcagctgcctctgtctccaaaggagacagtggaatcccacgataaagcgatcgcaaacgctcttaagaagattgccgagttcagttttgatctcttgccggtgattcggtcccacgtgtatgtgggaaatatctcaaaaaagcctgttatgcgggatcaggagaaggaagtggtctatgaattttctaccactaaaaaacatcttgctgagtgtctgctgcactccattctgtcagaattaaaaattcagaaaatcagtatggaccacaactatattcacgccctgtgtcgtgtgtatgtgggcatctgcagacaattgggcgatctggagagagcccggttattttgttacagcttgctgaaggaagacttccccgagtctgaaaaactgaccctatttatcgccaatatgtggcatgatatcttcctgagtcaaagcgttatcaacaaggccatgcagttggtggcccgccagagggctaaaggagaagtgttgaattgcctgagagcattcctcaattgggaaaaaaacgctccagttgatgtgggctttatggtctcaaaacttctactgacaattcaactctgccctaagaccgaatttcagcccagtgaaaagtttggtgaagaccttagtgacaacacgtgggaatacatcttcgctatcgatctgctgtgttgccaccagaaatggatatggactcacgataacattattagcaaagagctgtggccagtcatggataagtggatcaaatacagaaaggggcatgccaacattgcatatactccagacattataatcgccagcattcttcggctaatcggacgtcttgggcaactgggcctgaaagaaggttttccctctgctgttaagaacatttcatctgttatcggcatgttcattcagcacgcacacgatgaagacattccctggggcattcagctcgctgctgtgtacgctctttgtgacttgtcaccatccaacccggccgagatttcaaaaatcctggaagcatggaggagggaggcatccaagtcggtgccctccgctatcgtctcttgcctagaggaagtgtctgctctcagcaccgaagaactgggttag

SEQ ID NO: 185914 - DNA, 6800 bp, Artificial Sequence
  derived and/or modified sequence
atgatgcctggggagacacactctgctgcccctggtacagccgcagacctcagcaggtgccagggttgcgcatcactgcagcagaatctcaatgaatacgttgaggccctgatcacactaaaacaaaagattatcaataccgacaacctcttgacagagtaccagaagaaatgcgacgaactgcaattcgcaagaagagaaaactccaatctccaccaccaggtagaggaaatgctccaaaagatctcccctctccagaagtgccaggaggaactgggtagtctcaaggccgagctggaggaaaagaagtcaagcctgaagctctatcaggacactcatcaagagtacgcgagggtgaaggaggaatgcttaaaatccgatgctcaaaaaaagaagttggaggcaaaagtgaagaagttacaggaagccgctgtgaagcaaactcaggacttcaaacagcttaggaatgaaaagaaaatcctggagaaggagttcaagaagacccaagaacggctcgacgagttttcgaagcagaagaacgaaaaagagctgaggcacatagggacccaaatcagcagcgatagttatggctccatagacaaaaggaaagttaagctgctgctgaaggaactttggctttgtgttaacacaactcatcgcttgcccggagagggaagccgctgtgttcctgaaaaaccagctaaggccataacgagcagtcgcgtgcctggagaggacggaacacttccacccacccagggcagtccgctccgaacatcaaacgtgcagacatgtcttaccaagctctccatggagattaaggaggacttcttgtgccagaatgtggagaaacagtcgagttcaggaaccaattgctccagcgaccacgtatttaacgaaaacggaaatctggaggttctggtgcagtctcatagagatggagggagcacagaatttgttgatcacgaccattttttcgatgaggacttgcaggctgcgatcgatttttttaaattacctccaccgctcctctcgcctgttccgtcaccaccgcctatgagcagcccacacccgggtagcctcccgtcttcgtttgctccagagacttattttggcgagtacaccgacagcagtgacaatgatagtgtgcagctgagaaacagcgctgagtgtgtgtctgaggacgatactacagagtcccagaattactttggttccctccggaagaataaaggcagcggaacttgggaagaaaaacccaagagtcatgaggccatccaggctctcaatacctgggaagtgaacaaagtcactacctccggcctcgagacttttaccgccaccttacgcgagtcgtccgccacccattcactcgtgggcgaaaagcactggaccaccgcgagcaggtctatgagtgacagaaagcgtgatattctccatgagactaaaactcagatggaggtgcgggaaatggacaagtcagtccagaccgagaaaactatacacaaacttacaaggggcctgtgtatcgagcgcttaagcgcttctccagcccaggagaaggaggctgcaccgggaaaatcagagctgtgctcgagccctctgggaaagcgccctctgaatgaactgatggagagcgagggaaagacggtattgtctaagatgatgggttcaccaaaatccgagtttactaagtggacccgaatcaatgaaataacttccgagcctgataggatcaccgtgtctggccacttccacagactgtccagggaacttgaaaaggaaaaggaggacacccagggattcactctcggcgagtcccccgagtccgaggatgacgattcaggtgacggtatggatgtagccggattggacatcgagacctcattcagctcttcttctacgctggtagcattatcagtgggctccaacccccagtcttcgtccggccttgactgtggcaacgatacagacattactacaaaagtcttctcaacagaacctcatcacagcgagcacaagctgcagactaaaacactcaacactcttcacctgcaatccgagccgcctgaatgttcaatcggcggtaataatttggaaaactctttgtgcgccttgagcccagagctgggggcatccaactttaacgaccagaaaagctccgggatagaatatactaaggttgtgaaggggctgacaaaaatacactctctgcccaggtcagtgtttatgaaagccacgaaagacgggcagtgcgagtcccaggatccacgcatagagcttaccctgaacaagcccgacttcacctcccttattggctctcaggccgctctcataaaatctggtctgggcttcgtgaaaagtacttcctggcaccactccgatctcctgaggaaggggggagaggagtccctgcgggcaaagtccgagcatgagcagaaaacgagccaccaattgcagaaggctatgcccttcctgcagaatcgaggtccaacaccaaaacccgacttgttgcgcgagaataataacccagtcgaattcaaaactacggctagtgtgctcccgaatcaggtttctgtgatcacaaaacagactaggccagaaaaggtgcagtcagccaaactggagcatctgagaccacatagggtcgagcctactctggtgacggaaaactcaggcaacaaaaccgggatgagtactgtagccaagtgcgatggggagcgggacgacaccacccagaacattactgaagtcgcagcagtcaagtcgatctctcctgaggtgagtgcttccaggcgaaagctggactttaactctcccggaggtagcagccccgttgagaattctgactgctccacaaatagtcgtttgtctttttcccctgagaacatccttatccagaatcaggatattgtgcgtgaagcagcagtacagggggatggtcagaagcagaggcagccccaggccaccgaccttgatagtagcggaacccacggcagtgagatgcttccagcaactgaggttacggtgagtgggggattttccgtggaggagacctcttgtggcgacactgggaggagcggcggagaagcactggccgtcgcaaacgactcaacatccacgcctcagaatgccaacggactgtggaagctgaaatccaccactcctggaggggctctgccagagtgcttcggtactacagatacgacttttagcagtgccttctgcaggaagcacggcgagacgcaagacaccagtcagtcttctctgccgggaaccctccactgctatacgggaattagagaaggtggtgacgatacggaagtcgagtccgaggctttctcctgcagcgaggggtctgagcagcaggatgctcccgacgactcacagaaaaatctgggagatactgatgcggcagtcgctgaagttaggccatctctggaggttgggtacctgacatcagctctccaggattttaacatatcaaccttctctgaattggatagattgtcaacctccgaggtagtgatgttcctggagtcctgtcaattgggagattattcttccggggacagcgtctcggagtgcagtagcaagggtacactgtccaaggagatgaacaaagagctgaaagcaagcgagatcggagaaaagtacagaaaacagccctgtgaggaagaaaccctcggaacttgcgaggaatggatcgagtctgaagaagacgattacagtctgaaaaacacctcccagctgacgcagtgctcgctcgaaaccctgtcagaagtgctgaccaaaattaggcaagagctccagacgaattcagaggattgcaatggcaaggacactggctccctactcctcctgaatgtgaacaataatatgacgacggagaacctgaaggagaagtccccttttcgggaaaccaccggcagttcttcccacgcatctgagcccacgccgcaagccgctgcactcgatacagagggcagctcgccaattagcggtatgccacagaatgaaaatcctcagtcaaggccagaagcgaggtccgatgccggaaggcaaacggacggcggagaagaagatctgcccgaacccgtggaaccctctgcactatgtagcgactccgtcatggaaccctcgatcgagcagtctagcaactgcgaggctgagaccacgtttcaatgccaaatagccacagtcacaagcgaagtgataaatgtcctaatcaataaggaccagaatctggtgatcgaaaagggagacaactggactataatttccggcgtcgccgtgttacctcacgtggatcaggtcaccctctgtgatattccaggcgatatccctatatcacaggaccagggtgaattggaggcgggttgcatacctgtcacctccgccgagaagtcccctgaagcctcacatactggccctgctttccaggaggctccttgcgggaacaatttatcctgtccccaggaagacgtgtccagttccggtcaatccaccaactttgataagtccagattaagaaacaggcctgtaaaaccttcaatctggattagctcacaaatatacgaccagaattttgaaacacagatcgtcgcctctgaccacacttactacaacagcaagttggagccctcaggtaagaataaaaataggagcaaaatctccaataaggatcagtctaataaaccagtcaagaccagtgcctcaagccgtgtcgaaacacatcaatcggaggtcgcccaatcattcagcggggaaaaggccaacactaaaacccagagaagccagacccaaaccattttagccaatgctgacacatccacccccacggattgctccccagatacgctgtccaagataaggcaggaagtgggaccacccctgccgcctttactggcacccctgatcgctacaccccctcggactagccagcccctctccccgctaatatcttcatcttcgcccagctccccagcatctcctgtcggtcaagtgtcgccctttcgggaaacccccgtgcctcccgctatgtctccttggcccgaggacccgagacgggcttctcctccagacccctctcccagcccgtctgcagcgtccgccagtgaacgagttgttccctcccctctgcagttctgtgccgctactccaaagcatgcgctcccagtgcctggccgtctaccaccctgcgcctccggacacgccgcagttgggggacctcaggagaactcggtgaagattctggatacaatgtaccccgagctgtccgctcgtgcccgaacattaaatattttgaaaggcaatatccagctaacccgtggccctccggctgattgtaagaacttgcccggaccggcttctgcaatgatcggctttaagaccatcacaagcgccgcaaccgcctttgtgaaaacaggatcatcctccggaggggactgcaaccaggacaagagtagagatctcggtacacagcaggatagttcggggaagagaaccttgagcaccagtactctgcggagtgcaaagcggctgcgtcttgatacagggagtcccgagccagagacccgaggtgtcacggccgaaggaatccacaagaatcttcctggcaatttgcccccagccgaggtagccactaccaacgaggaacgctcatgttcaagcccagccgtcagtgctgtaagtcagttgccgcttagccctaaggaaaccgtcgaaagccacgataaggcaatcgcaaatgccctgaaaaagatcgctgagttcagcttcgacctgctgccggtcattcgatctcatgtctacgtgggtaacatctctaagaaaccagttatgcgtgaccaggaaaaggaagtagtctatgagttcagcaccacgaaaaaacacttagccgaatgcttactgcactccattctgagcgagctgaagattcagaagatctccatggatcacaactacatccacgcactgtgcagggtttatgtgggcatatgcaggcagctgggcgatcttgagagagccagactgttctgctacagccttcttaaggaggacttccctgagtcagaaaaactgactctgttcattgccaatatgtggcatgatattttcttgagtcaaagcgtgatcaataaagcaatgcagttggttgccagacagagagctaagggtgaagtactgaactgtctccgggcattcctgaattgggaaaaaaacgccccagtagatgttggctttatggtgagcaaactccttctcactatccagctttgtcccaagacagagttccaaccatccgagaaattcggcgaggatctgtccgataatacgtgggaatatatatttgccatagatctactgtgttgtcaccagaaatggatctggacccacgacaatattatttccaaggagctgtggccagttatggataagtggataaagtacagaaagggccatgcaaacattgcctatacccctgatatcatcattgccagcatcctccggcttattggccgactcggccaattgggcctgaaagagggttttccatccgcagttaagaatatatcctctgtgataggcatgttcattcaacacgcacacgatgaggacatcccctgggggatccagctggccgctgtttacgcgctgtgcgatctgtccccgtccaatccggcagaaatttccaaaatcctcgaagcttggcgaagagaagcatctaaaagcgtgcccagcgccatcgtgagctgtctggaagaagtgtcagccctttctacagaggagctcggata

SEQ ID NO: 185915 - DNA, 7927 bp, Artificial Sequence
  derived and/or modified sequence
ggggccgcgccgggtagcgtttctttttagtgcctgaggcagctctggctcggagagccttttgctagccccacggggacctctgtgcacggatggacccgcccggacctggcgggaagcggcctggcaggcggcggccccggcggcatcagcagagacaggacggggccgacgccgcgggcccctgaggcgtgcgtgcccaccgggcccggcggcggcaccatgatgccgggcgagacccattcggcggcgcccgggacggcggcggacctgtcgcgatgtcagggctgcgcctctctgcagcagaatttgaatgaatatgttgaagcattaattaccttgaaacaaaaaattatcaatacagataatttgttaacagaatatcagaagaaatgtgatgagctgcagtttgcaagaagagagaatagtaatctgcatcaccaagtggaagagatgcttcaaaaaatttctcctctacagaaatgtcaggaagaactgggatctttaaaagcagagctagaagagaaaaagagttctttaaagttgtatcaggatactcatcaggaatatgctcgtgtaaaggaagaatgcttgaagagtgatgctcagaagaagaaactagaagctaaggtgaagaagctgcaagaggctgctgtcaagcaaactcaggacttcaagcaactgagaaatgaaaagaaaatacttgaaaaggaatttaagaagacacaggaaaggcttgacgaattttctaaacagaaaaatgaaaaggagttgagacatattggaacacaaatttcaagtgattcatatggaagcatagataaaagaaaagtgaaactgcttctgaaggaactctggctctgtgtaaacacaacacacagactacctggtgaaggcagcaggtgtgtcccagaaaaacctgccaaagcaatcaccagctccagagtgcctggggaagatggtacgctacctccaacacagggcagccctctcaggacctcaaatgtgcagacatgcctcacaaaactgtccatggagataaaggaggactttttatgtcaaaatgtggaaaaacagagctccagtggaacaaattgtagttctgaccatgtttttaatgagaatggaaatcttgaggttttagtacaaagtcatcgtgacggtggtagtactgaatttgttgatcatgatcatttttttgatgaagatcttcaagctgcaattgacttcttcaaacttccccctcctcttctgtcaccagtgccctcgccccctccgatgtcatcacctcacccgggttccttaccgtcttcatttgcacctgaaacctactttggagaatacacagattccagcgataatgactcagtccagcttagaaattctgctgagtgtgtttcagaagatgatacaactgaatcacagaattattttggctcattgagaaaaaataaaggaagtggcacatgggaggaaaagcccaaatcacatgaagctatccaagctctgaatacatgggaagtaaataaagtgacaacttctggactcgagactttcacagcaacactgagagaatcttctgccacacactccttagttggtgaaaaacactggaccacagcatctcgatccatgagtgatagaaaaagagacattttacatgagacaaaaacacaaatggaggttagggagatggataagtcagtacaaactgagaagaccattcataaactcactcgaggtctatgcattgagagattgtctgccagccctgcacaagagaaggaagctgcccctgggaagtctgagttgtgttcttctccccttggcaaaaggccattaaatgaactcatggaatctgaaggaaaaaccgtattgtctaaaatgatgggatcgcccaaatcagagtttactaagtggacacgaattaatgaaatcacttctgaaccagaccgtatcacagtttctggccattttcacagactatctagagaattggaaaaggaaaaagaagatactcaagggttcactttaggagaatcacctgaatcagaagatgatgactcaggtgatggaatggatgtagcagggcttgacattgaaaccagtttttcttcctcttctaccttggtagcattgtctgttggcagtaatccccagtcttcttctgggttagactgtggtaatgatacagatattactactaaagtattctctactgaaccgcatcattcagaacataaattgcaaactaaaactttaaacacattacatctgcagtctgagccaccggagtgttctataggaggaaacaacttggagaatagcttgtgtgccttgagccctgaattgggagcatctaattttaatgatcagaagagcagtgggatagaatatacaaaagtagtaaaaggcttgaccaaaatacattcacttcctcggtcagtatttatgaaagctacaaaagatgggcaatgtgaaagtcaagatccaagaattgagctcacactaaataagccagatttcacatcattaataggttctcaggctgccttgatcaagagtggtttgggttttgttaaaagtacttcatggcaccatagtgatttattaaggaaaggtggcgaagaaagtctgagagccaaatcagaacatgaacagaagactagccatcagttacaaaaggcaatgccattcctacaaaatagaggaccaacacccaagcctgatcttcttagagaaaataacaatcctgtagaattcaagaccactgcatcggtgttgcctaatcaagtatcagttatcacaaaacagacaagacctgaaaaggttcagagtgccaaattggaacacttgaggccacatagggttgagcctaccttagtaacagaaaatagtggcaacaaaaccggtatgtcaactgtagcaaaatgtgatggggaaagagatgatacaacacaaaacatcacggaggtggctgctgtgaaaagcatttcaccagaagtttctgcctctaggagaaaattagattttaattctccaggtggttcttcaccagtagaaaattctgattgttccacaaatagcagattatctttctctcctgaaaatatcctcatccaaaaccaagacattgtgagagaagctgcagtgcagggagatgggcagaagcaaaggcagcctcaggccacagatctggactccagtgggacacatggcagtgagatgcttccagccacagaagtgactgtgtcaggagggttttctgttgaagaaaccagctgtggagacacagggagatctggtggtgaggccctggctgttgcaaatgattctaccagcacaccacaaaatgctaatggactttggaaattgaaatctacaactcccggtggtgctttgcctgagtgttttggcaccacagacactactttttcttcagcattttgcagaaaacatggagagacacaggatacctcccaaagtagcctgcctggtaccttacattgttacacaggcattcgagaggggggagacgacactgaggtagagagtgaggcatttagctgcagtgaggggagcgaacagcaagatgctcctgatgactcacagaaaaatttaggagacacagatgctgctgtagccgaggtgagaccttccttagaggtaggttatttgacgtcagctctgcaagattttaacataagtactttttctgagctggatagactttccacatcagaggttgtgatgtttcttgagagctgtcagttaggggattatagttcaggggactctgtttctgaatgttctagtaaaggaaccctaagtaaagaaatgaacaaagaattaaaggcaagtgaaataggagaaaaatacagaaagcaaccctgtgaggaagaaacacttggaacctgtgaagagtggattgaatcagaggaagatgattattcgttaaaaaatacaagtcagctcactcagtgttctttggaaactctgtctgaggttctgaccaagattaggcaagaacttcaaacaaattctgaagattgcaatggtaaagatactggcagtttattgctcttaaatgtaaataacaacatgaccactgagaatttaaaagagaaaagtccatttcgggaaacgactggctcctcatcacatgcttcagaaccaaccccacaagcagctgccttggacactgagggcagctctcccatcagcggtatgcctcagaatgaaaaccctcagagcagaccagaggcccgttcagatgcaggcaggcaaaccgatggtggggaagaagacctgccagaacctgtggagccatcagccttgtgctctgactctgtgatggagccatccatagagcaaagttctaactgcgaggccgaaacaacatttcagtgtcagatagcaacagtgacctcagaagttataaacgtacttataaataaggatcagaatctagtcattgaaaagggggacaactggacaatcatcagtggtgtagctgtcttgccacatgtggaccaggtcacactgtgtgacattcctggagacatccctatttctcaggatcaaggagagctggaagctggttgcatcccagtgacttctgctgagaagtccccagaggccagtcacactggccctgcatttcaggaggctccatgtggcaataatctttcatgtccccaagaggatgtttcaagcagtggtcagagcaccaactttgataagagtcgtttgcgaaatagacccgttaagcctagtatatggattagttctcaaatctatgatcaaaacttcgagactcagattgttgcgtctgatcacacatattataactcaaaactagagccatctggcaaaaataagaatcgatcaaagatttcaaacaaagatcagtcaaacaaaccagtaaaaacttcagcgtcgagcagagttgaaactcatcagagtgaagttgctcagtcattttcaggggaaaaagctaatacaaaaactcaaagaagccaaactcagaccattttagcaaatgctgatacatccactcctacagattgttctcctgacacactgagtaaaatacggcaagaggtggggcctcctttgccgcctctgcttgctcctctgatagctacacctccaaggacttcacagccactgtctccactgatatcgagttctagtccttcctcaccagcctctcctgttggccaggtttctcccttccgtgaaaccccagtgcctcctgccatgtctccatggccagaggaccccagacgtgcctctcctccagatccttctccatctccatctgcagcttcagccagtgagagggtagtgccgtctcctctgcagttctgtgcggccacgccgaagcacgcacttcctgtgcctggccgactcccaccctgtgcatctggccacgctgctgtgggagggcctcaggagaattctgtgaaaatccttgacaccatgtatccagagttatctgccagggcccggaccctcaacatcctcaaagggaatattcaactcacacgaggtccgcctgctgactgtaagaatttaccgggacctgccagtgctatgataggattcaaaacgatcacttcagcagcaactgcttttgtcaaaactgggagcagctctggtggtgactgtaaccaagacaagtcaagagatttggggactcagcaggattcaagcgggaaaagaacactgtcaacgtctacactgagaagtgctaaaagactgcgcctggacactgggtccccagaaccagaaaccaggggagtcactgcagaaggaatccacaaaaacctcccagggaacctccctccagctgaagttgcaacaacaaatgaggaaagaagttgttctagtccagccgtcagtgcagtttcacagttgcctttaagcccaaaagaaactgtggagtcccatgataaagccatagctaatgccctgaagaaaattgcagagttttcttttgatctgttacctgtcattcgtagtcatgtgtatgtgggaaatatctccaaaaagcccgtaatgagagatcaagagaaggaagttgtttatgaatttagcacaacaaaaaagcatttagcagagtgcttgcttcactctattctctcagaactaaaaattcagaagatatctatggaccacaattacattcacgccctctgcagggtgtatgtgggtatttgtcggcaactcggagacttggaaagagctcgtttgttttgctacagcctacttaaagaagattttccggagtctgaaaaattaactttgtttattgcaaacatgtggcatgatatatttctctctcaatcggtgattaataaagcaatgcagttagttgccaggcaacgtgctaaaggagaggttctgaactgcttgagagcttttcttaattgggaaaagaatgccccggtagatgttggcttcatggtttctaagctgcttttgaccatacagttatgtccaaaaacagaatttcaacctagtgaaaaatttggtgaagacctaagtgataacacttgggaatacatatttgccattgatctgctctgctgccatcagaaatggatctggacgcatgataacatcataagtaaggagctgtggcctgtgatggataaatggataaaatacagaaaaggacatgcaaacattgcgtatactcctgatattattatagcctcaatactgaggctgattggtcgtttaggccaattgggtttgaaagaaggatttccatctgctgtgaaaaatattagttcggttattggtatgtttatacagcatgctcacgatgaagatataccatggggtatacagttagcagccgtgtatgctctttgtgacttgagtcccagcaatccagcagaaatttccaagatcctggaagcttggcggagagaggcctccaaaagcgttccgtctgcgattgtcagctgcctagaggaagtcagtgccctgagcacagaggagcttggctgacctgggatgccactgaggcttgagaagtgccttgacacattttgaacacaaatagtttgatcagctttcagaatacaaagggaggtttcaaaacaaaaagacataaaatagataaaacagaccagaggctctccttattgtttggcaaggagacaggagaaacaagcagtcgcatagtcgtttttccctaaatctaatacgtttcacttaaggctgttgtgatctgtgacatatgggttatattattgtgtctttgtcaaacaacaaaaacttgaacttagccctttttttgctgcagaaagtgtccttttagtggcttcttaaaattgagtggcattttataatgaacttaccaatataaaaacatgatttggttcctgagctgttgttgttggacttgtgttccaatgagtgactaggaaaaaataaattggcaaaaacctagagttttctgctatctttgctggaaatgagttgcaaaagtttttctcaagatgtagtgcgtaattgatcagagcaaaacatgcagagcccttagcagaaacccactttaatgcattttcttcatatccctaaagttccttaaaaatatgtgacaatgcatcaggaagaggagaactgaagagtagaagttcccttgcagatttttttatcagtgacatgtaatgagcaattcacagatgagcgcaggcagagctctgtgtgccgtgtacatatggaccgtgctatgatgtgtctcacattggatgatattccactttgggaattttagtatttgtatatagaaaatgggtttaataactcaccatggttttgatttgtcttatattcgttatttcttaaaactcttgtatgtgtttttataataaaaaataaaagtaagccatggatattactgttctga

SEQ ID NO: 185916 - protein, 985 aa, Artificial Sequence
  derived and/or modified sequence
  misc_feature (1)..(1): Xaa can be any naturally occurring amino acid
XKDQNVLSPVNCWNLLLNQVKRESRDHTTLSDIYLNNIIPRFVQVSEDSGRLFKKSKEVGQQLQDDLMKVLNELYSVMKTYHMYNADSISAQSKLKEAEKQEEKQIGKSVKQEDRQTPRSPDSTANVRIEEKHVRRSSVKKIEKMKEKRQAKYTENKLKAIKARNEYLLALEATNASVFKYYIHDLSDLIDQCCDLGYHASLNRALRTFLSAELNLEQSKHEGLDAIENAVENLDATSDKQRLMEMYNNVFCPPMKFEFQPHMGDMASQLCAQQPVQSELVQRCQQLQSRLSTLKIENEEVKKTMEATLQTIQDIVTVEDFDVSDCFQYSNSMESVKSTVSETFMSKPSIAKRRANQQETEQFYFTKMKEYLEGRNLITKLQAKHDLLQKTLGESQRTDCSLARRSSTVRKQDSSQAIPLVVESCIRFISRHGLQHEGIFRVSGSQVEVNDIKNAFERGEDPLAGDQNDHDMDSIAGVLKLYFRGLEHPLFPKDIFHDLMACVTMDNLQERALHIRKVLLVLPKTTLIIMRYLFAFLNHLSQFSEENMMDPYNLAICFGPSLMSVPEGHDQVSCQAHVNELIKTIIIQHENIFPSPRELEGPVYSRGGSMEDYCDSPHGETTSVEDSTQDVTAEHHTSDDECEPIEAIAKFDYVGRTARELSFKKGASLLLYQRASDDWWEGRHNGIDGLIPHQYIVVQDTEDGVVERSSPKSEIEVISEPPEEKVTARAGASCPSGGHVADIYLANINKQRKRPESGSIRKTFRSDSHGLSSSLTDSSSPGVGASCRPSSQPIMSQSLPKEGPDKCSISGHGSLNSISRHSSLKNRLDSPQIRKTATAGRSKSFNNHRPMDPEVIAQDIEATMNSALNELRELERQSSVKHTPDVVLDTLEPLKTSPVVAPTSEPSSPLHTQLLKDPEPAFQRSASTAGDIACAFRPVKSVKMAAPVKPPATRPKPTVFPKTNATSPGVNSSTSPQSTDKSCTV

SEQ ID NO: 185917 - protein, 931 aa, Artificial Sequence
  derived and/or modified sequence
QSKEVGQQLQDDLMKVLNELYSVMKTYHMYNADSISAQSKLKEAEKQEEKQIGKSVKQEDRQTPRSPDSTANVRIEEKHVRRSSVKKIEKMKEKRQAKYTENKLKAIKARNEYLLALEATNASVFKYYIHDLSDLIDQCCDLGYHASLNRALRTFLSAELNLEQSKHEGLDAIENAVENLDATSDKQRLMEMYNNVFCPPMKFEFQPHMGDMASQLCAQQPVQSELVQRCQQLQSRLSTLKIENEEVKKTMEATLQTIQDIVTVEDFDVSDCFQYSNSMESVKSTVSETFMSKPSIAKRRANQQETEQFYFTKMKEYLEGRNLITKLQAKHDLLQKTLGESQRTDCSLARRSSTVRKQDSSQAIPLVVESCIRFISRHGLQHEGIFRVSGSQVEVNDIKNAFERGEDPLAGDQNDHDMDSIAGVLKLYFRGLEHPLFPKDIFHDLMACVTMDNLQERALHIRKVLLVLPKTTLIIMRYLFAFLNHLSQFSEENMMDPYNLAICFGPSLMSVPEGHDQVSCQAHVNELIKTIIIQHENIFPSPRELEGPVYSRGGSMEDYCDSPHGETTSVEDSTQDVTAEHHTSDDECEPIEAIAKFDYVGRTARELSFKKGASLLLYQRASDDWWEGRHNGIDGLIPHQYIVVQDTEDGVVERSSPKSEIEVISEPPEEKVTARAGASCPSGGHVADIYLANINKQRKRPESGSIRKTFRSDSHGLSSSLTDSSSPGVGASCRPSSQPIMSQSLPKEGPDKCSISGHGSLNSISRHSSLKNRLDSPQIRKTATAGRSKSFNNHRPMDPEVIAQDIEATMNSALNELRELERQSSVKHTPDVVLDTLEPLKTSPVVAPTSEPSSPLHTQLLKDPEPAFQRSASTAGDIACAFRPVKSVKMAAPVKPPATRPKPTVFPKTNATSPGVNSSTSPQSTDKSCTV

SEQ ID NO: 185918 - protein, 450 aa, Artificial Sequence
  derived and/or modified sequence
VKKTMEATLQTIQDIVTVEDFDVSDCFQYSNSMESVKSTVSETFMSKPSIAKRRANQQETEQFYFTKMKEYLEGRNLITKLQAKHDLLQKTLGESQRTDCSLARRSSTVRKQDSSQAIPLVVESCIRFISRHGLQHEGIFRVSGSQVEVNDIKNAFERGEDPLAGDQNDHDMDSIAGVLKLYFRGLEHPLFPKDIFHDLMACVTMDNLQERALHIRKVLLVLPKTTLIIMRYLFAFLNHLSQFSEENMMDPYNLAICFGPSLMSVPEGHDQVSCQAHVNELIKTIIIQHENIFPSPRELEGPVYSRGGSMEDYCDSPHGETTSVEDSTQDVTAEHHTSDDECEPIEAIAKFDYVGRTARELSFKKGASLLLYQRASDDWWEGRHNGIDGLIPHQYIVVQDTEDGVVERSSPKSEIEVISEPPEEKVTARAGASCPSGGHVADIYLANINK

SEQ ID NO: 185919 - DNA, 2958 bp, Artificial Sequence
  derived and/or modified sequence
tgaaaggaccagaatgtgctgtcacctgtgaactgctggaatctcttgctcaaccaggtaaaaagggaaagccgcgaccacacaacactgtcagacatctatctgaacaacataattccgcgcttcgtgcaggtaagcgaagatagcggtaggttgtttaaaaagtcaaaggaagtagggcaacagcttcaggatgatttaatgaaggttctcaatgagctgtacagtgttatgaaaacttatcacatgtacaacgccgattccatttccgcgcagagcaaactgaaggaggctgaaaagcaggaagagaagcaaatcggtaagtccgttaaacaggaggaccgtcaaacaccccggagtcccgacagtaccgccaatgtcagaattgaagaaaagcatgtgcgccgtagctccgtgaagaagattgagaaaatgaaggagaagcgtcaagcaaaatataccgagaataaactgaaggcaattaaggcacgaaacgaatatctcctggccctggaagcaaccaacgcttccgtgttcaaatattatattcacgaccttagcgacctgatcgatcaatgttgtgatctgggttaccacgcctcactcaacagagccctacgtacttttttatccgccgagcttaatctggagcagagcaaacacgaagggctggacgctatagagaatgctgtggagaatcttgatgctacttccgacaaacaacgcctcatggagatgtataataatgtgttttgtcctccaatgaaattcgagttccaaccacatatgggagatatggcaagtcaactgtgcgcgcagcagcccgtccaatccgaactggtgcaaaggtgccagcagctccagagcaggctctctacattaaagatagaaaatgaggaagtcaagaaaaccatggaggccactctgcagacgattcaggacatcgtgacagtcgaagattttgatgtgtctgactgcttccagtattccaattcgatggaatccgtgaagtctaccgtgtcagaaaccttcatgagcaaaccttcgatcgccaagagaagggcaaaccaacaagaaactgaacagttctactttacgaaaatgaaggagtacttggagggccgaaacttgattaccaaactccaggccaagcacgacttacttcagaaaaccctgggggaaagtcaacgcacagattgtagtctggctagaagaagcagcacagttaggaagcaagattcatcccaggctattccactcgtggtggaatcctgtattagatttatatcacggcacgggcttcagcacgagggaattttccgtgttagcggctcccaggtcgaagtcaacgatattaagaatgcttttgagaggggggaagacccactggccggggaccagaacgaccacgatatggactctatagcgggtgtactaaagctttactttcgcggcctggaacaccccctgttcccaaaagatatcttccacgacctgatggcatgtgttaccatggacaatctgcaggaacgcgccctccacatccgaaaggtccttctcgtccttcctaaaacaacccttattatcatgaggtatctgtttgcctttcttaaccatctgagccagttttccgaagagaacatgatggatccttataatctcgcgatttgcttcggccccagcttgatgtccgtgcctgagggccacgaccaggtgtcctgccaagcacatgtgaacgagctcataaaaacgatcatcatccagcatgagaatatattccccagcccacgggaactggaggggcctgtgtatagtagaggcggctcaatggaggattattgcgactccccccatggggaaactacaagcgtcgaagacagtacacaggacgtgaccgcggaacatcacacatcggacgacgaatgtgagcctattgaggctattgccaaattcgattatgttggccggactgcccgcgagctcagcttcaagaaaggcgcctcactcctgttataccagcgtgcaagcgatgactggtgggaggggagacacaacgggatcgatggcctaattccccatcagtacattgtggtgcaggatacagaggacggagtggttgagcgtagcagcccaaagagcgagatcgaagtgatctcggaacctcccgaggagaaagtcacagccagagctggcgcatcttgtccgtcgggaggccatgtagcggacatctaccttgcaaacattaacaagcaacgaaagcgtccagagtctggctctattaggaaaacctttagaagcgattcacatgggctaagctccagcttgaccgatagttcctctccgggggtgggcgcaagctgtcgccccagcagtcaacctataatgagccaaagtctgcccaaggaaggccctgataaatgctctatatccgggcacggaagcctgaactccatatcacggcacagttccctgaagaaccgcctagactctcctcaaataaggaagaccgcgacagccggccgatctaagagctttaataaccatcggccaatggatcccgaggtgatcgcgcaagatatcgaagctaccatgaattcggccctcaacgaactgagagagctggaacgccagtcaagtgtgaagcacacgcccgacgtggtgctcgacaccctggaaccattgaagaccagcccagtggtcgcccccacctccgagccatcttcccctcttcatacacagctcctcaaggaccctgagcccgcgtttcagagatccgcatccaccgccggcgacatagcctgtgcattccggcctgtcaagtccgtgaagatggctgcccctgtaaaacctcccgcaactcgtcccaaacctactgtgtttcctaagactaatgcgacatctcccggcgttaatagtagcacttcaccgcagagtactgacaagtcctgtacagtgtag

SEQ ID NO: 185920 - DNA, 2796 bp, Artificial Sequence
  derived and/or modified sequence
caatctaaggaagtgggccagcagctgcaggatgatctaatgaaggtgctaaacgagctttattctgtcatgaaaacctaccacatgtacaacgccgatagcatctccgcccagagtaagttgaaggaagccgagaaacaagaggagaagcagattggcaagtccgtcaagcaggaagacagacagactcctagaagcccagattccacagctaatgtccggatcgaggagaagcatgtaaggcggagttcagtgaaaaagattgaaaaaatgaaggaaaagaggcaggctaaatacacggagaacaagttgaaagcaattaaggctagaaatgagtatctactggcattagaggccacaaacgcaagcgtttttaagtactacattcatgacctcagtgacctcattgaccagtgctgtgacctgggctaccatgcttccctcaacagggccctacggacgttccttagtgcggagctaaatcttgagcagtcaaagcacgagggactggatgctatcgagaacgcagtggagaacttggacgcgaccagtgataagcagagattaatggagatgtataataatgtcttctgtccccccatgaagttcgagtttcagccccatatgggggatatggccagccagctctgcgcacaacagcccgttcaatccgagctggtacagagatgtcagcaactgcagtcgcggctgagcactcttaagattgaaaacgaggaagtgaagaagaccatggaagccactctacagactatacaagatatcgtaaccgtggaggacttcgatgtcagcgattgcttccagtacagtaactctatggagagcgtgaaatccaccgtgtccgagacattcatgagcaaaccctccatcgctaagagaagggccaatcagcaagaaactgaacagttttactttactaaaatgaaagaatacctggaggggcgtaacctgatcacaaaactgcaagctaagcacgacttgcttcagaagactttgggtgagtcgcagaggaccgattgcagcctggccagaagatccagcacagtgaggaagcaagatagttcccaggcgataccccttgtcgtcgagtcctgtatacggttcatcagccgacacgggctccagcacgaggggattttccgtgtctcagggtcccaggtggaagtgaatgatattaaaaacgcattcgagcgtggtgaagaccccctggctggggaccaaaacgaccatgacatggactcaatagctggcgttctaaagctttacttccgtggactcgagcatcccctctttcctaaagatatcttccatgacttgatggcatgcgtaacaatggacaatctgcaagagagggcgctccatatacgcaaggtgctactcgtcctacctaagacgactctcattatcatgaggtacctgttcgcgttcctgaaccacttgtctcagttcagcgaggaaaatatgatggatccatataacctggccatttgtttcggaccctcgctgatgtctgtccccgaggggcacgaccaggtttcttgccaggcacacgtcaacgagcttatcaaaactatcattattcagcacgagaatatttttcccagcccccgcgaactggagggtccggtatactcacgggggggctctatggaagattactgcgactccccccacggagagacaacgtcagttgaggactccactcaggatgtgacagctgagcaccacacttccgatgacgaatgcgagccgatcgaggcgatcgccaagtttgactacgtcggtcgaactgctagagagttgtcgttcaaaaaaggggcatccctcctgctatatcaacgtgcatccgacgattggtgggagggaagacacaatggcatagacgggctgatcccacatcagtatatcgtagtgcaggatacagaagatggagtcgtggaacggagttctccaaagagcgaaatcgaagttatctccgaacctccagaggaaaaagtgaccgcccgcgccggcgcctcctgcccatccgggggacatgtcgccgatatctatctggccaatattaataaacagcggaaacgacctgaaagcgggtccatacggaagactttccggagcgatagccatggactcagctcttcactcactgactcctctagcccgggggtgggcgcttcatgtagaccctcttcgcagcctattatgtcccagtccctgcccaaggagggccccgacaaatgttctatcagtgggcacggctcactaaacagcataagcagacactcatcccttaaaaataggctagatagcccacaaatccgaaaaacggccaccgccggccgctccaaatctttcaataatcaccggcccatggatcctgaggttatcgcacaggacattgaggccacaatgaactctgcactgaatgagctgcgcgaattagaacgccagtcctctgttaagcacacccctgacgtggtgctggatacgctggagccacttaagactagcccagtcgtggcccctaccagcgaaccaagtagcccgctgcatactcagctgctgaaggacccagaacctgcttttcagaggagtgccagcacagccggcgacatcgcctgtgcttttaggcctgttaaaagcgtgaaaatggccgctcccgtgaaacccccagctacacgaccgaagcccaccgtgttccctaagacaaacgccacatctcctggagtgaattccagcacctctccccaaagtaccgacaagtcatgtacggtatag

SEQ ID NO: 185921 - DNA, 2958 bp, Artificial Sequence
  derived and/or modified sequence
tgaaaagaccagaatgtgctgagccctgtgaactgctggaacctgctgctgaaccaggtgaagcgggagagccgggaccacaccaccctgagtgacatctacctgaacaacatcatccccaggtttgtgcaggtgtctgaagattctggccgcctcttcaagaagagcaaggaggtgggccagcagctgcaggatgacctgatgaaggtgctgaatgagctgtacagcgtgatgaagacctaccacatgtacaatgctgacagcatcagcgcccagagcaagctgaaggaggccgagaagcaggaggagaagcagatcggcaagtctgtgaagcaggaggaccggcagacccccaggagcccagacagcacagccaacgtgagaattgaggagaagcacgtgagaagaagctctgtgaagaagattgagaagatgaaggagaagaggcaggccaagtacacagagaacaagctgaaggccatcaaggccagaaatgagtacctgctggccctggaggccaccaatgcctctgtgttcaagtactacatccatgacctgagtgacctgattgaccagtgctgtgacctgggctaccacgccagcctgaacagagccctgcggaccttcctgtctgctgagctgaacctggagcagagcaagcatgagggcctggatgccattgaaaatgctgtggagaacctggatgccaccagtgacaagcagaggctgatggagatgtacaacaacgtgttctgcccccccatgaagtttgagttccagccccacatgggagacatggccagccagctgtgtgcccagcagcctgtgcagagcgagctggtgcagcgctgccagcagctgcagagccggctgagcaccctgaagattgaaaatgaggaggtgaagaagaccatggaggccaccctgcagaccatccaggacatcgtgacagtggaggactttgatgtgtctgactgcttccagtacagcaacagcatggagagcgtgaagagcacagtgtctgagaccttcatgagcaagcccagcatcgccaagagaagagccaaccagcaggagacagagcagttctacttcaccaagatgaaggagtacctggagggcaggaacctgatcaccaagctgcaggccaagcatgacctgctgcagaagaccctgggggagagccagaggacagactgcagcctggcccggcgcagcagcacagtgaggaagcaggacagcagccaggccatccccctggtggtggagagctgcatccgcttcatcagccgccacggcctgcagcacgagggcatcttccgggtgtctggcagccaggtggaggtgaatgacatcaagaatgcctttgagcggggggaggaccccctggccggggaccagaatgaccatgacatggacagcattgctggggtgctgaagctgtacttccggggcctggagcaccccctcttccccaaggacatcttccatgacctgatggcctgtgtgaccatggacaacctgcaggagcgggccctgcacatcaggaaggtgctgctggtgctgcccaagaccaccctcatcatcatgagatacctgtttgccttcctgaaccacctgagccagttcagcgaggagaacatgatggacccctacaacctggccatctgcttcggccccagcctgatgtctgtgcctgagggccatgaccaggtgtcctgccaggcccacgtgaatgaactcatcaagaccatcatcatccagcacgagaacatcttccccagcccccgggagctggagggccctgtgtacagcagaggaggctccatggaggactactgtgacagcccccacggggagaccacctctgtggaggacagcacccaggatgtgacagctgagcaccacaccagtgatgatgaatgtgagcccatcgaggccatcgccaagtttgattatgtgggccgcacagcccgggagctgtccttcaagaagggggccagcctgctgctgtaccagagggccagtgatgactggtgggagggccgccacaatggaattgatggcctcatcccccaccagtacatcgtggtgcaggacacagaagatggagtggtggagaggagcagccccaagtcagaaattgaagtcatcagcgagcccccagaggagaaggtgacagcccgggccggggccagctgccccagcggcggccacgtggccgacatctacctggccaacatcaacaagcagaggaagaggcctgagagcggcagcatcaggaagaccttcagaagtgacagccacggcctgagcagcagcctgacagacagcagcagccctggggtgggcgccagctgccggcccagcagccagcccatcatgagccagagcctgcccaaggagggccctgacaagtgcagcatcagcggccacggcagcctgaacagcatcagccgccacagcagcctgaagaaccggctggacagcccccagatcaggaagacagccacagctggccgcagcaagagcttcaacaaccaccggcccatggaccctgaggtgattgcccaggacatcgaggccaccatgaacagcgccctgaatgagctgcgggagctggagcggcagagctctgtgaagcacaccccagatgtggtgctggacaccctggagcccctgaagaccagccctgtggtggcccccaccagcgagcccagcagccccctgcacacccagctgctgaaggaccctgagcccgccttccagaggtctgccagcacagctggggacatcgcctgtgccttccggcctgtgaagtctgtgaagatggccgcccctgtgaagcccccagccacccggcccaagcccaccgtcttccccaagaccaatgccaccagccctggggtgaacagcagcaccagcccccagagcacagacaagagctgcaccgtgtag

SEQ ID NO: 185922 - DNA, 2796 bp, Artificial Sequence
  derived and/or modified sequence
cagagcaaggaggtgggccagcagctgcaggatgacctgatgaaggtgctgaatgagctgtacagcgtgatgaagacctaccacatgtacaatgctgacagcatcagcgcccagagcaagctgaaggaggccgagaagcaggaggagaagcagatcggcaagtctgtgaagcaggaggaccggcagacccccaggagcccagacagcacagccaacgtgagaattgaggagaagcacgtgagaagaagctctgtgaagaagattgagaagatgaaggagaagaggcaggccaagtacacagagaacaagctgaaggccatcaaggccagaaatgagtacctgctggccctggaggccaccaatgcctctgtgttcaagtactacatccatgacctgagtgacctgattgaccagtgctgtgacctgggctaccacgccagcctgaacagagccctgcggaccttcctgtctgctgagctgaacctggagcagagcaagcatgagggcctggatgccattgaaaatgctgtggagaacctggatgccaccagtgacaagcagaggctgatggagatgtacaacaacgtgttctgcccccccatgaagtttgagttccagccccacatgggagacatggccagccagctgtgtgcccagcagcctgtgcagagcgagctggtgcagcgctgccagcagctgcagagccggctgagcaccctgaagattgaaaatgaggaggtgaagaagaccatggaggccaccctgcagaccatccaggacatcgtgacagtggaggactttgatgtgtctgactgcttccagtacagcaacagcatggagagcgtgaagagcacagtgtctgagaccttcatgagcaagcccagcatcgccaagagaagagccaaccagcaggagacagagcagttctacttcaccaagatgaaggagtacctggagggcaggaacctgatcaccaagctgcaggccaagcatgacctgctgcagaagaccctgggggagagccagaggacagactgcagcctggcccggcgcagcagcacagtgaggaagcaggacagcagccaggccatccccctggtggtggagagctgcatccgcttcatcagccgccacggcctgcagcacgagggcatcttccgggtgtctggcagccaggtggaggtgaatgacatcaagaatgcctttgagcggggggaggaccccctggccggggaccagaatgaccatgacatggacagcattgctggggtgctgaagctgtacttccggggcctggagcaccccctcttccccaaggacatcttccatgacctgatggcctgtgtgaccatggacaacctgcaggagcgggccctgcacatcaggaaggtgctgctggtgctgcccaagaccaccctcatcatcatgagatacctgtttgccttcctgaaccacctgagccagttcagcgaggagaacatgatggacccctacaacctggccatctgcttcggccccagcctgatgtctgtgcctgagggccatgaccaggtgtcctgccaggcccacgtgaatgaactcatcaagaccatcatcatccagcacgagaacatcttccccagcccccgggagctggagggccctgtgtacagcagaggaggctccatggaggactactgtgacagcccccacggggagaccacctctgtggaggacagcacccaggatgtgacagctgagcaccacaccagtgatgatgaatgtgagcccatcgaggccatcgccaagtttgattatgtgggccgcacagcccgggagctgtccttcaagaagggggccagcctgctgctgtaccagagggccagtgatgactggtgggagggccgccacaatggaattgatggcctcatcccccaccagtacatcgtggtgcaggacacagaagatggagtggtggagaggagcagccccaagtcagaaattgaagtcatcagcgagcccccagaggagaaggtgacagcccgggccggggccagctgccccagcggcggccacgtggccgacatctacctggccaacatcaacaagcagaggaagaggcctgagagcggcagcatcaggaagaccttcagaagtgacagccacggcctgagcagcagcctgacagacagcagcagccctggggtgggcgccagctgccggcccagcagccagcccatcatgagccagagcctgcccaaggagggccctgacaagtgcagcatcagcggccacggcagcctgaacagcatcagccgccacagcagcctgaagaaccggctggacagcccccagatcaggaagacagccacagctggccgcagcaagagcttcaacaaccaccggcccatggaccctgaggtgattgcccaggacatcgaggccaccatgaacagcgccctgaatgagctgcgggagctggagcggcagagctctgtgaagcacaccccagatgtggtgctggacaccctggagcccctgaagaccagccctgtggtggcccccaccagcgagcccagcagccccctgcacacccagctgctgaaggaccctgagcccgccttccagaggtctgccagcacagctggggacatcgcctgtgccttccggcctgtgaagtctgtgaagatggccgcccctgtgaagcccccagccacccggcccaagcccaccgtcttccccaagaccaatgccaccagccctggggtgaacagcagcaccagcccccagagcacagacaagagctgcaccgtgtag

SEQ ID NO: 185923 - DNA, 2958 bp, Artificial Sequence
  derived and/or modified sequence
tgaaaggaccagaacgtgctgagccccgtgaactgctggaacctgctgcttaatcaagtgaagcgcgaatcacgggatcatacaactcttagcgatatttatctgaacaacattatccccaggtttgttcaggtgtccgaagactccgggaggctgtttaaaaagtccaaggaggtggggcaacagctccaggatgatttgatgaaagtgctgaatgagctgtatagtgtcatgaaaacttaccacatgtataatgcagattcgattagtgcacagagtaagctgaaggaagcggagaagcaggaagaaaaacagattggcaaaagcgtgaagcaggaggaccgtcagactcctcgctcaccagactcaacggccaacgtcagaattgaagaaaaacacgtgagacgatcttcggttaagaaaattgaaaagatgaaagagaagcgacaagccaagtacacagagaacaagcttaaggccatcaaggccagaaacgaatatctgctcgccctggaagccaccaacgccagcgtgttcaagtactatattcacgacttgtctgacctaatcgaccagtgctgcgacctgggataccacgcgtcattaaaccgtgccttgaggactttcctttcagcagagctcaacctggagcagtccaagcatgagggcctggacgccatcgagaacgcagtcgagaatctcgacgccacaagtgataagcagcggctgatggagatgtacaacaacgtattctgcccccccatgaaattcgagttccagccccacatgggggacatggccagccagctgtgcgcccaacagcctgtccagtccgagctagtccagcggtgtcaacagctgcagtctaggctgtctacactcaaaatagaaaatgaggaggtcaagaagactatggaagcgaccctgcaaaccatccaagatattgtcactgtggaggacttcgacgtgagtgactgctttcagtacagtaattcaatggaatccgtcaaaagtaccgtgtctgaaacctttatgtccaagccgtctatcgctaagcgacgagctaatcagcaagagactgagcagttttacttcacaaagatgaaggagtacttagagggacgtaacctgattacaaagctgcaggccaaacacgacctcctgcaaaaaactttgggcgaaagccagcgaaccgattgctccctggcccggaggagttctacagtacgcaagcaagattcgtcacaggctattccactggtagttgagagttgcatccgtttcatctccaggcatggactccaacacgagggtatttttcgggtctcggggagccaggtagaggtcaacgatatcaaaaatgcttttgaacgcggggaggatcctttagcaggagaccagaacgatcatgatatggattcaattgcaggcgtgctaaaactttatttccgggggctggagcatccattatttcctaaggatatattccatgatctcatggcatgtgtgactatggataacctgcaagaaagagcactgcacattcgcaaagttctgctggttttacctaagactaccctaattatcatgaggtacctcttcgcgttcttgaatcacctgtcccagttctccgaggaaaatatgatggatccttacaacttagccatttgcttcgggccttctctcatgtccgtccccgaaggacacgatcaggtttcctgtcaggcccatgtgaacgagctaattaagactatcattatacagcatgaaaacattttcccttctcctagagagttggaggggccggtgtacagccggggtggctccatggaagactactgtgattccccccacggcgagaccacttcggtagaggattccacccaagacgttaccgctgaacaccatacaagcgatgacgaatgtgaacccatagaggccatagcaaaattcgactatgtgggccgcacggccagggaactcagctttaaaaaaggggcatcgctccttctgtaccagcgggccagcgatgattggtgggagggtaggcataatggtatcgacggcctgataccccaccagtacattgtggtgcaggatacagaagacggggtcgttgagcgcagctcaccaaagagtgaaatcgaagtaatcagcgagccacctgaggagaaagtcaccgctagagccggtgcctcctgtccaagtgggggacacgtcgccgacatttatcttgccaacatcaacaaacagcgaaaacggcccgagagtggtagtattcgcaaaacctttcgctctgattcccatggactgtcctcctcacttacggactctagctcacctggcgtgggggcatcctgccgcccttcttcccaaccgattatgtcccagagcctgcccaaagaaggacccgacaagtgttctatctcaggacacggatcccttaatagtataagcaggcattccagcctgaaaaaccgtctggacagtccccagataagaaaaaccgccaccgctggccggagtaagagcttcaacaaccatcggccaatggaccccgaggtcatcgcccaagatattgaggcaacgatgaacagcgcgctgaacgagctgagagagcttgagagacaaagcagtgtgaagcacactcctgacgtcgttcttgacacattggagcccctgaaaacatcaccagttgtcgctcctacttccgaaccatcctcccccctgcacacgcagctgcttaaggaccccgaaccagcattccagcgatctgcctctacagctggcgatattgcatgcgccttcagaccagtgaaaagtgtgaagatggccgctccagttaagccacccgccaccaggccaaaaccgactgtgttccccaagaccaacgcaacctcacccggcgttaactctagtacctcacctcagtcgactgataaatcctgtacagtatag

SEQ ID NO: 185924 - DNA, 2796 bp, Artificial Sequence
  derived and/or modified sequence
cagagcaaggaggtgggccagcagctgcaggacgacctgatgaaggtgttgaatgagttatactccgtgatgaagacataccacatgtacaatgcggactctatttccgctcagtctaaacttaaagaggctgaaaaacaggaggagaagcagatcggcaagagcgtcaagcaggaggatcgacaaacccctagatcccctgatagtactgctaacgtccgtattgaggaaaaacacgttcgccgatccagcgttaaaaagatcgagaagatgaaggaaaaacgtcaggctaaatacacggagaacaaactgaaggccatcaaggcacgcaatgagtacctcctcgccctggaagcgaccaatgctagcgtgttcaaatactatatccatgatctgagtgatctcatcgatcagtgttgtgacctggggtatcacgcaagcctgaaccgcgcattgcgaaccttcctctccgctgagctcaatctcgagcagtctaaacacgagggattggatgcgatcgaaaatgccgtagagaatctcgatgccaccagcgacaaacagcgcctgatggagatgtataataacgtgttctgcccacctatgaaatttgagttccagcctcacatgggcgatatggcaagccagctttgtgcacaacagccagtgcaatctgaacttgtccagagatgccagcaactacagagtcgtctctcaaccttgaagatcgagaacgaggaagtcaagaagacaatggaagccacactgcagactatccaggacatagtgaccgtcgaggactttgacgtgtcagattgtttccaatatagtaactctatggagagtgtaaagagtacagtctctgaaaccttcatgtcaaaaccttctattgcgaagaggagagccaaccagcaggagacagagcaattttacttcactaaaatgaaggagtaccttgaagggagaaatctgatcaccaagctgcaggcaaagcatgacctgctgcaaaaaactctcggggagtcccagcgaacagattgttctttagcccgacgttccagcaccgtgcgaaaacaggacagcagccaagccatcccgttggtggttgagtcctgcattcggttcatcagtagacacggcctgcaacacgaaggcatattccgcgtatcaggatctcaggtggaggttaacgacatcaagaatgcatttgagagaggcgaggaccctctggctggggatcagaacgaccatgatatggacagtatcgcaggggtgctcaagctgtattttagaggcctggaacacccactttttcccaaagacatttttcatgatttgatggcttgcgttaccatggacaatttgcaggagcgcgcactgcacatacggaaagtgctgctcgtgctccccaaaacaaccctaattattatgaggtacctcttcgctttcctcaaccacctaagtcagttcagcgaggagaatatgatggatccttataatctggcgatttgctttgggcctagtctcatgtcggttcctgaaggccacgaccaggtaagctgccaggctcacgtgaacgagctgattaagaccataataatacagcacgaaaatatcttcccgagccctcgggaacttgaagggccggtctattcacggggagggtcaatggaagactactgcgactcaccacatggagaaacaacctcagtggaggactccacccaggatgtcactgccgaacaccacacgagcgatgatgaatgcgaacctatcgaagcaattgctaaattcgactacgtcgggcgcactgccagagagctttcttttaaaaagggggcctccctcctcttgtatcaaagagcctccgatgattggtgggagggacgacacaacgggatagacgggctgatccctcaccaatatattgtggtgcaggatacagaggacggagtcgtggagaggtccagtccgaaatccgaaatcgaagtcatctcagaacctcctgaagagaaagtgactgctagggcgggtgcatcttgcccatccggtggccacgttgcggatatatacctggccaatattaacaaacagcggaagcggccggagagtggctcaataagaaaaaccttcaggtctgatagtcacgggttgtctagctctctgactgacagctcttctcctggcgtcggcgccagttgtagaccttcctcacagcccatcatgagccaatctctccctaaggagggcccagacaagtgtagcatcagcggccatggaagcctaaatagtatcagcaggcatagtagcctaaaaaatcgtctggactccccacaaattcgcaagactgctacagctggccgatcaaagtcatttaataaccatagaccaatggaccctgaagtgatcgcccaggatatcgaagccacaatgaattccgccttgaatgaactccgtgagttggagagacaatccagtgtcaaacacaccccagacgtcgtccttgacacgttggaacctctgaagactagcccggttgtcgctcccacctctgagccaagctcacccctgcacacacagctgctaaaagacccagagcccgcgttccaacggtcggcctcaacggccggagatatcgcttgtgccttccgccccgtaaagtcagtgaagatggctgcccctgtcaaacccccagctacccggccgaagccgaccgtctttccaaaaaccaatgctacatcaccaggcgtgaactcctcaacaagtccccagagcactgataaatcatgtacagtgtag

SEQ ID NO: 185925 - DNA, 2958 bp, Artificial Sequence
  derived and/or modified sequence
tgaaaggaccagaacgttttgtcccctgtcaactgctggaaccttctgctgaatcaggtgaagagagagagccgggaccacacgactttgtctgatatttatttaaacaacatcatccctcgttttgttcaagtgtccgaagactctggacggcttttcaaaaagtccaaagaggtagggcagcagctccaggatgacctgatgaaagttttgaacgagttgtactcggtgatgaagacatatcacatgtacaacgctgacagtattagtgcgcagagtaaactgaaggaggcggagaagcaggaggagaagcaaatcgggaagtctgtgaagcaagaagaccggcaaactcccaggagccctgactcgacagctaacgtgcgtattgaggaaaagcacgtgcggcgatcaagtgttaaaaagatcgagaaaatgaaggagaaacgacaggctaagtataccgaaaacaagttgaaagctatcaaagcaaggaacgagtatctactggcactcgaggcaactaacgccagcgttttcaagtactatatccacgacttatctgacctgattgaccagtgttgcgacctcggatatcacgctagcttgaacagggcgctgagaacattcctctccgcggagctcaaccttgaacagagtaaacatgaagggctagatgctattgagaacgcagtagaaaatctggacgccacctccgacaagcaacgcctgatggagatgtataataatgtcttctgtccacccatgaagttcgagtttcagccacacatgggcgacatggcctcccaactatgtgctcaacagcccgtccagtcggagctcgtgcagaggtgtcagcagcttcagagtcgcctgtccacccttaagattgagaatgaggaggtaaagaagactatggaggcaacgctacagacaatccaggatatagtcacagtggaagattttgatgtgagcgactgctttcagtatagcaatagtatggagtcggtcaagagcaccgtgagtgagacctttatgtctaagcccagcatcgctaaaaggagggccaaccaacaggagacggagcagttctattttaccaaaatgaaggaatacctggaggggcgtaacttgatcacaaagctgcaagcaaagcatgatctattgcagaaaaccctgggcgaatctcagcgaaccgactgctcactggctagacggtccagcacagtgaggaagcaggatagttcccaggctattccactggtggtcgaatcctgcatcaggtttatcagccgccatggtcttcagcatgagggaatttttcgcgtgtccgggagtcaggtagaagtgaacgatatcaaaaacgcattcgagaggggcgaggatccactggccggagaccaaaatgatcacgacatggattctattgccggtgtgctgaaattgtacttccgaggacttgagcatcctctgttccccaaagacatctttcacgacctaatggcgtgcgtgaccatggacaatctgcaagaacgcgctcttcatattcgaaaggtgttgctggtgctgccaaaaaccacactgatcattatgcgatatctgtttgcttttctgaatcaccttagccagttcagcgaggaaaacatgatggatccctacaacctggccatttgttttgggccatctttgatgagtgtgcctgaaggtcatgatcaggtatcatgtcaggcacacgtgaacgaactgattaagaccattattatccagcatgagaacattttccctagcccacgcgaactggaaggcccagtgtacagccgcggaggatctatggaagactattgcgattctccccatggcgagaccacatctgtggaggactccacacaggacgtgacagcagagcatcacacatcagacgatgaatgtgaacctatcgaagctatagctaaatttgactatgtgggaaggactgcaagagaattgtcctttaaaaagggggcttctttgttactttaccagagggcaagcgacgattggtgggaaggcaggcacaatggaatcgacggactgattccccaccagtacattgtggtgcaggatactgaagatggtgtggtggagcggtcttcccctaagtccgaaatagaagtaatctcggaacctcctgaagagaaggtcacagcaagggccggtgccagttgcccttccggagggcatgtggccgacatatacttagctaatatcaataaacagcggaagaggcctgagtcgggtagcattaggaaaacatttaggtcagacagccatggactaagttccagcttaactgacagtagttcacctggggtcggagcctcctgtcgtccctcgagtcagccaattatgagccagtccctcccgaaggagggcccagacaagtgctcgataagcggtcacggatctctgaattcaatatctagacacagctctttgaaaaacaggctcgatagcccacagattaggaaaactgctacggccggaaggagcaaaagctttaacaatcatcggccaatggatcccgaagtcattgcacaggacattgaggccactatgaactcagccctgaacgaattgagagagctggagaggcaatcttccgtcaagcacacacccgatgtcgttttagacacccttgaacccttgaaaacgtctcccgtggtggcaccgacttccgaacctagctctcctcttcacactcagttactaaaggatcccgaacctgcatttcaacgatcagccagcaccgctggggacattgcttgcgctttcaggcctgtgaagtccgtcaaaatggcggcacccgtcaaaccccctgctacccgcccaaaacccacagtattccccaagactaacgccacaagccccggagtgaactcaagcacctcaccgcagagcactgacaagtcatgtactgtgtag

SEQ ID NO: 185926 - DNA, 2796 bp, Artificial Sequence
  derived and/or modified sequence
cagagcaaggaagtgggccaacagctccaagacgatctgatgaaagttctgaatgagctgtactctgtgatgaaaacttaccatatgtacaatgcagatagtatctctgcacaaagcaaactgaaggaggccgaaaagcaagaggagaagcagatagggaagagcgtgaagcaggaggatcgccaaacccccaggtcacccgacagtactgccaacgttcggatcgaggagaagcacgtgaggaggagtagtgtcaagaaaattgagaagatgaaggaaaagcggcaagccaagtacactgagaataaactgaaggccattaaggcacgaaatgaatacctactcgccctggaggctaccaacgcaagtgtgtttaagtattatatccacgatctgtctgatctaattgaccagtgctgcgacctggggtatcacgcaagcctgaatagggcattgagaaccttcttatcagccgagctcaatctggagcagagcaaacacgaggggctagacgcaattgagaacgcagtcgagaacttagatgccacctccgacaagcagcgcttaatggaaatgtacaacaatgtgttttgcccaccgatgaaatttgagtttcaaccgcatatgggtgatatggcctctcagctctgcgctcaacagcccgtccagagcgagctggttcagagatgccaacagttgcagtcccgtctgtccaccctcaagatcgagaatgaagaagtgaaaaaaactatggaggctacgctgcaaacaattcaggatattgtcacagtagaggattttgacgtatcggactgttttcagtactctaactccatggagtccgtcaaatcaactgtgtctgagacatttatgtcaaagccctcgatcgccaagagacgggctaatcagcaggaaactgagcagttctacttcaccaaaatgaaggagtatttggagggccgaaacctgattacaaaactacaggcaaagcatgacctgctccagaaaacactcggggaatcccagagaacagactgttccctggctaggcgctcctctaccgtacgcaagcaggacagctcccaagcaatccctctcgtcgtggagagctgtattaggtttatcagccgccatgggctgcaacacgaaggcatcttccgtgtctcgggttcccaggtagaggttaatgatattaagaatgcatttgagagaggggaggaccctttggctggtgaccaaaacgatcatgatatggactcaattgcgggtgtactgaagctgtactttaggggtctcgagcatcccctcttccctaaagacatcttccatgaccttatggcttgtgtgaccatggacaacttacaagaacgggctctgcatatcagaaaggttctgctcgtgcttcccaaaactacattgattatcatgcgatatctttttgcattccttaatcacctctcccagtttagcgaggaaaacatgatggatccttataatctggctatctgctttggcccatccctaatgtctgtgcctgaggggcacgatcaggtctcatgccaggctcacgttaacgaactcattaaaacaatcatcattcagcacgaaaatatattcccatcaccacgcgaacttgagggaccagtgtactcacgtggcggtagcatggaggactattgtgactctccgcatggagagactacttcagttgaggactcaacacaggatgtgactgccgaacaccacacctcagacgatgaatgtgagcccattgaagctattgcaaaattcgattacgtcggccgaaccgcccgagaacttagctttaagaaaggagctagcctactcttgtaccaacgcgcaagtgatgactggtgggaagggcgacataacggcatcgacgggctcatcccccaccagtatattgtggtgcaagatactgaagacggcgttgtggagcgcagctctcccaagtccgagatcgaggtcatatccgagccgccagaggaaaaagttacagcccgtgctggggcttcgtgcccctccggaggacatgtggccgatatttacttggccaatataaataaacagcgcaaacggccagagtctggaagtatccgcaagacctttagaagtgattcccacggcttaagtagcagcttgacagatagttctagccccggtgttggggctagctgtcgacccagtagccagcctatcatgtctcagagtttgccgaaggaggggccagacaagtgcagtatctctgggcatggaagccttaactccatcagtaggcactcatctttaaaaaatagactggattctccacagataaggaagacggcaactgctgggagaagtaagagttttaataaccatcgaccaatggatcccgaggtgattgcacaggatatagaagccactatgaattcagcactgaatgaactgcgagaactcgagaggcaaagctccgtgaagcacaccccagatgttgtgctagacacgttagagccactcaagacatcccctgtggtagctccaacatctgagccctcctctcctctacacacgcaattactgaaggatccagagcctgcgtttcaacgctccgccagcacagccggagacatcgcatgtgccttcaggcccgtgaaatctgtgaaaatggcagccccagtgaagcctccagccacacgccctaagccgaccgtgtttcccaagactaacgcaactagccctggcgtaaacagttcaacatctccccagtcaactgacaagagttgtaccgtgtag

SEQ ID NO: 185927 - DNA, 5967 bp, Artificial Sequence
  derived and/or modified sequence
gaaggatcagaatgttctctctccagtcaactgctggaatctcctcttaaaccaggtgaagcgggaaagcagggaccataccaccctgagtgacatctacctgaataatatcattcctcgatttgtacaagtcagcgaggactcaggaagactctttaaaaagagtaaagaagtcggccagcagctccaagatgatttgatgaaggtcctgaacgagctctactcggtgatgaagacatatcacatgtacaatgccgacagcatcagtgctcagagcaaactaaaggaggcggagaagcaggaggagaagcaaattggtaaatcggtaaagcaggaggaccggcagaccccacgctcccctgactccacggccaacgttcgcattgaggagaaacatgtccggaggagctcagtgaagaagattgagaagatgaaggagaagcgtcaagccaagtacacggagaataagctgaaggccatcaaagcccggaatgagtacttgctggctttggaggcaaccaatgcatctgtcttcaagtactacatccatgacctatctgaccttattgatcagtgttgtgacttaggctaccatgcaagtctgaaccgggctctacgcaccttcctctctgctgagttaaacctggaacagtcgaagcatgagggtctggatgccatcgagaatgcagtagaaaacctggatgccaccagtgacaagcagcgcctcatggagatgtacaacaacgtcttctgcccccctatgaagtttgagtttcagccccacatgggggatatggcttcccagctctgtgcccagcagcctgtccagagtgagctggtacagagatgccaacaactgcagtctcgcttatccactctaaagattgaaaacgaagaggtaaagaagacaatggaggccaccctgcaaaccatccaggacattgtgactgtcgaggactttgatgtgtctgactgcttccagtacagcaactccatggagtccgtcaagtccacggtctctgaaaccttcatgagcaagcccagcattgctaagaggagagccaaccagcaagagacagagcagttttatttcacaaaaatgaaagagtacctggagggcaggaacctcatcaccaagttacaagccaagcatgaccttctgcagaaaaccctgggagaaagtcagcggacagattgcagtctagccaggcgcagctcaactgtgaggaaacaggactccagccaggcaattcctctggtggtggaaagctgtatccggtttatcagcagacacggactacagcatgaaggaattttccgggtgtcaggatcccaggtggaagtgaatgacatcaaaaatgcctttgagagaggagaggaccccctggctggggaccagaacgaccatgacatggattccatagctggtgtcctgaagctttacttccgggggctggaacaccctctcttccccaaggacatctttcatgacctgatggcctgcgtcacaatggacaacctgcaggagagagctctgcacatccggaaagtcctcctagtcctgcccaaaaccactctgattatcatgagatacctctttgccttcctcaatcatttatcacagttcagtgaagagaacatgatggacccctacaacctcgccatctgcttcgggccctcgctaatgtcagtgccagagggccacgaccaggtgtcctgccaagcccacgtgaatgagctgatcaaaaccatcatcatccagcatgagaacatcttcccaagccccagggagctggagggccctgtctacagcagaggaggaagcatggaggattactgtgatagccctcatggagagactacctcggttgaagactcaacccaggatgtgaccgcagagcaccacacgagcgatgacgaatgtgagcccatcgaggccattgccaagtttgactacgtgggccggacagcccgagagctgtcctttaagaagggagcatccctgctgctttaccagcgggcttccgacgactggtgggaaggccggcacaatggcatcgacggactcatcccccatcagtacatcgtggtccaagacaccgaggacggtgtcgtggagaggtccagccccaagtctgagattgaggtcatttctgagccacctgaagaaaaggtgacagccagagcgggggccagctgtcccagtgggggtcatgtagccgatatttatcttgcaaacatcaacaagcaaaggaagcgtccagaatctgggagcatccggaaaacttttcggagtgacagccatgggctgagcagttccctgactgactcctcctccccaggggtgggggctagctgccgcccatcctcccagcccatcatgagccagagcctccccaaagaagggccagataagtgttccatcagtgggcacgggagcctcaactccatcagccgccactcatccctgaagaatcggctggatagtccacagatccggaagactgccacagcgggaaggtcaaaaagcttcaataaccatcggcccatggaccctgaggtcattgctcaggatattgaggcaacaatgaactcggccctgaatgagctacgggaactagaacggcagagcagtgtcaaacacacccctgacgtggttctggacaccttggagcccctcaaaacctccccagtggtggcccccacgtcagagccctccagccctctgcacacccagctcctcaaggaccccgagcccgccttccagcgcagcgccagtactgctggggacatcgcctgcgccttccggcctgtcaagtctgtcaagatggctgccccggtcaaaccaccagccacacggcccaagcccactgtcttccccaaaacaaatgccactagccctggtgtcaactcatcaacttccccacagtctactgacaagtcttgtactgtctgagggataataatttaattgttctagacaaggggactatagggactgactgttattaaaatcttcctatttaactagcttggggacttcagttgaaaattaggttctaagttgttcttgcaggaattagcctccccgtctcccaaaaccttgagaatgaagcccttggtatcgcctctcccttcccactgccctctgcttcccccagtcgtcgtaattcagccagctgcagtccgtaccgttcttaggttagccagagacaggttttcattatcaggtcactgtgaaatctggtaaggcagtcctgaggacatgggctcaagtctcagtcccctcagaccacggtgatgccttgaccagatggttggctactgccatccagctttcagtggcatcttgttttgggaactgattatagagaatcatatatagtccagtcttcattttacatacacacacatattttacacacacacacattttacacacacacacacacacacacacatatgtttttctagtctctggcatgtgtagcctctcctggtcatagaccagtctctttgtaagttattgtggcagttcacacagtagccaccaggggtctctgtttccattacaaactttgttctgtctgggccagagaacctagcctttgaaatctctccatcatatgaaacataacgggatgggacaatcccgtaacctgtttggggttgggggctttctctctgtgttctttccattgatgtgaattggtcattggtgtttgctcttgcctctcctccatcccctagaagtacacccccgtcttattaaggagcttttaaagtttttctgaatgtatagacatttctcgggttcctacctttgtctctgatggaccattttccatttaagacattttcctgtataagacagttttatagctggttccttttagggtaaagagtcttaagagagttttattgtgtctatggcaggtttgggaaaggtaagaaatgggtcctttttcctcctaatgtttttggcacttaaaacataaaattcattatcctattaaaaaattaaattcagctttgctaatccagaaattgttcccaaatgaaaacttgttttaagtccaccccttagtttccttattttacaaggtctctcttcagggaccaacaggggcttagagagccttagttagattaaagggagaccctacctcttaaaaccagttttcatttatgcaaacaaggacaattaagggaaccctgaccccacaggctctcaagtcttcccaaggccagaatcgaaagaaaattaaaatttgaatgctgaatattctggctctactctggccttttttctggttcccttccaaaatgcacaaatcatacccttgtctgctccaattcagtctccaaacctggtgcctgtgctcctggcccccctagcatcatgctatcccaggagtatcaggaccagacacatccacagccaggctcatgggtctcagacagcaacttgagttaaagctgaaactcatccttcttctctgtgttttctggtttaaaagctgcacttatattttagccttattattttctgtagttccggagagatggtgggttgccattctggtaggaaaatctgagttttcttatctttgacctagaagagattctttttggaccaacctgcgaaattggtagttaggtctatggaaagtggtaggattttttttttttaatcctgtgcaaaggaaaagaggtgctttgtgggaaatcactaatgagaaggctaacctgcagcaccagagaaacctttccaagtgctaggcaggagaactgaagaactctttcagtgaagtgagtcagcctagaagaggcaacccacagtcttgatttttgttgctgtttcctgacctgttcttgcctgtcacctgggcctacacaggtcccgagccaacggggctttcatacccaaggatctgtttccttgctgaaaatgaaaccctatctttcactttacattcctttcaatccaactgatcaaaactggtacccacacttgccctttctccctctctccagcacactcccctctaagaaagtaaaagcaaagctttcttaatggcaacactttgggcctgttctgttgctcctgccttatttctctttcaaccctgtacatgactcgtgttcaccatccccttgatcagtgtccatccgcgctaatttgcatcatgaactgaacagtgtgtgagtggtcacctactaaacccagctctgggggcagagctgtcttccccatctctggtgctcctaacacctgtgagatggtcctgtcgagaggactaggaaccgataggaggagagtccttctcggcagagctcactgcaaacaactggaattgaggttgcacactgtgatttttacaccgaaaagccaaaaggagctggccatccagggcctagggagaccagccttcctcagctatgcttgccgaaaccagcatgatgcttcaaagagccctgctccacccctcatggcatggatccttttcctggtgtggactctgaagggtcagtcttcggggaagagaggtggggtggggctactagcatcccaatttagaaaacagaggagtttgtagccagcagcctgtaaactggaaacactggtctcagccaacctcctcagggcgccctggcttctccccaaggagatgaggagcggtgatgccagcaccgggatgcgcagagcactggaagggctggtgcagatctacttcccatgcagaagagaagtcacatcttccagggaatcgcaatgttgtggcgtctgacttgtatgtcacatttgtgtaaaatggtatattctttaaaatagtgttgataactggaatattgtatgtatgcttggagatgctttgtgtgaacctaagactgtcactcaacagatgttggattggggaaaatccaaagcacaacttcaaaataaaatacatttttaggtttcga

SEQ ID NO: 185928 - DNA, 5814 bp, Artificial Sequence
  derived and/or modified sequence
cagagtaaagaagtcggccagcagctccaagatgatttgatgaaggtcctgaacgagctctactcggtgatgaagacatatcacatgtacaatgccgacagcatcagtgctcagagcaaactaaaggaggcggagaagcaggaggagaagcaaattggtaaatcggtaaagcaggaggaccggcagaccccacgctcccctgactccacggccaacgttcgcattgaggagaaacatgtccggaggagctcagtgaagaagattgagaagatgaaggagaagcgtcaagccaagtacacggagaataagctgaaggccatcaaagcccggaatgagtacttgctggctttggaggcaaccaatgcatctgtcttcaagtactacatccatgacctatctgaccttattgatcagtgttgtgacttaggctaccatgcaagtctgaaccgggctctacgcaccttcctctctgctgagttaaacctggaacagtcgaagcatgagggtctggatgccatcgagaatgcagtagaaaacctggatgccaccagtgacaagcagcgcctcatggagatgtacaacaacgtcttctgcccccctatgaagtttgagtttcagccccacatgggggatatggcttcccagctctgtgcccagcagcctgtccagagtgagctggtacagagatgccaacaactgcagtctcgcttatccactctaaagattgaaaacgaagaggtaaagaagacaatggaggccaccctgcaaaccatccaggacattgtgactgtcgaggactttgatgtgtctgactgcttccagtacagcaactccatggagtccgtcaagtccacggtctctgaaaccttcatgagcaagcccagcattgctaagaggagagccaaccagcaagagacagagcagttttatttcacaaaaatgaaagagtacctggagggcaggaacctcatcaccaagttacaagccaagcatgaccttctgcagaaaaccctgggagaaagtcagcggacagattgcagtctagccaggcgcagctcaactgtgaggaaacaggactccagccaggcaattcctctggtggtggaaagctgtatccggtttatcagcagacacggactacagcatgaaggaattttccgggtgtcaggatcccaggtggaagtgaatgacatcaaaaatgcctttgagagaggagaggaccccctggctggggaccagaacgaccatgacatggattccatagctggtgtcctgaagctttacttccgggggctggaacaccctctcttccccaaggacatctttcatgacctgatggcctgcgtcacaatggacaacctgcaggagagagctctgcacatccggaaagtcctcctagtcctgcccaaaaccactctgattatcatgagatacctctttgccttcctcaatcatttatcacagttcagtgaagagaacatgatggacccctacaacctcgccatctgcttcgggccctcgctaatgtcagtgccagagggccacgaccaggtgtcctgccaagcccacgtgaatgagctgatcaaaaccatcatcatccagcatgagaacatcttcccaagccccagggagctggagggccctgtctacagcagaggaggaagcatggaggattactgtgatagccctcatggagagactacctcggttgaagactcaacccaggatgtgaccgcagagcaccacacgagcgatgacgaatgtgagcccatcgaggccattgccaagtttgactacgtgggccggacagcccgagagctgtcctttaagaagggagcatccctgctgctttaccagcgggcttccgacgactggtgggaaggccggcacaatggcatcgacggactcatcccccatcagtacatcgtggtccaagacaccgaggacggtgtcgtggagaggtccagccccaagtctgagattgaggtcatttctgagccacctgaagaaaaggtgacagccagagcgggggccagctgtcccagtgggggtcatgtagccgatatttatcttgcaaacatcaacaagcaaaggaagcgtccagaatctgggagcatccggaaaacttttcggagtgacagccatgggctgagcagttccctgactgactcctcctccccaggggtgggggctagctgccgcccatcctcccagcccatcatgagccagagcctccccaaagaagggccagataagtgttccatcagtgggcacgggagcctcaactccatcagccgccactcatccctgaagaatcggctggatagtccacagatccggaagactgccacagcgggaaggtcaaaaagcttcaataaccatcggcccatggaccctgaggtcattgctcaggatattgaggcaacaatgaactcggccctgaatgagctacgggaactagaacggcagagcagtgtcaaacacacccctgacgtggttctggacaccttggagcccctcaaaacctccccagtggtggcccccacgtcagagccctccagccctctgcacacccagctcctcaaggaccccgagcccgccttccagcgcagcgccagtactgctggggacatcgcctgcgccttccggcctgtcaagtctgtcaagatggctgccccggtcaaaccaccagccacacggcccaagcccactgtcttccccaaaacaaatgccactagccctggtgtcaactcatcaacttccccacagtctactgacaagtcttgtactgtctgagggataataatttaattgttctagacaaggggactatagggactgactgttattaaaatcttcctatttaactagcttggggacttcagttgaaaattaggttctaagttgttcttgcaggaattagcctccccgtctcccaaaaccttgagaatgaagcccttggtatcgcctctcccttcccactgccctctgcttcccccagtcgtcgtaattcagccagctgcagtccgtaccgttcttaggttagccagagacaggttttcattatcaggtcactgtgaaatctggtaaggcagtcctgaggacatgggctcaagtctcagtcccctcagaccacggtgatgccttgaccagatggttggctactgccatccagctttcagtggcatcttgttttgggaactgattatagagaatcatatatagtccagtcttcattttacatacacacacatattttacacacacacacattttacacacacacacacacacacacacatatgtttttctagtctctggcatgtgtagcctctcctggtcatagaccagtctctttgtaagttattgtggcagttcacacagtagccaccaggggtctctgtttccattacaaactttgttctgtctgggccagagaacctagcctttgaaatctctccatcatatgaaacataacgggatgggacaatcccgtaacctgtttggggttgggggctttctctctgtgttctttccattgatgtgaattggtcattggtgtttgctcttgcctctcctccatcccctagaagtacacccccgtcttattaaggagcttttaaagtttttctgaatgtatagacatttctcgggttcctacctttgtctctgatggaccattttccatttaagacattttcctgtataagacagttttatagctggttccttttagggtaaagagtcttaagagagttttattgtgtctatggcaggtttgggaaaggtaagaaatgggtcctttttcctcctaatgtttttggcacttaaaacataaaattcattatcctattaaaaaattaaattcagctttgctaatccagaaattgttcccaaatgaaaacttgttttaagtccaccccttagtttccttattttacaaggtctctcttcagggaccaacaggggcttagagagccttagttagattaaagggagaccctacctcttaaaaccagttttcatttatgcaaacaaggacaattaagggaaccctgaccccacaggctctcaagtcttcccaaggccagaatcgaaagaaaattaaaatttgaatgctgaatattctggctctactctggccttttttctggttcccttccaaaatgcacaaatcatacccttgtctgctccaattcagtctccaaacctggtgcctgtgctcctggcccccctagcatcatgctatcccaggagtatcaggaccagacacatccacagccaggctcatgggtctcagacagcaacttgagttaaagctgaaactcatccttcttctctgtgttttctggtttaaaagctgcacttatattttagccttattattttctgtagttccggagagatggtgggttgccattctggtaggaaaatctgagttttcttatctttgacctagaagagattctttttggaccaacctgcgaaattggtagttaggtctatggaaagtggtaggattttttttttttaatcctgtgcaaaggaaaagaggtgctttgtgggaaatcactaatgagaaggctaacctgcagcaccagagaaacctttccaagtgctaggcaggagaactgaagaactctttcagtgaagtgagtcagcctagaagaggcaacccacagtcttgatttttgttgctgtttcctgacctgttcttgcctgtcacctgggcctacacaggtcccgagccaacggggctttcatacccaaggatctgtttccttgctgaaaatgaaaccctatctttcactttacattcctttcaatccaactgatcaaaactggtacccacacttgccctttctccctctctccagcacactcccctctaagaaagtaaaagcaaagctttcttaatggcaacactttgggcctgttctgttgctcctgccttatttctctttcaaccctgtacatgactcgtgttcaccatccccttgatcagtgtccatccgcgctaatttgcatcatgaactgaacagtgtgtgagtggtcacctactaaacccagctctgggggcagagctgtcttccccatctctggtgctcctaacacctgtgagatggtcctgtcgagaggactaggaaccgataggaggagagtccttctcggcagagctcactgcaaacaactggaattgaggttgcacactgtgatttttacaccgaaaagccaaaaggagctggccatccagggcctagggagaccagccttcctcagctatgcttgccgaaaccagcatgatgcttcaaagagccctgctccacccctcatggcatggatccttttcctggtgtggactctgaagggtcagtcttcggggaagagaggtggggtggggctactagcatcccaatttagaaaacagaggagtttgtagccagcagcctgtaaactggaaacactggtctcagccaacctcctcagggcgccctggcttctccccaaggagatgaggagcggtgatgccagcaccgggatgcgcagagcactggaagggctggtgcagatctacttcccatgcagaagagaagtcacatcttccagggaatcgcaatgttgtggcgtctgacttgtatgtcacatttgtgtaaaatggtatattctttaaaatagtgttgataactggaatattgtatgtatgcttggagatgctttgtgtgaacctaagactgtcactcaacagatgttggattggggaaaatccaaagcacaacttcaaaataaaatacatttttaggtttcgatgctgca

SEQ ID NO: 185929 - DNA, 2958 bp, Artificial Sequence
  derived and/or modified sequence
tgaaaggaccagaacgtgctgagccccgtgaactgctggaacctgctgctgaaccaggtgaagagagagagcagagaccacaccaccctgagcgacatctacctgaacaacatcatccccagattcgtgcaggtgagcgaggacagcggcagactgttcaagaagagcaaggaggtgggccagcagctgcaggacgacctgatgaaggtgctgaacgagctgtacagcgtgatgaagacctaccacatgtacaacgccgacagcatcagcgcccagagcaagctgaaggaggccgagaagcaggaggagaagcagatcggcaagagcgtgaagcaggaggacagacagacccccagaagccccgacagcaccgccaacgtgagaatcgaggagaagcacgtgagaagaagcagcgtgaagaagatcgagaagatgaaggagaagagacaggccaagtacaccgagaacaagctgaaggccatcaaggccagaaacgagtacctgctggccctggaggccaccaacgccagcgtgttcaagtactacatccacgacctgagcgacctgatcgaccagtgctgcgacctgggctaccacgccagcctgaacagagccctgagaaccttcctgagcgccgagctgaacctggagcagagcaagcacgagggcctggacgccatcgagaacgccgtggagaacctggacgccaccagcgacaagcagagactgatggagatgtacaacaacgtgttctgcccccccatgaagttcgagttccagccccacatgggcgacatggccagccagctgtgcgcccagcagcccgtgcagagcgagctggtgcagagatgccagcagctgcagagcagactgagcaccctgaagatcgagaacgaggaggtgaagaagaccatggaggccaccctgcagaccatccaggacatcgtgaccgtggaggacttcgacgtgagcgactgcttccagtacagcaacagcatggagagcgtgaagagcaccgtgagcgagaccttcatgagcaagcccagcatcgccaagagaagagccaaccagcaggagaccgagcagttctacttcaccaagatgaaggagtacctggagggcagaaacctgatcaccaagctgcaggccaagcacgacctgctgcagaagaccctgggcgagagccagagaaccgactgcagcctggccagaagaagcagcaccgtgagaaagcaggacagcagccaggccatccccctggtggtggagagctgcatcagattcatcagcagacacggcctgcagcacgagggcatcttcagagtgagcggcagccaggtggaggtgaacgacatcaagaacgccttcgagagaggcgaggaccccctggccggcgaccagaacgaccacgacatggacagcatcgccggcgtgctgaagctgtacttcagaggcctggagcaccccctgttccccaaggacatcttccacgacctgatggcctgcgtgaccatggacaacctgcaggagagagccctgcacatcagaaaggtgctgctggtgctgcccaagaccaccctgatcatcatgagatacctgttcgccttcctgaaccacctgagccagttcagcgaggagaacatgatggacccctacaacctggccatctgcttcggccccagcctgatgagcgtgcccgagggccacgaccaggtgagctgccaggcccacgtgaacgagctgatcaagaccatcatcatccagcacgagaacatcttccccagccccagagagctggagggccccgtgtacagcagaggcggcagcatggaggactactgcgacagcccccacggcgagaccaccagcgtggaggacagcacccaggacgtgaccgccgagcaccacaccagcgacgacgagtgcgagcccatcgaggccatcgccaagttcgactacgtgggcagaaccgccagagagctgagcttcaagaagggcgccagcctgctgctgtaccagagagccagcgacgactggtgggagggcagacacaacggcatcgacggcctgatcccccaccagtacatcgtggtgcaggacaccgaggacggcgtggtggagagaagcagccccaagagcgagatcgaggtgatcagcgagccccccgaggagaaggtgaccgccagagccggcgccagctgccccagcggcggccacgtggccgacatctacctggccaacatcaacaagcagagaaagagacccgagagcggcagcatcagaaagaccttcagaagcgacagccacggcctgagcagcagcctgaccgacagcagcagccccggcgtgggcgccagctgcagacccagcagccagcccatcatgagccagagcctgcccaaggagggccccgacaagtgcagcatcagcggccacggcagcctgaacagcatcagcagacacagcagcctgaagaacagactggacagcccccagatcagaaagaccgccaccgccggcagaagcaagagcttcaacaaccacagacccatggaccccgaggtgatcgcccaggacatcgaggccaccatgaacagcgccctgaacgagctgagagagctggagagacagagcagcgtgaagcacacccccgacgtggtgctggacaccctggagcccctgaagaccagccccgtggtggcccccaccagcgagcccagcagccccctgcacacccagctgctgaaggaccccgagcccgccttccagagaagcgccagcaccgccggcgacatcgcctgcgccttcagacccgtgaagagcgtgaagatggccgcccccgtgaagccccccgccaccagacccaagcccaccgtgttccccaagaccaacgccaccagccccggcgtgaacagcagcaccagcccccagagcaccgacaagagctgcaccgtgtag

SEQ ID NO: 185930 - DNA, 2796 bp, Artificial Sequence
  derived and/or modified sequence
cagagcaaggaggtgggccagcagctgcaggacgacctgatgaaggtgctgaacgagctgtacagcgtgatgaagacctaccacatgtacaacgccgacagcatcagcgcccagagcaagctgaaggaggccgagaagcaggaggagaagcagatcggcaagagcgtgaagcaggaggacagacagacccccagaagccccgacagcaccgccaacgtgagaatcgaggagaagcacgtgagaagaagcagcgtgaagaagatcgagaagatgaaggagaagagacaggccaagtacaccgagaacaagctgaaggccatcaaggccagaaacgagtacctgctggccctggaggccaccaacgccagcgtgttcaagtactacatccacgacctgagcgacctgatcgaccagtgctgcgacctgggctaccacgccagcctgaacagagccctgagaaccttcctgagcgccgagctgaacctggagcagagcaagcacgagggcctggacgccatcgagaacgccgtggagaacctggacgccaccagcgacaagcagagactgatggagatgtacaacaacgtgttctgcccccccatgaagttcgagttccagccccacatgggcgacatggccagccagctgtgcgcccagcagcccgtgcagagcgagctggtgcagagatgccagcagctgcagagcagactgagcaccctgaagatcgagaacgaggaggtgaagaagaccatggaggccaccctgcagaccatccaggacatcgtgaccgtggaggacttcgacgtgagcgactgcttccagtacagcaacagcatggagagcgtgaagagcaccgtgagcgagaccttcatgagcaagcccagcatcgccaagagaagagccaaccagcaggagaccgagcagttctacttcaccaagatgaaggagtacctggagggcagaaacctgatcaccaagctgcaggccaagcacgacctgctgcagaagaccctgggcgagagccagagaaccgactgcagcctggccagaagaagcagcaccgtgagaaagcaggacagcagccaggccatccccctggtggtggagagctgcatcagattcatcagcagacacggcctgcagcacgagggcatcttcagagtgagcggcagccaggtggaggtgaacgacatcaagaacgccttcgagagaggcgaggaccccctggccggcgaccagaacgaccacgacatggacagcatcgccggcgtgctgaagctgtacttcagaggcctggagcaccccctgttccccaaggacatcttccacgacctgatggcctgcgtgaccatggacaacctgcaggagagagccctgcacatcagaaaggtgctgctggtgctgcccaagaccaccctgatcatcatgagatacctgttcgccttcctgaaccacctgagccagttcagcgaggagaacatgatggacccctacaacctggccatctgcttcggccccagcctgatgagcgtgcccgagggccacgaccaggtgagctgccaggcccacgtgaacgagctgatcaagaccatcatcatccagcacgagaacatcttccccagccccagagagctggagggccccgtgtacagcagaggcggcagcatggaggactactgcgacagcccccacggcgagaccaccagcgtggaggacagcacccaggacgtgaccgccgagcaccacaccagcgacgacgagtgcgagcccatcgaggccatcgccaagttcgactacgtgggcagaaccgccagagagctgagcttcaagaagggcgccagcctgctgctgtaccagagagccagcgacgactggtgggagggcagacacaacggcatcgacggcctgatcccccaccagtacatcgtggtgcaggacaccgaggacggcgtggtggagagaagcagccccaagagcgagatcgaggtgatcagcgagccccccgaggagaaggtgaccgccagagccggcgccagctgccccagcggcggccacgtggccgacatctacctggccaacatcaacaagcagagaaagagacccgagagcggcagcatcagaaagaccttcagaagcgacagccacggcctgagcagcagcctgaccgacagcagcagccccggcgtgggcgccagctgcagacccagcagccagcccatcatgagccagagcctgcccaaggagggccccgacaagtgcagcatcagcggccacggcagcctgaacagcatcagcagacacagcagcctgaagaacagactggacagcccccagatcagaaagaccgccaccgccggcagaagcaagagcttcaacaaccacagacccatggaccccgaggtgatcgcccaggacatcgaggccaccatgaacagcgccctgaacgagctgagagagctggagagacagagcagcgtgaagcacacccccgacgtggtgctggacaccctggagcccctgaagaccagccccgtggtggcccccaccagcgagcccagcagccccctgcacacccagctgctgaaggaccccgagcccgccttccagagaagcgccagcaccgccggcgacatcgcctgcgccttcagacccgtgaagagcgtgaagatggccgcccccgtgaagccccccgccaccagacccaagcccaccgtgttccccaagaccaacgccaccagccccggcgtgaacagcagcaccagcccccagagcaccgacaagagctgcaccgtgtag

SEQ ID NO: 185931 - protein, 611 aa, Artificial Sequence
  derived and/or modified sequence
MSVQVVSAAAAAKVPEVELKDLSPSEAESQLGLSTAAVGAMAPPAGGGDPEAPAPAAERPPVPGPGSGPAAALSPAAGKVPQASAMKRSDPHHQHQRHRDGGEALVSPDGTVTEAPRTVKKQIQFADQKQEFNKRPTKIGRRSLSRSISQSSTDSYSSAASYTDSSDDETSPRDKQQKNSKGSSDFCVKNIKQAEFGRREIEIAEQEMPALMALRKRAQGEKPLAGAKIVGCTHITAQTAVLMETLGALGAQCRWAACNIYSTLNEVAAALAESGFPVFAWKGESEDDFWWCIDRCVNVEGWQPNMILDDGGDLTHWIYKKYPNMFKKIKGIVEESVTGVHRLYQLSKAGKLCVPAMNVNDSVTKQKFDNLYCCRESILDGLKRTTDMMFGGKQVVVCGYGEVGKGCCAALKAMGSIVYVTEIDPICALQACMDGFRLVKLNEVIRQVDIVITCTGNKNVVTREHLDRMKNSCIVCNMGHSNTEIDVASLRTPELTWERVRSQVDHVIWPDGKRIVLLAEGRLLNLSCSTVPTFVLSITATTQALALIELYNAPEGRYKQDVYLLPKKMDEYVASLHLPTFDAHLTELTDEQAKYLGLNKNGPFKPNYYRY

SEQ ID NO: 185932 - DNA, 1836 bp, Artificial Sequence
  derived and/or modified sequence
atgagcgtgcaggtggtgagcgccgccgccgccgccaaggtgcccgaggtggagctgaaggacctgagccccagcgaggccgagagccagctgggcctgagcaccgccgccgtgggcgccatggccccccccgccggcggcggcgaccccgaggcccccgcccccgccgccgagagaccccccgtgcccggccccggcagcggccccgccgccgccctgagccccgccgccggcaaggtgccccaggccagcgccatgaagagaagcgacccccaccaccagcaccagagacacagagacggcggcgaggccctggtgagccccgacggcaccgtgaccgaggcccccagaaccgtgaagaagcagatccagttcgccgaccagaagcaggagttcaacaagagacccaccaagatcggcagaagaagcctgagcagaagcatcagccagagcagcaccgacagctacagcagcgccgccagctacaccgacagcagcgacgacgagaccagccccagagacaagcagcagaagaacagcaagggcagcagcgacttctgcgtgaagaacatcaagcaggccgagttcggcagaagagagatcgagatcgccgagcaggagatgcccgccctgatggccctgagaaagagagcccagggcgagaagcccctggccggcgccaagatcgtgggctgcacccacatcaccgcccagaccgccgtgctgatggagaccctgggcgccctgggcgcccagtgcagatgggccgcctgcaacatctacagcaccctgaacgaggtggccgccgccctggccgagagcggcttccccgtgttcgcctggaagggcgagagcgaggacgacttctggtggtgcatcgacagatgcgtgaacgtggagggctggcagcccaacatgatcctggacgacggcggcgacctgacccactggatctacaagaagtaccccaacatgttcaagaagatcaagggcatcgtggaggagagcgtgaccggcgtgcacagactgtaccagctgagcaaggccggcaagctgtgcgtgcccgccatgaacgtgaacgacagcgtgaccaagcagaagttcgacaacctgtactgctgcagagagagcatcctggacggcctgaagagaaccaccgacatgatgttcggcggcaagcaggtggtggtgtgcggctacggcgaggtgggcaagggctgctgcgccgccctgaaggccatgggcagcatcgtgtacgtgaccgagatcgaccccatctgcgccctgcaggcctgcatggacggcttcagactggtgaagctgaacgaggtgatcagacaggtggacatcgtgatcacctgcaccggcaacaagaacgtggtgaccagagagcacctggacagaatgaagaacagctgcatcgtgtgcaacatgggccacagcaacaccgagatcgacgtggccagcctgagaacccccgagctgacctgggagagagtgagaagccaggtggaccacgtgatctggcccgacggcaagagaatcgtgctgctggccgagggcagactgctgaacctgagctgcagcaccgtgcccaccttcgtgctgagcatcaccgccaccacccaggccctggccctgatcgagctgtacaacgcccccgagggcagatacaagcaggacgtgtacctgctgcccaagaagatggacgagtacgtggccagcctgcacctgcccaccttcgacgcccacctgaccgagctgaccgacgagcaggccaagtacctgggcctgaacaagaacggccccttcaagcccaactactacagatactag

SEQ ID NO: 185933 - DNA, 5056 bp, Artificial Sequence
  derived and/or modified sequence
gccgaccaagagcaggagctggagtctgagccggtggttgcagcggaggcggtgatgtcggtgcaggttgtgtcagccgcggctgccgccaaggtgcctgaggtggagctgaaggacctgagcccctccgaggcggagtcgcaactaggactgagcacggccgccgtgggcgccatggcccccccggcgggcggtggagaccctgaggctccagctcccgccgcggagcggcccccggtccccggcccgggctcggggcccgccgccgctctcagccccgccgccgggaaggtgcctcaggcgtcggccatgaagcggagcgacccacatcaccagcaccagcggcaccgcgacggcggcgaggccctggtcagccccgacggcaccgtcaccgaggcgccgcgcacagtcaagaagcagatccagtttgctgaccagaagcaagaattcaacaaacgtcccaccaaaattggacgtcgctctttgtctcgttccatttctcagtcatctactgacagctacagctcagcggcttcatatacagatagctctgatgatgagacatcgcccagggacaagcagcaaaagaactctaagggaagcagtgacttctgtgttaagaacatcaaacaggcagagtttggacgaagagaaattgaaattgctgaacaagaaatgcctgcattgatggctttgaggaagagagctcaaggagaaaagcctttggctggagccaaaatcgtgggttgcacacacatcactgctcagactgctgtgcttatggaaactctgggtgctctgggggcccagtgccgatgggctgcctgcaacatctattccactctcaatgaagtggctgctgctctagcagaaagtggatttcctgtttttgcctggaagggagagtcagaagatgacttttggtggtgtatcgatagatgtgtgaatgtggagggctggcagccaaacatgatcttggatgatggaggggatcttacccactggatttataaaaagtatcccaacatgtttaagaaaatcaagggcatagtagaggagagtgttactggagttcacaggctgtaccaactgtccaaagctgggaagctgtgtgttccagccatgaatgtcaatgactcagtcaccaaacagaaatttgacaacctctactgttgccgtgaatcaattcttgatggacttaaaaggacaacagacatgatgtttggtggaaagcaagtggtagtctgtggctatggagaggtggggaaagggtgctgtgctgccctgaaagccatgggctccattgtgtatgtaactgaaattgaccccatctgtgccctgcaagcctgtatggatggatttcgactggtgaaattaaatgaggtcatccgacaagtggacattgttattacctgtacaggtaacaagaatgtggtaaccagagagcacttggaccgtatgaagaatagctgcatcgtttgtaacatgggacattccaacacagagattgacgtggcgagtctgcggacaccagaactgacctgggagcgagtgagatctcaagttgaccatgtgatatggcctgatggcaagaggatagtactgctggcagagggccgcctgctgaaccttagctgctccacagtgcctacatttgtgctctcaatcactgctactactcaggctcttgccttgatagagctttacaatgctcctgagggtcgctataagcaggatgtctacctgttgcccaagaagatggatgagtatgtggccagcctacacctgcctacctttgatgcccacttgacagagctgacagatgaacaggccaagtatctgggactcaacaagaatgggcccttcaagcctaattactacaggtattaagttcctgtaactcaaaccagaatttttaaggaatagaactccaagccttttctccactactatacaagaaagaattcagcaagctgcttctccaatcaaagctgcctgccgtgctcaccctgtgtgttaggttatttatttattaaaatcaagaatcctgtgcctgtagtgttggcccagagtgtggttactgccctgagggccatgaaagccacagaggatgggctgaggaaggaaagaaatggggttactgctcccagtgcatcatttgcatcattccccattgactgaatcctcagcagtggccgtttttcctcttgtccaggctcacgagttagtccagggattccatactccctattccctggagttttctggaataaattttcagcacctgcttttctcagcttggcccttccccgggtgaggccgtttggaattaacatggccagtgtttcacacaagattgggttcccaatcttgaccatcactatcactgccttctttatataaaggctaataaggaaggagtgttatttatggctttgccaagctacatcaagaactcagctgtgctgtgcctaccaggggtctcctttcttacccaggactcctttcttctccttgaatatttatgtccattttaacacttcctggttgcaagagggatgtgcctccattatttcctccacagttttggtatttgtcagacatttgttctgctgtctttctaatccagccaacgtctgctcaggaagtggggccagctccactgggacccatagttttacttccttgtcatttgattggatagtttccaaggaagcccctccagattggcactatctcagaaaaggagagcttgttgtgaaacactgcttcctgaaacttcctgctattgcctaaagctacgtctgaaactgagtagggaaaggcatacttttccagggacttagggggataggctttggaaatgggacaggtctttcagactcacagcttgataccctaacaaagcagagtatatttatttgtttcccaggaaggccattgcagtttgactggctgagggatacagagatgaaattgtaaactgtatccagattatcaaagctaatttgactagtttgaacctcgtcagacattcattcctttggccattgccatggatgaaaccgagatctgcagtctgatctgtggacttctctgctggcatatcttttatgatttaacctcttccatttgatgattctgtatttcagagtcagtttcttgagtaactccagtgctacaaaaagaattagtaatgtggtgtgggcagcgtgacattttatgtcccacccaaaaattggattccttttggagactgatctgttggtctcaggcatttcattaggaccagattggttctaagagttagtctggactggccctaggaaacttgaattaaataagcctcttccccttaccgatcctttttaacactctcaggtttgtttgtttcccacttttttcctatgctggtctgcctcaaagtctcaagaccaaggtgactcaagataacaccagaccacgcatgatcaccaaaaccttcccatcctgattctcttcttctacctctaccctctccaacttctcctggtcttcacatatactctcaaagctagtctgaaagtgaccttactttcggaagtagggaagtggaactttggtaaatgactgtttgcctcatttaatagtatacaggctcagcccatagactacagttcttcagaggccatatgtctcagcaagtactggttatattctttttttgtaaggaagatcataaatgctaaaaattccactaagccattcagttcttccttttgcctacctagtcctgatttttgtattaattggttccctttagcaagggattcagatctttgtaccttatcttatatccagagcagattccatttggcagatagatggtctctagcctattgtattcttagaccaaaaatcataacctgctgtttctcagcaaagccttgctctctggagcttactatgtgctggtacttaaagagtacattctgccttgctgtagtgaagagacccactccaaataaaaaaggggccacacggggcttctaagttaggttgccagtgttgctgcccatgatgagttatttgcctctgagtttcagatgacctctctgtagggacactgtgttatcaaccattaagaagaaagaaccacaagcctcccaagtatttgggttctatcttagggttgaaatctggtcattattccctctacccttggaatcagagcaatgtgtcttctttcctccaacctcttaccttagatgcatcctggttatctggaagcatgggaaagaaggctacttatctctttgtatgtggctccagtctgtgaggatacataacattttctctacaatgaatctgtgctaatattttgccttctttctttcttttcttttcacccttagagacagggtttcactatgttgcccaggctggtctcaaactcctgggctcaagcaatcctcctgcctcagcttcctgagtagctggaaccacaggtgtgtgctaccgtgcctggcacttttttgccttcttaatggagatattcagttttctttttttcatttaaacaaagaaaaaaaatgtatctactctaccttccctctgctctcctccctccctatcctacttgcccatatgagcacggctccccatggccacatactcctgcaaagcttttatgctgcttcgcttttctctaaacagatctgatattgctgctcctgtggttttctcaaaattaactttgccgtggtttttaaaaaggaatcaaaatgcattgttgcattaagctttttcaataaaggaaaattacggaaggaaaataggcaacaccagcaaattatatgtggacaggttctaaactctatatatacatatatatatatatatctatatatctatatacgtaatcatctagttctgtcatcttactgaaaggaataacacttctaaagatcaccatttctgagaagttcttggaaatctttatgtctaagtgattgtattagatcagcaataatgactatgtaatctcaaaaaacaaataaaatattcttaacatgga

SEQ ID NO: 185934 - DNA, 1836 bp, Artificial Sequence
  derived and/or modified sequence
atgtcagtacaggtggtttccgcggctgcagccgccaaggtcccggaggtggaactgaaggatctctctccttccgaggccgaatcccagttgggcctgagcacagccgccgtgggagccatggcaccccctgctggcggtggtgatccggaggctccggctcccgcagcggaacgccctccagtacccggcccagggtctggaccagccgccgcgttgtctcctgccgccggaaaggtccctcaggcaagcgccatgaagcggtcagacccccaccatcagcatcaacgtcatagagatggaggcgaagcgttggtctctccagacggcaccgttacagaggcgcccagaacggtaaagaaacagatccaattcgcagaccagaagcaggaattcaacaaacgaccaacaaaaattgggcggcgctcgctatcaaggtctatcagtcaaagctcaaccgacagctacagcagcgcggccagctataccgattcttcggacgatgaaacatctccccgcgataaacagcaaaaaaattctaaggggagctcagacttttgcgtgaagaatattaaacaggccgagttcggcaggcgagaaatcgagatagccgagcaggagatgcctgccctgatggctctgcgaaagagggcgcagggggagaagcccctcgcaggtgcgaagattgttggatgtactcatataaccgcccagaccgcggtgctaatggagactctgggtgcgctcggagcccaatgccggtgggcagcgtgcaatatctactccacactgaacgaggttgcagctgccctggccgagtctgggttccccgtattcgcatggaagggagaatccgaggatgatttttggtggtgcatagacaggtgcgtcaatgtggaaggttggcaacccaacatgatcctggacgacggaggggacttgacccattggatctataagaaatatccgaatatgtttaaaaagatcaagggcattgtggaagagtcagtcaccggggttcaccgtctgtaccaactgtcaaaagctgggaagttgtgcgtgcctgccatgaatgtgaacgattccgtgacgaaacagaaatttgacaatctgtattgctgtcgggaaagcatcctggatgggctgaagcgcactacagacatgatgttcggcgggaagcaggtggtggtgtgcgggtacggcgaggtggggaagggatgctgcgccgccctgaaagcaatgggctccattgtctacgtgacagagatagatcctatctgtgctcttcaggcctgtatggatggattccggctcgttaaactgaatgaggtgatacgccaagtagacattgtgatcacctgtactgggaataaaaatgttgtaacgcgcgagcatctggacaggatgaagaattcatgcatcgtctgcaacatgggacatagtaataccgagatcgacgtggcgtccctgcgaactcctgagctcacgtgggaacgcgtgcgcagtcaggtggaccacgtgatttggcccgacggtaagcgcattgtcctgcttgctgagggccgactgctgaacctgtcttgttcaaccgtccctacgttcgttctgtctatcaccgcgactacgcaggcccttgctttaatcgagctgtacaatgcccctgagggccggtacaagcaagacgtctaccttctgccaaaaaagatggatgagtatgtggcatccctccacctgcctacattcgacgctcacttaactgaactcaccgatgaacaggctaagtacctgggactcaacaaaaacgggcctttcaagcccaactattatcgctattag

SEQ ID NO: 185935 - DNA, 1836 bp, Artificial Sequence
  derived and/or modified sequence
atgtctgtgcaggtggtgtctgctgctgctgctgccaaggtgcctgaggtggagctgaaggacctgagccccagcgaggccgagagccagctgggcctgagcacagctgctgtgggcgccatggcccctcctgctgggggcggggaccctgaggccccagccccagctgctgagcggccccctgtgcccggccctggcagcggccctgctgctgccctgagccctgctgctgggaaggtgccccaggccagcgccatgaagagaagtgacccccaccaccagcaccagaggcacagagatggaggagaggccctggtgtccccagatggcaccgtgacagaggcccccaggacagtgaagaagcagatccagtttgctgaccagaagcaggagttcaacaagaggcccaccaagattggaagaagaagcctgagccgcagcatcagccagagcagcacagacagctacagcagcgctgccagctacacagacagcagtgatgatgagaccagcccccgggacaagcagcagaagaacagcaagggcagcagtgacttctgtgtgaagaacatcaagcaggccgagtttggccggcgggagattgaaattgctgagcaggagatgcctgccctgatggccctgaggaagagggcccagggcgagaagcccctggccggggccaagatcgtgggctgcacccacatcacagcccagacagctgtgctgatggagaccctgggcgccctgggcgcccagtgccgctgggccgcctgcaacatctacagcaccctgaatgaggtggccgccgccctggccgagagcggcttccctgtgtttgcctggaagggggagagtgaagatgacttctggtggtgcatcgacagatgtgtgaatgtggagggctggcagcccaacatgatcctggatgatggaggagacctgacccactggatctacaagaagtaccccaacatgttcaagaagatcaagggcatcgtggaggagagcgtgactggagtgcaccggctgtaccagctgagcaaggccggcaagctgtgtgtgcctgccatgaatgtgaatgacagcgtgaccaagcagaagtttgacaacctgtactgctgccgggagagcatcctggatggcctgaagaggaccacagacatgatgtttggaggcaagcaggtggtggtgtgtggctacggggaggtgggcaagggctgctgtgccgccctgaaggccatgggcagcatcgtgtatgtgacagaaattgaccccatctgtgccctgcaggcctgcatggatggcttccggctggtgaagctgaatgaggtgatccggcaggtggacatcgtcatcacctgcaccggcaacaagaatgtggtgacccgggagcacctggacaggatgaagaacagctgcatcgtgtgcaacatgggccacagcaacacagaaattgatgtggccagcctgcggaccccagagctgacctgggagcgggtgcgcagccaggtggaccacgtgatctggccagatggcaagagaattgtgctgctggccgagggccgcctgctgaacctgagctgcagcacagtgcccacctttgtgctgagcatcacagccaccacccaggccctggccctgattgagctgtacaatgcccctgagggccgctacaagcaggatgtgtacctgctgcccaagaagatggatgaatatgtggccagcctgcacctgcccacctttgatgcccacctgacagagctgacagatgagcaggccaagtacctgggcctgaacaagaatggccccttcaagcccaactactaccgctactag

SEQ ID NO: 185936 - DNA, 1836 bp, Artificial Sequence
  derived and/or modified sequence
atgagcgtgcaggtggtgagcgccgccgccgccgccaaggtgcccgaggttgagttaaaggatttaagcccatcagaggccgaatcccagcttggtctctctaccgctgctgtcggcgcaatggctccaccggccggaggcggtgaccctgaagctcccgcaccagcagccgagcggcctcctgtgccggggcctgggagcggacccgctgcagccctctcgccggccgccgggaaagttccacaggcctccgccatgaagcgctctgacccccaccaccagcatcagagacacagagatgggggcgaagccctggtaagtcccgacgggactgttacagaggcacctcgcacggtcaaaaaacagatccagttcgcagaccagaaacaggagtttaataagcggcctacaaagatcgggagaagaagtttaagtcggagcatcagccagagctctacagacagctacagttctgctgcgtcatacactgatagcagcgacgatgaaacttcacctcgtgataagcagcaaaaaaattctaagggaagtagcgacttctgcgtgaagaacatcaagcaagctgagtttggacgcagagaaatagaaattgcagagcaggaaatgccggccttgatggcattgaggaagagagcccagggggagaagcctctggctggcgctaaaatcgttggctgcacacacataacagcccaaaccgcagtattgatggagacgctgggggctctgggtgcccagtgcagatgggccgcctgcaatatttacagcaccctgaatgaggtggctgcagccctggccgagagcgggttccctgtcttcgcatggaagggcgagagcgaggacgacttctggtggtgtatcgaccgctgcgtgaacgtggagggatggcagccgaacatgatcttagatgacggaggcgatttgacgcactggatctacaaaaaatatcctaatatgtttaaaaagattaaagggattgtggaagagtcggtgacgggcgtgcatcggctctaccaattgtctaaagcaggaaagctttgtgtccccgccatgaacgtgaacgactctgtgactaaacagaagttcgacaacctgtactgctgtcgggaaagtattcttgatggtctgaagaggaccaccgacatgatgtttggggggaaacaggtggtggtgtgtggttacggggaggtcgggaaaggatgctgtgcagctttgaaagctatgggctctatagtctacgtaacagagattgaccctatatgcgccctccaggcttgcatggacggctttaggcttgttaagcttaacgaggtgatccgtcaggttgatatagtgatcacttgtacaggtaacaagaatgtggtgacccgagagcacctggatcgcatgaaaaattcttgtatcgtatgcaacatggggcattcaaataccgagattgatgtcgcatcactgagaacccctgagctcacctgggaaagagttaggtcccaggttgaccacgtcatctggcctgacgggaagcgcatcgtgctgctggctgaggggcgtctactgaatctctcttgtagtacagttcccacttttgtcctgtcaataacagccactacccaagcactggccttgattgaactctacaatgccccagagggtcggtacaagcaggatgtttatctgctcccaaagaaaatggatgaatatgtcgctagcctccacctgcccacattcgacgcgcaccttacagaacttaccgatgaacaagcaaagtacctcggcttgaataagaatggccctttcaagccaaactactaccggtattag

SEQ ID NO: 185937 - DNA, 1836 bp, Artificial Sequence
  derived and/or modified sequence
atgagcgtgcaagtggtgagtgccgcagcagccgcaaaagttcctgaagtagaactgaaagatctgtcccccagcgaagctgagtctcagctaggcctgtctactgctgccgttggagccatggccccaccagctgggggaggtgacccagaggcccctgcccctgccgcagagcggccaccagtgcccggtcccggttctggtcctgccgctgccctaagcccagctgccggaaaagtcccccaggcaagtgcaatgaaacggagtgaccctcatcatcagcaccaacgccaccgtgacgggggagaggccctagtcagcccggatggaactgtgactgaagctccacggacagttaaaaaacaaattcagtttgccgaccagaaacaggaattcaacaaacgtccaaccaagatcggcaggagatcacttagtagatctatcagccagagttcaaccgattcatactcttccgctgcttcatacactgactcgtctgatgatgaaacttccccacgggataaacagcaaaaaaattccaaaggctctagtgatttctgtgtcaagaatattaaacaggcagagttcggcagaagggaaattgaaatcgccgagcaggaaatgcctgcactgatggccttgcggaaaagagctcaaggggagaaacctctggctggcgcaaagatcgtgggttgcactcacatcaccgctcagaccgctgtgctgatggaaacattaggagcactaggtgcccagtgcagatgggctgcatgtaacatttatagcaccctaaatgaagtggctgctgctttggcagaatccgggtttccggtgttcgcctggaagggtgaatcggaggacgatttttggtggtgcatagacaggtgcgtgaacgtggaaggctggcaacccaacatgatcctggacgatggcggtgacttgactcattggatctataagaaatacccgaacatgttcaaaaaaatcaagggcatcgtcgaggaaagtgtcaccggtgtacaccggctttaccaactgtcaaaagcgggaaaactgtgcgtacccgctatgaatgtcaacgactccgtgaccaaacaaaagttcgacaatctgtattgttgcagggagtccatcctagatggtctcaagagaactactgatatgatgttcggtggaaagcaggtggtggtctgtgggtatggagaggtggggaagggctgctgtgcagctctcaaagccatgggaagcatcgtttacgtgacagagattgatccaatttgcgccctgcaggcctgcatggacggatttaggttggtgaagctgaatgaggtcattaggcaagtcgatatcgtgattacatgtacagggaacaagaatgtcgtgactagggagcatttagatcggatgaagaattcctgcatcgtgtgcaacatggggcactctaacacagagattgacgtggccagtctgagaacccccgaacttacctgggagagagtgcggagccaggtggaccatgtgatctggccagatggaaaacgcattgtgctcctcgccgaggggcgtcttctgaacctgtcctgctccaccgttcctacgttcgtgctgagcattactgcaactacacaggcccttgccctaatcgagctctataacgcacctgaagggaggtataaacaagatgtgtatctgttgccaaagaaaatggacgagtacgtcgcctcgctccacctacctacatttgacgctcacctgactgagctgacagatgaacaggccaagtatctgggcctcaacaagaatggtcctttcaaaccaaactactacagatattag

SEQ ID NO: 185938 - protein, 613 aa, Artificial Sequence
  derived and/or modified sequence
MAAQAAAAAQAAAAQAAQAEAADSWYLALLGFAEHFRTSSPPKIRLCVHCLQAVFPFKPPQRIEARTHLQLGSVLYHHTKNSEQARSHLEKAGSLSQQIPQFEDVKFEAASLLSELYCQENSVDAAKPLLRKAIQISQQTPYWHCRLLFQLAQLHTLEKDLVSACDLLGVGAEYARVVGSEYTRALFLLSKGMLLLMERKLQEVHPLLTLCGQIVENWQGNPIQKESLRVFFLVLQVTHYLDAGQVKSVKPCLKQLQQCIQTISTLHDDEILPSNPADLFHWLPKEHMCVLVYLVTVMHSMQAGYLEKAQKYTDKALMQLEKLKMLDCSPILSSFQVILLEHIIMCRLVTGHKATALQEISQVCQLCQQSPRLFSNHAAQLHTLLGLYCVSVNCMDNAEAQFTTALRLTNHQELWAFIVTNLASVYIREGNRHQEVLYSLLERINPDHSFPVSSHCLRAAAFYVRGLFSFFQGRYNEAKRFLRETLKMSNAEDLNRLTACSLVLLGHIFYVLGNHRESNNMVVPAMQLASKIPDMSVQLWSSALLRDLNKACGNAMDAHEAAQMHQNFSQQLLQDHIEACSLPEHNLITWTDGPPPVQFQAQNGPNTSLASLL

SEQ ID NO: 185939 - protein, 613 aa, Artificial Sequence
  derived and/or modified sequence
MAAQAAAAAQAAAAQAAQAEAADSWYLALLGFAEHFRTSSPPKIRLCVHCLQAVFPFKPPQRIEARTHLQLGSVLYHHTKNSEQARSHLEKAWLISQQIPQFEDVKFEAASLLSELYCQENSVDAAKPLLRKAIQISQQTPYWHCRLLFQLAQLHTLEKDLVSACDLLGVGAEYARVVGSEYTRALFLLSKGMLLLMERKLQEVHPLLTLCGQIVENWQGNPIQKESLRVFFLVLQVTHYLDAGQVKSVKPCLKQLQQCIQTISTLHDDEILPSNPADLFHWLPKEHMCVLVYLVTVMHSMQAGYLEKAQKYTDKALMQLEKLKMLDCSPILSSFQVILLEHIIMCRLVTGHKATALQEISQVCQLCQQSPRLFSNHAAQLHTLLGLYCVSVNCMDNAEAQFTTALRLTNHQELWAFIVTNLASVYIREGNRHQEVLYSLLERINPDHSFPVSSHCLRAAAFYVRGLFSFFQGRYNEAKRFLRETLKMSNAEDLNRLTACSLVLLGHIFYVLGNHRESNNMVVPAMQLASKIPDMSVQLWSSALLRDLNKACGNAMDAHEAAQMHQNFSQQLLQDHIEACSLPEHNLITWTDGPPPVQFQAQNGPNTSLASLL

SEQ ID NO: 185940 - DNA, 4853 bp, Artificial Sequence
  derived and/or modified sequence
gcctccctgtggcggcggcttgttgttgtggaggccaaaatggcggctcaggcggcggcagcggcccaggcggcggcggcccaggctgcgcaggccgaggcggccgactcgtggtacctggcgcttctgggcttcgctgagcacttccgcacttccagcccgcccaaaatccgcctgtgcgtgcactgcctgcaggccgtgttccccttcaagccgccgcagcgcatcgaggcccgtacacacctgcagctgggctccgttctctatcaccacaccaagaacagcgagcaggcgcgcagccacctggagaaggcgggttcactttctcagcaaatcccgcagttcgaagatgttaaatttgaagcagcaagtctgttgtctgaattgtactgtcaagagaattccgttgatgcagcaaagccgctgctgcggaaggcgatccagatctcacagcagaccccatattggcactgccgcctgctcttccagctcgctcaactgcacacgcttgagaaggacctggtgtcggcctgtgacctcctgggtgtaggggccgagtacgcccgggtggtgggatctgaatacacacgggcgctgttcctcctcagcaaggggatgctgctgctgatggagcgaaagctgcaggaggtgcacccgctgctgaccctctgcgggcagatcgtggagaactggcaggggaaccccatccagaaggagtcgctgcgtgtcttcttcctggtgctccaggtcacccactatctggatgccgggcaggtgaagagcgtgaagccgtgtctgaagcagctgcagcagtgcatccagaccatctccacactgcacgatgatgagatcctgcccagcaaccccgctgacctcttccactggctgcccaaggagcacatgtgtgtgcttgtctacctggtgactgtgatgcactccatgcaggccggctacctggagaaggcgcagaagtacacggacaaggccctcatgcagctggagaagctcaagatgctggactgcagccccatcctgtcatccttccaagtgatcctgctggagcacatcatcatgtgccgccttgtcacgggtcacaaggccacggcgctgcaggagatctcccaggtctgccagctgtgccagcagtccccccggctcttctccaaccatgcagcacagctgcacacattgctgggcctgtactgtgtctctgtcaactgcatggacaacgcggaagcccagttcaccacggccctgcggctcaccaaccaccaggagctgtgggccttcatcgtcaccaacctggcgagtgtgtatatacgggaaggaaatagacaccaagaggtactctacagtctgctggagaggatcaacccggaccacagcttccctgtcagctcgcactgcctccgagcagccgccttctatgtgcgtgggctcttctccttcttccagggacgctacaacgaggccaagcgatttctgcgggaaactctgaagatgtccaatgctgaggacctgaaccggctcacagcctgctccctcgtgcttctgggccacatcttctatgtgctgggaaaccacagggagagtaacaacatggtggtgcctgccatgcagctcgccagcaagatcccggacatgtcggtacagctgtggtcgtcagcactgctgagagacctgaataaagcctgtgggaacgccatggatgcccatgaagccgcccagatgcaccagaacttctcgcagcagctgctccaggaccacattgaggcctgcagcctccccgaacacaacctcatcacgtggacagacggtccaccccccgtgcagttccaagctcagaatggacccaacaccagcctggccagcctcctgtgaggccttgatggggccatccagctccgcagggcctgcgcgtctccggcttccacccagacggcactcaagcctgcccccgaggcgtgcttccttcctgattgtctctagagcttccaagtcctgggaatgtgcggggccagtccctgccctcccaggaggggtggtagccgttcccacctcgcagcaggacccccagtgcagaggctcacaggtggcacacaggcgctgtctctccagagccatccttcagagtggacctcagtgccagtcctgcctcagcatctgggtcacgtcggccaggagtagggtgcaggcctccagcaggtcctaatcctgtgtgccagggcaggcagtgccccaggggcaccacgcctgactctccatcacccaggccttgatgccgagcgggagtagagtgtttcctctgctcaaggcaatttccagagcccggatgccagtttctggcctgaatttggagggaagaagtaatggcgctagtgtgggacgaagcacagatcccagcacttttcccagctttctctccagcatcagtccctgcagcagctggggcctctggtcaggaaccctcagggacccaggaactcagcttccaaacatctgcaccttgaccggactcgccatcccgccgtgggggtgcaggtgattgtaaacacgggtgtgcatgtggatgcacacgggtgtgcggtgaagatctgtggagatggagctgggagctgaggctcctgttgcaccagccaccttcccccatcttgtggctgctgaggggcaggaagcgggggagtgggctcgtctcctaaatttaagatcacctcctcagctagcttagagtgcgtggcacgggccccccgcccccgagatctggagcccagggactttcttcctggcagatctgtggccttccctgctcagcctcttggtccccccactccctccaccgcctcaccttccctgctgggtctctggggcacagtgtgaaacccgcaccctagccaggccccagggagcctccgctgggcccagacagcagcgtttggttttatccacttttcttggataatcaggaggtgccccagtggtcacagtgtggcattccgagttggggcgggtggtcgggtcaagatagcagcagcaggtgtcagggctcaagacaccaccccctccagcttctggggcccaggagcctctccctgctacagggggtgggggtcctgctcagcagggtaggtggtggttttaggtcttgtcaccctcactcagtggaactgcctctgggagctttggcgtctgtgactaaagggacgctggattgctcaggtcagctgcttggggctcccaggctgggtgtgccttagccacaggcagggctgtcaataacccccttcctcactggccaccacctgacatcagcaccagtgacaggctggtcagagggcggggctggtgagggtttgtcctaagaggaccaccgccatctctgggtctccagggggagagcctggccctgtcctttgctacccagggctgcccccaggcccatgaagccaataggagagcgtgtggcactggcccacaaactgtccctgtcctgtcttcctcccgagccatggcctctgctagctccaccttgaaggagccccccacatcctcccctacatcccagagatgccaccacttgtgtctccacaatgtgctcctgcccacccgggttccgcactgtccgacccctgcacaccactcatgtcaccacggcgtgcatcatgttcatccccatctatttatttaagcctttctttgcttgtagggcattttgtatgtagagcagttgaaaacagaacctcagaacttaacatctgtcctgatgttaaagtgcttttcatgaccaccctgttatctatgtatatgtaaagttaaggatgagatcttaagtttacaattaaaaactcagtactcaatatttaatattctactcgagctttatggaagccaaatcatgtgcatgtgtgtgtgtgcgtgtgtgcaagctttgaacctccttccacagccgcatcttctcatgacacaaagcttttgataagtactttcctgtgggtcgctcagcgcctcatagcatctcattcaattgcaagaatagaggccagacacggtggcgcatgcctgtagtcccagctaactgggaggctgaggcaggaggatcacttgagcccaggagattgaggctgcagtgagcatgatcgcgacactgcactccagcctgggtgacggtgagactttgtctcaaaaaaaaaaaaaaaaacaatggaaggcagacagcaagtccctgaggacacatcacacagtgtcctgtagctaagtgtctaggaaaaaacaaaaactccaaacccttcagtggatgaggacaaggtcgcagaaaggcattctgttgacagatgaacagccgaaagctggccagaccctcctgtatgcctctgcccttgtcctgtgggttgagggggtctgaccaggaggccacctacagcaggaagtgaggctgccatgtttccttgagacacagctgcctctccccagctctgtccctgtagtcacctgccggtgggcgaggatcctctccctgggataagcactcccagccccgtttatcagaaacacaggcaaggaaattggaactgccacccagcccagcatggtggctcaattggttggttgcgttgtcagttgtctcttcgttttgttaaggtttttaataagtacgtttggcataatgtcttttaatgggtttgtaatatttgtaacggttttagcagcctataacttttcagctggtgcttttacttagggaaaaaaacaatttgtaaatacagaacattgtttaaaagacataaccatagaacatagcttcctgtttgtggattttgtttcctatatattcaaagtaaaatgacttacaggagcca

SEQ ID NO: 185941 - DNA, 4870 bp, Artificial Sequence
  derived and/or modified sequence
tcgcgcgcctgcttccgcctccctgtggcggcggcttgttgttgtggaggccaaaatggcggctcaggcggcggcagcggcccaggcggcggcggcccaggctgcgcaggccgaggcggccgactcgtggtacctggcgcttctgggcttcgctgagcacttccgcacttccagcccgcccaaaatccgcctgtgcgtgcactgcctgcaggccgtgttccccttcaagccgccgcagcgcatcgaggcccgtacacacctgcagctgggctccgttctctatcaccacaccaagaacagcgagcaggcgcgcagccacctggagaaggcgtggttgatatcacagcaaatcccgcagttcgaagatgttaaatttgaagcagcaagtctgttgtctgaattgtactgtcaagagaattccgttgatgcagcaaagccgctgctgcggaaggcgatccagatctcacagcagaccccatattggcactgccgcctgctcttccagctcgctcaactgcacacgcttgagaaggacctggtgtcggcctgtgacctcctgggtgtaggggccgagtacgcccgggtggtgggatctgaatacacacgggcgctgttcctcctcagcaaggggatgctgctgctgatggagcgaaagctgcaggaggtgcacccgctgctgaccctctgcgggcagatcgtggagaactggcaggggaaccccatccagaaggagtcgctgcgtgtcttcttcctggtgctccaggtcacccactatctggatgccgggcaggtgaagagcgtgaagccgtgtctgaagcagctgcagcagtgcatccagaccatctccacactgcacgatgatgagatcctgcccagcaaccccgctgacctcttccactggctgcccaaggagcacatgtgtgtgcttgtctacctggtgactgtgatgcactccatgcaggccggctacctggagaaggcgcagaagtacacggacaaggccctcatgcagctggagaagctcaagatgctggactgcagccccatcctgtcatccttccaagtgatcctgctggagcacatcatcatgtgccgccttgtcacgggtcacaaggccacggcgctgcaggagatctcccaggtctgccagctgtgccagcagtccccccggctcttctccaaccatgcagcacagctgcacacattgctgggcctgtactgtgtctctgtcaactgcatggacaacgcggaagcccagttcaccacggccctgcggctcaccaaccaccaggagctgtgggccttcatcgtcaccaacctggcgagtgtgtatatacgggaaggaaatagacaccaagaggtactctacagtctgctggagaggatcaacccggaccacagcttccctgtcagctcgcactgcctccgagcagccgccttctatgtgcgtgggctcttctccttcttccagggacgctacaacgaggccaagcgatttctgcgggaaactctgaagatgtccaatgctgaggacctgaaccggctcacagcctgctccctcgtgcttctgggccacatcttctatgtgctgggaaaccacagggagagtaacaacatggtggtgcctgccatgcagctcgccagcaagatcccggacatgtcggtacagctgtggtcgtcagcactgctgagagacctgaataaagcctgtgggaacgccatggatgcccatgaagccgcccagatgcaccagaacttctcgcagcagctgctccaggaccacattgaggcctgcagcctccccgaacacaacctcatcacgtggacagacggtccaccccccgtgcagttccaagctcagaatggacccaacaccagcctggccagcctcctgtgaggccttgatggggccatccagctccgcagggcctgcgcgtctccggcttccacccagacggcactcaagcctgcccccgaggcgtgcttccttcctgattgtctctagagcttccaagtcctgggaatgtgcggggccagtccctgccctcccaggaggggtggtagccgttcccacctcgcagcaggacccccagtgcagaggctcacaggtggcacacaggcgctgtctctccagagccatccttcagagtggacctcagtgccagtcctgcctcagcatctgggtcacgtcggccaggagtagggtgcaggcctccagcaggtcctaatcctgtgtgccagggcaggcagtgccccaggggcaccacgcctgactctccatcacccaggccttgatgccgagcgggagtagagtgtttcctctgctcaaggcaatttccagagcccggatgccagtttctggcctgaatttggagggaagaagtaatggcgctagtgtgggacgaagcacagatcccagcacttttcccagctttctctccagcatcagtccctgcagcagctggggcctctggtcaggaaccctcagggacccaggaactcagcttccaaacatctgcaccttgaccggactcgccatcccgccgtgggggtgcaggtgattgtaaacacgggtgtgcatgtggatgcacacgggtgtgcggtgaagatctgtggagatggagctgggagctgaggctcctgttgcaccagccaccttcccccatcttgtggctgctgaggggcaggaagcgggggagtgggctcgtctcctaaatttaagatcacctcctcagctagcttagagtgcgtggcacgggccccccgcccccgagatctggagcccagggactttcttcctggcagatctgtggccttccctgctcagcctcttggtccccccactccctccaccgcctcaccttccctgctgggtctctggggcacagtgtgaaacccgcaccctagccaggccccagggagcctccgctgggcccagacagcagcgtttggttttatccacttttcttggataatcaggaggtgccccagtggtcacagtgtggcattccgagttggggcgggtggtcgggtcaagatagcagcagcaggtgtcagggctcaagacaccaccccctccagcttctggggcccaggagcctctccctgctacagggggtgggggtcctgctcagcagggtaggtggtggttttaggtcttgtcaccctcactcagtggaactgcctctgggagctttggcgtctgtgactaaagggacgctggattgctcaggtcagctgcttggggctcccaggctgggtgtgccttagccacaggcagggctgtcaataacccccttcctcactggccaccacctgacatcagcaccagtgacaggctggtcagagggcggggctggtgagggtttgtcctaagaggaccaccgccatctctgggtctccagggggagagcctggccctgtcctttgctacccagggctgcccccaggcccatgaagccaataggagagcgtgtggcactggcccacaaactgtccctgtcctgtcttcctcccgagccatggcctctgctagctccaccttgaaggagccccccacatcctcccctacatcccagagatgccaccacttgtgtctccacaatgtgctcctgcccacccgggttccgcactgtccgacccctgcacaccactcatgtcaccacggcgtgcatcatgttcatccccatctatttatttaagcctttctttgcttgtagggcattttgtatgtagagcagttgaaaacagaacctcagaacttaacatctgtcctgatgttaaagtgcttttcatgaccaccctgttatctatgtatatgtaaagttaaggatgagatcttaagtttacaattaaaaactcagtactcaatatttaatattctactcgagctttatggaagccaaatcatgtgcatgtgtgtgtgtgcgtgtgtgcaagctttgaacctccttccacagccgcatcttctcatgacacaaagcttttgataagtactttcctgtgggtcgctcagcgcctcatagcatctcattcaattgcaagaatagaggccagacacggtggcgcatgcctgtagtcccagctaactgggaggctgaggcaggaggatcacttgagcccaggagattgaggctgcagtgagcatgatcgcgacactgcactccagcctgggtgacggtgagactttgtctcaaaaaaaaaaaaaaaaacaatggaaggcagacagcaagtccctgaggacacatcacacagtgtcctgtagctaagtgtctaggaaaaaacaaaaactccaaacccttcagtggatgaggacaaggtcgcagaaaggcattctgttgacagatgaacagccgaaagctggccagaccctcctgtatgcctctgcccttgtcctgtgggttgagggggtctgaccaggaggccacctacagcaggaagtgaggctgccatgtttccttgagacacagctgcctctccccagctctgtccctgtagtcacctgccggtgggcgaggatcctctccctgggataagcactcccagccccgtttatcagaaacacaggcaaggaaattggaactgccacccagcccagcatggtggctcaattggttggttgcgttgtcagttgtctcttcgttttgttaaggtttttaataagtacgtttggcataatgtcttttaatgggtttgtaatatttgtaacggttttagcagcctataacttttcagctggtgcttttacttagggaaaaaaacaatttgtaaatacagaacattgtttaaaagacataaccatagaacatagcttcctgtttgtggattttgtttcctatatattcaaagtaaaatgacttacaggagccac

SEQ ID NO: 185942 - DNA, 1842 bp, Artificial Sequence
  derived and/or modified sequence
atggctgctcaggctgccgctgccgctcaggctgccgccgcacaggcagcccaggccgaggccgctgatagttggtacctggctctgcttggattcgcggagcacttccgcacctccagtcccccaaagatccggctctgtgtgcattgcctgcaagccgtatttccgtttaagccgcctcagcgcatagaggcaaggactcacctgcagctgggttccgtgctataccaccacacaaaaaacagcgaacaggccaggtcacatcttgaaaaagccgggtcattgtcacaacaaattccccagttcgaggacgtgaaatttgaagcagcatctctgctgtcagagctctattgtcaggaaaactccgtggacgcagctaaaccactcctgcggaaagctattcagattagccagcagaccccatactggcattgccgcctccttttccagcttgctcaactgcacaccttggagaaggacttggtgtctgcctgtgacctcctcggggtgggagctgaatacgctagggtggttggttcggagtataccagagccttgttcctgctgagtaaaggaatgttattgctcatggagcgcaaattgcaagaggtccacccattactcactctgtgtggacagatcgtggagaactggcagggcaatcctatacaaaaggagtctcttagggttttttttctcgtcctccaggtcacccactacctggatgccggccaggtgaagtcagtgaaaccatgcctgaagcaactccagcaatgcatccagaccatctccaccctgcatgatgacgaaatcctaccctccaatccagccgatctcttccactggctccctaaagagcacatgtgtgtgctggtctacctggttactgtcatgcactccatgcaggccggttatcttgaaaaagcacagaagtacactgataaagcactgatgcagcttgagaagcttaaaatgctcgattgttcccccatcctgagcagctttcaggtgattttgcttgagcacataatcatgtgtaggctcgttaccggccacaaagcgaccgctctgcaggaaatcagtcaggtctgtcagctgtgccaacaaagccctagactgttctcgaaccacgcggcacagctgcacactctactggggttgtattgtgtgtctgtgaactgtatggataacgctgaggcccagtttacaactgcgctacggttgactaaccaccaggagctgtgggcgttcatcgtcacgaacctcgcatcagtttacattcgagagggaaatcgacatcaggaggtgctttattctctgttggaacgtataaatcctgatcactcgttcccagtgtcgagccattgcctcagagctgccgccttttacgtgcggggcctattctcattcttccagggccggtataatgaagctaagagattcctcagggaaacacttaagatgagcaatgctgaggacctcaaccgccttaccgcttgctcattagtgctgctcggccacatattttacgtgctcggcaaccaccgcgaatctaacaatatggtagtgcctgccatgcagctggcttccaagatccccgatatgtccgtgcaactgtggtcttccgcacttctgagggatttgaacaaggcctgcggcaatgccatggacgcccacgaggctgcacagatgcaccagaacttcagccaacagctcttgcaggaccatatcgaggcatgttccctgccagaacataacctgatcacatggacggatggaccaccaccagtccagttccaggcacagaatggacccaatacctccctggccagcctgctgtag

SEQ ID NO: 185943 - DNA, 1842 bp, Artificial Sequence
  derived and/or modified sequence
atggctgctcaagccgccgcggcggcccaggcagctgctgcacaggccgcacaggccgaagcagccgacagttggtatctggccctgctcggatttgccgagcatttcaggacatcgagcccccctaagatccgactctgcgtccattgcctccaagcagtcttcccctttaaaccaccccagcgtattgaggcaagaacgcaccttcagctgggcagtgtgctctatcaccacacaaagaactccgagcaggcccgatcacatcttgagaaggcttggctgatttcacagcaaatcccccagtttgaagatgtaaaatttgaggccgcgtccctcctgagtgaattgtactgccaggagaattcggtcgacgcagctaaaccattgttgaggaaagctattcaaataagccagcagaccccttactggcattgcaggcttctgttccagctggcacagctccataccctagagaaggacctcgtctccgcgtgtgatctgttgggcgtgggcgcagagtacgccagagtggtggggtctgagtatacacgcgcgctgttcctgctttctaagggaatgctcttactcatggaacgcaaactccaagaagtgcatccgctgctgaccctgtgtggccagattgtggaaaactggcaaggcaaccccattcagaaagaatcattgagggttttttttttggtcttacaggtgacacactacctcgatgcgggacaggtaaagtcagtgaagccttgccttaagcagttgcagcaatgcatccagaccatttcaaccctgcacgatgacgagatcttgcccagtaacccggccgatctgttccactggcttccaaaagaacatatgtgcgttctcgtgtatcttgtcaccgtgatgcattctatgcaggcggggtatctggagaaagctcagaaatataccgacaaagccctcatgcagctcgagaaactgaaaatgcttgactgttcacctattctgagtagttttcaagtgatcttacttgaacatataataatgtgtcgtctggtcactgggcacaaagccaccgccttgcaggaaatctcacaggtgtgtcagctctgccagcagagtcctagattgtttagtaatcatgcagcccagctgcatacccttcttggcctgtactgtgtatccgttaactgtatggacaatgctgaggctcagttcacaactgcgttgcggttgacaaatcaccaggagctatgggccttcattgtcacgaacctcgcaagcgtctacatacgcgagggcaatcggcatcaagaagtgctgtattcattactggaaagaattaacccggaccacagtttccctgtctccagccactgcttacgcgcggccgccttttacgtgcgtggactgttttcgttcttccaaggaagatacaatgaagctaaaaggtttctcagagagactctgaaaatgagcaatgcggaagacctgaatcggctgactgcctgctccctggttctccttggtcatattttctacgttctgggcaaccaccgtgaaagtaacaatatggttgtgccagcgatgcaactcgccagcaagatccccgacatgtctgtgcagctctggtctagtgcccttcttagggatttgaataaggcttgcggtaatgccatggatgcccacgaggcggctcagatgcaccagaactttagtcagcaactgctgcaggaccatatagaggcgtgcagtcttcctgagcacaatctgatcacctggacagacgggccacccccggtgcaattccaggcccagaatggaccaaacacctccctggccagtctgctttag

SEQ ID NO: 185944 - DNA, 1842 bp, Artificial Sequence
  derived and/or modified sequence
atggccgcccaggccgctgctgctgcccaggccgctgctgcccaggccgcccaggccgaggccgctgacagctggtacctggccctgctgggctttgctgagcacttccgcaccagcagcccccccaagatccggctgtgtgtgcactgcctgcaggccgtgttccccttcaagccaccccagagaattgaggcccggacccacctgcagctgggctctgtgctgtaccaccacaccaagaacagcgagcaggcccggagccacctggagaaggccggcagcctgagccagcagatcccccagtttgaagatgtgaagtttgaagctgccagcctgctgtctgagctgtactgccaggagaacagcgtggatgctgccaagcccctgctgaggaaggccatccagatcagccagcagaccccctactggcactgccgcctgctcttccagctggcccagctgcacaccctggagaaggacctggtgtctgcctgtgacctgctgggcgtgggcgcagaatatgcccgggtggtgggcagcgagtacacccgggccctcttcctgctgagcaagggcatgctgctgctgatggagaggaagctgcaggaggtgcaccccctgctgaccctgtgtggccagatcgtggagaactggcagggcaaccccatccagaaggagagcctgcgggtcttcttcctggtgctgcaggtgacccactacctggatgctggccaggtgaagtctgtgaagccctgcctgaagcagctgcagcagtgcatccagaccatcagcaccctgcatgatgatgagatcctgcccagcaacccagctgacctcttccactggctgcccaaggagcacatgtgtgtgctggtgtacctggtgacagtgatgcacagcatgcaggccggctacctggagaaggcccagaagtacacagacaaggccctgatgcagctggagaagctgaagatgctggactgcagccccatcctgagcagcttccaggtgatcctgctggagcacatcatcatgtgccgcctggtgacaggccacaaggccacagccctgcaggagatcagccaggtgtgccagctgtgccagcagagccccaggctcttcagcaaccacgccgcccagctgcacaccctgctgggcctgtactgtgtgtctgtgaactgcatggacaatgctgaggcccagttcaccacagccctgcggctgaccaaccaccaggagctgtgggccttcatcgtgaccaacctggcctctgtgtacatccgggagggcaacagacaccaggaggtgctgtacagcctgctggagcgcatcaacccagaccacagcttccctgtgagcagccactgcctgcgggccgccgccttctacgtgcggggcctcttctccttcttccagggccgctacaatgaggccaagcgcttcctgcgggagaccctgaagatgagcaatgctgaggacctgaaccggctgacagcctgcagcctggtgctgctgggccacatcttctacgtgctgggcaaccaccgggagagcaacaacatggtggtgcctgccatgcagctggccagcaagatcccagacatgtctgtgcagctgtggagcagcgccctgctgcgggacctgaacaaggcctgtggaaatgccatggatgcccatgaagctgcccagatgcaccagaacttcagccagcagctgctgcaggaccacatcgaggcctgcagcctgcctgagcacaacctgatcacctggacagatggccccccacctgtgcagttccaggcccagaatggccccaacaccagcctggccagcctgctgtag

SEQ ID NO: 185945 - DNA, 1842 bp, Artificial Sequence
  derived and/or modified sequence
atggccgcccaggccgctgctgctgcccaggccgctgctgcccaggccgcccaggccgaggccgctgacagctggtacctggccctgctgggctttgctgagcacttccgcaccagcagcccccccaagatccggctgtgtgtgcactgcctgcaggccgtgttccccttcaagccaccccagagaattgaggcccggacccacctgcagctgggctctgtgctgtaccaccacaccaagaacagcgagcaggcccggagccacctggagaaggcctggctgatcagccagcagatcccccagtttgaagatgtgaagtttgaagctgccagcctgctgtctgagctgtactgccaggagaacagcgtggatgctgccaagcccctgctgaggaaggccatccagatcagccagcagaccccctactggcactgccgcctgctcttccagctggcccagctgcacaccctggagaaggacctggtgtctgcctgtgacctgctgggcgtgggcgcagaatatgcccgggtggtgggcagcgagtacacccgggccctcttcctgctgagcaagggcatgctgctgctgatggagaggaagctgcaggaggtgcaccccctgctgaccctgtgtggccagatcgtggagaactggcagggcaaccccatccagaaggagagcctgcgggtcttcttcctggtgctgcaggtgacccactacctggatgctggccaggtgaagtctgtgaagccctgcctgaagcagctgcagcagtgcatccagaccatcagcaccctgcatgatgatgagatcctgcccagcaacccagctgacctcttccactggctgcccaaggagcacatgtgtgtgctggtgtacctggtgacagtgatgcacagcatgcaggccggctacctggagaaggcccagaagtacacagacaaggccctgatgcagctggagaagctgaagatgctggactgcagccccatcctgagcagcttccaggtgatcctgctggagcacatcatcatgtgccgcctggtgacaggccacaaggccacagccctgcaggagatcagccaggtgtgccagctgtgccagcagagccccaggctcttcagcaaccacgccgcccagctgcacaccctgctgggcctgtactgtgtgtctgtgaactgcatggacaatgctgaggcccagttcaccacagccctgcggctgaccaaccaccaggagctgtgggccttcatcgtgaccaacctggcctctgtgtacatccgggagggcaacagacaccaggaggtgctgtacagcctgctggagcgcatcaacccagaccacagcttccctgtgagcagccactgcctgcgggccgccgccttctacgtgcggggcctcttctccttcttccagggccgctacaatgaggccaagcgcttcctgcgggagaccctgaagatgagcaatgctgaggacctgaaccggctgacagcctgcagcctggtgctgctgggccacatcttctacgtgctgggcaaccaccgggagagcaacaacatggtggtgcctgccatgcagctggccagcaagatcccagacatgtctgtgcagctgtggagcagcgccctgctgcgggacctgaacaaggcctgtggaaatgccatggatgcccatgaagctgcccagatgcaccagaacttcagccagcagctgctgcaggaccacatcgaggcctgcagcctgcctgagcacaacctgatcacctggacagatggccccccacctgtgcagttccaggcccagaatggccccaacaccagcctggccagcctgctgtag

SEQ ID NO: 185946 - DNA, 1842 bp, Artificial Sequence
  derived and/or modified sequence
atggccgcccaggccgccgccgccgcccaggccgccgccgcccaggcagcccaggcggaggcagcagattcatggtacctggcgctgcttggctttgctgagcacttccggacctcgtctccacccaaaatacgattatgcgtccactgtcttcaagcggtgttccctttcaagcctcctcagcgcatagaggcacgtacccatctgcagctgggttccgtcctataccaccataccaaaaacagtgagcaggctcgtagccatctggagaaagccgggtcactaagccagcagatcccccagttcgaggatgtgaagttcgaagccgcgtcactgctgagtgaattgtactgccaggagaattccgtggacgctgctaagcccttgctaaggaaggccattcagatatcacagcagaccccctactggcactgccgcctgttattccagctggcccaactccatacgcttgaaaaggatctcgtcagcgcatgtgacctactgggcgtaggagctgaatacgcgagagttgtaggttccgagtacacccgagccctttttcttctgagtaagggaatgctgcttttgatggaaaggaaactgcaagaggtgcatccgctattgaccttatgcgggcagatagtggaaaattggcaggggaatccaatccagaaggagtctctgagagtgtttttcttagtgcttcaagtgacccattacctcgatgccggacaagtgaaatcagtgaagccttgcttaaagcagctgcagcagtgcattcagaccatctcaactctccatgacgacgaaatccttcctagtaaccccgctgacctcttccactggctgccgaaagaacatatgtgcgttttagtatatctggtaactgtgatgcatagcatgcaggcaggctacctcgagaaggctcaaaagtacactgataaggcccttatgcagcttgagaagctaaaaatgttggactgcagtcccattctgtctagcttccaggtgatcctgttggagcatattataatgtgcaggctggtcactgggcataaagcaaccgccctgcaggagatctctcaggtgtgccagttgtgccagcagtcgccgaggctgttctctaaccatgcagctcagcttcacacgctgctggggctttattgcgtgtcggtaaattgtatggacaatgccgaagctcagtttactaccgctctgaggttgacaaaccaccaggagttatgggcatttatagtcacaaatttggctagcgtgtatattagagagggaaaccgccaccaggaggtgctatactccctgctggagcggattaaccccgaccattctttcccagtgagctcacactgcctgcgagctgcggcattctacgtccggggattgttctcattcttccagggacggtacaacgaggcaaagaggtttctgcgagagacactgaaaatgagtaatgccgaagatcttaaccgcctaacagcttgctctcttgtgctcctaggccatatattttacgttctgggaaatcatagggagtctaataacatggtggttcctgccatgcagttggctagcaaaatacctgatatgtcagttcagctttggtcatctgccctacttagagacttaaacaaggcgtgcggaaacgccatggatgctcacgaggcagcccagatgcaccagaatttcagtcagcagctgctgcaggaccacattgaagcatgctctctgcctgagcacaatctgatcacatggacggatggcccaccacccgtgcaattccaagctcaaaacgggcctaatacatctctagctagtctgctctag

SEQ ID NO: 185947 - DNA, 1842 bp, Artificial Sequence
  derived and/or modified sequence
atggccgcccaggccgccgccgccgcccaggccgccgccgcccaggccgcccaggctgaggccgcagatagctggtacctggccctgctcgggtttgccgagcacttccgtacctcttcaccgccgaagatccggctctgtgttcactgccttcaggccgtctttcctttcaaaccgccacagcgtatagaggcccgcactcacttgcagctgggcagcgtgctgtatcaccacactaagaatagtgagcaggcccggagtcacttagagaaagcatggctaatctcccagcagattccccaattcgaagacgttaaattcgaggcagcctcgctgctgagcgagctctactgccaggaaaattccgtagatgcggcgaaacccctcttgagaaaagcgattcagattagtcagcagaccccttattggcactgtcgactgctctttcagttggcacagttgcacactttggagaaggacctggtgagtgcctgtgacttgctgggcgtcggggctgaatatgctagggtggtgggttctgagtatactcgggctcttttccttctgtctaagggtatgctcctcttgatggagagaaagctgcaggaggtgcacccactgctcactctgtgtggccagattgtcgagaactggcaggggaatccgattcagaaggagtcccttcgcgttttttttctggtactgcaggtgacacattatctcgatgccggccaggtcaaatcagtcaagccctgtctcaaacagttacagcagtgtattcagacaatctcaacgttgcacgatgacgaaattcttccctccaatcccgctgatctgtttcattggctccctaaagagcacatgtgtgttctggtttacctggtgactgttatgcactccatgcaggctggatacctggagaaggcgcagaagtataccgataaagcgctgatgcagttggagaagctgaaaatgctggactgcagcccaattctgtcctcattccaggtcatcctcttggagcacattatcatgtgtaggctggtgactggtcacaaagcaaccgcactgcaggaaatctcacaggtctgccaactgtgccagcagtcacctaggctgttttccaatcatgctgcacagctgcatactctgctgggcctctactgtgtatccgtcaactgcatggacaacgcggaggcacagtttaccaccgctttgcgcctgacgaatcaccaagaattgtgggccttcatcgtcacgaatctcgccagcgtgtacatccgcgagggcaatcgtcaccaggaagtcctgtattcactgctggagagaattaatccagatcactcgttccctgtgtctagccactgtctcagggctgccgccttttacgtgcgcggattgtttagcttcttccagggccgctataacgaagccaagcgctttctgcgcgagaccctgaaaatgagcaatgccgaggatttaaacaggctcacagcatgtagcctggtgttactaggacacatcttctacgtattaggcaatcatagagagtcaaacaacatggtggtgcccgcaatgcagctagcttcgaagatccccgacatgtctgtgcagctctggagttcagccctgttgcgcgacttgaacaaagcctgtgggaacgccatggacgcgcacgaggcagctcagatgcaccagaacttctctcagcagctccttcaggaccatatcgaggcctgttccctcccggaacacaatcttataacttggaccgacggtcccccccccgtccagtttcaggcccagaatggccccaacacctcactggcgtcactgctctag

SEQ ID NO: 185948 - DNA, 1842 bp, Artificial Sequence
  derived and/or modified sequence
atggctgcccaggccgctgccgcagcacaggctgctgcagctcaggcagcccaggccgaggctgctgattcgtggtacctggctctgctgggattcgcggaacactttagaacatcgtccccgccaaaaattaggctgtgtgtacactgtctgcaagcagtttttcctttcaagcctccccagcggatagaagctcggacccatctgcaactgggttccgtgctgtaccatcacacgaaaaacagtgagcaggccagatcgcatttggaaaaggcaggctctctgagccagcagattccgcagttcgaggatgttaaatttgaagcagccagcctcctgtccgagctctactgccaggagaactcagtggatgctgcaaaaccgctgttgcggaaggccatccagatatcccagcagacgccttattggcactgccgactgctctttcaacttgcccagctgcacactttagaaaaggatctcgtgtcagcgtgcgatctcctgggcgtcggggctgagtacgcgcgtgtggtgggcagcgaatatacaagggctctgtttctactcagcaaaggaatgctgctgctcatggagcgaaaactgcaagaggtgcaccccctgctgaccctgtgcggacagattgtcgagaattggcaggggaaccccatccaaaaggagtccctcagagtctttttcctcgtgttgcaggtgacacactacctcgacgcgggacaggttaaatctgtaaagccttgcctgaaacagctgcaacaatgcatccagacgatttctaccttgcatgatgatgagatactgccctcgaaccctgccgatcttttccactggctacccaaagagcatatgtgcgtcttggtatatttggtgacagtgatgcactccatgcaagccggttacctcgaaaaggctcagaaatatacagataaagctctgatgcagctagaaaagctaaaaatgttagattgctccccaatactgtccagctttcaagttatcctcttggagcacattatcatgtgccggcttgtgacaggtcataaagccactgccctgcaggagatctcccaggtttgccagctgtgccagcaaagtcccaggctgtttagcaaccatgcagcacaactgcacaccctcctgggactgtactgcgtatcagtcaactgtatggataacgccgaagcccagttcactacagcactgaggcttaccaaccaccaggagctctgggcttttattgttaccaaccttgcaagcgtgtatattcgggagggtaatcgtcaccaggaagtgctgtacagtcttctggagagaatcaatccagaccacagctttcccgtttcaagtcactgcctgcgagccgcagctttctacgtgcggggtctgtttagtttttttcaggggagatataatgaagctaagcgctttcttagagaaacccttaaaatgagcaatgccgaggaccttaaccggttgacagcttgcagcttagtcctgctgggtcatatattttacgtccttggcaatcaccgggagtctaacaacatggtggtgccagcaatgcaattagcctctaagatcccagacatgagtgtgcagttgtggagtagtgctctccttcgggatctgaacaaggcctgtggcaatgccatggatgcccatgaagccgctcagatgcatcagaattttagtcagcagttgctccaggaccacatagaggcctgctcgttgccagaacataacctcattacctggacagacggcccacctcctgttcagttccaggcccaaaatggtcctaatacatcgttggcctctctgttgtag

SEQ ID NO: 185949 - DNA, 1842 bp, Artificial Sequence
  derived and/or modified sequence
atggctgcccaggccgctgcagccgcacaggccgcagccgcacaggctgcccaggcagaggcagcagattcttggtatctggcattattggggtttgccgagcatttccggaccagcagccctcccaaaatccggctctgcgttcactgtttacaagcagtattcccctttaagcctccccagcgcattgaggccagaacacatttgcagcttggcagtgtgttgtaccaccatactaaaaacagcgaacaggctagatcccacctggagaaagcctggctaatcagccagcagatcccgcagttcgaagatgtcaagtttgaggccgcatcattgctctctgagctgtattgtcaggagaactctgtggatgccgctaaacccctcctccggaaagccatccagattagccaacaaacaccctactggcactgcaggctcttattccagttggcccaactgcacaccctggagaaagacctcgtgtcagcatgtgatctgttgggcgttggagccgagtacgctagagtagtgggaagcgagtataccagagcactgttcttgttgagcaagggcatgctgctgctgatggaacgtaaactgcaggaggttcatccccttctgacactctgcggccaaatcgttgagaactggcagggcaatcctatacagaaggaatcattgagagtgttcttcttagtcctacaagtgactcattacttggacgccggacaggtcaagtccgttaagccctgcctcaaacaactgcagcagtgtatccagactatttctacgctgcacgacgacgagatcctgccaagtaacccggcagatctgtttcactggttaccaaaagaacacatgtgtgtgctggtctacctggttaccgtgatgcactcaatgcaggcaggctacctggagaaagcccagaaatacacagacaaagccctaatgcagttagagaagttaaagatgctagactgcagtcccatactgtctagctttcaggtcatattgttggagcacattatcatgtgtaggttagtgaccggccacaaggcgaccgccttgcaggagatttcccaggtgtgtcagttatgtcaacagtctcccagattattcagcaatcatgcggcacaacttcacaccctgctcgggttgtattgtgtcagtgtaaactgcatggacaacgcagaggctcagttcactacagctttgcgtcttactaatcaccaagaattgtgggctttcattgtcacgaatttggccagcgtgtatatcagggaaggcaaccgtcatcaggaagtcctgtatagccttctggaacgcatcaatccggaccactcattcccagtgagcagccattgcctgcgggcagccgcattctacgtgcgcggactttttagcttttttcagggtcggtacaatgaggccaagcggtttctgcgagagactctgaaaatgtcaaacgctgaggacctgaaccggttgacggcgtgctcactcgtgctgctcgggcacattttctatgttctagggaatcatcgtgagtcgaataacatggtggtaccagctatgcagctcgcctctaaaattcccgacatgtcagtgcagctgtggtcgagtgcgcttctcagagatttgaataaggcttgtggcaacgctatggatgcacacgaggcagcacagatgcatcagaacttctcgcagcagctactgcaggatcacatagaagcttgctctcttccggagcataaccttatcacctggacagatggcccacctccagtgcagttccaggcccaaaatggacctaatacttctctggcttccctgctctag

SEQ ID NO: 185950 - DNA, 1842 bp, Artificial Sequence
  derived and/or modified sequence
atggccgcccaggccgccgccgccgcccaggccgccgccgcccaggccgcccaggccgaggccgccgacagctggtacctggccctgctgggcttcgccgagcacttcagaaccagcagcccccccaagatcagactgtgcgtgcactgcctgcaggccgtgttccccttcaagcccccccagagaatcgaggccagaacccacctgcagctgggcagcgtgctgtaccaccacaccaagaacagcgagcaggccagaagccacctggagaaggccggcagcctgagccagcagatcccccagttcgaggacgtgaagttcgaggccgccagcctgctgagcgagctgtactgccaggagaacagcgtggacgccgccaagcccctgctgagaaaggccatccagatcagccagcagaccccctactggcactgcagactgctgttccagctggcccagctgcacaccctggagaaggacctggtgagcgcctgcgacctgctgggcgtgggcgccgagtacgccagagtggtgggcagcgagtacaccagagccctgttcctgctgagcaagggcatgctgctgctgatggagagaaagctgcaggaggtgcaccccctgctgaccctgtgcggccagatcgtggagaactggcagggcaaccccatccagaaggagagcctgagagtgttcttcctggtgctgcaggtgacccactacctggacgccggccaggtgaagagcgtgaagccctgcctgaagcagctgcagcagtgcatccagaccatcagcaccctgcacgacgacgagatcctgcccagcaaccccgccgacctgttccactggctgcccaaggagcacatgtgcgtgctggtgtacctggtgaccgtgatgcacagcatgcaggccggctacctggagaaggcccagaagtacaccgacaaggccctgatgcagctggagaagctgaagatgctggactgcagccccatcctgagcagcttccaggtgatcctgctggagcacatcatcatgtgcagactggtgaccggccacaaggccaccgccctgcaggagatcagccaggtgtgccagctgtgccagcagagccccagactgttcagcaaccacgccgcccagctgcacaccctgctgggcctgtactgcgtgagcgtgaactgcatggacaacgccgaggcccagttcaccaccgccctgagactgaccaaccaccaggagctgtgggccttcatcgtgaccaacctggccagcgtgtacatcagagagggcaacagacaccaggaggtgctgtacagcctgctggagagaatcaaccccgaccacagcttccccgtgagcagccactgcctgagagccgccgccttctacgtgagaggcctgttcagcttcttccagggcagatacaacgaggccaagagattcctgagagagaccctgaagatgagcaacgccgaggacctgaacagactgaccgcctgcagcctggtgctgctgggccacatcttctacgtgctgggcaaccacagagagagcaacaacatggtggtgcccgccatgcagctggccagcaagatccccgacatgagcgtgcagctgtggagcagcgccctgctgagagacctgaacaaggcctgcggcaacgccatggacgcccacgaggccgcccagatgcaccagaacttcagccagcagctgctgcaggaccacatcgaggcctgcagcctgcccgagcacaacctgatcacctggaccgacggccccccccccgtgcagttccaggcccagaacggccccaacaccagcctggccagcctgctgtag

SEQ ID NO: 185951 - DNA, 1842 bp, Artificial Sequence
  derived and/or modified sequence
atggccgcccaggccgccgccgccgcccaggccgccgccgcccaggccgcccaggccgaggccgccgacagctggtacctggccctgctgggcttcgccgagcacttcagaaccagcagcccccccaagatcagactgtgcgtgcactgcctgcaggccgtgttccccttcaagcccccccagagaatcgaggccagaacccacctgcagctgggcagcgtgctgtaccaccacaccaagaacagcgagcaggccagaagccacctggagaaggcctggctgatcagccagcagatcccccagttcgaggacgtgaagttcgaggccgccagcctgctgagcgagctgtactgccaggagaacagcgtggacgccgccaagcccctgctgagaaaggccatccagatcagccagcagaccccctactggcactgcagactgctgttccagctggcccagctgcacaccctggagaaggacctggtgagcgcctgcgacctgctgggcgtgggcgccgagtacgccagagtggtgggcagcgagtacaccagagccctgttcctgctgagcaagggcatgctgctgctgatggagagaaagctgcaggaggtgcaccccctgctgaccctgtgcggccagatcgtggagaactggcagggcaaccccatccagaaggagagcctgagagtgttcttcctggtgctgcaggtgacccactacctggacgccggccaggtgaagagcgtgaagccctgcctgaagcagctgcagcagtgcatccagaccatcagcaccctgcacgacgacgagatcctgcccagcaaccccgccgacctgttccactggctgcccaaggagcacatgtgcgtgctggtgtacctggtgaccgtgatgcacagcatgcaggccggctacctggagaaggcccagaagtacaccgacaaggccctgatgcagctggagaagctgaagatgctggactgcagccccatcctgagcagcttccaggtgatcctgctggagcacatcatcatgtgcagactggtgaccggccacaaggccaccgccctgcaggagatcagccaggtgtgccagctgtgccagcagagccccagactgttcagcaaccacgccgcccagctgcacaccctgctgggcctgtactgcgtgagcgtgaactgcatggacaacgccgaggcccagttcaccaccgccctgagactgaccaaccaccaggagctgtgggccttcatcgtgaccaacctggccagcgtgtacatcagagagggcaacagacaccaggaggtgctgtacagcctgctggagagaatcaaccccgaccacagcttccccgtgagcagccactgcctgagagccgccgccttctacgtgagaggcctgttcagcttcttccagggcagatacaacgaggccaagagattcctgagagagaccctgaagatgagcaacgccgaggacctgaacagactgaccgcctgcagcctggtgctgctgggccacatcttctacgtgctgggcaaccacagagagagcaacaacatggtggtgcccgccatgcagctggccagcaagatccccgacatgagcgtgcagctgtggagcagcgccctgctgagagacctgaacaaggcctgcggcaacgccatggacgcccacgaggccgcccagatgcaccagaacttcagccagcagctgctgcaggaccacatcgaggcctgcagcctgcccgagcacaacctgatcacctggaccgacggccccccccccgtgcagttccaggcccagaacggccccaacaccagcctggccagcctgctgtag

SEQ ID NO: 185952 - protein, 709 aa, Artificial Sequence
  derived and/or modified sequence
MATAGGGSGADPGSRGLLRLLSFCVLLAGLCRGNSVERKIYIPLNKTAPCVRLLNATHQIGCQSSISGDTGVIHVVEKEEDLQWVLTDGPNPPYMVLLESKHFTRDLMEKLKGRTSRIAGLAVSLTKPSPASGFSPSVQCPNDGFGVYSNSYGPEFAHCREIQWNSLGNGLAYEDFSFPIFLLEDENETKVIKQCYQDHNLSQNGSAPTFPLCAMQLFSHMHAVISTATCMRRSSIQSTFSINPEIVCDPLSDYNVWSMLKPINTTGTLKPDDRVVVAATRLDSRSFFWNVAPGAESAVASFVTQLAAAEALQKAPDVTTLPRNVMFVFFQGETFDYIGSSRMVYDMEKGKFPVQLENVDSFVELGQVALRTSLELWMHTDPVSQKNESVRNQVEDLLATLEKSGAGVPAVILRRPNQSQPLPPSSLQRFLRARNISGVVLADHSGAFHNKYYQSIYDTAENINVSYPEWLSPEEDLNFVTDTAKALADVATVLGRALYELAGGTNFSDTVQADPQTVTRLLYGFLIKANNSWFQSILRQDLRSYLGDGPLQHYIAVSSPTNTTYVVQYALANLTGTVVNLTREQCQDPSKVPSENKDLYEYSWVQGPLHSNETDRLPRCVRSTARLARALSPAFELSQWSSTEYSTWTESRWKDIRARIFLIASKELELITLTVGFGILIFSLIVTYCINAKADVLFIAPREPGAVSY

SEQ ID NO: 185953 - protein, 134 aa, Artificial Sequence
  derived and/or modified sequence
MATAGGGSGADPGSRGLLRLLSFCVLLAGLCRGNSVERKIYIPLNKTAPCVRLLNATHQIGCQSSISGDTGVIHVVEKEEDLQWVLTDGPNPPYMVLLESKHFTRQNVRLSDTFLCSFMEFLSYSRDLMEKLKG

SEQ ID NO: 185954 - protein, 232 aa, Artificial Sequence
  derived and/or modified sequence
MATAGGGSGADPGSRGLLRLLSFCVLLAGLFLDFEPDPLPLCPDVSFFPQPQPPTPQSKGTGLCRGNSVERKIYIPLNKTAPCVRLLNATHQIGCQSSISGDTGVIHVVEKEEDLQWVLTDGPNPPYMVLLESKHFTRDLMEKLKGRTSRIAGLAVSLTKPSPASGFSPSVQCPNDGFGVYSNSYGPEFAHCREIQWNSLGNGLAYEDFSFPIFLLEDENETKVIKQCYQDH

SEQ ID NO: 185955 - DNA, 2130 bp, Artificial Sequence
  derived and/or modified sequence
atggcaacagcaggcgggggaagcggggccgaccccggcagtagaggtttgctgcgcttgctgagcttctgcgtgctgcttgccggcttgtgtcgtggaaactctgttgagcggaaaatatatatccctctgaataaaaccgctccctgcgtacgcctcctcaacgctacgcatcagattgggtgccagtcctctatcagcggagataccggtgtgattcatgtggtcgagaaagaggaagatcttcagtgggtacttaccgatggccccaatccgccctacatggtcttactggagagcaaacacttcaccagagacctcatggagaaacttaaagggagaacatcccgtatcgctgggttagccgttagcctgaccaaacccagtcctgcctcagggtttagccctagtgttcagtgtccaaatgatgggtttggcgtgtacagtaatagctatgggcccgagttcgctcactgcagggaaatccaatggaacagtcttgggaacggcctggcctacgaagactttagcttccccatctttttattagaggacgagaatgaaaccaaggtgattaaacagtgctatcaggatcataatttatcacagaatggctccgccccaaccttcccgctgtgcgcaatgcagctgttttctcacatgcacgcagtcatcagcactgccacctgcatgaggcgctcgtctatccagtcgacattttctattaaccccgagattgtgtgtgatcccttgtccgattacaatgtgtggtccatgcttaaaccaataaatacgaccggcaccctgaagcccgatgatagagtggtagtagccgccaccagactggacagcagatcctttttttggaatgtggcgccaggcgcggaaagcgctgtcgcgtcttttgttacacagttagcagctgccgaagctctccagaaagccccagatgtgacaacactgccacgcaatgtcatgtttgtgtttttccaaggggagacctttgattatattggtagtagcagaatggtgtacgatatggagaagggcaagttcccggtccagctggaaaacgtggattcattcgtggagttaggtcaggtagctctgcgcacctccctggagctgtggatgcataccgaccctgtatctcagaaaaatgagtccgttcgaaatcaggtggaggacctgctggccactctggagaagagcggcgcaggagttccagctgtgattctgagaagacccaaccagagccagcccctaccccccagcagtctccagaggtttcttagggcacgaaacatctccggggtggtgcttgctgaccattctggggcgtttcacaataagtactatcagtccatttatgacactgcggaaaatattaatgtgtcgtatccagaatggttatcccctgaggaagacctcaattttgttacagacacagccaaggctttggccgacgtcgctacggtattagggcgcgcactgtatgagctcgccggaggcacaaactttagcgacacagtccaggctgatccccagacagtgaccaggcttctctatggtttcttgattaaagccaacaactcatggttccagagcatcctgagacaggatctgcgctcttacctaggcgatgggcctcttcagcactatatcgcagtgtccagccctactaatacaacatacgtcgtgcaatatgcactagcaaatctgaccggcaccgtggtaaatctcactcgcgagcaatgtcaagatccgagcaaagtgccatccgagaataaggatctctatgagtattcttgggtgcaggggccacttcactcaaatgagacggacaggctccccagatgcgtgcggtctacagcccgactcgctcgggccctgagccccgcattcgaactgtcgcaatggagcagcaccgagtattccacatggacggagtcccggtggaaagatatccgcgctcgtattttcctgattgcatcaaaagaattggagttgatcacccttacggtcggattcggcattctcattttttcgctaattgtgacatattgtatcaatgccaaggccgacgtcctgttcattgccccacgagagcccggcgccgtatcctattag

SEQ ID NO: 185956 - DNA, 2130 bp, Artificial Sequence
  derived and/or modified sequence
atggccacagctgggggcggcagcggggctgaccccggcagccggggcctgctgcggctgctgtccttctgtgtgctgctggccggcctgtgccggggcaacagcgtggagaggaagatctacatccccctgaacaagacagccccctgtgtgcggctgctgaatgccacccaccagatcggctgccagagcagcatcagcggggacaccggggtcatccacgtggtggagaaggaggaggacctgcagtgggtgctgacagatggccccaaccccccctacatggtgctgctggagagcaagcacttcacccgggacctgatggagaagctgaagggccgcaccagcagaattgctggcctggccgtgtccctgaccaagcccagccctgccagcggcttcagccccagcgtgcagtgccccaatgatggctttggagtgtacagcaacagctatggccctgagtttgcccactgccgggagatccagtggaacagcctgggcaatggcctggcctatgaggacttctccttccccatcttcctgctggaggatgaaaatgagaccaaggtgatcaagcagtgctaccaggaccacaacctgagccagaatggcagcgcccccaccttccccctgtgtgccatgcagctgttcagccacatgcatgctgtgatcagcacagccacctgcatgaggaggagcagcatccagagcaccttcagcatcaaccctgagatcgtgtgtgaccccctgagtgactacaacgtgtggagcatgctgaagcccatcaacaccaccggcaccctgaagccagatgacagagtggtggtggccgccacccggctggacagccgctccttcttctggaatgtggcccctggagctgagagcgctgtggccagctttgtgacccagctggccgctgctgaggccctgcagaaggccccagatgtgaccaccctgcccagaaatgtgatgtttgtgttcttccagggcgagacctttgactacatcggcagcagcaggatggtgtatgacatggagaagggcaagtttcctgtgcagctggagaatgtggacagctttgtggagctgggccaggtggccctgcggaccagcctggagctgtggatgcacacagatcctgtgtcccagaagaatgaatctgtgaggaaccaggtggaggacctgctggccaccctggagaagagcggggccggcgtgcctgctgtgatcctgcggcggcccaaccagagccagcccctgccccccagcagcctgcagcgcttcctgcgggccaggaacatctctggagtggtgctggccgaccacagcggggccttccacaacaagtactaccagagcatctatgacacagctgagaacatcaacgtgtcctacccagagtggctgagccctgaggaggacctgaactttgtgacagacacagccaaggccctggctgatgtggccaccgtgctgggccgggccctgtatgagctggccggcggcaccaacttcagtgacacagtgcaggccgacccccagacagtgacccggctgctgtatggcttcctgatcaaggccaacaacagctggttccagagcatcctgcggcaggacctgcggagctacctgggagatggccccctgcagcactacatcgctgtgagcagccccaccaacaccacctacgtggtgcagtatgccctggccaacctgactggaacagtggtgaacctgacccgggagcagtgccaggaccccagcaaggtgcccagcgagaacaaggacctgtatgagtacagctgggtgcagggccccctgcacagcaatgaaacagaccggctgccccgctgtgtgcgcagcacagcccggctggcccgggccctgagccctgcctttgagctgagccagtggagcagcacagagtacagcacctggacagagagccgctggaaggacatccgggcccgcatcttcctgattgccagcaaggagctggagctgatcaccctgactgtgggcttcggcatcctgatcttcagcctgattgtgacctactgcatcaatgccaaggcagatgtgctcttcatcgccccccgggagcccggggctgtgtcctactag

SEQ ID NO: 185957 - DNA, 2130 bp, Artificial Sequence
  derived and/or modified sequence
atggccaccgccggcggcggcagcggcgccgaccccggcagccggggcctgctccggctgctgagcttttgtgttctactggcgggactgtgtagaggaaattctgtcgaaaggaagatctatattccactgaataaaacagcaccctgcgtacgcctgcttaacgccacccatcagattggatgtcagagtagcatttccggggacactggcgtaattcatgtggtcgagaaggaagaagacctgcagtgggtcctgacagacggacccaaccctccttacatggtgctgctcgaatctaagcacttcacccgcgatttaatggagaaactgaagggtcgaacaagccgtatcgccgggctagccgtgtcccttactaagcccagccccgctagcggatttagtccctcggtacagtgtcccaacgatggttttggagtgtactctaacagctacggccccgagttcgcccattgccgcgagatccagtggaattctctcggcaacggtctggcatacgaagattttagttttcctatttttctcttggaggatgagaacgaaaccaaagtcatcaagcagtgctaccaggaccacaatttgagccagaacggctcggcccccaccttccccctatgcgctatgcagctcttttcccacatgcacgcagttattagcacggctacttgtatgaggaggagctcaattcaaagtacattctcgatcaacccggaaattgtctgcgaccctctgtctgattataacgtctggtccatgttaaagcctataaacacaactggaacacttaaacccgacgatagagtggtggtagccgcaactcggcttgattcccgttctttcttctggaacgtggctccaggggctgaaagtgctgtggccagcttcgttacgcagttggcagccgctgaggccttgcaaaaggcacctgatgtgaccacactgccacgtaatgtaatgtttgttttcttccaaggcgaaacgtttgattacatcggctcttcaagaatggtttacgatatggagaagggcaaatttccggtgcagctggagaacgtggatagcttcgtggagttaggacaagtcgccttgagaaccagtcttgaactgtggatgcacacagaccctgtatctcagaaaaacgaaagcgtgaggaaccaggttgaggatcttctcgccaccctggaaaagagcggggccggggtgccggccgtcatacttcggcgccccaatcaaagccagcctttaccgccatctagcctgcaacgtttcttgagagccagaaacatatctggagtggttctggcggaccactctggggccttccacaataaatattatcaaagtatctacgatacggccgaaaacattaacgtatcgtacccggagtggcttagtcccgaggaggacttaaatttcgtgaccgacacagcaaaggcgctagctgatgttgctaccgtgctcggcagggccttgtacgagctggcagggggcacgaatttctccgatactgtccaggcagatccccagaccgtcactagattgctctacggctttctgataaaagctaataattcctggttccagtcaattctcaggcaggatctgcgtagctatctgggggacgggccactgcagcattacatcgctgtgtcctctccgactaataccacgtatgtggtgcaatatgcgctcgctaaccttactggaaccgtggtgaacctcactcgggagcaatgtcaggacccgtctaaagtcccctccgaaaacaaggacctgtacgagtacagttgggttcagggaccattgcatagtaatgagacagaccgccttcccagatgtgtgcggagcactgctcggttagcccgcgccttgtcaccagccttcgagctgagtcagtggtcatcaactgagtactccacgtggacagaatcaaggtggaaagacatcagggcacgaatttttctcattgcctccaaggagttggagctgattacgctcacagtcggtttcgggatcctcatttttagcctgatcgtcacttactgcattaatgcaaaagcagatgtgctgttcatcgctcccagagagcccggggccgttagctactag

SEQ ID NO: 185958 - DNA, 2936 bp, Artificial Sequence
  derived and/or modified sequence
gcgcctggaaacacgaacttccggtctcttaggctccgggccacagagacggtgtcagtggtagcctagagaggccgctaacagacaggagccgaacgggggcttccgctcagcagagaggcaagatggctacggcagggggtggctctggggctgacccgggaagtcggggtctccttcgccttctgtctttctgcgtcctactagcaggtttgtgcaggggaaactcagtggagaggaagatatatatccccttaaataaaacagctccctgtgttcgcctgctcaacgccactcatcagattggctgccagtcttcaattagtggagacacaggggttatccacgtagtagagaaagaggaggacctacagtgggtattgactgatggccccaaccccccttacatggttctgctggagagcaagcattttaccagggatttaatggagaagctgaaagggagaaccagccgaattgctggtcttgcagtgtccttgaccaagcccagtcctgcctcaggcttctctcctagtgtacagtgcccaaatgatgggtttggtgtttactccaattcctatgggccagagtttgctcactgcagagaaatacagtggaattcgctgggcaatggtttggcttatgaagactttagtttccccatctttcttcttgaagatgaaaatgaaaccaaagtcatcaagcagtgctatcaagatcacaacctgagtcagaatggctcagcaccaaccttcccactatgtgccatgcagctcttttcacacatgcatgctgtcatcagcactgccacctgcatgcggcgcagctccatccaaagcaccttcagcatcaacccagaaatcgtctgtgaccccctgtctgattacaatgtgtggagcatgctaaagcctataaatacaactgggacattaaagcctgacgacagggttgtggttgctgccacccggctggatagtcgttcctttttctggaatgtggccccaggggctgaaagcgcagtggcttcctttgtcacccagctggctgctgctgaagctttgcaaaaggcacctgatgtgaccaccctgccccgcaatgtcatgtttgtcttctttcaaggggaaacttttgactacattggcagctcgaggatggtctacgatatggagaagggcaagtttcccgtgcagttagagaatgttgactcatttgtggagctgggacaggtggccttaagaacttcattagagctttggatgcacacagatcctgtttctcagaaaaatgagtctgtacggaaccaggtggaggatctcctggccacattggagaagagtggtgctggtgtccctgctgtcatcctcaggaggccaaatcagtcccagcctctcccaccatcttccctgcagcgatttcttcgagctcgaaacatctctggcgttgttctggctgaccactctggtgccttccataacaaatattaccagagtatttacgacactgctgagaacattaatgtgagctatcccgaatggctgagccctgaagaggacctgaactttgtaacagacactgccaaggccctggcagatgtggccacggtgctgggacgtgctctgtatgagcttgcaggaggaaccaacttcagcgacacagttcaggctgatccccaaacggttacccgcctgctctatgggttcctgattaaagccaacaactcatggttccagtctatcctcaggcaggacctaaggtcctacttgggtgacgggcctcttcaacattacatcgctgtctccagccccaccaacaccacttatgttgtacagtatgccttggcaaatttgactggcacagtggtcaacctcacccgagagcagtgccaggatccaagtaaagtcccaagtgaaaacaaggatctgtatgagtactcatgggtccagggccctttgcattctaatgagacggaccgactcccccggtgtgtgcgttctactgcacgattagccagggccttgtctcctgcctttgaactgagtcagtggagctctactgaatactctacatggactgagagccgctggaaagatatccgtgcccggatatttctcatcgccagcaaagagcttgagttgatcaccctgacagtgggcttcggcatcctcatcttctccctcatcgtcacctactgcatcaatgccaaagctgatgtccttttcattgctccccgggagccaggagctgtgtcatactgaggaggaccccagcttttcttgccagctcagcagttcacttcctagagcatctgtcccactgggacacaaccactaatttgtcactggaacctccctgggcctgtctcagattgggattaacataaaagagtggaactatccaaaagagacagggagaaataaataaattgcctcccttcctccgctcccctttcccatcaccccttccccatttcctcttccttctctactcatgccagattttgggattacaaatagaagcttcttgctcctgtttaactccctagttacccaccctaatttgcccttcaggacccttctactttttccttcctgccctgtacctctctctgctcctcacccccacccctgtacccagccaccttcctgactgggaaggacataaaaggtttaatgtcagggtcaaactacattgagcccctgaggacaggggcatctctgggctgagcctactgtctccttcccactgtcctttctccaggccctcagatggcacattagggtgggcgtgctgcgggtgggtatcccacctccagcccacagtgctcagttgtactttttattaagctgtaatatctatttttgtttttgtctttttcctttattctttttgtaaatatatatataatgagtttcattaaaatagattatcccacacga

SEQ ID NO: 185959 - DNA, 2701 bp, Artificial Sequence
  derived and/or modified sequence
gatggctacggcagggggtggctctggggctgacccgggaagtcggggtctccttcgccttctgtctttctgcgtcctactagcaggtttgtgcaggggaaactcagtggagaggaagatatatatccccttaaataaaacagctccctgtgttcgcctgctcaacgccactcatcagattggctgccagtcttcaattagtggagacacaggggttatccacgtagtagagaaagaggaggacctacagtgggtattgactgatggccccaaccccccttacatggttctgctggagagcaagcattttaccagggatttaatggagaagctgaaagggagaaccagccgaattgctggtcttgcagtgtccttgaccaagcccagtcctgcctcaggcttctctcctagtgtacagtgcccaaatgatgggtttggtgtttactccaattcctatgggccagagtttgctcactgcagagaaatacagtggaattcgctgggcaatggtttggcttatgaagactttagtttccccatctttcttcttgaagatgaaaatgaaaccaaagtcatcaagcagtgctatcaagatcacaacctgagtcagaatggctcagcaccaaccttcccactatgtgccatgcagctcttttcacacatgcatgctgtcatcagcactgccacctgcatgcggcgcagctccatccaaagcaccttcagcatcaacccagaaatcgtctgtgaccccctgtctgattacaatgtgtggagcatgctaaagcctataaatacaactgggacattaaagcctgacgacagggttgtggttgctgccacccggctggatagtcgttcctttttctggaatgtggccccaggggctgaaagcgcagtggcttcctttgtcacccagctggctgctgctgaagctttgcaaaaggcacctgatgtgaccaccctgccccgcaatgtcatgtttgtcttctttcaaggggtggccttaagaacttcattagagctttggatgcacacagatcctgtttctcagaaaaatgagtctgtacggaaccaggtggaggatctcctggccacattggagaagagtggtgctggtgtccctgctgtcatcctcaggaggccaaatcagtcccagcctctcccaccatcttccctgcagcgatttcttcgagctcgaaacatctctggcgttgttctggctgaccactctggtgccttccataacaaatattaccagagtatttacgacactgctgagaacattaatgtgagctatcccgaatggctgagccctgaagaggacctgaactttgtaacagacactgccaaggccctggcagatgtggccacggtgctgggacgtgctctgtatgagcttgcaggaggaaccaacttcagcgacacagttcaggctgatccccaaacggttacccgcctgctctatgggttcctgattaaagccaacaactcatggttccagtctatcctcaggcaggacctaaggtcctacttgggtgacgggcctcttcaacattacatcgctgtctccagccccaccaacaccacttatgttgtacagtatgccttggcaaatttgactggcacagtggtcaacctcacccgagagcagtgccaggatccaagtaaagtcccaagtgaaaacaaggatctgtatgagtactcatgggtccagggccctttgcattctaatgagacggaccgactcccccggtgtgtgcgttctactgcacgattagccagggccttgtctcctgcctttgaactgagtcagtggagctctactgaatactctacatggactgagagccgctggaaagatatccgtgcccggatatttctcatcgccagcaaagagcttgagttgatcaccctgacagtgggcttcggcatcctcatcttctccctcatcgtcacctactgcatcaatgccaaagctgatgtccttttcattgctccccgggagccaggagctgtgtcatactgaggaggaccccagcttttcttgccagctcagcagttcacttcctagagcatctgtcccactgggacacaaccactaatttgtcactggaacctccctgggcctgtctcagattgggattaacataaaagagtggaactatccaaaagagacagggagaaataaataaattgcctcccttcctccgctcccctttcccatcaccccttccccatttcctcttccttctctactcatgccagattttgggattacaaatagaagcttcttgctcctgtttaactccctagttacccaccctaatttgcccttcaggacccttctactttttccttcctgccctgtacctctctctgctcctcacccccacccctgtacccagccaccttcctgactgggaaggacataaaaggtttaatgtcagggtcaaactacattgagcccctgaggacaggggcatctctgggctgagcctactgtctccttcccactgtcctttctccaggccctcagatggcacattagggtgggcgtgctgcgggtgggtatcccacctccagcccacagtgctcagttgtactttttattaagctgtaatatctatttttgtttttgtctttttcctttattctttttgtaaatatatatataatgagtttcattaaaatagattatccc

SEQ ID NO: 185960 - DNA, 2130 bp, Artificial Sequence
  derived and/or modified sequence
atggcaaccgcaggtgggggatccggggctgaccctgggtctaggggtctgctgcgcttgttaagtttttgtgtcttgctggccggactgtgtcgaggcaattccgtggaacggaaaatttacatccccctcaataagaccgcaccgtgtgttcggctgctaaacgcaacccatcagatcggttgccagagcagcatctcaggagataccggcgtcattcacgtcgttgaaaaagaggaggacctgcaatgggtgttgaccgatggacccaacccaccctacatggtgctgctcgagagcaaacattttacaagagatctgatggaaaaattaaaaggacgaacctctcggatagccggactggctgtctctcttactaaaccctctccggcaagtgggttttccccatctgtacaatgccccaacgatggcttcggtgtctatagcaattcatacgggcctgagttcgctcattgtcgggagatacagtggaatagtttgggcaatgggctcgcctatgaagatttctctttcccaattttcctgctcgaagatgagaacgagacaaaggtgatcaagcagtgctaccaagaccataatctgtcccagaacggttcagctccaacctttcccctttgtgccatgcagctcttctcgcacatgcatgctgtgatatctactgctacatgtatgagaaggagctccatccagagcaccttctccattaatcccgagatcgtgtgcgatcctctttccgactacaacgtgtggtctatgctgaagcccatcaataccacgggcacactcaaacccgatgatcgcgtcgttgtggctgccactaggttggattctcggtctttcttctggaatgtagcccctggtgccgaatcagctgtggcctctttcgtgacccagctggctgcggcagaggccctgcagaaagctccagatgtgaccactttgcccaggaacgttatgtttgttttcttccagggggagacgttcgattatatcggcagctcaaggatggtttacgacatggagaagggaaagtttccagtgcagttggaaaacgtggattcattcgtggaattagggcaggtcgctctaaggacgtcgctggaactctggatgcataccgatcctgtgagtcaaaagaacgaatcagtgaggaatcaagttgaggatttgctagccactttagaaaagtcgggggcaggcgttcctgccgtgatcctgcgccgtcctaaccagtctcagcctctgcctcctagctccttgcaaagattcctgagagcaaggaatatttccggcgtggtcctcgccgatcattcaggggcatttcacaacaagtattatcaatcaatctacgacacagccgaaaatatcaatgtgtcctaccctgagtggctgtctcctgaggaggatctgaattttgtaactgataccgccaaggccctggcagatgtcgccacagtcttgggacgcgcactgtacgaacttgcgggaggcaccaacttctccgataccgttcaagctgaccctcagaccgtgacccgactgctttatggattccttatcaaggcaaataatagctggttccaatctattctccggcaggatcttaggtcctatctgggggacggccctttgcagcattacatcgctgtcagcagtccgaccaacacaacgtacgttgtgcagtacgcactggcaaatctgacggggaccgtcgtcaatttgacccgcgaacagtgccaagatccctcaaaagtgccctcggagaacaaggacctgtatgagtactcatgggtgcagggcccactccatagcaatgaaaccgatcgtttgcctcgatgtgtaaggagcacagcccgactggccagagcactcagccccgctttcgagctgagccagtggtcaagtactgaatacagcacctggaccgagagccggtggaaagatattcgggctagaatcttcctgattgccagcaaagaattagagctcatcacccttacagttggctttggtatacttatattttctctgatcgtcacttattgtataaatgccaaggccgacgtgctgtttattgccccacgggagccaggcgcagtttcctactag

SEQ ID NO: 185961 - DNA, 2130 bp, Artificial Sequence
  derived and/or modified sequence
atggccaccgccggcggcggcagcggcgccgaccccggcagcagaggcctgctgagactgctgagcttctgcgtgctgctggccggcctgtgcagaggcaacagcgtggagagaaagatctacatccccctgaacaagaccgccccctgcgtgagactgctgaacgccacccaccagatcggctgccagagcagcatcagcggcgacaccggcgtgatccacgtggtggagaaggaggaggacctgcagtgggtgctgaccgacggccccaaccccccctacatggtgctgctggagagcaagcacttcaccagagacctgatggagaagctgaagggcagaaccagcagaatcgccggcctggccgtgagcctgaccaagcccagccccgccagcggcttcagccccagcgtgcagtgccccaacgacggcttcggcgtgtacagcaacagctacggccccgagttcgcccactgcagagagatccagtggaacagcctgggcaacggcctggcctacgaggacttcagcttccccatcttcctgctggaggacgagaacgagaccaaggtgatcaagcagtgctaccaggaccacaacctgagccagaacggcagcgcccccaccttccccctgtgcgccatgcagctgttcagccacatgcacgccgtgatcagcaccgccacctgcatgagaagaagcagcatccagagcaccttcagcatcaaccccgagatcgtgtgcgaccccctgagcgactacaacgtgtggagcatgctgaagcccatcaacaccaccggcaccctgaagcccgacgacagagtggtggtggccgccaccagactggacagcagaagcttcttctggaacgtggcccccggcgccgagagcgccgtggccagcttcgtgacccagctggccgccgccgaggccctgcagaaggcccccgacgtgaccaccctgcccagaaacgtgatgttcgtgttcttccagggcgagaccttcgactacatcggcagcagcagaatggtgtacgacatggagaagggcaagttccccgtgcagctggagaacgtggacagcttcgtggagctgggccaggtggccctgagaaccagcctggagctgtggatgcacaccgaccccgtgagccagaagaacgagagcgtgagaaaccaggtggaggacctgctggccaccctggagaagagcggcgccggcgtgcccgccgtgatcctgagaagacccaaccagagccagcccctgccccccagcagcctgcagagattcctgagagccagaaacatcagcggcgtggtgctggccgaccacagcggcgccttccacaacaagtactaccagagcatctacgacaccgccgagaacatcaacgtgagctaccccgagtggctgagccccgaggaggacctgaacttcgtgaccgacaccgccaaggccctggccgacgtggccaccgtgctgggcagagccctgtacgagctggccggcggcaccaacttcagcgacaccgtgcaggccgacccccagaccgtgaccagactgctgtacggcttcctgatcaaggccaacaacagctggttccagagcatcctgagacaggacctgagaagctacctgggcgacggccccctgcagcactacatcgccgtgagcagccccaccaacaccacctacgtggtgcagtacgccctggccaacctgaccggcaccgtggtgaacctgaccagagagcagtgccaggaccccagcaaggtgcccagcgagaacaaggacctgtacgagtacagctgggtgcagggccccctgcacagcaacgagaccgacagactgcccagatgcgtgagaagcaccgccagactggccagagccctgagccccgccttcgagctgagccagtggagcagcaccgagtacagcacctggaccgagagcagatggaaggacatcagagccagaatcttcctgatcgccagcaaggagctggagctgatcaccctgaccgtgggcttcggcatcctgatcttcagcctgatcgtgacctactgcatcaacgccaaggccgacgtgctgttcatcgcccccagagagcccggcgccgtgagctactag

SEQ ID NO: 185962 - protein, 361 aa, Artificial Sequence
  derived and/or modified sequence
METGAAELYDQALLGILQHVGNVQDFLRVLFGFLYRKTDFYRLLRHPSDRMGFPPGAAQALVLQVFKTFDHMARQDDEKRRQELEEKIRRKEEEEAKTVSAAAAEKEPVPVPVQEIEIDSTTELDGHQEVEKVQPPGPVKEMAHGSQEAEAPGAVAGAAEVPREPPILPRIQEQFQKNPDSYNGAVRENYTWSQDYTDLEVRVPVPKHVVKGKQVSVALSSSSIRVAMLEENGERVLMEGKLTHKINTESSLWSLEPGKCVLVNLSKVGEYWWNAILEGEEPIDIDKINKERSMATVDEEEQAVLDRLTFDYHQKLQGKPQSHELKVHEMLKKGWDAEGSPFRGQRFDPAMFNISPGAVQF

SEQ ID NO: 185963 - DNA, 1086 bp, Artificial Sequence
  derived and/or modified sequence
atggagaccggcgccgccgagctgtacgaccaggccctgctgggcatcctgcagcacgtgggcaacgtgcaggacttcctgagagtgctgttcggcttcctgtacagaaagaccgacttctacagactgctgagacaccccagcgacagaatgggcttcccccccggcgccgcccaggccctggtgctgcaggtgttcaagaccttcgaccacatggccagacaggacgacgagaagagaagacaggagctggaggagaagatcagaagaaaggaggaggaggaggccaagaccgtgagcgccgccgccgccgagaaggagcccgtgcccgtgcccgtgcaggagatcgagatcgacagcaccaccgagctggacggccaccaggaggtggagaaggtgcagccccccggccccgtgaaggagatggcccacggcagccaggaggccgaggcccccggcgccgtggccggcgccgccgaggtgcccagagagccccccatcctgcccagaatccaggagcagttccagaagaaccccgacagctacaacggcgccgtgagagagaactacacctggagccaggactacaccgacctggaggtgagagtgcccgtgcccaagcacgtggtgaagggcaagcaggtgagcgtggccctgagcagcagcagcatcagagtggccatgctggaggagaacggcgagagagtgctgatggagggcaagctgacccacaagatcaacaccgagagcagcctgtggagcctggagcccggcaagtgcgtgctggtgaacctgagcaaggtgggcgagtactggtggaacgccatcctggagggcgaggagcccatcgacatcgacaagatcaacaaggagagaagcatggccaccgtggacgaggaggagcaggccgtgctggacagactgaccttcgactaccaccagaagctgcagggcaagccccagagccacgagctgaaggtgcacgagatgctgaagaagggctgggacgccgagggcagccccttcagaggccagagattcgaccccgccatgttcaacatcagccccggcgccgtgcagttctag

SEQ ID NO: 185964 - DNA, 1086 bp, Artificial Sequence
  derived and/or modified sequence
atggagacaggcgccgcggaactttacgatcaagctctgctgggcattctgcagcatgtaggaaatgtgcaggacttccttcgggtgctgttcggtttcctataccgaaaaacagacttctacagacttctccgccacccttcggatcggatgggctttccccctggcgcagctcaggcactagttcttcaggtgtttaaaacctttgatcacatggctcgtcaggatgatgaaaagagaagacaggaattggaggagaagataagaagaaaggaagaggaagaggcgaagactgtctctgctgccgccgccgagaaggagccggtgcccgtgcccgttcaggaaatcgagatcgacagtacaacggagctcgatggacaccaagaagtggagaaggtgcagccgcccggacctgtcaaggaaatggctcatggttcccaggaagccgaagcccccggggccgtggctggggccgctgaggttcctcgggaaccccccatactcccaaggatccaagaacagtttcagaagaaccctgactcgtacaacggcgccgtaagagagaattacacatggtctcaagactacacagacctggaagtacgcgtaccagttcctaagcatgtcgtcaaaggcaaacaggtctccgttgccctgagttcatcctcgatccgcgttgcgatgcttgaggaaaatggtgagagggttctgatggaagggaagcttacccataagatcaatactgagagcagcttatggagcctagaaccagggaagtgcgtcttggtcaatctctccaaagtgggggaatactggtggaacgctattctcgagggagaggaaccaatcgacattgataaaatcaacaaggagagaagtatggccactgtggacgaggaggagcaggctgtcctggaccggctcacctttgattaccatcagaagcttcagggcaaaccccagtctcacgagttgaaagtacacgagatgctgaagaagggctgggacgccgaggggtcaccattccgggggcagagatttgaccccgccatgtttaacatctctccgggagccgtgcagttctag

SEQ ID NO: 185965 - DNA, 1086 bp, Artificial Sequence
  derived and/or modified sequence
atggagactggagctgctgagctgtatgaccaggccctgctgggcatcctgcagcacgtgggcaatgtgcaggacttcctgcgggtgctgtttggcttcctgtacaggaagacagacttctaccgcctgctgcggcaccccagcgacaggatgggcttccccccaggagctgcccaggccctggtgctgcaggtgttcaagacctttgaccacatggcccggcaggatgatgagaagaggcggcaggagctggaggagaagatccggaggaaggaggaggaggaggccaagacagtgtctgctgctgctgctgagaaggagcctgtgcctgtgcctgtgcaggagattgaaattgacagcaccacagagctggatggccaccaggaggtggagaaggtgcagcccccaggccctgtgaaggagatggcccacggcagccaggaggccgaggcccctggagctgtggccggggctgctgaggtgccccgggagccccccatcctgccccgcatccaggagcagttccagaagaacccagacagctacaatggagctgtgcgggagaactacacctggagccaggactacacagacctggaggtgcgggtgcctgtgcccaagcacgtggtgaagggcaagcaggtgtctgtggccctgagcagcagcagcatccgggtggccatgctggaggagaatggagagcgggtgctgatggagggcaagctgacccacaagatcaacacagagagcagcctgtggagcctggagcctggaaaatgtgtgctggtgaacctgagcaaggtgggggagtactggtggaatgccatcctggagggggaggagcccattgatattgacaagatcaacaaggagaggtccatggccaccgtggatgaggaggagcaggccgtgctggaccggctgacctttgactaccaccagaagctgcagggcaagccccagagccatgagctgaaggtgcatgagatgctgaagaagggctgggatgctgagggcagccccttccggggccagagatttgatcctgccatgttcaacatcagccctggagctgtgcagttctag

SEQ ID NO: 185966 - DNA, 1086 bp, Artificial Sequence
  derived and/or modified sequence
atggagaccggcgccgccgagctgtacgaccaggccctgctgggcatccttcagcatgtaggaaacgtgcaggacttcctgcgtgtgctgttcgggtttctctatagaaaaaccgacttttacaggctcctgaggcatccaagtgaccggatggggtttcctcctggcgccgcacaggccttagtgctgcaggtgttcaaaacgtttgaccacatggcccggcaggacgatgagaagaggcggcaggagcttgaagagaagatccgacgcaaggaggaagaggaagccaagacagtgagcgccgcagccgccgaaaaagaacctgtacctgtacccgtgcaggagatcgaaatagattcaaccaccgaactggacggacaccaggaagtggaaaaggttcaacccccagggccagtgaaggagatggcccacggctctcaagaagctgaggcgccaggtgccgtcgcaggggccgctgaggtccccagggagcctcctatcctgcccagaattcaggaacagttccaaaagaatcccgatagttacaatggagccgtccgcgagaattacacttggtcccaagactacaccgaccttgaggtgagagtacctgtgcccaaacacgttgtgaaaggaaagcaggtcagtgtggctctttccagctccagcatcagggtggccatgttggaggagaatggagagcgagtcctgatggagggaaaattgactcacaagattaacaccgaatccagcctctggtccctcgagccgggcaaatgtgtgctggttaatctgtctaaggtgggggaatattggtggaatgctatccttgaaggggaggagcctatcgacatagacaagatcaataaagagcggtccatggctacagttgatgaagaagaacaggctgtgctggacagattaactttcgactaccaccagaagctacaggggaagcctcaaagccatgagctaaaggtccacgaaatgctcaaaaaaggttgggatgctgagggtagcccctttcgcggccagcgctttgatccagcgatgttcaacatcagcccaggggccgtgcagttctag

SEQ ID NO: 185967 - DNA, 5007 bp, Artificial Sequence
  derived and/or modified sequence
gccctcgcagcgcagcagaagccacgggcttccttccgcgtaggaacctccttgctgcccttgtcgggctcttttgtctaagaccacctcaaggcaaagcccgtggggcagctgggtctggggaaaacagcccggggccgcgggggccgaacgagcacggaccggaagttccgcagccgcgccgtccggcggagccgttggctgcggacgccggaagtggccagtcggcaggtctgaggcggcgctgtgtgtgtgaagcgtacctagggcgggaggcgacatggagacaggggcggccgagctgtatgaccaggcccttttgggcatcctgcagcacgtgggcaacgtccaggatttcctgcgcgttctctttggcttcctctaccgcaagacagacttctatcgcttgctgcgccacccatcggaccgcatgggcttcccgcccggggccgcgcaggccttggtgctgcaggtattcaaaacctttgaccacatggcccgtcaggatgatgagaagagaaggcaggaacttgaagagaaaatcagaagaaaggaagaggaagaggccaagactgtgtcagctgctgcagctgagaaggagccagtcccagttccagtccaggaaatagagattgactccaccacagaattggatgggcatcaggaagtagagaaagtgcagcctccaggccctgtgaaggaaatggcccatggttcacaggaggcagaagctccaggagcagttgctggtgctgctgaagtccctagggaaccaccaattcttcccaggattcaggagcagttccagaaaaatcccgacagttacaatggtgctgtccgagagaactacacctggtcacaggactatactgacctggaggtcagggtgccagtacccaagcacgtggtgaagggaaagcaggtctcagtggcccttagcagcagctccattcgtgtggccatgctggaggaaaatggggagcgcgtcctcatggaagggaagctcacccacaagatcaacactgagagttctctctggagtctcgagcccgggaagtgcgttttggtgaacctgagcaaggtgggcgagtattggtggaacgccatcctggagggagaagagcccatcgacattgacaagatcaacaaggagcgctccatggccaccgtggatgaggaggaacaggcggtgttggacaggcttacctttgactaccaccagaagctgcagggcaagccacagagccatgagctgaaagtccatgagatgctgaagaaggggtgggatgctgaaggttctcccttccgaggccagcgattcgaccctgccatgttcaacatctccccgggggctgtgcagttttaatgaccagaaggaaaggaaaccctcgccggtggggaggcagagccttatcctcggctgcccttcttggctccctgcattccagggacttgctcgtcttgtttacccctagccatcctttctttcaagggtgaaccaggccttccaccctgaccttgcatctccagactgttccagagaaggtgcggggccagctgctatgtggtggccgctgtggctgacactgagtgaaggtgtttgaaatgcaggagaggatatcccagcaaattgggatcacatgcttttgtctccacagcaaccagccactgcaggcagcatgtctttcctcccctgctctctgcttgctgttgttttgacgctattctgcttgcatgtcttctggttgggatgtggagttgttgctggactctcaggcgaagctgaagtcattgaagtgtgtgaagctctgtgcttgcatgagggcaagcaaggaatggctgtgcctgaggctgctctgggaaactccttgccccttgacctcttttgagagcattcacgtggtcttcttgctcatccccttataaatgtgctttgcctgcctcagcctcatggtcagagcagtggagactggagccctgtttgcacgttctagttgttcggagaaagcctaggttctgggctcaggtccagatgcagcggggattctgttctctgactgtggcgaccttgctttggttcttgttgaagtgaaccaagcccggccaccacgcatggcatgctgtgcttggctccccataagacgtcctctttgggtgcacggtgtcaaagtgtgggcaggagtggagagctggtgccctcaggaggagaccacagcatgtccatcagctcagcagagctcgacagccacaagtcctgagaagctttgaccttgaagggcttctgggagaggaggaatttctgcatggggcgtgaaggcacactgtcccaccacaactgaaccagaagagagtgaagactcccctcttcccatcctctgtgccaggtgccagactgtgctccttggaacttatggcccaatcttacctgttctccagggactggtcactgcctcaggacccccaagcctatgccctgagccatggctgctgactgactccagccaaggtgcaaagacgagattatgagacaggtcctcaggcctgtgttccaagtactcacaggggctctgggtgcccatcgccgggagtatggttcagctgccaccggcactgtccatttgcctgtctgtcaagctcagagcatggataagccacacagcagggcagtgcaccctggcaccatgcacggccagcaagaatcaaggcccgcagatgctaagagggcctattgtcaggggaaggtccccgctcctgcacactctctatggatacttgggttgtgggggctctcttggagagtaagtttgtggtttgtttctggtttacagtggtggctgacaccccttgtaagaaagcattcctgggaagtcttctgtgggtccaaacatgttgctccgatcatcacaggagagcaaaaggccctagataccccctttggaatgtgagagtcttgttgtctgatatttgccactgagctggtgaagcccctctaaagagatctcgaccctggggagcagaattcttgtcatctatgaggggtcctgagaaagacttgtcattttttttcctggagttcttcccattgaggtcctaggatttgcacaccactgtcccacaagagctttcctgcctaatgaaaggaggtcttgtggtgtgtgtctcctctcttctctatagttcccgagttggcccccattgcagcccccaccctgtgggtagtcttccagaagtgatgcagtggtgtgagatgccctacaccttgttatttgggagactttgagagtcattcacttccatggtgactagtgtttgttttgcctgattttatattctgtgttgcatttctccccactccctgccctgctttaataaacagcaaaccaatatctaggaagaatgactgagggatagtattgggtattggccccatggcaggaacagccacttgcatctggtcccggtgccacactgcggtgcttggtgtggttgtggagcctgtccctgcgcgccttgctcccgttgagccacgctgtctggtgggtgattctctgccctgagccaccaccctggactggcccagtctccagagctggcacaccctgcctgttttctctttttagacacaacagccgcagtttggccagccactaagtcccaccagctgaggtccgaggaaagcggggtgactcatttcccttgtccagggcccgaggagagtgaggtgtccagcctgcaaagctattccagctccttggtgttggtttgcaataaattggtatttaagcagttctgggtctgcgtgtgacatttgctgctgagacagttctgtctgtgcatggtcattattgttgcattctagccttgaggtcccaggccaacgtacacagcaaacaccagcatggggaattcttaggggttgtttcccatctggtctgaatgcactgggcaagatctcaatacagctttagaaatcctgtaagattttgaccagtggggagaaaaagaatgtagctatagatcttacatcctttcaaacaggttctggaattctgtagttactggaaagcttagggtgagtgcagagttgggaatgattccactgaagggccacctttgcccaccaggctccaaggccctccttggtctccaggtgcatacctgctgttaactttgctgagccctcgcaatgggcttcctccaggacataacgccgtgtctgacacagaagtctcccaggtggctggccacctgcttcttcctcagtcagatctttgactctccttctctgtgcccaccccatctccagcctcctctgaccctgctcacccctggggacaggacctaggggtgtgagaagtacttggctgaataaagactgtttcaaaggcaatccttagaattgcctagcatactcccagggccagaaataacccgccagaaaggagaggcgtatttgcccctgaagagtgcaggagggagaacagttgagaagtgttttgtgtggaaatgtgtccaagaggcgtcagctgctgcacagagaactcactgcccagaacactgcgcttggggaacagacctcacccccacctcaaatctgctctccactgggcctgttggcagccagctcagctggggaagggacagcatgactcgctttgtcgatgaaaagcacgaagttgtcagcacagaacctggccagtccttgagaaactccctccttggtggtcagaggtcaagcagcccatgtggcccacggtcctgaagaactgggctatgtccctgaggctcctctctaccgtctgactgtggggtctggggaacaggcatttaaaccaggctgctgccctggggagtgcccactggacgccagggtgccccatagggacagggtcacaaagccctggggcttcccctgccagtcctggtgaggacagtgtggtcactatctcagagagacgaaaaatgaatattctgtcatttcagactaaactactcacccagctcaca

SEQ ID NO: 185968 - DNA, 1086 bp, Artificial Sequence
  derived and/or modified sequence
atggagaccggcgcagctgaactctacgaccaagcactgttaggtatcctccagcacgttggaaacgtgcaggactttctccgggtgctgtttggtttcctttacagaaagacggacttctataggctcctgcggcatccttccgatcgaatgggatttcccccaggggcagcccaggccctggtgctgcaagtgttcaaaactttcgatcatatggccagacaggatgatgagaaacgaagacaagagctggaggaaaaaattcgcagaaaagaagaagaggaagctaaaaccgtgtcggcagccgctgccgagaaagaacctgtccccgtgcccgtgcaggaaattgagattgacagtaccaccgaactagatggccaccaggaggtagagaaggtgcagcctccgggacctgtaaaagaaatggcacacggtagccaggaagctgaagctcccggagctgttgcaggagccgcagaagttccgagagagcccccaattctgcccagaatccaggaacagtttcaaaaaaatcctgattcttataacggagccgttcgcgagaattatacctggtctcaggattacaccgatcttgaagtgcgcgtacccgttccgaagcacgtggttaagggcaagcaggtgtctgttgccttaagtagtagcagcatcagagtcgcaatgttggaggaaaatggcgagagggtcttgatggaggggaaactaacccacaagatcaacacggagtctagtttgtggtctcttgagcctggcaagtgcgtcctggttaacttgtcaaaggtcggagagtattggtggaatgcaatcctggagggggaagagcctatcgacatagacaagataaataaagaaagaagtatggcaaccgttgatgaggaagaacaggcagtcctcgaccgcctgactttcgactatcatcagaagctccaagggaagcctcagagccacgagctgaaggtgcatgagatgctaaagaaaggctgggatgcagaagggtcccctttccggggacagaggtttgaccccgcaatgtttaatattagtcccggagcagttcagttttag

SEQ ID NO: 185969 - protein, 2210 aa, Artificial Sequence
  derived and/or modified sequence
MTAAANWVANGASLEDCHSNLFSLAELTGIKWRRYNFGGHGDCGPIISAPAQDDPILLSFIRCLQANLLCVWRRDVKPDCKELWIFWWGDEPNLVGVIHHELQVVEEGLWENGLSYECRTLLFKAIHNLLERCLMDKNFVRIGKWFVRPYEKDEKPVNKSEHLSCAFTFFLHGESNVCTSVEIAQHQPIYLINEEHIHMAQSSPAPFQVLVSPYGLNGTLTGQAYKMSDPATRKLIEEWQYFYPMVLKKKEESKEEDELGYDDDFPVAVEVIVGGVRMVYPSAFVLISQNDIPVPQSVASAGGHIAVGQQGLGSVKDPSNCGMPLTPPTSPEQAILGESGGMQSAASHLVSQDGGMITMHSPKRSGKIPPKLHNHMVHRVWKECILNRTQSKRSQMSTPTLEEEPASNPATWDFVDPTQRVSCSCSRHKLLKRCAVGPNRPPTVSQPGFSAGPSSSSSLPPPASSKHKTAERQEKGDKLQKRPLIPFHHRPSVAEELCMEQDTPGQKLGLAGIDSSLEVSSSRKYDKQMAVPSRNTSKQMNLNPMDSPHSPISPLPPTLSPQPRGQETESLDPPSVPVNPALYGNGLELQQLSTLDDRTVLVGQRLPLMAEVSETALYCGIRPSNPESSEKWWHSYRLPPSDDAEFRPPELQGERCDAKMEVNSESTALQRLLAQPNKRFKIWQDKQPQLQPLHFLDPLPLSQQPGDSLGEVNDPYTFEDGDIKYIFTANKKCKQGTEKDSLKKNKSEDGFGTKDVTTPGHSTPVPDGKNAMSIFSSATKTDVRQDNAAGRAGSSSLTQVTDLAPSLHDLDNIFDNSDDDELGAVSPALRSSKMPAVGTEDRPLGKDGRAAVPYPPTVADLQRMFPTPPSLEQHPAFSPVMNYKDGISSETVTALGMMESPMVSMVSTQLTEFKMEVEDGLGSPKPEEIKDFSYVHKVPSFQPFVGSSMFAPLKMLPSHCLLPLKIPDACLFRPSWAIPPKIEQLPMPPAATFIRDGYNNVPSVGSLADPDYLNTPQMNTPVTLNSAAPASNSGAGVLPSPATPRFSVPTPRTPRTPRTPRGGGTASGQGSVKYDSTDQGSPASTPSTTRPLNSVEPATMQPIPEAHSLYVTLILSDSVMNIFKDRNFDSCCICACNMNIKGADVGLYIPDSSNEDQYRCTCGFSAIMNRKLGYNSGLFLEDELDIFGKNSDIGQAAERRLMMCQSTFLPQVEGTKKPQEPPISLLLLLQNQHTQPFASLNFLDYISSNNRQTLPCVSWSYDRVQADNNDYWTECFNALEQGRQYVDNPTGGKVDEALVRSATVHSWPHSNVLDISMLSSQDVVRMLLSLQPFLQDAIQKKRTGRTWENIQHVQGPLTWQQFHKMAGRGTYGSEESPEPLPIPTLLVGYDKDFLTISPFSLPFWERLLLDPYGGHRDVAYIVVCPENEALLEGAKTFFRDLSAVYEMCRLGQHKPICKVLRDGIMRVGKTVAQKLTDELVSEWFNQPWSGEENDNHSRLKLYAQVCRHHLAPYLATLQLDSSLLIPPKYQTPPAAAQGQATPGNAGPLAPNGSAAPPAGSAFNPTSNSSSTNPAASSSASGSSVPPVSSSASAPGISQISTTSSSGFSGSVGGQNPSTGGISADRTQGNIGCGGDTDPGQSSSQPSQDGQESVTERERIGIPTEPDSADSHAHPPAVVIYMVDPFTYAAEEDSTSGNFWLLSLMRCYTEMLDNLPEHMRNSFILQIVPCQYMLQTMKDEQVFYIQYLKSMAFSVYCQCRRPLPTQIHIKSLTGFGPAASIEMTLKNPERPSPIQLYSPPFILAPIKDKQTELGETFGEASQKYNVLFVGYCLSHDQRWLLASCTDLHGELLETCVVNIALPNRSRRSKVSARKIGLQKLWEWCIGIVQMTSLPWRVVIGRLGRLGHGELKDWSILLGECSLQTISKKLKDVCRMCGISAADSPSILSACLVAMEPQGSFVVMPDAVTMGSVFGRSTALNMQSSQLNTPQDASCTHILVFPTSSTIQVAPANYPNEDGFSPNNDDMFVDLPFPDDMDNDIGILMTGNLHSSPNSSPVPSPGSPSGIGVGSHFQHSRSQGERLLSREAPEELKQQPLALGYFVSTAKAENLPQWFWSSCPQAQNQCPLFLKASLHHHISVAQTDELLPARNSQRVPHPLDSKTTSDVLRFVLEQYNALSWLTCNPATQDRTSCLPVHFVVLTQLYNAIMNIL

SEQ ID NO: 185970 - DNA, 6633 bp, Artificial Sequence
  derived and/or modified sequence
atgaccgccgctgccaactgggtggctaacggagcatcccttgaggattgtcatagcaatctgtttagccttgccgagcttacgggaataaaatggcgacgatataatttcgggggacatggagactgtgggccaatcataagcgccccggcccaagatgatccaatcctcttgagctttattcgttgccttcaggccaacctgctgtgcgtgtggcggcgggatgtaaagcccgattgtaaagaactgtggattttctggtggggcgatgagcctaacctggttggtgtcatccaccacgaattgcaagtagttgaggaagggctttgggaaaacggtttgtcttatgaatgcagaacactgttattcaaagcaatacataatctcttggagcgctgccttatggacaaaaactttgtccgtataggaaaatggttcgtgcggccttatgagaaggacgagaaacccgttaacaagtctgaacacctgtcctgtgcttttactttctttctgcacggagaaagcaatgtatgtacaagcgtggagatcgcgcaacatcaacccatttacttgattaacgaggaacatattcacatggctcagagctccccagccccatttcaggtcctcgtgagcccttatggcttgaatggtacattgactgggcaggcttacaaaatgtctgaccctgccacccggaaactcatcgaggagtggcaatatttttatcctatggtccttaaaaaaaaggaagaatccaaggaagaggatgagcttggttatgatgacgacttcccagttgccgtggaagtgatcgtaggcggcgttaggatggtctatccctccgccttcgtgcttatatctcagaacgatatcccggtccctcagagcgtggcatcagccggcggccatattgctgtgggtcagcagggtctgggcagtgtgaaagaccctagcaattgtggtatgccactgaccccacctactagccctgaacaagctatactgggcgagagtggcgggatgcagtctgctgccagccatctagtgtcgcaggacggcggcatgatcactatgcattcgcccaagagaagcgggaagatcccacccaaactgcacaaccacatggtccaccgagtgtggaaggaatgtatcctcaataggacacaatccaagcggtcgcagatgagtacccccaccctggaagaagagcccgcctctaatccggccacctgggactttgtcgaccccactcagcgggtcagctgctcatgtagcagacacaagctgctgaaaaggtgcgccgtgggaccaaatagaccgcctacagtgagccaacctgggttctccgcaggaccatcatctagttcatccttgccaccacctgcctcttcaaagcacaagactgccgagcgccaggagaaaggggataagctgcagaaacggcccttgattccttttcatcatagaccgagtgttgcagaagagctatgtatggagcaggataccccgggccagaaacttggcttagccggaatcgattcaagtctcgaggtgtccagttctcgcaagtatgataagcaaatggccgtgccctcccggaatacaagtaagcagatgaatctgaacccgatggactccccccactcacccatctcccccctgcccccaactcttagcccacagccgcgggggcaggagaccgagtcccttgaccccccaagtgtccccgtgaatccggcattatacggcaatggactggaactccagcagctcagtacactcgacgaccggacagtgctcgttggtcagcggctgccactgatggcagaagtcagcgagacagcactgtactgcggcatcagaccatccaaccctgaatccagtgagaagtggtggcactcctatcgactgccacccagcgatgacgccgagttccgccccccagaactacagggagaaaggtgtgatgccaagatggaggtgaacagtgagtctacagccttgcagcgccttctggctcagcccaacaaaagattcaaaatctggcaggataagcagcctcagctgcagccattgcattttctcgatcccttgcctctaagccagcagcccggtgatagcctcggggaggtcaatgacccgtacacattcgaggacggggacattaagtatatctttacggcaaacaaaaagtgtaagcagggaacagaaaaagactcactgaagaagaacaaatccgaggacgggttcggcacaaaagacgtaactacccccggccattctacacctgtgccagatggcaagaacgccatgagcattttctctagcgcgacgaaaacagacgtgagacaggacaatgctgcagggcgcgcaggcagcagtagtctgactcaagtcacggacttggctccttccctgcacgatctggacaacatctttgacaacagcgacgacgacgagcttggggcggtctcaccggcactacgatctagtaaaatgcccgccgttgggactgaggatcgtcccctcgggaaggacggcagagctgccgtcccgtacccccccaccgtggctgacctgcaacggatgttcccaacacccccttcactggaacaacatcctgccttctcgcctgtaatgaactataaggatggaatctcctccgagactgttaccgccctgggcatgatggaaagtccaatggtgagcatggtgtcaacacagctgacagagttcaagatggaagttgaggatggtctggggagccccaagcctgaggaaattaaagacttttcctacgttcacaaggtgccatctttccagccctttgtggggagtagcatgtttgccccccttaagatgcttccctcgcactgtcttctgcccctgaagatcccagacgcctgtctcttccgaccttcctgggcaatcccccctaagatcgaacagctccccatgcctccggcggccactttcatcagggatggctacaacaatgtcccatccgtcggaagcttagccgatcctgactacttaaatactcctcaaatgaacacaccagtgactctgaatagcgcggccccggcctctaactctggcgccggggtgctgcctagccctgctacaccgaggttctcggtcccaactcctagaacaccccgtactccccgcacaccccgcggcggtggaaccgcctccggacagggaagtgtaaaatacgattcgaccgatcagggatccccagcttcaactccatctacgacaaggcctctcaacagcgtcgaacctgctaccatgcagcccattccagaagctcactcactttatgttacactgattctcagcgacagtgtcatgaatatttttaaggaccgcaatttcgactcatgctgcatctgtgcttgtaacatgaatattaaaggggcagatgtgggcttgtatatcccagattccagtaatgaggaccagtacagatgtacctgcggcttctccgccataatgaaccggaaactaggatacaattcgggactgttcctggaagacgagctggatatcttcgggaaaaactctgacatcggacaggccgctgagaggaggctaatgatgtgccagtctacattccttcctcaagtcgaggggacaaaaaagcctcaggagcctcccatcagcctgcttctcttgcttcagaatcaacacacacagccgtttgcatctctgaactttctagattatatcagctcgaataatcgacagacgttgccatgtgtgtcatggagctatgaccgggtgcaggcggacaacaatgattattggacggagtgcttcaacgccctggaacagggcaggcaatatgtcgacaatcctaccggtggaaaggtggatgaagccctcgtgcgatctgccaccgtacacagttggccccatagcaatgtgctggacatttccatgctgagctcacaggacgtcgtgaggatgctgttgagcctccagcctttcctgcaggacgcgattcagaaaaagaggactgggcgaacgtgggaaaatatacagcatgtccagggcccgttgacatggcaacaatttcataagatggccggaagggggacgtatggctcagaggagtctcccgagcctctgccaattcccaccttactggtcggctatgacaaggacttcctcaccatctcccctttttccttaccattctgggaaagactcctattagatccgtacggtggtcacagggacgtggcatatattgtggtttgccccgagaatgaagcacttctggagggggcaaaaacttttttcagagatttgtccgcggtgtacgaaatgtgcagattgggccaacataaaccaatctgcaaggttctcagggacggcattatgcgagtcggtaagaccgtagcccaaaagctcaccgatgagctggtgagcgagtggttcaatcaaccatggtcaggggaagagaatgacaaccacagcaggctcaagctatatgcccaggtctgccgacaccatctggccccctacttggccacactgcagctggacagctccctcttgatcccaccgaaatatcagacaccaccagccgcggcacagggccaagctacacccggtaatgccggcccactggcacccaacggcagtgcagcccctcccgcgggcagcgcattcaatcccacctctaatagtagcagtaccaacccagccgcaagttcctcagccagcggctcttcagtgccgcctgtgtcttctagcgcttcagcacctggcattagccaaatcagcaccacttcgagcagtggattttctggttcggtgggtggccagaatccctcaactggggggattagtgccgatcggacacagggcaatatcggatgtgggggcgacactgacccaggccagagttcatcccagccctcgcaagatggacaagagtctgtgaccgagcgcgaaagaatagggatccctacggagcccgatagtgccgattcacatgcccacccccctgcagtcgtaatctatatggtggacccctttacctatgccgcggaagaagatagcactagcggaaacttctggcttctgtccctgatgcggtgctatacggagatgctcgataacctcccagaacacatgcgcaacagctttatattgcagatcgtgccttgtcagtacatgctgcaaaccatgaaagacgaacaggttttctatattcagtacttaaaatcaatggcatttagcgtttactgccagtgtcgccgaccacttcctacccagatacatatcaagtccctgaccggttttggacccgccgcttctattgagatgaccctaaagaaccccgaaagaccaagcccaattcaactgtactccccaccctttatcctggcccccatcaaagataaacaaacggaactcggcgagaccttcggagaggcttctcaaaaatacaacgtgctgtttgtaggatactgtctgtcccacgatcagagatggctgctggcttcctgcacggacttgcatggtgagctattggagacctgcgtggtaaacatcgccctgcccaataggagtcggcgttctaaggtgtccgcgcggaaaatcgggctgcagaaattgtgggagtggtgcataggcatcgttcagatgacgtctcttccttggcgcgtagttatcggacggctcgggaggctggggcacggcgagttgaaggactggtccattttattgggagaatgctcattacagacgatatcaaaaaaactgaaagacgtgtgtcggatgtgcggcatatctgcagctgattcaccatctatcctttcggcctgcctggttgcaatggaaccacaaggaagctttgtggtcatgcccgatgctgtgaccatgggcagcgtctttggccggagcacagccctgaacatgcagtccagccagctgaacaccccccaggacgcctcctgcacgcatatcttggtatttcctacttcaagcaccatccaggtggcccccgctaactatcctaacgaggatggattttcacccaacaatgatgatatgttcgtcgacctcccttttcccgacgacatggacaatgacattggaattcttatgaccggcaatttgcacagctcacccaacagtagcccagtaccctcacctggatcgccatccgggatcggcgtcggctcacatttccagcattccaggagtcagggagagcgtttactgtcccgggaagctcctgaggagctgaagcagcagcccctagctttaggctattttgtttccactgctaaggcggaaaatttgccacaatggttttggtcaagttgcccccaggctcagaaccagtgccccttgtttctgaaggcttccctccaccaccatatatctgtcgcccagaccgacgagcttctcccagctagaaattcacagcgcgtgcctcatcccctggattccaagactacaagtgacgtgctgcgtttcgtcctggaacagtataatgctctcagttggctcacctgtaatccagctacccaggacagaaccagctgcctacctgtgcatttcgtcgtgctgacccagctttacaacgcaatcatgaatatcttgtag

SEQ ID NO: 185971 - DNA, 6633 bp, Artificial Sequence
  derived and/or modified sequence
atgacagctgctgccaactgggtggccaacggggccagcctggaggactgccacagcaacctcttcagcctggccgagctgaccggcatcaagtggaggcgctacaactttggaggccacggggactgtggccccatcatcagcgccccagcccaggatgaccccatcctgctgtccttcatccgctgcctgcaggccaacctgctgtgtgtgtggaggagagatgtgaagccagactgcaaggagctgtggatcttctggtggggagatgagcccaacctggtgggcgtcatccaccacgagctgcaggtggtggaggagggcctgtgggagaatggcctgtcctatgaatgtaggaccctgctcttcaaggccatccacaacctgctggagcgctgcctgatggacaagaactttgtgcgcatcggcaagtggtttgtgcggccctatgagaaggatgagaagcctgtgaacaagtctgagcacctgagctgtgccttcaccttcttcctgcacggggagagcaatgtgtgcacctctgtggagatcgcccagcaccagcccatctacctgatcaatgaggagcacatccacatggcccagagcagccctgcccccttccaggtgctggtgagcccctacggcctgaatggcaccctgaccggccaggcctacaagatgtctgaccctgccaccaggaagctgattgaggagtggcagtacttctaccccatggtgctgaagaagaaggaggagagcaaggaggaggatgagctgggctatgatgatgacttccctgtggccgtggaggtgattgtgggcggcgtgaggatggtgtaccccagcgcctttgtgctgatcagccagaatgacatccctgtgccccagagcgtggccagcgctgggggccacatcgctgtgggccagcagggcctgggctctgtgaaggaccccagcaactgtggcatgcccctgaccccacccaccagccctgagcaggccatcctgggggagagcggcggcatgcagagcgctgccagccacctggtgtcccaggacggcggcatgatcaccatgcacagccccaagaggtctgggaagatcccccccaagctgcacaaccacatggtgcaccgggtgtggaaggagtgcatcctgaacagaacccagagcaagaggagccagatgagcacccccaccctggaggaggagcccgccagcaacccagccacctgggactttgtggaccccacccagagggtgtcctgcagctgcagccgccacaagctgctgaagagatgtgctgtgggccccaacagaccacccaccgtgtcccagcccggcttctctgctggccccagcagcagcagcagcctgcccccaccagccagcagcaagcacaagacagctgagcggcaggagaagggggacaagctgcagaagaggcccctcatccccttccaccaccggcccagcgtggccgaggagctgtgcatggagcaggacaccccaggccagaagctgggcctggccggcatcgacagcagcctggaggtgagcagcagcaggaaatatgacaagcagatggctgtgcccagcaggaacaccagcaagcagatgaacctgaaccccatggacagcccccacagccccatcagccccctgccccccaccctgagcccccagccccggggccaggagacagagagcctggaccccccatctgtgcctgtgaacccagccctgtatggaaatggcctggagctgcagcagctgagcaccctggatgacagaacagtgctggtgggccagaggctgcccctgatggccgaggtgtctgaaacagccctgtactgcggcatccggcccagcaaccctgagagcagcgagaagtggtggcacagctaccgcctgcccccatctgatgatgctgagttccggcccccagagctgcagggcgagcgctgtgatgccaagatggaggtgaacagcgagagcacagccctgcagaggctgctggcccagcccaacaagcgcttcaagatctggcaggacaagcagccccagctgcagcccctgcacttcctggaccccctgcccctgagccagcagcccggggacagcctgggggaggtgaatgacccctacacctttgaagatggagacatcaagtacatcttcaccgccaacaagaagtgcaagcagggcacagagaaggacagcctgaagaagaacaagtcagaagatggcttcggcaccaaggatgtgaccaccccaggccacagcacccctgtgcctgatggcaagaatgccatgagcatcttcagcagcgccaccaagacagatgtgcggcaggacaatgctgctggccgggccggcagcagcagcctgacccaggtgacagacctggcccccagcctgcatgacctggacaacatctttgacaacagtgatgatgatgagctgggcgctgtgtccccagccctgcggagcagcaagatgcctgctgtgggcacagaggaccggcccctgggcaaggatggccgggctgctgtgccctacccacccaccgtggccgacctgcagaggatgttccccaccccacccagcctggagcagcacccagccttcagccctgtgatgaactacaaggatggcatcagcagcgagaccgtgacagccctgggcatgatggagagccccatggtgtccatggtgtccacccagctgacagagttcaagatggaggtggaggatggcctgggcagccccaagccagaggagatcaaggacttctcctatgtgcacaaggtgcccagcttccagccctttgtgggcagctccatgtttgcccccctgaagatgctgcccagccactgcctgctgcccctgaagatcccagatgcctgcctcttccggcccagctgggccatcccccccaagattgagcagctgcccatgcccccagctgccaccttcatcagagatggctacaacaacgtgcccagcgtgggcagcctggccgaccctgactacctgaacaccccccagatgaacacccctgtgaccctgaacagcgctgccccagccagcaacagcggggccggcgtgctgcccagccctgccaccccccgcttctctgtgcccacccccaggacccccaggacccccaggaccccccggggcggcggcacagccagcggccagggctctgtgaagtatgacagcacagaccagggcagccctgccagcacccccagcaccacccggcccctgaacagcgtggagcccgccaccatgcagcccatccctgaggcccacagcctgtatgtgaccctcatcctgagtgacagcgtgatgaacatcttcaaggacaggaactttgacagctgctgcatctgtgcctgcaacatgaacatcaagggagcagatgtgggcctgtacatcccagacagcagcaatgaagaccagtaccgctgcacctgtggcttcagcgccatcatgaacaggaagctgggctacaacagcggcctcttcctggaggatgagctggacatctttgggaagaacagcgacatcggccaggccgctgagcggcggctgatgatgtgccagagcaccttcctgccccaggtggagggcaccaagaagccccaggagccccccatcagcctgctgctgctgctgcagaaccagcacacccagccctttgccagcctgaacttcctggactacatcagcagcaacaaccggcagaccctgccctgtgtgtcctggagctatgacagagtgcaggccgacaacaatgactactggacagagtgcttcaatgccctggagcagggccggcagtatgtggacaaccccaccggcggcaaggtggatgaggccctggtgcgcagcgccaccgtgcacagctggccccacagcaatgtgctggacatctccatgctgagcagccaggatgtggtgaggatgctgctgagcctgcagcccttcctgcaggatgccatccagaagaagaggactggaagaacctgggagaacatccagcacgtgcagggccccctgacctggcagcagttccacaagatggccggccggggcacctacggcagcgaggagagccctgagcccctgcccatccccaccctgctggtgggctatgacaaggacttcctgaccatcagccccttcagcctgcccttctgggagcggctgctgctggacccctacggcggccacagagatgtggcctacatcgtggtgtgcccagaaaatgaggccctgctggagggcgccaagaccttcttccgggacctgtctgctgtgtatgagatgtgccgcctgggccagcacaagcccatctgcaaggtgctgagagatggcatcatgagggtgggcaagacagtggcccagaagctgacagatgagctggtgtctgagtggttcaaccagccctggagcggggaggagaatgacaaccacagccggctgaagctgtatgcccaggtgtgccgccaccacctggccccctacctggccaccctgcagctggacagcagcctgctgatcccccccaagtaccagaccccacctgctgctgcccagggccaggccaccccaggaaatgccggccccctggccccaaatggatctgctgcccccccagctggcagcgccttcaaccccaccagcaacagcagcagcaccaacccagctgccagcagcagcgccagcggcagctctgtgccccctgtgagcagcagcgccagcgcccctggcatcagccagatcagcaccaccagcagcagcggcttcagcggctctgtgggcggccagaaccccagcactggaggcatctctgctgacaggacccagggcaacatcggctgcggcggggacacagaccccggccagagcagcagccagcccagccaggacggccaggagagcgtgacagagcgggagagaattggcatccccacagagccagattctgctgacagccacgcccaccccccagctgtggtgatctacatggtggaccccttcacctacgccgctgaggaggacagcaccagcggcaacttctggctgctgagcctgatgcgctgctacacagagatgctggacaacctgcctgagcacatgagaaattccttcatcctgcagatcgtgccctgccagtacatgctgcagaccatgaaggatgagcaggtgttctacatccagtacctgaagtccatggccttctctgtgtactgccagtgcagaagacccctgcccacccagatccacatcaagagcctgaccggcttcggccctgctgccagcattgagatgaccctgaagaaccctgagcggcccagccccatccagctgtacagcccccccttcatcctggcccccatcaaggacaagcagacagagctgggggagaccttcggggaggccagccagaagtacaacgtgctgtttgtgggctactgcctgagccatgaccagcgctggctgctggccagctgcacagacctgcatggagagctgctggagacctgtgtggtgaacatcgccctgcccaacagaagcagaagaagcaaggtgtctgccaggaagattggcctgcagaagctgtgggagtggtgcatcggcatcgtgcagatgaccagcctgccctggagggtggtgattggccgcctgggccgcctgggccacggggagctgaaggactggagcatcctgctgggggagtgcagcctgcagaccatcagcaagaagctgaaggatgtgtgcaggatgtgtggcatctctgctgctgacagccccagcatcctgagcgcctgcctggtggccatggagccccagggcagctttgtggtgatgccagatgctgtgaccatgggctctgtgtttggccgcagcacagccctgaacatgcagagcagccagctgaacaccccccaggatgccagctgcacccacatcctggtgttccccaccagcagcaccatccaggtggccccagccaactacccaaatgaagatggcttcagccccaacaatgatgacatgtttgtggacctgcccttcccagatgacatggacaatgacatcggcatcctgatgacaggcaacctgcacagcagccccaacagcagccctgtgcccagccctggcagccccagcggcattggagtgggcagccacttccagcacagccgcagccagggcgagcggctgctgagccgggaggcccctgaggagctgaagcagcagcccctggccctgggctactttgtgtccacagccaaggccgagaacctgccccagtggttctggagcagctgcccccaggcccagaaccagtgccccctcttcctgaaggccagcctgcaccaccacatctctgtggcccagacagatgagctgctgcctgccaggaacagccagagggtgccccaccccctggacagcaagaccaccagtgatgtgctgcgctttgtgctggagcagtacaatgccctgtcctggctgacctgcaacccagccacccaggacaggaccagctgcctgcctgtgcactttgtggtgctgacccagctgtacaatgccatcatgaacatcctgtag

SEQ ID NO: 185972 - DNA, 9530 bp, Artificial Sequence
  derived and/or modified sequence
cccccccgccagcccgggcccgctgcccccggcgcggcgtcgccgcggcgcctcccgcctgcccgccggccctcgcgccctcccccggcggcggcggcggcccggccgccccgcgctccccggcgaggcgccgccgcccggcccggcctcgcctcggacgcctcgctccgacatgccccgctctggcggccgggctcgcggaggatcatgactgcggcagcgaactgggtggcgaacggggcgagcctggaggattgtcactccaacctcttttcgctggctgaactcacgggaatcaaatggcgtaggtacaattttggagggcatggggactgtggacccataatttcagccccagcccaagatgatccaattctgttaagtttcatccgctgtctgcaagctaacctgctttgtgtatggcgtcgtgatgtcaaaccagattgcaaagagttatggatattctggtggggagatgaacccaacctagtgggtgtaatacatcatgaactgcaggttgtggaagaaggactctgggaaaatggcctttcctatgaatgtaggacgctgctcttcaaagcgatccacaatctgttagaaaggtgcctaatggataagaacttcgttaggattgggaaatggtttgtccgaccctacgaaaaggatgaaaagccagtcaacaaaagtgagcatttgtcctgtgctttcacattctttctgcatggagaaagtaatgtatgcacaagtgtggagattgcccagcaccagccaatttatttgatcaatgaggagcatatacacatggctcagtcttcacctgcaccatttcaagtactggtaagtccttatggcttaaatgggacgctaacaggccaagcatacaagatgtcagacccagccactcgtaagttgattgaggaatggcagtatttctacccgatggtgctaaaaaagaaagaagaatcgaaagaggaagacgagttgggatatgatgatgatttccctgtggcagttgaagtaattgttggtggtgttcggatggtttacccttcagcatttgttttgatctctcagaatgacatcccggttcctcagagtgttgccagtgctggaggccacattgcagttgggcagcaagggcttggtagtgtgaaggacccaagtaactgtgggatgcctctgacccctcccacctctccagaacaggctatcctaggtgagagtggaggtatgcagagtgctgccagtcacctggtttcccaagatggagggatgataacgatgcacagtccaaagagatcggggaagattcctccaaaactccacaatcatatggtccatcgagtctggaaggaatgcatcctcaacagaacccagtccaagaggagccaaatgtcaactccaactcttgaagaagagcctgctagcaatcctgctacttgggattttgtggatccaacccaaagagtcagctgttcttgttccaggcataagcttttaaaacgttgtgcagtcgggcccaatcgacctcccacagtatctcaaccagggttcagtgcaggaccatcatcatcttcatctttaccacctcctgcttcttctaagcacaaaacagcagaaagacaggaaaaaggagacaagctgcaaaagagacccttaataccatttcaccataggccctctgtggccgaagaattatgcatggagcaagatacaccaggacagaaactagggttggcagggatagactcctccttagaggtgtctagcagtaggaaatatgataagcaaatggccgtgccttccagaaatacaagcaagcaaatgaatctgaatcctatggattcacctcattcccctatatcccctctgccaccaacactcagccctcagccacgaggtcaggaaacagagagtttggacccaccatcggtccctgtgaatccagccctttatggaaatggactagaactccagcagttgtctactctggatgacagaactgtcctcgtaggccaaagactgcctctcatggcagaggtcagcgagacagccttatattgtgggattaggccctcgaacccggagtcatcagaaaagtggtggcatagttatcgtctcccacccagtgatgatgctgagttcaggcctccagagctccagggtgagagatgtgatgccaaaatggaggtaaactcagagagcactgcattgcaaagactcttagcacaacctaacaaacggtttaaaatctggcaagacaaacagccccagttgcagccactccacttccttgacccattgcctctatcacaacaacctggagacagtttgggagaagtgaatgacccatatacctttgaagatggtgacataaaatacatctttacagccaacaagaaatgcaaacaagggacggagaaagattccctgaaaaagaataagtcagaggatggatttggtaccaaggatgtcactacaccaggtcattccacgccggtgcctgatgggaaaaatgccatgtctattttcagttctgctactaaaacagatgtccggcaggataatgctgctggcagagctggctccagtagccttacacaggtaacagatttggcaccttccctgcatgacttagacaacatctttgataattctgatgacgacgaacttggggctgtatcacctgctctgcgctcatcaaaaatgcctgcagttgggacagaagaccgacctcttgggaaggatggaagagctgctgttccttatccaccaacagttgcagacttgcaaaggatgtttcccactccaccatctttggaacagcatcctgcattttctcctgtgatgaattataaagatgggatcagctcagagacagtgacagcattaggcatgatggagagccctatggtcagtatggtttcaacacaactcacagaattcaaaatggaagtggaagatggattaggaagtcccaagcccgaggaaattaaggacttttcatatgtgcacaaagttccatcctttcaaccttttgtgggatcctccatgtttgctccactgaagatgttgccgagccattgtttgctacctctgaagatacctgatgcctgtctgtttcggccttcatgggcaattcctcctaaaattgaacaactgcccatgccccctgcagccactttcattagagatggctacaataacgtgcctagtgttgggagcctagcagatccagactatctgaacacaccacagatgaacacacccgtgacgttgaacagcgctgccccagccagcaatagtggggcaggagtcctaccatctccagcaacccctcgcttctctgtccccacaccacgaacccccaggaccccaagaactcccagaggtgggggcactgccagtggtcaagggtctgttaagtatgatagcaccgatcaaggatcaccagcctccaccccctctactacacggcccctcaactctgtggagcccgccaccatgcagccaattcccgaagcccacagcctctatgttaccctgattctctccgattccgtgatgaatatctttaaagacagaaactttgacagctgttgcatctgtgcctgcaacatgaacatcaaaggggcggatgtcgggctttacatccccgattcttccaatgaggaccagtaccgctgtacctgtgggtttagtgcgattatgaaccgcaaacttggctacaattcaggactcttccttgaagatgagttggatatttttgggaagaattctgatattggtcaggctgcagagaggcgcttaatgatgtgtcagtccaccttccttcctcaggtggaaggaaccaaaaaaccccaggagccacccataagccttctcctcctcctccagaatcaacacacacaaccttttgcttcactgaatttcctggactacatttcctctaacaatcgccaaactcttccctgtgtaagctggagttatgaccgggtgcaagcagataataatgattactggacggaatgctttaatgcgttggagcaggggcggcagtatgtggataaccccactggtggaaaagtggacgaagctctggtgagaagtgccactgtgcactcttggcctcacagcaatgtgctggacatcagcatgctctcctcccaggatgtggttcgtatgctgttgtccctgcagccctttctccaagatgccatccaaaagaagcgcacgggcaggacctgggagaacatccagcatgtgcagggaccactcacttggcagcagttccataaaatggcaggacggggaacctacggttcggaagaatctcctgagccgttgcccatccccactctgctggtaggctatgacaaggatttcctcaccatctcgccattctccttgccgttttgggagaggctcttgttggacccatatgggggccaccgtgatgttgcctatattgtggtgtgtccagaaaatgaggccttgctcgaaggagccaaaactttcttcagggacttgagtgctgtatacgagatgtgtaggcttgggcagcacaagcccatctgcaaagtgctacgtgacgggatcatgcgcgtgggaaaaactgtggcacagaagctgacagatgagcttgtgagtgagtggtttaaccagccttggagcggcgaggagaatgacaatcattccagactcaaactttatgcgcaagtttgccgccatcacctagcaccttatttagccactctgcagcttgatagcagcctattgataccacctaaataccagaccccaccagcagcagcacagggacaagctacgccagggaatgctgggcccttagctccaaatggatcagcagctcccccagctggcagtgcatttaatcccacctcgaatagtagttctacaaatcctgcagcaagtagttctgcatctggttcctctgtgccaccggtctcatcgtctgcctctgctcctggtattagccagataagcactacctcttcttcaggattcagtggtagtgttggagggcagaaccccagcactgggggcatttctgcggatagaacgcaagggaacataggctgtggtggagacactgaccctgggcagagctcttctcagccctcacaggatggacaagagagtgttacagaaagggagagaataggaattcccacggagcctgactctgcagacagccatgcccaccctccagctgttgtcatttacatggtggacccgttcacgtatgctgcagaggaggactccacttctgggaacttttggctgttgagcttgatgcgctgctacacagaaatgctggataatttacctgagcatatgagaaattctttcattctccagattgtgccttgccagtacatgctgcagacaatgaaggatgagcaagttttctacattcaatacttgaagtccatggcattttcagtgtactgccagtgcaggcgaccactgcctacacagatccacattaaatccctcacgggatttgggcctgcagccagcattgagatgaccctcaagaaccctgagcggcccagcccaatccagctttactcccctccctttatattggccccaatcaaagacaagcagacagagctgggagagacgtttggtgaggcgagccagaaatacaatgtgctcttcgtgggctattgtctgtctcacgaccagcgctggcttttggcttcctgcactgacctccatggggaattattagagacctgcgttgtaaatattgctttaccaaacaggtcacggaggagtaaagtatctgcacgtaaaattggactacagaagttatgggagtggtgcatagggattgtccaaatgacatctctaccctggagagttgtaatcgggcgacttgggcgtcttggccatggggagcttaaagattggagtatcctccttggagaatgttcactacagacaatcagcaaaaagctcaaggatgtgtgccggatgtgtggaatctctgccgcagactctccttctatccttagtgcctgcctggttgccatggagccccaggggtcctttgtagtgatgccagatgctgtcacaatgggctctgtttttggccgaagtactgcactgaacatgcagtcatctcagctcaacacccctcaagatgcttcttgtacacacatcttggtgttcccaacatcatcaaccatccaggtggctccagccaactaccccaatgaagatgggtttagccccaacaatgatgatatgtttgttgaccttccattcccagatgatatggacaatgatattggcatattaatgactgggaacctccattcctctcccaactcttccccagtaccctccccaggctctccttctggaattggtgtgggctctcacttccagcatagtcggagccagggtgagcgtcttctttctagagaagcaccagaggagctaaagcagcagcccctggcccttgggtattttgtatcaactgccaaagctgagaatcttccccagtggttttggtcatcgtgtccccaggctcaaaaccagtgccctctcttcttaaaggcttcgctgcatcaccacatttcagtagcacagacagacgaacttctgcctgccaggaattctcagcgggttccacaccctcttgactccaaaaccacgtcggatgttttaaggtttgttttggagcagtacaacgctctgtcctggctcacgtgcaatccggccacccaggaccgtacttcctgccttcccgtccactttgtggtgctcactcagttgtacaatgccatcatgaatatactttaattggaaaagcacttgttctctctggctcagttccttctccctgcaacctcagtccaaggaacctgctacactctgcaaataacccacatccttttcttcagaccactctccacagtcctgcactgtgattccttctcagcaggcacatgtcaattctgcagtgttcattaccagagtgactccttgacacttctctcatggacctggaaacttccataagtggtgactttcagccagtgcggtggtgtgtgtagccccaaccactggtccccaggaagtggtggtggttgatggcttttcagcgggaaacagaagagacagtgtccttttgcacaagagtctgtgttttcagcctctgtatacaattgagggcagtctagccctttggatgaaatcctcttagttactggtgtatggcctgtgggttacctgaactccataatctgggactttttaaaaataagaaccagctcaagtacatggtttcatactggggtttctgtctccctagtgttcccatccagattagcatgagtgctttggttgacttcaaacctgtgtgtcaatgcagaaggtctggagacagcttcattttgtttatttattttaatttgttttgtcatatggtttttgtgactttatttttttaattcacaaggaccaggtacagtagctgaaacccaattcagatccaccataggattctttgactacatacctctgtcctagaagccggaaaaggagtaaaaacacattggggagatcatgcctaaaagtaatatattcaaaaccacccagcagtaggttttgttaacaacaaactggattttaaaagttctgccatgttaagtggccagcatttcatgaaggataacatttttatacagaaggcagtcaagctcaactcagagccatggaggcaagtaccttaattagttttatatagtcacaacggaaatatattttctagtgaattcttattggaagccaggtctctcctctcattagatcaaaagggacttatgtacatacaacaattgaaagtgtttgctcatgaaatcagttataaatatggtgaattttttctggaccataggaatattatttcaaagaaatattacaacttaaccattaaattagtacttgaagttgagcctttgtggtgggactttttaaaaaaatgcctttttaaagcattaatggctaattgaagtattttatgactcctcattcctggcccagagggttgtctttgaaaccctgtttctaacccttgtgttgtgtgtttctgtctgaggacagtgggtgtgtactggcctcccgggagccactgtgaccaggcctttgagctcttgtcatctgtggagagaatcatgcaaattttaaaagttcttccaagagacttccatgtcctggttattaacaaaaaaggaaaaatgtaataattgatatgattttgtaaaagtatttttcttgaaataatctaaagtttaaaacattatattaaaaaaaaagttgtgtggtgggaatgtgaaagcagagaaataacttgtaaatggataattttgttctctgtaccaccagttgaagggggggttgactttcgcaatgtataggataaaaaatctgatatatcaaaccatttgtatctaatgtgtacagtgtaaaattgactttaaaaatattgcagtgctattttttcttaatcagaaaggaaaattctcaaggccttttgaagagcataagaagatgaagattgtaaacttgtataaaattatcttggtgagaagacaaattgtaaagtagatatttgtaatcttttaccactttggggttgcttttttcccggaattcatcagaactttgaattttttttttaaatgggctgtttttaatgcaggggcttttcttccctagaaacccaattctaagcagaaaaagaaaaaaaacacaaaaaataaaaaacccctacaaaaaaactttaaaaaaaatggcagcaaagggtagttttcatctggtgtcttttatttaagttttttaagttaagaaaagctggtgacatatttatacgtttttgtgcaaaaataaatgaatggcaatagattttaaaaaatcttattatgtacttctgtgtgaaaaagtctgtataatatttcccttaaatatgcattattttacttgtgagttttttactgaattaatctgaaatgtacaagccctggatttgctacagagtgagaagttattttatttttttttatttttaattttggaaattctgcagaaatcagaactcttaccatggtttgaacaaaaaaaggggaaatggggaggggaaaagggtgggattgtccagcatgcttgtatgtatatttcagaaccttttttaaatgtaaaagctgtacatttctgggaagttctgaatttcttttgtttccttttttccttcaagcattttgcagtgagcttcttttatatatagcaaacaatttgaaagaatacaaaaatatgtgaagttcatttaaaaaaataactacagtatagcgctggtacagtacactaaaagactttgataaaaagaaacaataataaaaggcctccattttaaatgtcattcatatataccttgtggatgagagctatatacttttacacacttttttagaggaataaattattgaattactgaa

SEQ ID NO: 185973 - DNA, 6633 bp, Artificial Sequence
  derived and/or modified sequence
atgaccgccgccgccaactgggtggccaacggcgccagcctggaggattgccactcaaatttgttctctttggctgagcttacggggatcaagtggaggcgctataactttggtggccacggggattgcggacccattatctccgcccctgcccaggatgaccccatcctcctgtctttcattcggtgtttacaggctaacttgctgtgtgtgtggcggcgtgacgtgaaaccggactgcaaggagctttggatattctggtggggcgacgagcctaacctcgtgggggtcattcatcacgagctgcaagtggtcgaggaggggttgtgggagaacggcctgagctatgagtgccgcactttactttttaaggctattcacaacttgctggagcgatgcctaatggacaagaattttgtgcggattggaaaatggttcgtgcgcccgtacgagaaggacgaaaagccagtgaataagagtgaacatctctcatgcgcctttacctttttcctacatggcgagtcgaacgtgtgcacctccgtcgaaattgcacagcatcagcccatctacctcattaatgaagagcatattcatatggcacaatcttctccggcacctttccaggtacttgtctcaccttacggactcaacggcaccctgactggccaagcatacaagatgagcgaccctgccacacgaaagctcattgaggaatggcagtacttctatccaatggtgttaaagaagaaggaagagagtaaagaggaagatgagctgggctatgacgatgacttccctgtggctgtggaagtaattgtggggggcgtgcgaatggtgtacccctccgccttcgtactgatctctcagaatgacatcccagtgccacagagcgtggcctctgccgggggacacatcgcagttggtcaacagggcctcggctcagtcaaagatcctagtaactgtggcatgccccttactcctcccaccagtccggagcaggccattctcggagagtctggtgggatgcaatccgccgccagtcacctggtgtcccaggacggaggcatgatcactatgcatagccccaaacgctctggcaaaattccccctaaactgcacaatcacatggtccatagagtgtggaaagagtgtatcctgaatcgtactcagtccaagaggagccagatgtcgacacccacattggaagaagagccggcaagcaatcctgccacctgggatttcgttgaccctacacagcgtgtttcatgctcatgctcgcgacacaaactcctgaagcgatgcgccgtggggcccaatagaccaccaaccgtaagtcagccaggtttcagcgctggaccgtccagttcttccagccttcctcctccagcctctagcaagcataaaaccgctgaaagacaggagaagggagataaattgcagaagcgcccactcatcccattccatcacaggccgtccgtagccgaagagctttgtatggagcaggatactcccggacagaagttgggactcgccggtatcgacagcagtttagaggtgagctcatcccgcaaatatgacaagcaaatggcagttccctctaggaataccagtaaacaaatgaacttaaaccctatggacagcccccacagccccatttcccccctcccaccaactctgtcgccccagcctaggggccaggagaccgagagtctcgatcctcctagcgtgcccgtcaatcctgccctctatgggaatggcctggaactgcagcagctttccacccttgatgatcgaacagttctagtgggccagaggcttccactcatggccgaggtgagcgagactgccctgtactgtggcattagaccaagtaatccagagagttctgagaaatggtggcactcctataggctacccccctccgacgacgcagaattccgcccccctgagttgcagggggaacgttgcgatgctaagatggaggttaatagcgaatcaaccgcactgcagagactactcgcccagccgaacaaaaggttcaaaatttggcaggataagcagccgcaactccagcccctacactttctcgaccctttgccactctcgcagcaaccaggcgatagcctaggagaggttaacgacccttatacatttgaggatggggatatcaaatatattttcacagccaataaaaagtgcaagcagggcactgagaaagatagtttgaaaaagaataaaagcgaggacggcttcggaactaaggacgtaactacgcccggccactccacccctgtgccagatggaaaaaatgccatgagtattttttcttcagctacaaaaaccgatgtcagacaggataatgcagcggggcgagctggctccagttcattgacacaggttaccgatttggccccttcattacatgacctggacaacattttcgacaactctgacgatgatgaactcggcgctgtttcacccgccttgcgcagtagcaagatgcccgctgttggcactgaggataggccattaggaaaggatgggagggcagcagtgccttatcctccaaccgtcgccgatctgcagagaatgtttcccacccccccttcactggagcagcaccctgccttttcccctgtgatgaactataaggacgggatctcttcagagaccgtgactgctctgggaatgatggagagtccaatggttagcatggtttcaacgcaactgacggagtttaagatggaagtggaggatggactgggttcccctaagcccgaagagatcaaagacttcagttacgtgcacaaggttccgagcttccagcccttcgtcggtagctccatgtttgctcctctgaaaatgttacccagccattgcctgctgcctctaaagatccctgacgcctgcctgtttcgcccctcatgggctatcccaccgaagatcgagcagctgcctatgccgccagccgcaacttttatcagggacgggtataataatgttccatccgtgggaagtctcgccgaccccgattatcttaacaccccccagatgaatacacccgtcacattgaactccgccgcaccagctagcaacagcggcgcgggggtgttgcctagtcccgctactccacgcttttcagtccccacgcctagaacacccaggactccccgcactcctagagggggcggcacagctagcggtcagggatccgttaagtatgattctaccgatcagggctctcccgcctccacaccaagtacaactagaccgttaaattctgtagaacctgcaacgatgcagcccatccctgaggcccattccctatacgttaccctgattctctcagattccgtgatgaatatcttcaaagatcggaactttgattcctgctgcatttgtgcctgtaatatgaatattaaaggcgcagatgttggtctctacatccctgacagctcgaatgaggaccagtaccgatgtacatgtggcttcagtgcaattatgaacaggaaactgggttataattctggactattcctagaggacgaactggacatattcggcaagaattcagatattggccaggctgcagagaggcggctgatgatgtgtcagagcaccttcctgccacaagtggagggaactaagaaacctcaggagccaccaatcagcctgcttttgttgctgcagaaccagcacacccagcccttcgctagcttaaacttcctggactacatttccagcaacaatcggcagacattgccttgtgtgagctggagttacgaccgcgtacaggctgacaataatgactactggacagaatgttttaatgctctggaacagggcagacaatacgtggataacccaactggagggaaggtggatgaagctttggtccggtcggcaaccgttcacagttggccccatagcaacgtgcttgatatcagcatgctctccagccaagatgtggttagaatgctcttgagcctccagccctttctccaggacgccattcagaagaaaagaaccggccggacttgggaaaatattcagcacgtgcaggggcccctgacctggcagcagttccacaaaatggccggaaggggcacatatggcagcgaggaatccccagaaccacttccaatccccactcttctggtgggctatgacaaggacttccttactatctcccccttcagccttccgttttgggagagattactcctggatccctacggaggccatagagatgtggcatatatcgtggtgtgcccagagaatgaagccctcctggaaggcgcaaaaacattttttagagaccttagcgccgtatacgaaatgtgcaggctgggccagcacaagcctatttgcaaggtactgcgggacgggataatgagagtggggaaaacagtggcacagaagttgactgacgaactcgtttccgagtggttcaaccagccctggagtggcgaggagaacgacaatcatagccgtctcaagctgtatgcacaggtgtgccgacaccatcttgcaccctatttggctaccctgcagttggattcttcacttctgatccccccgaaataccagacccctcctgctgccgcacaaggacaggcaacacccggaaatgcgggtcccctggctccaaatggatcagccgcaccccccgcgggctctgcgtttaaccccacttccaatagctccagcaccaatcctgccgcaagctcaagtgcctcaggctcatctgtcccgccagtctctagcagcgcgtctgcgccggggattagccagatcagcacgaccagttcttcaggcttttctggctcagtgggaggtcagaacccatctacagggggcatctccgctgaccggacccaggggaacatcgggtgcggaggagatacagaccctggtcagtcttcatctcagcctagccaggatggacaggagtctgtgaccgagcgcgaacggatcggcattcccacagaacctgattccgcagacagccatgctcacccaccagctgtggttatctatatggtggatccctttacatacgccgctgaggaagactccaccagcggcaacttctggctcttgtcactaatgaggtgttatacagaaatgctcgacaatctgcccgagcacatgcgcaattctttcatactgcagattgtaccgtgtcagtacatgctgcagactatgaaagatgaacaggtgttttacattcaatatttaaagtccatggcattttctgtgtattgccagtgcaggcgaccgttgcccacgcagattcatattaaaagcctcacaggcttcggccccgccgcctccattgaaatgacactgaagaatccagaacgtccatcccccatacagttgtacagtccgccattcatcctagccccgataaaggacaagcagacggaactcggggagacattcggggaggcctcccagaagtataatgttctcttcgtcggctactgcttgtcacacgaccaacgatggctcctagcctcttgcacagacttacatggcgaattgttggaaacttgcgtggtaaacatcgccctcccgaacagaagtaggagatcgaaggtgtccgccagaaaaatcgggcttcagaagctctgggagtggtgcatcgggatcgtacagatgacatctttgccctggagggtcgtcatcggccgcttaggtcggctgggacatggggaactgaaagactggagcatattactgggggaatgttctctgcagacaatatctaaaaagcttaaagatgtctgcaggatgtgcgggataagcgcagcagattcccccagtattttgagcgcctgtcttgtcgctatggagcctcaagggtctttcgtcgtgatgcctgacgcagttacaatgggttcagtgttcggcagatcaactgccctcaacatgcaaagcagccagctgaatactccacaggatgcttcctgcacgcatatattagtgtttcccaccagtagcactatacaggtggctcctgcaaattatcctaacgaagacggattcagccctaacaacgatgacatgtttgtggatttgccttttcctgatgatatggacaacgacatcggcattctcatgaccggaaaccttcactcctccccaaactcttctcccgttcctagcccagggagtccgtctgggataggggttggctcccactttcagcattcgcggagccagggggagcgcctcctctctcgcgaggcccctgaagagctcaagcagcagcctctcgccctggggtatttcgtcagcaccgcaaaagcggaaaatctaccacagtggttctggagttcatgtccccaggcccagaaccagtgcccccttttcctcaaagcttccctacatcaccacatttctgttgcccagacagacgagttgctcccagcccggaacagccagcgcgtcccccaccccctggatagcaagactacctcggacgtgctcagatttgtgctggaacagtacaacgctctgagctggctgacctgtaaccccgccacccaggacaggacaagctgtctgccggtgcactttgtggtcctgacccaattgtacaacgcaatcatgaatatcctgtag

SEQ ID NO: 185974 - DNA, 6633 bp, Artificial Sequence
  derived and/or modified sequence
atgaccgccgctgcgaactgggttgccaacggagcttcactggaagactgtcatagtaatctttttagtctggccgagttgacagggatcaaatggcgacgatacaattttggcggtcatggtgactgcggacccatcatcagcgctcctgcccaggacgaccctattctactctcttttattcggtgtttgcaggcaaacctgctatgtgtatggaggagagacgtcaagcctgactgcaaagagctgtggatcttctggtggggagatgaacctaacctggtaggcgtgattcatcatgaactccaagtcgtggaggagggtttgtgggagaacggtctctcatacgagtgtcgcaccctgctttttaaagctatccacaatctgctggaaaggtgtctaatggataagaacttcgtgcgtatcggaaagtggttcgttcggccatatgagaaggacgaaaaaccagtcaacaagtcagagcatctctcgtgcgcttttacctttttcctgcatggtgagtccaatgtttgcaccagcgtggaaatcgcgcagcatcagcctatctatctgatcaacgaggagcacatccatatggctcaaagttcacccgctcctttccaggtcctggtttccccctatggcctaaatggtactctgacaggtcaagcctataaaatgtcagaccctgccacacgcaagctgatcgaggagtggcagtacttttatcctatggtgcttaaaaagaaggaggaatccaaagaagaagacgagctggggtatgacgacgactttcctgtggctgtggaggtgatcgtgggtggagtgagaatggtctatccctccgcatttgtgctgatcagccaaaacgatattcctgtacctcaatctgtcgccagcgcgggaggtcacattgccgtgggacagcagggtctgggcagtgtgaaagacccttctaactgtggaatgcctttaaccccacccacaagcccggagcaggcgattcttggcgaatccggagggatgcagtccgctgccagtcatctagtttcccaggacggagggatgattaccatgcatagccccaagagatctggcaaaatcccaccaaaacttcacaaccacatggtccatcgagtgtggaaggaatgcatcttgaatcgaacacaatccaagagatcccagatgagcacccctacattggaggaggagcccgcaagcaacccagctacatgggactttgtcgaccctacgcagcgggttagttgctcttgttcccgacacaaactgcttaagcgctgtgctgtgggtcccaaccggccacccacagtcagtcagccgggattttctgcagggccatcatcttcctcttctttgcccccaccagcttctagtaagcacaagactgctgaaaggcaggagaagggagataagctccagaagagacctcttatcccttttcatcaccggccatctgtggccgaggaactgtgcatggagcaagacacaccaggccagaagctgggactcgccggtattgatagcagtctagaagtctcatcctcgaggaagtatgataaacaaatggccgtgccaagtcgcaacacttctaaacagatgaatctaaatcccatggactcaccgcactctcccattagcccgctgccgcctacactttcaccacagcccaggggtcaggaaacggagtctctcgacccaccatctgtgcctgtcaaccccgcactgtacggaaatgggctcgaattgcagcagttatcgaccttagacgaccgcactgtgcttgtgggacaacgactgccgcttatggctgaagtgtccgagaccgccctatattgcggaatccggccttccaaccccgaaagctctgagaagtggtggcactcctatcggttgccaccctccgacgatgcggaatttaggccacctgaactacaaggggagcggtgcgatgccaagatggaagtaaactcagaatcaacagcgcttcagaggctgcttgctcagcctaataaaaggtttaaaatctggcaggataagcagccccagcttcagcctctgcactttctggaccccctgcccctgtcccagcagcccggtgacagtctgggcgaagtcaacgatccctacacgtttgaggacggggatatcaagtacattttcaccgctaacaaaaagtgcaagcaaggaactgagaaagactctctgaaaaagaataagagcgaggacggctttgggacgaaagacgtcaccacgccagggcatagtactccagttccagatggaaagaatgccatgagcatcttttcgagcgcgacaaaaacggatgtacgacaggataacgccgcaggtcgagccggatcatcttccctgacccaggtgactgacttggcgccttccctgcacgacctcgataatattttcgacaatagcgacgatgacgaactgggggctgtctcccccgctcttagatcatccaagatgcccgctgttggcaccgaggatcgtcccctggggaaagatgggagagcagccgtaccgtacccccctactgttgccgatctccagagaatgtttcctaccccacctagtctggagcagcaccccgctttttctcctgtgatgaattacaaagacggcatcagttctgaaaccgtcacagctttgggaatgatggagagtcctatggtgagtatggtaagcacccagcttacagaattcaaaatggaggtggaagatggacttggtagtccaaagcctgaagagatcaaggacttcagctacgtccacaaggtccctagtttccagccattcgttggaagcagtatgttcgctccactcaaaatgctgccctctcactgcctcctccccctgaaaatccctgatgcatgtctgtttcgcccaagctgggccattcccccaaagatagaacaactaccaatgccaccagccgctaccttcataagggatggatacaataatgtgccttccgttggctcactggcagatcctgactacctgaatacccctcagatgaatacccccgtcacactgaattcagccgctcctgcctccaactctggcgcaggcgtgctgccttcgcccgctacacctcgctttagcgtgcctacccccaggacacctcgtacccctagaacaccacggggtggcggtacagcctccgggcagggctcggtcaaatacgattctactgaccagggctcgccggcatctacgccatcgactaccaggcctctcaattctgtggaacctgccaccatgcaaccgatcccagaagcccactcactgtacgtcaccctaatcctctcagacagtgttatgaatatctttaaagacagaaacttcgactcctgttgcatttgtgcatgcaacatgaacataaagggggcagacgtcggcctttacatccctgattccagtaatgaagaccagtacagatgcacgtgcgggtttagtgccatcatgaaccgtaagttgggttacaacagcggcctctttcttgaggacgagctggacatatttgggaaaaactcagacattggacaggccgctgaacgtagactgatgatgtgccaatctacatttctaccgcaggtcgaagggaccaagaagccgcaggagcctcccatttctctactgctgttgctccagaatcaacatacccaacccttcgcctccctgaactttctcgactatatcagtagtaataacagacaaacactgccgtgcgtgtcatggagctacgatcgcgtacaggctgacaacaatgactattggactgaatgctttaatgcactggagcagggacggcagtatgttgataaccccactggcggtaaagtcgacgaagccctcgtacgtagcgcaactgtacacagctggcctcattccaacgttttagacatcagcatgctgtcatcccaggacgtcgtgagaatgctcctgtcactgcagcctttcctgcaggatgccatccagaagaagaggaccggcaggacatgggagaatatacaacacgtacagggacccctgacatggcaacagtttcacaagatggccggacgagggacatacggatcggaagagagccctgagccgctcccaataccaactcttctggtgggttacgataaagatttcctgacaatttcccctttttcccttccattctgggaacgccttctgttagacccctacgggggacatagagatgtggcatacatcgtggtgtgccccgagaatgaggccttgctagaaggagccaagaccttttttcgagatctgagtgcagtgtatgagatgtgccgccttggacagcataaaccaatctgtaaagtgctccgggacggtattatgagagttggaaagaccgtagcccagaaattgacggacgaactggtgagcgaatggttcaatcagccctggagcggcgaagaaaatgacaaccactcccgtctgaaactctatgcgcaggtgtgccgccaccaccttgcaccctatctggccactctgcagcttgattcatccctacttatccccccaaaatatcagacccctcccgcagcagctcaagggcaggcaactcctgggaacgctgggccactcgctcctaatgggtcagccgcacccccagccggttcagcttttaatccaacctcaaattctagtagtacaaaccctgctgcaagctcaagtgcaagcggaagttctgtgccgccagtgtcctcctcagccagcgcccctggcatcagtcagatttccaccaccagtagctctggcttctcagggagcgtgggagggcagaacccgtcaacggggggaatcagtgcagaccgcacgcaaggcaatatcgggtgcggaggcgatacagaccccggacaatccagctcacagccctcacaggacggtcaggagtctgttacggaacgcgagaggattggcattccaacagaacctgactccgccgattcccacgcccatcctcccgctgttgtgatctatatggtagaccccttcacctatgccgcagaagaagacagcaccagcgggaacttctggctactgtcactgatgagatgttataccgaaatgctggataatctccccgagcacatgcgcaacagcttcattttgcaaatcgtgccttgtcagtacatgttgcagactatgaaagacgagcaggtgttttacattcaatacttgaagtccatggcgttttcggtttattgccaatgtcgaagacctctgccaacgcagatccatatcaaatctctgaccgggtttggacctgcagcttcaattgaaatgactttgaagaacccagaaagaccgtctcccatacagctttactcccccccattcattctggctccgatcaaggataaacagacggagctgggcgaaactttcggggaagcttcgcaaaagtataacgttctgtttgtgggatactgcttgtctcatgaccaacggtggttacttgccagctgtactgatttacacggtgaacttttggaaacctgcgttgtcaacatcgccctgcctaaccgatccagacggtctaaggtttcggctcgcaagatcggtcttcagaaactatgggagtggtgcattggcattgtgcagatgacttctctgccctggagggtggttatcggaagattgggaaggcttggccatggagagttaaaggactggagtatactcctgggggagtgttccttgcaaaccatttcaaaaaagctgaaggacgtgtgccgtatgtgtgggatcagcgcagcggacagcccctccatcttgagtgcctgccttgtcgctatggagccacaaggcagttttgttgtcatgccagacgccgtcactatgggcagcgtgtttggcaggtccacggcactcaacatgcagtcatcacagctgaacaccccacaggacgctagctgcacacacattctcgtctttcccacctcatctaccattcaagtcgcccctgccaactatccaaacgaggatgggttctcccccaacaacgatgatatgtttgttgacttgccgtttcccgatgatatggataacgacataggcatcctgatgacaggtaatctgcactcttcccctaatagtagccctgttccctctcccggaagccccagtggaatcggcgtcggatcacacttccagcacagtagaagccagggcgagcgactgctcagtagagaagctccggaggagctcaaacagcagccccttgccttgggatattttgtgagtactgccaaggcggagaatctgcctcagtggttttggtcctcatgtccacaggcacagaaccagtgcccattgttcctgaaggcttcgctgcatcaccatatctctgtcgcccaaacagatgagcttctgccagccaggaactctcagagagtccctcatcccctagattcgaaaaccacatctgacgtgttgcgatttgtcttggagcagtacaacgcattatcttggcttacatgcaacccagcaacgcaagacaggactagctgtctgccagtccatttcgtcgtgttaacacagctgtacaatgccattatgaacatcctgtac

SEQ ID NO: 185975 - DNA, 6633 bp, Artificial Sequence
  derived and/or modified sequence
atgaccgccgccgccaactgggtggccaacggcgccagcctggaggactgccacagcaacctgttcagcctggccgagctgaccggcatcaagtggagaagatacaacttcggcggccacggcgactgcggccccatcatcagcgcccccgcccaggacgaccccatcctgctgagcttcatcagatgcctgcaggccaacctgctgtgcgtgtggagaagagacgtgaagcccgactgcaaggagctgtggatcttctggtggggcgacgagcccaacctggtgggcgtgatccaccacgagctgcaggtggtggaggagggcctgtgggagaacggcctgagctacgagtgcagaaccctgctgttcaaggccatccacaacctgctggagagatgcctgatggacaagaacttcgtgagaatcggcaagtggttcgtgagaccctacgagaaggacgagaagcccgtgaacaagagcgagcacctgagctgcgccttcaccttcttcctgcacggcgagagcaacgtgtgcaccagcgtggagatcgcccagcaccagcccatctacctgatcaacgaggagcacatccacatggcccagagcagccccgcccccttccaggtgctggtgagcccctacggcctgaacggcaccctgaccggccaggcctacaagatgagcgaccccgccaccagaaagctgatcgaggagtggcagtacttctaccccatggtgctgaagaagaaggaggagagcaaggaggaggacgagctgggctacgacgacgacttccccgtggccgtggaggtgatcgtgggcggcgtgagaatggtgtaccccagcgccttcgtgctgatcagccagaacgacatccccgtgccccagagcgtggccagcgccggcggccacatcgccgtgggccagcagggcctgggcagcgtgaaggaccccagcaactgcggcatgcccctgaccccccccaccagccccgagcaggccatcctgggcgagagcggcggcatgcagagcgccgccagccacctggtgagccaggacggcggcatgatcaccatgcacagccccaagagaagcggcaagatcccccccaagctgcacaaccacatggtgcacagagtgtggaaggagtgcatcctgaacagaacccagagcaagagaagccagatgagcacccccaccctggaggaggagcccgccagcaaccccgccacctgggacttcgtggaccccacccagagagtgagctgcagctgcagcagacacaagctgctgaagagatgcgccgtgggccccaacagaccccccaccgtgagccagcccggcttcagcgccggccccagcagcagcagcagcctgcccccccccgccagcagcaagcacaagaccgccgagagacaggagaagggcgacaagctgcagaagagacccctgatccccttccaccacagacccagcgtggccgaggagctgtgcatggagcaggacacccccggccagaagctgggcctggccggcatcgacagcagcctggaggtgagcagcagcagaaagtacgacaagcagatggccgtgcccagcagaaacaccagcaagcagatgaacctgaaccccatggacagcccccacagccccatcagccccctgccccccaccctgagcccccagcccagaggccaggagaccgagagcctggacccccccagcgtgcccgtgaaccccgccctgtacggcaacggcctggagctgcagcagctgagcaccctggacgacagaaccgtgctggtgggccagagactgcccctgatggccgaggtgagcgagaccgccctgtactgcggcatcagacccagcaaccccgagagcagcgagaagtggtggcacagctacagactgccccccagcgacgacgccgagttcagaccccccgagctgcagggcgagagatgcgacgccaagatggaggtgaacagcgagagcaccgccctgcagagactgctggcccagcccaacaagagattcaagatctggcaggacaagcagccccagctgcagcccctgcacttcctggaccccctgcccctgagccagcagcccggcgacagcctgggcgaggtgaacgacccctacaccttcgaggacggcgacatcaagtacatcttcaccgccaacaagaagtgcaagcagggcaccgagaaggacagcctgaagaagaacaagagcgaggacggcttcggcaccaaggacgtgaccacccccggccacagcacccccgtgcccgacggcaagaacgccatgagcatcttcagcagcgccaccaagaccgacgtgagacaggacaacgccgccggcagagccggcagcagcagcctgacccaggtgaccgacctggcccccagcctgcacgacctggacaacatcttcgacaacagcgacgacgacgagctgggcgccgtgagccccgccctgagaagcagcaagatgcccgccgtgggcaccgaggacagacccctgggcaaggacggcagagccgccgtgccctacccccccaccgtggccgacctgcagagaatgttccccaccccccccagcctggagcagcaccccgccttcagccccgtgatgaactacaaggacggcatcagcagcgagaccgtgaccgccctgggcatgatggagagccccatggtgagcatggtgagcacccagctgaccgagttcaagatggaggtggaggacggcctgggcagccccaagcccgaggagatcaaggacttcagctacgtgcacaaggtgcccagcttccagcccttcgtgggcagcagcatgttcgcccccctgaagatgctgcccagccactgcctgctgcccctgaagatccccgacgcctgcctgttcagacccagctgggccatcccccccaagatcgagcagctgcccatgccccccgccgccaccttcatcagagacggctacaacaacgtgcccagcgtgggcagcctggccgaccccgactacctgaacaccccccagatgaacacccccgtgaccctgaacagcgccgcccccgccagcaacagcggcgccggcgtgctgcccagccccgccacccccagattcagcgtgcccacccccagaacccccagaacccccagaacccccagaggcggcggcaccgccagcggccagggcagcgtgaagtacgacagcaccgaccagggcagccccgccagcacccccagcaccaccagacccctgaacagcgtggagcccgccaccatgcagcccatccccgaggcccacagcctgtacgtgaccctgatcctgagcgacagcgtgatgaacatcttcaaggacagaaacttcgacagctgctgcatctgcgcctgcaacatgaacatcaagggcgccgacgtgggcctgtacatccccgacagcagcaacgaggaccagtacagatgcacctgcggcttcagcgccatcatgaacagaaagctgggctacaacagcggcctgttcctggaggacgagctggacatcttcggcaagaacagcgacatcggccaggccgccgagagaagactgatgatgtgccagagcaccttcctgccccaggtggagggcaccaagaagccccaggagccccccatcagcctgctgctgctgctgcagaaccagcacacccagcccttcgccagcctgaacttcctggactacatcagcagcaacaacagacagaccctgccctgcgtgagctggagctacgacagagtgcaggccgacaacaacgactactggaccgagtgcttcaacgccctggagcagggcagacagtacgtggacaaccccaccggcggcaaggtggacgaggccctggtgagaagcgccaccgtgcacagctggccccacagcaacgtgctggacatcagcatgctgagcagccaggacgtggtgagaatgctgctgagcctgcagcccttcctgcaggacgccatccagaagaagagaaccggcagaacctgggagaacatccagcacgtgcagggccccctgacctggcagcagttccacaagatggccggcagaggcacctacggcagcgaggagagccccgagcccctgcccatccccaccctgctggtgggctacgacaaggacttcctgaccatcagccccttcagcctgcccttctgggagagactgctgctggacccctacggcggccacagagacgtggcctacatcgtggtgtgccccgagaacgaggccctgctggagggcgccaagaccttcttcagagacctgagcgccgtgtacgagatgtgcagactgggccagcacaagcccatctgcaaggtgctgagagacggcatcatgagagtgggcaagaccgtggcccagaagctgaccgacgagctggtgagcgagtggttcaaccagccctggagcggcgaggagaacgacaaccacagcagactgaagctgtacgcccaggtgtgcagacaccacctggccccctacctggccaccctgcagctggacagcagcctgctgatcccccccaagtaccagaccccccccgccgccgcccagggccaggccacccccggcaacgccggccccctggcccccaacggcagcgccgccccccccgccggcagcgccttcaaccccaccagcaacagcagcagcaccaaccccgccgccagcagcagcgccagcggcagcagcgtgccccccgtgagcagcagcgccagcgcccccggcatcagccagatcagcaccaccagcagcagcggcttcagcggcagcgtgggcggccagaaccccagcaccggcggcatcagcgccgacagaacccagggcaacatcggctgcggcggcgacaccgaccccggccagagcagcagccagcccagccaggacggccaggagagcgtgaccgagagagagagaatcggcatccccaccgagcccgacagcgccgacagccacgcccacccccccgccgtggtgatctacatggtggaccccttcacctacgccgccgaggaggacagcaccagcggcaacttctggctgctgagcctgatgagatgctacaccgagatgctggacaacctgcccgagcacatgagaaacagcttcatcctgcagatcgtgccctgccagtacatgctgcagaccatgaaggacgagcaggtgttctacatccagtacctgaagagcatggccttcagcgtgtactgccagtgcagaagacccctgcccacccagatccacatcaagagcctgaccggcttcggccccgccgccagcatcgagatgaccctgaagaaccccgagagacccagccccatccagctgtacagcccccccttcatcctggcccccatcaaggacaagcagaccgagctgggcgagaccttcggcgaggccagccagaagtacaacgtgctgttcgtgggctactgcctgagccacgaccagagatggctgctggccagctgcaccgacctgcacggcgagctgctggagacctgcgtggtgaacatcgccctgcccaacagaagcagaagaagcaaggtgagcgccagaaagatcggcctgcagaagctgtgggagtggtgcatcggcatcgtgcagatgaccagcctgccctggagagtggtgatcggcagactgggcagactgggccacggcgagctgaaggactggagcatcctgctgggcgagtgcagcctgcagaccatcagcaagaagctgaaggacgtgtgcagaatgtgcggcatcagcgccgccgacagccccagcatcctgagcgcctgcctggtggccatggagccccagggcagcttcgtggtgatgcccgacgccgtgaccatgggcagcgtgttcggcagaagcaccgccctgaacatgcagagcagccagctgaacaccccccaggacgccagctgcacccacatcctggtgttccccaccagcagcaccatccaggtggcccccgccaactaccccaacgaggacggcttcagccccaacaacgacgacatgttcgtggacctgcccttccccgacgacatggacaacgacatcggcatcctgatgaccggcaacctgcacagcagccccaacagcagccccgtgcccagccccggcagccccagcggcatcggcgtgggcagccacttccagcacagcagaagccagggcgagagactgctgagcagagaggcccccgaggagctgaagcagcagcccctggccctgggctacttcgtgagcaccgccaaggccgagaacctgccccagtggttctggagcagctgcccccaggcccagaaccagtgccccctgttcctgaaggccagcctgcaccaccacatcagcgtggcccagaccgacgagctgctgcccgccagaaacagccagagagtgccccaccccctggacagcaagaccaccagcgacgtgctgagattcgtgctggagcagtacaacgccctgagctggctgacctgcaaccccgccacccaggacagaaccagctgcctgcccgtgcacttcgtggtgctgacccagctgtacaacgccatcatgaacatcctgtag

SEQ ID NO: 185976 - protein, 632 aa, Artificial Sequence
  derived and/or modified sequence
MQREEGFNTKMADGPDEYDTEAGCVPLLHPEEIKPQSHYNHGYGEPLGRKTHIDDYSTWDIVKATQYGIYERCRELVEAGYDVRQPDKENVTLLHWAAINNRIDLVKYYISKGAIVDQLGGDLNSTPLHWATRQGHLSMVVQLMKYGADPSLIDGEGCSCIHLAAQFGHTSIVAYLIAKGQDVDMMDQNGMTPLMWAAYRTHSVDPTRLLLTFNVSVNLGDKYHKNTALHWAVLAGNTTVISLLLEAGANVDAQNIKGESALDLAKQRKNVWMINHLQEARQAKGYDNPSFLRKLKADKEFRQKVMLGTPFLVIWLVGFIADLNIDSWLIKGLMYGGVWATVQFLSKSFFDHSMHSALPLGIYLATKFWMYVTWFFWFWNDLNFLFIHLPFLANSVALFYNFGKSWKSDPGIIKATEEQKKKTIVELAETGSLDLSIFCSTCLIRKPVRSKHCGVCNRCIAKFDHHCPWVGNCVGAGNHRYFMGYLFFLLFMICWMIYGCISYWGLHCETTYTKDGFWTYITQIATCSPWMFWMFLNSVFHFMWVAVLLMCQMYQISCLGITTNERMNARRYKHFKVTTTSIESPFNHGCVRNIIDFFEFRCCGLFRPVIVDWTRQYTIEYDQISGSGYQLV

SEQ ID NO: 185977 - DNA, 1899 bp, Artificial Sequence
  derived and/or modified sequence
atgcagagagaggagggcttcaacaccaagatggccgacggccccgacgagtacgacaccgaggccggctgcgtgcccctgctgcaccccgaggagatcaagccccagagccactacaaccacggctacggcgagcccctgggcagaaagacccacatcgacgactacagcacctgggacatcgtgaaggccacccagtacggcatctacgagagatgcagagagctggtggaggccggctacgacgtgagacagcccgacaaggagaacgtgaccctgctgcactgggccgccatcaacaacagaatcgacctggtgaagtactacatcagcaagggcgccatcgtggaccagctgggcggcgacctgaacagcacccccctgcactgggccaccagacagggccacctgagcatggtggtgcagctgatgaagtacggcgccgaccccagcctgatcgacggcgagggctgcagctgcatccacctggccgcccagttcggccacaccagcatcgtggcctacctgatcgccaagggccaggacgtggacatgatggaccagaacggcatgacccccctgatgtgggccgcctacagaacccacagcgtggaccccaccagactgctgctgaccttcaacgtgagcgtgaacctgggcgacaagtaccacaagaacaccgccctgcactgggccgtgctggccggcaacaccaccgtgatcagcctgctgctggaggccggcgccaacgtggacgcccagaacatcaagggcgagagcgccctggacctggccaagcagagaaagaacgtgtggatgatcaaccacctgcaggaggccagacaggccaagggctacgacaaccccagcttcctgagaaagctgaaggccgacaaggagttcagacagaaggtgatgctgggcacccccttcctggtgatctggctggtgggcttcatcgccgacctgaacatcgacagctggctgatcaagggcctgatgtacggcggcgtgtgggccaccgtgcagttcctgagcaagagcttcttcgaccacagcatgcacagcgccctgcccctgggcatctacctggccaccaagttctggatgtacgtgacctggttcttctggttctggaacgacctgaacttcctgttcatccacctgcccttcctggccaacagcgtggccctgttctacaacttcggcaagagctggaagagcgaccccggcatcatcaaggccaccgaggagcagaagaagaagaccatcgtggagctggccgagaccggcagcctggacctgagcatcttctgcagcacctgcctgatcagaaagcccgtgagaagcaagcactgcggcgtgtgcaacagatgcatcgccaagttcgaccaccactgcccctgggtgggcaactgcgtgggcgccggcaaccacagatacttcatgggctacctgttcttcctgctgttcatgatctgctggatgatctacggctgcatcagctactggggcctgcactgcgagaccacctacaccaaggacggcttctggacctacatcacccagatcgccacctgcagcccctggatgttctggatgttcctgaacagcgtgttccacttcatgtgggtggccgtgctgctgatgtgccagatgtaccagatcagctgcctgggcatcaccaccaacgagagaatgaacgccagaagatacaagcacttcaaggtgaccaccaccagcatcgagagccccttcaaccacggctgcgtgagaaacatcatcgacttcttcgagttcagatgctgcggcctgttcagacccgtgatcgtggactggaccagacagtacaccatcgagtacgaccagatcagcggcagcggctaccagctggtgtag

SEQ ID NO: 185978 - DNA, 1899 bp, Artificial Sequence
  derived and/or modified sequence
atgcagcgggaggagggctttaacacgaaaatggccgacgggcctgatgaatacgacacagaagcggggtgtgtacctctcttacaccccgaggaaattaagcctcaatcccattataatcatggctacggagagccactcggccggaaaacacacattgacgactacagcacctgggatattgtcaaagcaacacagtatggcatctatgagaggtgcagggaactggttgaggccggttacgacgttagacaacctgacaaagaaaacgtgaccctgctgcattgggccgccattaacaatcggatcgatcttgtcaagtactacatctccaagggcgctatcgtcgaccagctggggggagatcttaatagcacgcctctccattgggcaacaagacaaggacacctgtcaatggtcgttcaactcatgaagtacggcgcagatcctagtctcatagatggcgagggatgctcttgcatccaccttgcagcccagtttggtcatacctcgatcgtcgcctatctgattgcaaaagggcaggatgtagacatgatggatcagaacgggatgactccattaatgtgggccgcatatcggacccattccgtggaccccaccaggctgctcttaaccttcaatgtgagcgtcaatctcggcgacaaatatcacaagaataccgcgctgcactgggctgtcttggccggaaacactacagtcatctcactgctactagaggcaggagccaatgtggacgcgcagaacatcaaaggagaatccgcgctggatttggccaagcagcggaagaacgtgtggatgataaatcacctccaggaggcgagacaggcaaaaggatatgacaatcctagcttcctgcggaaactgaaggccgacaaagaatttcggcagaaagtcatgcttggcacccctttcctcgtaatttggctcgtgggttttatcgcagacctaaatatcgatagttggctcattaaaggcctcatgtatggcggagtatgggctactgtgcagttcctgtccaagagcttttttgatcattccatgcacagtgcgctgcctctcgggatctatttggccactaagttctggatgtatgtgacctggtttttttggttctggaatgatctcaattttctgtttatccatctaccattcttggcaaattctgtagccctgttttataacttcgggaagagttggaagagtgatccagggattataaaagctacagaggaacaaaagaagaagacaatagtggagcttgccgagacgggatccctagacctgtctattttctgttccacttgcttgatacgaaaaccagtgcggagcaaacactgcggtgtgtgtaatcgctgcatagctaagttcgatcaccattgcccctgggttggaaattgtgtgggtgccggtaaccacaggtactttatggggtacttgttctttttgttgtttatgatatgctggatgatctacggctgcattagttattggggactccactgcgaaaccacttataccaaggacgggttttggacatatattacacagatcgcgacttgtagcccatggatgttctggatgtttcttaattccgtatttcattttatgtgggttgcagtcctgttgatgtgtcagatgtatcagattagttgtctcgggatcaccactaatgaaaggatgaacgctcgaaggtacaagcatttcaaagtgaccactacctccatcgagagcccatttaaccacgggtgtgttcgaaatattattgacttctttgaattcagatgttgcgggttatttaggcctgtgatcgtcgattggactcggcaatacacgattgaatatgatcaaatatccggctccggataccagctagtttag

SEQ ID NO: 185979 - DNA, 1899 bp, Artificial Sequence
  derived and/or modified sequence
atgcagagagaggaaggattcaatactaaaatggccgatgggcccgacgagtacgacaccgaggcaggatgtgtccccttactgcacccggaggaaattaaaccacagagccactacaaccacggatatggcgaacccctgggccgaaaaacccacatcgacgactactccacctgggatattgtgaaagcgacccagtatggtatttatgaacgttgtcgcgaactggtggaggcgggatatgacgttagacagccggataaggagaatgttactctactgcactgggctgcaatcaacaaccgtattgatctcgttaaatactatatatctaagggggcaatcgtggatcagctggggggggaccttaattccactccactgcattgggcaacacgtcagggtcacctgtctatggttgtgcagcttatgaagtacggagctgacccatccttgattgatggggagggatgttcctgcattcatctagcagcccagttcgggcacactagcatcgtagcgtatttgatcgctaagggccaggatgtggacatgatggaccagaatggaatgacaccactgatgtgggccgcatataggacccactctgttgacccaacaaggctgctgctgacctttaatgtgtctgtcaaccttggcgataagtatcacaagaacacagcactccattgggctgtgctcgcggggaatacaactgtaatcagcctccttttggaggcgggagctaacgtcgatgctcagaatattaagggggagtccgcactagatctggccaaacaacgaaaaaacgtctggatgatcaatcatttgcaggaggcaaggcaagcaaagggatacgacaatccaagctttctgcggaagctgaaggccgacaaagaattcagacaaaaggtgatgttaggaaccccttttctggtcatttggctggtggggttcattgcggatttgaatattgattcctggctgatcaaggggttaatgtacgggggagtgtgggccacggtccagtttttatccaaaagttttttcgaccattctatgcactccgccctccctctcggcatctacctggcaacgaaattctggatgtacgtaacttggtttttctggttctggaacgacctcaactttctctttattcatctgccttttctggccaatagcgttgcattattttacaatttcggaaagtcttggaagtccgatcctgggatcattaaagctaccgaggaacagaaaaagaaaacaatcgtcgaactagctgaaactgggtcgctggatctatctatcttctgttccacttgtttaatcagaaagccagtgcgaagcaagcactgcggtgtgtgcaaccgctgtattgcaaaattcgatcaccactgtccatgggtaggcaattgtgtgggcgctggcaaccaccgatacttcatggggtatctgttctttctgctattcatgatctgctggatgatctatggctgcatatcctattgggggctgcattgtgaaactacatacacgaaggacgggttctggacgtatataacacaaattgctacatgtagcccctggatgttctggatgtttcttaatagcgtgttccactttatgtgggtggccgtgctgctgatgtgtcagatgtaccagattagctgtctggggatcacaactaatgaacggatgaatgcccgaaggtataaacacttcaaagtgaccactacgtcgatcgagtcccccttcaaccacgggtgtgtccgtaacataattgatttttttgaattccgatgctgtggcctgttccggcccgtgatcgtcgattggacaaggcagtacaccattgagtatgatcagatcagtggttcaggctatcagcttgtttag

SEQ ID NO: 185980 - DNA, 1899 bp, Artificial Sequence
  derived and/or modified sequence
atgcagcgggaggagggcttcaacaccaagatggctgatggcccagatgaatatgacacagaggccggctgtgtgcccctgctgcaccctgaggagatcaagccccagagccactacaaccacggctatggagagcccctgggcaggaagacccacattgatgactacagcacctgggacatcgtgaaggccacccagtatggcatctatgagcgctgccgggagctggtggaggccggctatgatgtgcggcagcctgacaaggaaaatgtgaccctgctgcactgggccgccatcaacaacagaattgacctggtgaagtactacatcagcaagggggccatcgtggaccagctgggcggggacctgaacagcacccccctgcactgggccacccggcagggccacctgtccatggtggtgcagctgatgaagtacggggctgaccccagcctgattgatggagagggctgcagctgcatccacctggccgcccagtttggccacaccagcatcgtggcctacctgattgccaagggccaggatgtggacatgatggaccagaatggcatgacccccctgatgtgggccgcctaccgcacccacagcgtggaccccacccggctgctgctgaccttcaacgtgtctgtgaacctgggggacaagtaccacaagaacacagccctgcactgggccgtgctggccggcaacaccaccgtcatcagcctgctgctggaggccggggccaacgtggatgcccagaacatcaagggggagagcgccctggacctggccaagcagaggaagaatgtgtggatgatcaaccacctgcaggaggcccggcaggccaagggctatgacaaccccagcttcctgaggaagctgaaggctgacaaggagttccggcagaaggtgatgctgggcacccccttcctggtgatctggctggtgggcttcatcgctgacctgaacatcgacagctggctgatcaagggcctgatgtatggaggagtgtgggccaccgtgcagttcctgagcaagagcttctttgaccacagcatgcacagcgccctgcccctgggcatctacctggccaccaagttctggatgtatgtgacctggttcttctggttctggaatgacctgaacttcctgttcatccacctgcccttcctggccaacagcgtggccctcttctacaactttgggaagtcctggaagagtgaccccggcatcatcaaggccacagaggagcagaagaagaagaccatcgtggagctggccgagaccggcagcctggacctgagcatcttctgcagcacctgcctgatcaggaagcctgtgcgcagcaagcactgcggcgtgtgcaaccgctgcatcgccaagtttgaccaccactgcccctgggtgggcaactgtgtgggcgccggcaaccaccgctacttcatgggctacctgttcttcctgctcttcatgatctgctggatgatctacggctgcatctcctactggggcctgcactgtgagaccacctacaccaaggatggcttctggacctacatcacccagatcgccacctgcagcccctggatgttctggatgttcctgaacagcgtcttccacttcatgtgggtggccgtgctgctgatgtgccagatgtaccagatcagctgcctgggcatcaccaccaatgaaagaatgaatgcccggcgctacaagcacttcaaggtgaccaccaccagcattgagagccccttcaaccacggctgtgtgaggaacatcatcgacttctttgagttccgctgctgcggcctcttccggcctgtgattgtggactggacccggcagtacaccattgaatatgaccagatcagcggcagcggctaccagctggtgtag

SEQ ID NO: 185981 - DNA, 1899 bp, Artificial Sequence
  derived and/or modified sequence
atgcagcgggaggagggcttcaacaccaagatggccgacggccccgacgagtacgataccgaggcggggtgcgtgccactgctccatcctgaggagattaaaccccagtcccactataaccacggatacggagagccactgggccgtaagacacacatcgacgactactccacctgggatatcgttaaagccacccaatacgggatctatgaacgatgccgtgaactcgtggaggccggctacgatgtccgccagccagataaagaaaatgtaacactgctgcattgggcagccatcaacaaccgcatagacctggtcaagtattacatttctaagggtgctatcgtggaccagctgggcggtgatctcaatagcacgcccttgcattgggccacaagacaaggccacctgagcatggtagtgcagcttatgaagtatggtgccgacccatcattgattgatggagagggatgttcttgtattcatctcgccgcacagttcggccatacttctattgtggcctacctcatagctaagggccaagacgtggacatgatggaccaaaatgggatgacacctctcatgtgggcagcttacagaactcactcagttgacccaacaagattactcctgacgttcaacgtgtctgtgaatcttggtgataaatatcataagaataccgcattgcactgggccgtacttgctggcaacaccacggtcatttcccttctgttagaggccggagcaaatgtcgatgcccagaatatcaagggtgagtcagccctggatctggctaaacagcgcaagaacgtatggatgattaaccatcttcaggaggcgagacaggctaaagggtatgataatccctctttcctacggaaactgaaggctgacaaagaatttcggcagaaggtaatgcttggcactccctttctcgtcatctggttagtgggttttatcgcagacctaaacatcgattcctggctgattaagggcctcatgtacgggggagtttgggcaactgtccagtttctgagcaaatcatttttcgaccattccatgcactccgcccttcctcttggtatctaccttgccacaaagttctggatgtacgtcacttggtttttttggttctggaacgacttgaatttcctattcatccatctcccattcctggccaatagcgtggccctgttctataattttgggaaatcgtggaagtccgacccaggaattatcaaggccaccgaggaacagaagaaaaagactattgtggaactagcagagactggctccttggacctgtccatcttctgttcgacttgtctgatccgaaagcctgtgaggagcaagcattgtggagtttgcaaccgatgtatcgccaagtttgatcaccactgcccttgggtaggcaattgtgtgggagccgggaatcataggtactttatgggttacctgttctttctgctttttatgatttgttggatgatctacggctgcattagctattgggggctccactgtgagacaacatacaccaaggacgggttttggacttatatcacacaaattgccacatgttcgccgtggatgttctggatgtttctgaattctgttttccatttcatgtgggtggccgttctattaatgtgtcagatgtaccagatctcgtgtctgggcatcacgacaaacgaacgcatgaacgcgcgacggtacaagcactttaaggttaccactacatcaattgaatctcccttcaaccatggctgcgtgcgcaacatcattgatttctttgaattcaggtgttgtggattgttccgacctgtgatcgtcgattggactcgtcagtacactattgaatatgaccagatctcaggatctggctaccaattagtctag

SEQ ID NO: 185982 - DNA, 1899 bp, Artificial Sequence
  derived and/or modified sequence
atgcagcgggaggagggcttcaacaccaagatggccgacggccccgatgaatatgacactgaagccgggtgtgtcccactgctgcaccccgaggaaatcaagcctcagtcccactataaccatgggtatggcgagcctctcggtcgcaagacccacatagacgactacagtacgtgggatatcgtaaaggctacccagtacgggatatatgaacggtgtcgagaacttgtcgaggctggatacgacgtgcggcaaccagacaaggaaaacgtaacactcctacactgggctgccattaacaacaggattgacctggtgaaatattatatatccaagggcgcgatcgttgaccagctggggggggacctgaacagcaccccactgcactgggcgaccagacaggggcatctgagtatggtagtgcaacttatgaagtacggggccgatccatccttgattgatggggaagggtgcagctgcattcacctcgccgcccagttcggccacaccagtatcgttgcgtacctgattgccaagggacaagacgtggatatgatggaccagaacggtatgacccccctgatgtgggccgcgtatcgcacacattccgtggaccctactaggctccttctaacctttaacgtgagcgtgaatctgggagacaaataccataaaaataccgcattacactgggctgtgctggccggaaatacaactgtgatctctctgctactggaagccggggcaaacgtggacgctcagaatatcaagggagagagcgccctggacctggcaaagcagaggaagaacgtgtggatgattaatcatcttcaggaggccaggcaagctaagggttacgataacccttcattcttgcgaaagctaaaggcagataaagagtttcggcagaaagtgatgctcggtacaccattcttagtgatatggctagtcgggttcatcgccgaccttaacattgatagctggttaataaagggactaatgtatgggggcgtttgggccacggtgcagtttttgtctaaatcattcttcgaccactccatgcactccgccctgccactgggaatctacctagcgacgaagttttggatgtacgtgacgtggtttttctggttctggaacgaccttaatttcctttttattcatctaccctttcttgccaattctgtggcactcttttataatttcgggaaaagttggaagtccgatcccgggatcatcaaagccacagaagagcagaaaaaaaaaactatcgtcgaactcgccgagaccggttccctcgacctttccatattctgttcaacctgtttgataagaaagcctgtgcgcagcaaacactgcggagtttgcaatcgatgcatagcaaaatttgaccaccattgtccctgggttggtaactgtgtgggtgctgggaaccaccgctacttcatgggctatctctttttcctcctattcatgatttgttggatgatttacggctgtatttcctactggggtctccattgcgaaactacatataccaaggatggcttttggacatatataacacagattgccacctgcagcccttggatgttctggatgttcctgaacagtgttttccacttcatgtgggtggccgtgctgctgatgtgtcagatgtatcagatttcctgccttggcatcacaacaaacgaaaggatgaacgctagacggtataagcactttaaagttaccactacctccatagaaagcccttttaatcacggatgtgtacgcaacatcatcgatttttttgagttccgctgttgcggactgttccgtccagtaattgtcgattggacacgccagtacaccatcgagtatgatcagatatccgggtccggctaccagctggtatag

SEQ ID NO: 185983 - DNA, 1899 bp, Artificial Sequence
  derived and/or modified sequence
atgcagcgggaagagggattcaacaccaagatggcagacggccctgacgagtacgataccgaagcagggtgcgtccccttgttgcatccggaagaaataaagccgcaaagtcactataaccatggctacggagaaccgctgggaagaaagactcatatcgacgattattcaacttgggatatcgtgaaggctacccagtatgggatttacgagcgttgcagggagttggtcgaggcaggttatgatgtgagacagcctgacaaggaaaacgtcaccttgttgcattgggccgctattaataacaggattgatctggttaagtattatatatctaaaggagccattgtcgaccagttgggaggcgacctgaattccacacctctccattgggccacacggcaaggccatttgtccatggttgtgcagttgatgaaatacggagctgacccatctctcattgacggcgagggctgttcctgtattcacctggccgcacagttcggtcatacatctatcgtcgcctatttgattgcaaaaggccaggacgtcgatatgatggatcagaacgggatgactcctcttatgtgggccgcatataggacccactctgtcgatcccactcggctcctgttgaccttcaacgttagcgtgaatctgggtgacaagtatcataagaataccgccctgcattgggctgtgctcgctgggaacaccaccgtgatctctctcctgctggaggcgggagccaatgtcgatgctcagaatatcaagggcgagagtgcattggacctggctaaacagcgcaagaacgtgtggatgatcaatcatttgcaggaggcaaggcaggccaaaggctatgacaaccctagtttccttcggaaattgaaagctgataaggagtttcgacagaaagttatgctgggtactccattcctcgtcatttggttggtgggattcatcgcagatctcaatatagactcctggttaattaagggactgatgtacgggggagtgtgggcgaccgtgcagttcttatccaaaagtttttttgatcactcgatgcattccgctcttcctctgggtatatatctcgctaccaagttttggatgtatgtgacctggtttttttggttttggaacgatctcaactttctatttatccatttgcccttccttgccaactctgtggcattgttctataacttcggcaaatcttggaaaagtgacccaggtattataaaagcaaccgaggagcagaaaaagaagaccattgtggaactcgccgaaaccggaagccttgatctatcaattttctgctccacttgcctgatcaggaagcctgtaaggagcaagcattgcggcgtttgcaaccgctgtatagcaaagtttgaccaccattgtccttgggtgggcaattgtgtgggagctggaaatcataggtacttcatgggttatttgttctttctgctttttatgatttgctggatgatctatggatgtatctcttattggggtcttcattgcgagaccacatacaccaaagatggcttttggacttacataacccagatcgcaacgtgctccccgtggatgttttggatgttccttaatagcgtgtttcacttcatgtgggtggcggttctcttgatgtgtcaaatgtaccagatctcctgtctaggaattaccacaaacgagagaatgaacgcgaggcgctataagcactttaaggttaccactacgagtattgagagcccattcaatcacggatgtgtgaggaatatcatcgatttcttcgagttcaggtgttgcggcctgttccgcccagtgatcgtggactggacaaggcagtataccatagagtatgaccagatctcaggaagtggctaccaattggtctag

SEQ ID NO: 185984 - DNA, 1899 bp, Artificial Sequence
  derived and/or modified sequence
atgcaaagggaggagggctttaacactaagatggctgacggtcctgatgagtacgatactgaagcgggttgcgtgccccttctgcatcccgaggaaatcaagccacagagccattataaccacggatacggcgagccgcttggacgaaagacacatattgacgactactctacatgggatattgtgaaggccacccagtacggcatctatgaacgatgccgagagctggtggaagcaggatatgatgtgcggcaaccagataaggagaacgtgactttgctgcactgggcggctataaataaccggattgacctcgtcaagtactacatctcaaaaggagctattgtggaccagttaggcggagacctgaacagtaccccactccactgggcaaccaggcagggacatttaagcatggtagtacagctcatgaagtacggggctgaccctagtctgattgacggggaagggtgctcatgtatccacttagccgcacaattcggacacacatcaatagtggcctacttgattgccaagggccaggatgtggacatgatggaccaaaatggaatgaccccacttatgtgggccgcttaccgcacccactccgttgacccgacacggctgctgttgacctttaatgtcagcgtgaacttgggggataagtaccacaagaacaccgcactccactgggctgtgctcgcaggtaacaccaccgttatctcgctgctcctggaagcaggcgcaaatgtcgacgctcaaaacattaagggcgagagcgcactggacttagcaaagcagaggaaaaatgtctggatgatcaatcacctccaagaggcgagacaagccaaaggttatgataacccgtccttcctgaggaagttgaaggctgacaaagagttccggcagaaagtaatgttaggcacacccttccttgtgatctggcttgttggatttatcgctgatcttaacatcgatagttggctgatcaagggcctgatgtacgggggtgtttgggctaccgttcagttcctttctaagagcttcttcgatcattcaatgcacagcgcgcttcctcttggaatctacctagctaccaaattctggatgtatgttacctggttcttttggttttggaatgatctcaattttctcttcatccatctgccattcctggctaactctgttgccctgttttacaactttggtaaatcttggaagtctgaccccggtatcataaaagccacagaagaacagaaaaaaaaaacaattgtcgagctcgccgaaactggaagcctggatctgagtatattctgttcaacctgccttatcagaaagcccgttcgctcgaaacactgtggcgtgtgcaaccgatgcattgccaagttcgaccatcattgcccctgggtggggaattgcgtgggcgcaggaaaccacagatacttcatggggtatctgttctttttactgttcatgatttgttggatgatctacggctgcatctcatactggggactgcattgtgagactacctacactaaggacggcttctggacctacatcacccagatcgcgacatgctccccctggatgttctggatgtttctaaactccgtgttccattttatgtgggttgcggtccttctgatgtgtcaaatgtaccagatttcatgcttggggatcactactaatgagcgcatgaatgccaggaggtataaacattttaaagtcacaacgaccagcatcgagagccccttcaatcacggatgtgtccgtaatattatcgatttctttgagtttcgatgctgtggccttttcaggccggtcatcgttgactggacaaggcaatataccatcgaatacgaccagatcagcgggagcggatatcaactggtctag

SEQ ID NO: 185985 - DNA, 5257 bp, Artificial Sequence
  derived and/or modified sequence
ttgtatccatgtttttccgggcgtcccccggagggacaggttgcgggtgaccttttcaagtgtggaggaaagggaagctgcttttgtcttcaggaatgatgcaggtctcgactcaagcctgacgggcccaaacctccctggagctggctgacgactctgcccgagttcctgaagaggggtcccgggggtcccggagcggaagtgggagcgcgtgggcgtgggctcctcggctgcctggggctccagacttgtgctgcgtgcggctccggagctctgttctcgctcctgagcagctgctaggtttcccaagcgactgtctcaaccgcccggccgcctcccccgggcagccagagcttcacatctacctccagccgggacccgcccccgagccgcggggcccacgcccagagccctccgccgtccccagcgcagtgcagcagagcgcgatccagtctggggccgggccgcgcttccgcgcacgcgcggagaaacccgcgccctccgaggggggaggggacagagggggcgtcacgggggcaggagaagaaggaggaggaggcccgcgtcgcctccggcggggctcgcgctcgccccgcgctcgccctccgcctcgcccgagccccgggagggtgaaacgctttctcccagcatgcagcgggaggagggatttaacaccaagatggcggacggcccggatgagtacgataccgaagcgggctgtgtgccccttctccacccagaggaaatcaaaccccaaagccattataaccatggatatggtgaacctcttggacggaaaactcatattgatgattacagcacatgggacatagtcaaggctacacaatatggaatatatgaacgctgtcgagaattggtggaagcaggttatgatgtacggcaaccggacaaagaaaatgttaccctcctccattgggctgccatcaataacagaatagatttagtcaaatactatatttcgaaaggtgctattgtggatcaacttggaggggacctgaattcaactccattgcactgggccacaagacaaggccatctatccatggttgtgcaactaatgaaatatggtgcagatccttcattaattgatggagaaggatgtagctgtattcatctggctgctcagttcggacatacctcaattgttgcttatctcatagcaaaaggacaggatgtagatatgatggatcagaatggaatgacgcctttaatgtgggcagcatatagaacacatagtgtggatccaactagattgcttttaacattcaatgtttcagttaaccttggtgacaagtatcacaaaaacactgctctgcattgggcagtgctagcagggaataccacagtcattagccttcttctggaagctggagctaatgttgatgcccagaatatcaagggcgaatcagcgcttgatttggcaaaacagagaaaaaatgtgtggatgatcaaccacttacaagaggcaaggcaagcaaaaggatatgacaatccgtccttccttagaaagctgaaagctgataaggaatttcggcagaaagtaatgttaggaactcctttcctagttatttggctggttgggtttatagcagacctaaatattgattcttggctcattaaagggctaatgtatggtggtgtttgggctacagtacagtttctttcaaaatcctttttcgatcattcaatgcatagtgcattgccccttgggatatatttggcaaccaaattctggatgtatgtgacgtggttcttctggttttggaatgatctcaactttttatttatccatcttccattccttgccaatagtgttgcacttttctacaattttggaaaatcttggaaatcagatccagggattattaaagcaacagaagagcaaaagaaaaagacaatagttgaacttgcagagacaggaagtctggacctcagtatattctgcagtacctgtttgatacgaaaaccggtgaggtccaaacattgtggtgtgtgcaaccgctgtatagcaaaatttgatcatcattgcccatgggtgggtaactgtgtaggtgcaggcaaccatagatattttatgggctacctattcttcttgctttttatgatctgctggatgatttatggttgtatatcttactggggactccactgtgagaccacttacaccaaggatggattttggacatacattactcagattgccacgtgttcaccttggatgttttggatgttcctgaacagtgttttccacttcatgtgggtggctgtattactcatgtgtcagatgtaccagatatcatgtttaggtattactacaaatgaaagaatgaatgccaggagatacaagcactttaaagtcacaacaacgtctattgaaagcccattcaaccatggatgtgtaagaaatattatagacttctttgaatttcgatgctgtggcctctttcgtcctgttatcgtggactggaccaggcagtatacaatagaatatgaccaaatatcaggatctgggtaccagctggtgtagcgacatcttatcctatgaagcatattgctgagtggtgcctgaaaattgtgtctgtccgtgtctttctcacactcgaatccacatcctttgaacaagagcatgctatgtgtagggctaatggtgaattttacagtctttttttcaacacttttattaacaaaagtaaacatggacagaacacactgccatttctgggaagagtaaagatgataaaaaataattttaatggttcttaatgtggaaattcacaacatactcaacttttgggttttgttctcacagtatttttcacaaaaaaagggtaaacttattctattgacagacatggtgtactgatcagaaatgttcagttttaactaaaactaaatttatgttatttggctaaatgttatgatgcagtctagtacgagtattgcatctaattccaggagcattgttttaagttgattgactagttattatgtacatttcagaatgtacacataaatactgtgatgaaaatcatgtgattgggatctactgtgatgttgtcttcaaaggcaggagaaaataatgttcacaataaaatgtgctaacaatgttttgtttctatcagctgttgcaatgctgatatatttctagttcagtgaaataatttgtagtaaccttactctgaggttttacggtctgataatgaagcacttgcatgagtatagtaagtcatgtttttttgttcaaatttaaaagccctgctaattgcatgacacaccacatagaatgtatactagcagatactatccagtgaagcataaattagaatttaatttgatgttcaaaaacagttccatttttaagggttaaggtggtattttcaagaaaaggcagaacaaataatgcaaaattctcagtaatagtgatacatggatatacttccttttaaattctcagctgcaaaataattgtagacaaaataatggcatttaactaaagatggagcatgatctaagtacatagcacatgtgaataaaagaaaagctgacagtatattctggtttcaataaaatgacctatcagaaagtagaatttcatccccaagagtatttcagtttatccaatattgagtaagttctgaaacagttttagaaaaaattttctttttgttaaatgtgatgcactgatcaatttttgtcacagcattttcataccttcatggtggactactagtcactgcttccataaatattgtttacagggtgagatttggtttattcatcttaagtgctgtagcaaactgtggttcgagcaacctgtgggaaatctgtgagagggaatggggtgggagatgtgggggaatggtggtcagactgatgacagatcctagaccaatgtaaagaatgtgtatctgtatataaataatttatcaaatagttttctctttgtgtctgtgttagtgtttttaaagctgctcatttcattttgtccaaccaaaaagaaaagggagataactaatgagcttctagtgatgttcaaaattgctgttaataggcattataccctgcaagttcactgcatgtctgatgcttggtaaaactagtcttccctgtaaaatgcagattacaggtattaaagcaatctagtggtatacccgccccttgccttagtaagaggagcagtgaaatgtatatagttgatgttcagtatttccaagtaccatttttatatagtagcttatttgaccataagtcacacatcaaaaaaagattacccttagtgtatgtgttttaatattagaaaattggcatatgtactttatttttgaaaagggaagagatgggtgtggggtggcaatagcattgtgccattttgtcatagaatgtaaaaattggttaactttacaaatgtcagctagttttgactactaattgggggaaattttagataatttttaaattcaaagttatttataaaatgctagaatttgttttaattttttgtattttgagccacttcacatgaagactcagttgcatttttatcgaatacatttttatcaacagttaaagactatggtggttttttcagagtttggctaagaatgttgttaccatcttctttgtttgtggtacaatattttcagtgcaaaagagatgtcattcagttaaaaagacaaacctctagatgtgtaattacatggaaaatactagcaatgtgaatgcttttgtagtaaccatcttgtagtacctgtgaaatctataactcagaaatggtcagatggtcaggagccagctatgcagcagtataccatctgtttaattattttgtaggtcctgtgtgtggaaccaactataaacccagttctaaagttgtgtatgatggtgaacctttgggaatagttcttatcaacttaattggatacttttagcaaataggaacttaattctcagcactgaacatgaattacttccttggagttttttttcattcatatttttgttgtttccaggaatttatttgatattaatgggcgtaaaacagcatcattgtacttaagctatggatgtttttattttatattttctttatttataactgtgccaagtattattttgctacttaccgtgttattctgtggaaagaaaaacctgtaaagtgtttaataaattagccctccttacataaattaaatgtcaaaattttgtaaaatattaatcagaataaatactgactctt

SEQ ID NO: 185986 - DNA, 5259 bp, Artificial Sequence
  derived and/or modified sequence
ttgtatccatgtttttccgggcgtcccccggagggacaggttgcgggtgaccttttcaagtgtggaggaaagggaagctgcttttgtcttcaggaatgatgcaggtctcgactcaagcctgacgggcccaaacctccctggagctggctgacgactctgcccgagttcctgaagaggggtcccgggggtcccggagcggaagtgggagcgcgtgggcgtgggctcctcggctgcctggggctccagacttgtgctgcgtgcggctccggagctctgttctcgctcctgagcagctgctaggtttcccaagcgactgtctcaaccgcccggccgcctcccccgggcagccagagcttcacatctacctccagccgggacccgcccccgagccgcggggcccacgcccagagccctccgccgtccccagcgcagtgcagcagagcgcgatccagtctggggccgggccgcgcttccgcgcacgcgcggagaaacccgcgccctccgaggggggaggggacagagggggcgtcacgggggcaggagaagaaggaggaggaggcccgcgtcgcctccggcggggctcgcgctcgccccgcgctcgccctccgcctcgcccgagccccgggagggtgaaacgctttctcccagcatgcagcgggaggagggatttaacaccaagatggcggacggcccggatgagtacgataccgaagcgggctgtgtgccccttctccacccagaggaaatcaaaccccaaagccattataaccatggatatggtgaacctcttggacggaaaactcatattgatgattacagcacatgggacatagtcaaggctacacaatatggaatatatgaacgctgtcgagaattggtggaagcaggttatgatgtacggcaaccggacaaagaaaatgttaccctcctccattgggctgccatcaataacagaatagatttagtcaaatactatatttcgaaaggtgctattgtggatcaacttggaggggacctgaattcaactccattgcactgggccacaagacaaggccatctatccatggttgtgcaactaatgaaatatggtgcagatccttcattaattgatggagaaggatgtagctgtattcatctggctgctcagttcggacatacctcaattgttgcttatctcatagcaaaaggacaggatgtagatatgatggatcagaatggaatgacgcctttaatgtgggcagcatatagaacacatagtgtggatccaactagattgcttttaacattcaatgtttcagttaaccttggtgacaagtatcacaaaaacactgctctgcattgggcagtgctagcagggaataccacagtcattagccttcttctggaagctggagctaatgttgatgcccagaatatcaagggcgaatcagcgcttgatttggcaaaacagagaaaaaatgtgtggatgatcaaccacttacaagaggcaaggcaagcaaaaggatatgacaatccgtccttccttagaaagctgaaagctgataaggaatttcggcagaaagtaatgttaggaactcctttcctagttatttggctggttgggtttatagcagacctaaatattgattcttggctcattaaagggctaatgtatggtggtgtttgggctacagtacagtttctttcaaaatcctttttcgatcattcaatgcatagtgcattgccccttgggatatatttggcaaccaaattctggatgtatgtgacgtggttcttctggttttggaatgatctcaactttttatttatccatcttccattccttgccaatagtgttgcacttttctacaattttggaaaatcttggaaatcagatccagggattattaaagcaacagaagagcaaaagaaaaagacaatagttgaacttgcagagacaggaagtctggacctcagtatattctgcagtacctgtttgatacgaaaaccggtgaggtccaaacattgtggtgtgtgcaaccgctgtatagcaaaatttgatcatcattgcccatgggtgggtaactgtgtaggtgcaggcaaccatagatattttatgggctacctattcttcttgctttttatgatctgctggatgatttatggttgtatatcttactggggactccactgtgagaccacttacaccaaggatggattttggacatacattactcagattgccacgtgttcaccttggatgttttggatgttcctgaacagtgttttccacttcatgtgggtggctgtattactcatgtgtcagatgtaccagatatcatgtttaggtattactacaaatgaaagaatgaatgccaggagatacaagcactttaaagtcacaacaacgtctattgaaagcccattcaaccatggatgtgtaagaaatattatagacttctttgaatttcgatgctgtggcctctttcgtcctgttatcgtggactggaccaggcagtatacaatagaatatgaccaaatatcaggatctgggtaccagctggtgtagcgacatcttatcctatgaagcatattgctgagtggtgcctgaaaattgtgtctgtccgtgtctttctcacactcgaatccacatcctttgaacaagagcatgctatgtgtagggctaatggtgaattttacagtctttttttcaacacttttattaacaaaagtaaacatggacagaacacactgccatttctgggaagagtaaagatgataaaaaataattttaatggttcttaatgtggaaattcacaacatactcaacttttgggttttgttctcacagtatttttcacaaaaaaagggtaaacttattctattgacagacatggtgtactgatcagaaatgttcagttttaactaaaactaaatttatgttatttggctaaatgttatgatgcagtctagtacgagtattgcatctaattccaggagcattgttttaagttgattgactagttattatgtacatttcagaatgtacacataaatactgtgatgaaaatcatgtgattgggatctactgtgatgttgtcttcaaaggcaggagaaaataatgttcacaataaaatgtgctaacaatgttttgtttctatcagctgttgcaatgctgatatatttctagttcagtgaaataatttgtagtaaccttactctgaggttttacggtctgataatgaagcacttgcatgagtatagtaagtcatgtttttttgttcaaatttaaaagccctgctaattgcatgacacaccacatagaatgtatactagcagatactatccagtgaagcataaattagaatttaatttgatgttcaaaaacagttccatttttaagggttaaggtggtattttcaagaaaaggcagaacaaataatgcaaaattctcagtaatagtgatacatggatatacttccttttaaattctcagctgcaaaataattgtagacaaaataatggcatttaactaaagatggagcatgatctaagtacatagcacatgtgaataaaagaaaagctgacagtatattctggtttcaataaaatgacctatcagaaagtagaatttcatccccaagagtatttcagtttatccaatattgagtaagttctgaaacagttttagaaaaaattttctttttgttaaatgtgatgcactgatcaatttttgtcacagcattttcataccttcatggtggactactagtcactgcttccataaatattgtttacagggtgagatttggtttattcatcttaagtgctgtagcaaactgtggttcgagcaacctgtgggaaatctgtgagagggaatggggtgggagatgtgggggaatggtggtcagactgatgacagatcctagaccaatgtaaagaatgtgtatctgtatataaataatttatcaaatagttttctctttgtgtctgtgttagtgtttttaaagctgctcatttcattttgtccaaccaaaaagaaaagggagataactaatgagcttctagtgatgttcaaaattgctgttaataggcattataccctgcaagttcactgcatgtctgatgcttggtaaaactagtcttccctgtaaaatgcagattacaggtattaaagcaatctagtggtatacccgccccttgccttagtaagaggagcagtgaaatgtatatagttgatgttcagtatttccaagtaccatttttatatagtagcttatttgaccataagtcacacatcaaaaaaagattacccttagtgtatgtgttttaatattagaaaattggcatatgtactttatttttgaaaagggaagagatgggtgtggggtggcaatagcattgtgccattttgtcatagaatgtaaaaattggttaactttacaaatgtcagctagttttgactactaattgggggaaattttagataatttttaaattcaaagttatttataaaatgctagaatttgttttaattttttgtattttgagccacttcacatgaagactcagttgcatttttatcgaatacatttttatcaacagttaaagactatggtggttttttcagagtttggctaagaatgttgttaccatcttctttgtttgtggtacaatattttcagtgcaaaagagatgtcattcagttaaaaagacaaacctctagatgtgtaattacatggaaaatactagcaatgtgaatgcttttgtagtaaccatcttgtagtacctgtgaaatctataactcagaaatggtcagatggtcaggagccagctatgcagcagtataccatctgtttaattattttgtaggtcctgtgtgtggaaccaactataaacccagttctaaagttgtgtatgatggtgaacctttgggaatagttcttatcaacttaattggatacttttagcaaataggaacttaattctcagcactgaacatgaattacttccttggagttttttttcattcatatttttgttgtttccaggaatttatttgatattaatgggcgtaaaacagcatcattgtacttaagctatggatgtttttattttatattttctttatttataactgtgccaagtattattttgctacttaccgtgttattctgtggaaagaaaaacctgtaaagtgtttaataaattagccctccttacataaattaaatgtcaaaattttgtaaaatattaatcagaataaatactgactcttaa

SEQ ID NO: 185987 - protein, 1541 aa, Artificial Sequence
  derived and/or modified sequence
MKDKQKKKKERTWAEAARLVLENYSDAPMTPKQILQVIEAEGLKEMRSGTSPLACLNAMLHSNSRGGEGLFYKLPGRISLFTLKKDALQWSRHPATVEGEEPEDTADVESCGSNEASTVSGENDVSLDETSSNASCSTESQSRPLSNPRDSYRASSQANKQKKKTGVMLPRVVLTPLKVNGAHVESASGFSGCHADGESGSPSSSSSGSLALGSAAIRGQAEVTQDPAPLLRGFRKPATGQMKRNRGEEIDFETPGSILVNTNLRALINSRTFHALPSHFQQQLLFLLPEVDRQVGTDGLLRLSSSALNNEFFTHAAQSWRERLADGEFTHEMQVRIRQEMEKEKKVEQWKEKFFEDYYGQKLGLTKEESLQQNVGQEEAEIKSGLCVPGESVRIQRGPATRQRDGHFKKRSRPDLRTRARRNLYKKQESEQAGVAKDAKSVASDVPLYKDGEAKTDPAGLSSPHLPGTSSAAPDLEGPEFPVESVASRIQAEPDNLARASASPDRIPSLPQETVDQEPKDQKRKSFEQAASASFPEKKPRLEDRQSFRNTIESVHTEKPQPTKEEPKVPPIRIQLSRIKPPWVVKGQPTYQICPRIIPTTESSCRGWTGARTLADIKARALQVRGARGHHCHREAATTAIGGGGGPGGGGGGATDEGGGRGSSSGDGGEACGHPEPRGGPSTPGKCTSDLQRTQLLPPYPLNGEHTQAGTAMSRARREDLPSLRKEESCLLQRATVGLTDGLGDASQLPVAPTGDQPCQALPLLSSQTSVAERLVEQPQLHPDVRTECESGTTSWESDDEEQGPTVPADNGPILSLVGDDTLEKGTGQALDSHPTMKDPVNVTPSSTPESSPTDCLQNRAFDDELGLGGSCPPMRESDTRQENLKTKALVSNSSLHWIPIPSNDEVVKQPKPESREHIPSVEPQVGEEWEKAAPTPPALPGDLTAEEGLDPLDSLTSLWTVPSRGGSDSNGSYCQQVDIEKLKINGDSEALSPHGESTDTASDFEGHLTEDSSEADTREAAVTKGSSVDKDEKPNWNQSAPLSKVNGDMRLVTRTDGMVAPQSWVSRVCAVRQKIPDSLLLASTEYQPRAVCLSMPGSSVEATNPLVMQLLQGSLPLEKVLPPAHDDSMSESPQVPLTKDQSHGSLRMGSLHGLGKNSGMVDGSSPSSLRALKEPLLPDSCETGTGLARIEATQAPGAPQKNCKAVPSFDSLHPVTNPITSSRKLEEMDSKEQFSSFSCEDQKEVRAMSQDSNSNAAPGKSPGDLTTSRTPRFSSPNVISFGPEQTGRALGDQSNVTGQGKKLFGSGNVAATLQRPRPADPMPLPAEIPPVFPSGKLGPSTNSMSGGVQTPREDWAPKPHAFVGSVKNEKTFVGGPLKANAENRKATGHSPLELVGHLEGMPFVMDLPFWKLPREPGKGLSEPLEPSSLPSQLSIKQAFYGKLSKLQLSSTSFNYSSSSPTFPKGLAGSVVQLSHKANFGASHSASLSLQMFTDSSTVESISLQCACSLKAMIMCQGCGAFCHDDCIGPSKLCVLCLVVR

SEQ ID NO: 185988 - protein, 85 aa, Artificial Sequence
  derived and/or modified sequence
MKDKQKKKKERTWAEAARLVLENYSDAPMTPKQILQVIEAEGLKEMRSGTSPLACLNAMLHSNSRGGEGLFYKLPGRISLFTLKV

SEQ ID NO: 185989 - DNA, 4626 bp, Artificial Sequence
  derived and/or modified sequence
atgaaggacaagcagaagaaaaagaaagagcgcacgtgggccgaagcagcccggctcgtactggagaactacagcgacgcccctatgactcctaagcaaatccttcaggttatcgaggcagagggactaaaagaaatgaggtccggaaccagcccgttggcctgtctgaacgccatgctgcacagcaatagccgcggaggtgagggactcttctacaaactgcccgggagaatcagcctctttacactaaagaaggacgcgctgcagtggagtaggcaccctgctactgtggagggcgaagaacctgaggatactgccgatgtggaatcctgtgggtcaaatgaggcatcaactgtcagcggagagaacgacgtttctctcgacgagacctcttctaatgctagctgcagcacggagagccagagtcgacccttgagcaatcctcgcgactcctatagggccagttctcaagccaataagcaaaagaaaaagaccggcgtgatgctgccccgcgtggtgctgaccccacttaaagtgaacggcgcccacgtggagtctgcctcaggattttcaggctgtcatgccgatggggagagcggctcaccttctagcagcagtagcggttcattagccctggggagcgcagccatccgcgggcaggctgaggtgactcaggacccggcacccctgctcaggggtttcagaaagcccgcaacaggtcaaatgaagagaaatcgcggcgaggaaatagatttcgagacaccagggagcattctcgtgaatacgaaccttagggccctgatcaactcacggacctttcacgcgctgccgtcccattttcagcagcagctacttttcctcctgcctgaagttgatcggcaggtcggcaccgatggcttgttgaggctctcctcatctgccctcaacaatgagttcttcacgcatgcagctcaaagctggagggaaagactggccgacggcgaatttactcacgagatgcaggttagaatcaggcaggaaatggagaaagagaaaaaggtggagcagtggaaggagaagtttttcgaagattattatgggcaaaagctgggcctgacaaaagaggagtctctgcagcaaaatgtgggacaggaggaagcggaaattaaatccgggttatgcgtgcccggagagagtgtcaggattcagcgaggcccagccacacgacagcgggatgggcattttaaaaagagaagccggcccgatctgcgcacccgggcccgccgcaacctttacaaaaagcaggagagcgagcaggcgggagttgctaaggatgcaaagagtgtggcttcggacgtcccgctgtacaaggacggagaagctaaaaccgatcctgctggcctatcaagtccccatctcccaggaaccagctccgccgctcctgacctagagggtccggagttcccagttgaatcagttgcatccaggattcaggctgaacccgacaacctggcaagggcttccgcaagcccagaccggattccgtccctgcctcaggaaaccgtagatcaagaacccaaagaccagaagcggaaatcttttgaacaagcagcgagtgcctcatttccagagaaaaagccccgcctggaagaccgacaatcctttcggaacacgatcgaatctgtccatacggagaagcctcaacccaccaaagaagagcccaaggtgcctccgatccgcattcagctcagtcgcattaaaccaccctgggtcgtgaaaggtcagcctacttatcagatatgcccaagaatcatccccaccaccgagtcttcatgtaggggctggaccggtgcgcgcacactcgcggacataaaggccagggctctgcaggtgagaggagctcgtggccaccactgccatcgcgaagccgctacgacggcaattggtggcgggggtgggcccggcggaggcggtggcggcgcgacagatgagggcgggggccgggggagttcatcaggggatggcggcgaagcgtgcgggcatcccgaacctagaggaggtccctccactcccggaaaatgcacaagcgacttacagcgcacccagctcctgcccccctatcccctcaacggagagcacactcaggcaggtacagcaatgagcagggctagaagggaggatctgcccagtctgcgcaaagaggagtcttgtctcttacaacgggccactgtgggcctaacagatgggttgggcgatgcttctcagctgcctgtcgcacccaccggcgatcagccatgccaggcgctgccactgctgtcttcccagacaagtgtagctgagcggctggttgagcagccccagctgcacccggatgtccgaaccgaatgcgagagcggcaccacttcctgggagagcgacgacgaggaacagggtcccaccgtgccggcagacaacgggcccatcttatcccttgttggcgatgatacactagagaaaggcacgggacaagcacttgatagccatccgactatgaaggacccggtcaacgtgacgcccagttcaactccagagtccagtccaactgattgtctacaaaatcgggcttttgacgacgagctgggtctcggcgggtcctgcccccctatgagagagtccgatacacggcaggagaatttgaaaaccaaagctctggtctccaattcctcgctgcactggattccaatcccttccaacgatgaggttgttaaacagcctaaacccgaatccagagagcacattcccagcgtggagccacaggtcggcgaggaatgggaaaaagcggcccctaccccacctgccctaccaggcgacttaaccgccgaagaggggttggacccactggattccctgaccagcctctggacagtgccctcacgaggggggtctgacagtaatggttcctattgccagcaggttgacattgaaaagctgaagattaatggggattctgaagctctatctccacatggcgagtccactgacaccgcatccgactttgagggccacctgacagaggactccagcgaggcggacaccagggaggcagctgtaaccaagggcagctccgtcgacaaagatgaaaagcctaattggaatcaaagcgcacctctgagcaaggttaatggggacatgaggctcgttacacgtactgatggaatggtggccccccagagctgggttagtcgcgtatgcgctgtgcgtcagaaaatcccggactccctgctgctcgcatcaacagagtaccagcctagagctgtgtgtcttagtatgccaggcagttcagtcgaagcaactaaccctttggtaatgcaattgcttcaggggagcctgccccttgagaaggttctgcctccagcacacgacgactccatgagcgagagcccccaggtccccctgacgaaggatcaaagtcacggctctttgaggatgggaagtctccatggtctgggaaagaactcggggatggtagacgggtcatccccttcttctctacgggccttgaaagagccgttattgccagattcatgtgaaaccggtacaggactcgcccgcattgaggcgacccaagctccaggcgcaccacagaaaaattgcaaggccgtgccatccttcgattctctccatcccgtgaccaaccccatcactagcagcaggaaactggaagagatggattcaaaagagcagttttcatccttcagctgtgaagatcagaaggaggtccgggcaatgtcgcaggattctaattccaacgctgcacccggtaagtccccaggggacctgaccactagtagaacgcctcgtttctcgtcccccaacgtgatatcttttggcccggaacagaccggccgggctcttggcgatcaatccaacgtgactggacaagggaagaaactgtttggctctggtaacgttgccgctacactccagaggcctcggcctgcagatccgatgccgttaccagctgagataccacctgtcttcccatcaggcaaacttgggccgtctactaactctatgagtggaggcgtccaaacgcccagagaggattgggcgcccaagccacacgcattcgtggggagcgtgaagaacgagaagactttcgtgggcgggcccttgaaagctaatgccgagaaccgcaaggctaccggacacagtccgctggagcttgtgggtcaccttgagggcatgccattcgtgatggatcttccattctggaagctgccccgggagcctgggaagggactgtccgagcccctggagcccagcagcctgccatcccaactttccatcaagcaggcattctatggtaagctgtccaaactacaactgtctagcacatcctttaactacagctctagctcgcctacatttccaaagggcctggccggaagcgtcgttcagttgtcccacaaggcaaactttggtgcatcccatagtgcaagtctcagtttacaaatgttcacagacagtagtacagtagaatctattagcctacagtgtgcatgttccctcaaggcaatgattatgtgccagggctgcggggccttttgtcatgacgactgcataggaccctccaagctgtgcgtgctttgcctggtcgtgagatag

SEQ ID NO: 185990 - DNA, 4626 bp, Artificial Sequence
  derived and/or modified sequence
atgaaggacaaacagaagaagaaaaaggaaagaacttgggccgaggccgctcgcctggtcctggagaactacagcgatgctcccatgacaccgaagcagatacttcaagtgatagaagctgagggcctgaaggaaatgcgatctgggactagcccgctggcttgccttaacgctatgctgcacagcaactctagaggaggcgagggactgttttataaattaccagggaggatctcactgtttacgctgaagaaggacgccttgcagtggtctcggcatcctgcgactgtcgagggggaagagccagaggacactgccgatgtggaatcgtgtggttcgaacgaggcttcaacggtcagtggtgagaacgacgtgagcctcgacgaaacctcctctaatgccagctgtagcactgagtctcagtctcgaccgttatccaatcctagagattcctatagggccagcagtcaagccaacaaacaaaagaaaaaaacaggggttatgctgcctagggtggtcctgaccccacttaaggtcaatggcgcccacgtcgagagtgcgagcgggtttagtggctgccacgcagatggagaatcaggatccccaagctcgtccagctccggctcactggctttaggcagtgcagcgatacgcggccaggccgaagtgacccaggatcccgcccccctgcttcgaggtttcaggaagccagctacgggacagatgaagcggaataggggcgaagaaatcgacttcgaaacacccggcagcatcctggtaaacactaacctccgtgcgcttattaactcacgcacctttcatgcactgcccagccatttccagcagcagctcttattcctgcttcccgaagtggaccgccaggtcggtaccgatggcctcctgcgcctgagctccagcgccttgaacaatgaattctttactcatgcagcacagtcttggagggaaaggctcgccgacggcgagtttacgcatgaaatgcaagtccggatcaggcaagagatggaaaaggagaagaaagtggagcagtggaaggaaaagttctttgaggattattatggccagaaactgggcctcacgaaggaagagagtctacagcaaaacgtggggcaggaagaagcagaaattaaaagtggcttgtgcgtccccggcgaaagcgttagaattcagcgcgggccagcgactcggcaacgcgatggacatttcaaaaaaagatccagacccgatctgcgcacaagggctcgccgaaatctttataagaagcaggagtctgaacaggccggggttgcaaaggatgctaaatctgtcgcgtccgatgtacctctgtacaaggatggggaagccaagactgaccctgcaggtctgagcagccctcacctgccaggtacaagcagtgctgcccctgaccttgagggcccagaattccccgtggagtctgttgctagtcggatccaggcagagcctgacaatttggccagggcttcagccagcccggatcgcatcccaagccttccacaggaaactgtggatcaggaaccaaaggaccaaaaacgtaagtcctttgaacaggccgcgtccgcctccttcccggagaaaaaacctcgcctggaagaccgacaatcattcagaaataccattgagagcgtgcatactgaaaaaccccagcctaccaaagaggaacccaaggttcctcctataagaattcagctctcacggataaaacctccgtgggtggtgaagggccagcctacttatcagatctgcccaagaatcatacccaccacagaatcgtcctgtcggggctggacaggggctagaaccttagctgatatcaaagctcgcgcactgcaggtccgaggagcacgaggccaccactgtcacagggaagcggccactactgccattggcggcggtggcggccccggaggtggggggggaggtgccacagacgaaggcggtggccgtggctccagttctggcgatggtggtgaggcttgcggccacccggagccccgaggaggtcctagcacgccaggcaagtgcaccagcgacctccagcgtacacagctgctccccccctacccgctaaacggtgagcacacccaggcaggcaccgcgatgtcgagagcccggcgcgaggatctgccgtccctaagaaaagaggagtcctgtctgttacagagggctaccgtgggccttactgacggccttggggacgcatctcagctcccagtggcaccgacaggcgaccagccctgtcaggctctgcccctgctctcgagtcagacaagtgtggctgaaagattggtggagcaacctcagctgcacccggatgtgagaacagaatgtgaaagcgggacgacctcctgggagtctgacgacgaagaacaggggcccaccgtgccagccgacaatgggccgattctgagcctggtaggcgatgatactctggagaaaggaacgggtcaagccttggactcacaccccaccatgaaggatcccgtgaatgtaaccccttctagcactccagagagttcgccaaccgactgtctgcagaatagggcttttgatgatgagctgggactgggcggcagctgtccccctatgcgtgagtcagatacaagacaggaaaacctcaaaacgaaggccttagtctctaactcgtcactgcattggattcccatcccatccaatgacgaggtggtcaagcagccaaagccagaaagccgggaacatattccttcagtggaacctcaggtgggggaagagtgggaaaaagctgccccaacaccaccagcccttcccggggatctgacagccgaggaaggcttggaccccctagacagccttacgtccctatggaccgtgccttctaggggcggatctgactctaatgggagctattgccaacaggttgatattgaaaaactgaagattaatggtgattccgaggcactctcccctcacggagaatctacagacactgcatccgattttgaagggcacttgactgaagatagcagcgaggctgacactagagaagcggccgtgaccaagggttcaagcgtggacaaggatgaaaagccaaactggaaccagagtgcccccctgagtaaggtgaatggtgacatgcggctggttacacgtacggacgggatggtggccccccaaagctgggtgtcccgcgtttgcgctgtgcgccagaaaattcctgattccctcctgttggcttcaacagaatatcagcctagggcagtgtgcttgtctatgcctggctcctcagtcgaagcaacaaatccgctagtgatgcagttgttgcagggctccctccccctggagaaagtgctaccccccgctcacgatgactctatgagcgagagcccccaagtgccgctcacaaaggaccagtctcatggatccttgagaatggggagcctacacggcttgggcaaaaattctggcatggtcgacggcagttcgcccagctccctgcgcgccctcaaagaaccactgttacccgacagctgcgagacaggtacaggattggctcgtattgaggccacgcaagcaccgggggcaccccaaaagaactgcaaggccgtcccatccttcgattccttgcaccctgtcactaaccccattacaagcagccgcaaactcgaagaaatggatagtaaggagcaattctcctctttctcttgtgaagaccagaaggaggtgcgtgccatgagtcaggacagtaactccaacgcagccccgggaaaaagccccggtgatctgacgacctccagaaccccgagatttagtagtccaaatgtcattagtttcggccccgaacaaacgggcagagcactaggtgatcaaagcaatgtgactggacagggcaaaaagctgttcggatccggaaacgtcgccgccaccctccagaggccaagacccgccgaccccatgcctctgcctgccgaaattccgccagtgttcccctccggcaaactggggcctagtacaaactcaatgtcaggcggggtgcagaccccccgagaggactgggcccccaaaccccacgctttcgtgggctcagtgaagaacgaaaagacatttgtagggggaccactcaaggcaaacgccgagaacagaaaagccacagggcattcgcccctggaattagtgggacacctggaaggcatgcccttcgtgatggatcttccattttggaagttgccgcgggaacccggcaaaggcctctccgagcccctggaaccttcaagcctgccgtcccagttgtcgattaagcaggctttttatgggaaattgagcaagctgcagcttagctcaacatcatttaattacagcagctcttcacctaccttcccaaagggtctcgcgggatccgtggtgcagctctctcacaaggcaaactttggggccagtcattcagccagcctgagtctccaaatgtttaccgattcatctacagtggagagcatctccctgcagtgtgcatgttcgctgaaagcaatgatcatgtgccaggggtgcggggccttttgccacgacgactgcattggcccgagtaagctgtgcgtcctgtgtttagtggtacgctag

SEQ ID NO: 185991 - DNA, 4626 bp, Artificial Sequence
  derived and/or modified sequence
atgaaggacaaacagaagaagaaaaaagagcggacatgggcagaagcagcaagacttgttctggaaaactactcagatgctcccatgaccccaaaacagatcctgcaggtgatcgaagctgagggcttgaaggagatgcgctccgggacctctccactggcttgtttaaatgccatgctgcactccaactcccgcggcggcgaggggctgttctataaactgcccggacggatcagcctcttcaccctgaagaaggatgcgttacagtggtcccgccaccccgcaaccgtggagggggaagagcctgaggacactgcagacgtggagtcctgtgggagcaacgaagcttcgacagttagcggagaaaacgacgtgtctctggatgagacttccagtaatgcctcttgctctacagagagtcaatcccgtcctctttctaatccccgggattcatatcgtgcctccagccaggccaacaaacagaagaagaaaaccggcgtgatgctgccgagggtggtgcttaccccactgaaggttaatggtgcacatgtggaatcagctagtggcttcagtggttgccacgccgatggtgagtccgggagccctagttcgagctctagtggatccctggctctgggatctgctgctatccgcggccaggcagaagtcacccaagaccctgcacccctgctgcgcggtttcaggaagcccgctactggtcaaatgaaaaggaacaggggagaggagatagattttgaaacaccaggaagtatcctggtcaataccaaccttcgcgcccttatcaattcacgaacatttcatgccctaccgtcccacttccaacagcaacttcttttcctcctaccagaggtcgatcgacaggtgggcacggacgggttgcttaggttaagtagctctgctcttaacaatgagttcttcactcacgccgcgcagtcttggagagaaaggttggccgatggtgaatttacccacgagatgcaggtgcgaattagacaagagatggagaaggagaagaaagtggagcagtggaaggaaaaattttttgaggactactacggtcagaagttgggcctgacaaaagaagagtccctccagcagaatgtcggccaagaagaggccgagatcaagagcggtctgtgcgtgcccggggagtctgtgaggatacagcgcggaccagctacccgccaaagggacgggcattttaagaaacgtagccgaccagacttacgaacgcgtgcccgccgaaacctatacaaaaagcaggagagtgagcaggcaggtgttgctaaggacgctaagagtgtagctagcgacgtgcctctttacaaggatggcgaagctaagaccgatccagctggtctgtcttcaccgcacctccccgggacctcttctgcagccccagatctggaaggtccggagtttcctgttgaatccgttgcatcaaggatccaagcggagcccgataaccttgcacgtgcgtccgccagcccagataggattcccagtttaccccaagaaaccgtggatcaggagcctaaggatcagaagagaaaatctttcgagcaggctgcctcggcaagttttcctgagaagaaaccaaggttggaggaccgacagtctttccggaacacaatcgagtctgtccatacagagaaacctcaacccacaaaagaagaaccaaaagtgcctcccattagaatccagctaagcagaataaagccgccctgggtggtgaaggggcaacctacataccagatttgccctcgcatcattcccactactgaatcttcttgtcgcgggtggactggggcccgcactctggccgacataaaagccagggctttacaagttaggggagccaggggacaccattgccacagagaagccgccactaccgccattggcgggggggggggcccaggaggcggagggggcggagctacggacgagggggggggacggggctcgagttcaggggatggtggggaggcatgcgggcacccagaaccacgcggtggtcccagcacgcctggcaagtgtacttcggacttacagagaacacaactgctgcctccctacccattaaacggagagcacacacaggcaggcaccgctatgtctagagcacgcagggaggatcttcccagcctgcgaaaagaggagagctgtctgctgcagagagccacagtgggcttgactgatggattgggggacgcctctcagttgccagtggcgcccacaggagatcagccatgccaggccctgccactgctcagctcgcaaacctcagttgcagaacggttagtggagcagccacagctacacccagacgtaaggacggaatgcgagtccggcaccacaagctgggaaagtgacgatgaggaacagggccccaccgtgccagccgataacggccccatcctttctctggtcggcgacgacaccctagagaagggaacaggacaggctttggatagtcatccaacgatgaaggatccagtcaatgtgactccttcatctacaccggaaagttcccctaccgattgtttacagaaccgggctttcgacgatgagctcgggttaggggggagttgtcccccaatgagggagtctgacactcggcaggaaaatctgaaaacgaaagcgctggtcagcaactccagtctgcattggatcccgatcccatctaacgacgaagtcgtgaagcaacccaaacccgaatcacgcgagcacataccatcagtagaaccccaagtgggggaagagtgggagaaggccgcccccacccccccagccctgccaggggatctgactgctgaggaaggtctggatccacttgatagtctgacttcactgtggactgtcccgagcagaggggggagtgattccaatggctcttattgtcagcaagtcgatattgagaagttgaaaatcaatggggactcagaagcactgtcaccacacggggaaagtaccgacacagctagtgatttcgaaggacatttgacagaagacagctccgaggccgacacacgagaggctgcggtgaccaaaggaagctcagtggacaaagatgagaaacccaattggaaccagagtgcgcctctgagcaaagttaacggcgacatgcgccttgtcactagaacggacggaatggttgccccacaatcctgggtgtcacgcgtgtgtgctgtgagacagaaaatcccagattccctattgctggctagtactgaataccaacctcgcgccgtgtgcttgtcgatgccagggtccagcgttgaggccactaaccccctggtgatgcagctgcttcagggtagcttgcccctggagaaagtgctgccaccagcacatgatgacagcatgtccgagtctccccaggttcctctcaccaaggatcaaagtcatggatcacttcgcatgggttccttacatggtctgggcaagaattcaggcatggtggatggcagttctccctcctccctgcgcgcactgaaggagccgctcttaccggatagttgtgagactgggactgggttggcccgtattgaggctactcaggcccccggggctccacagaagaattgcaaggcggttccaagctttgacagcttacatccggtgaccaaccccattactagtagtcgcaagctggaggagatggactctaaagaacagttttcgtctttcagctgtgaagatcagaaagaagtgagggccatgtcacaagacagtaacagcaacgcagcacctggcaaaagccctggagacctcaccacctccagaacgcctagattctcttccccaaatgtgatatcttttgggcccgaacaaacggggagagccttgggggatcagtctaatgtgaccggtcagggtaaaaaattatttgggagtggaaatgtagctgctactctgcagcgccctcgccctgctgacccaatgcccttgccagcggaaattccacccgtgtttccctccggaaaactgggcccctcaactaacagcatgagcggcggcgtgcagactcctcgtgaggactgggcgcccaaaccacatgcattcgtgggcagcgtgaagaacgaaaagactttcgtgggcggcccattgaaggcaaacgctgagaacagaaaagccactgggcacagccccctggaattggtggggcatcttgaaggaatgccattcgttatggacctgccattctggaaactacctagggagccaggcaaggggttgtccgagccattggagccaagttcgttgccttctcagctatccattaagcaagcgttctacggtaagctctctaagctccagctgagctctaccagtttcaattattcttctagctcgcctaccttccccaagggattagcagggagcgtcgtacagctgtcccacaaagctaattttggcgcaagtcatagtgcctccctatctctgcagatgttcacggattcaagtaccgtcgagtctatctcgctgcagtgtgcatgctcattgaaagctatgattatgtgccaaggctgcggagccttttgtcacgacgactgtatcggtcctagcaagctctgtgtgctatgcctagtagtgagatag

SEQ ID NO: 185992 - DNA, 7038 bp, Artificial Sequence
  derived and/or modified sequence
cacacccacggcagacacgcacgcacccgggcgccgaagggaaagccgcgtctcgccctcccgccccgccgtcggtcctgtctcagtccctcagcagagcgggaaagcggaggccggagccgtgacctctgaccccgtggttatgcggagccgccgcattccttagcgatcgcggggcagccgccgctgccgccgtgggcgactgacgcagcgcgggcgcgtggagccgccgccgcccctcccccaccgccgctctcgcgccagccggtccccgcgtgcccgccccttctccccggccgcacccgagacctcgcgcgccgccgctgccacgcgccccccccaccgccgccgccgccccagccccgcgccaccgccccagcccgcccagcccggaggtcccgcgtggagctgccgccgccgccggggagaaggatgaaggacaaacagaagaagaagaaggagcgcacgtgggccgaggccgcgcgcctggtattagaaaactactcggatgctccaatgacaccaaaacagattctgcaggtcatagaggcagaaggactaaaggaaatgaggagtgggacttcccctctcgcatgcctcaatgctatgctacattccaattcaagaggaggagaggggttgttttataaactgcctggccgaatcagccttttcacgctcaagaaggatgccctgcagtggtctcgccatccagctacagtggagggagaggagccagaggacacggctgatgtggagagctgtgggtctaatgaagccagcactgtgagtggtgaaaacgatgtatctcttgatgaaacatcttcgaacgcatcctgttctacagaatctcagagtcgacctctttccaatcccagggacagctacagagcttcctcacaggcgaacaaacaaaagaaaaagactggggtgatgctgcctcgagttgtcctgactcctctgaaggtaaacggggcccacgtggaatctgcatcagggttctcgggctgccacgccgatggcgagagcggcagcccgtccagcagcagcagcggctctctggccctgggcagcgctgctattcgtggccaggccgaggtcacccaggaccctgccccgctcctgagaggcttccggaagccagccacaggtcaaatgaagcgcaacagaggggaagaaatagattttgagacacctgggtccattcttgtcaacaccaacctccgtgccctgatcaactctcggaccttccatgccttaccatcacacttccagcagcagctcctcttcctcctgcctgaagtagacagacaggtggggacggatggcctgttgcgtctcagcagcagtgcactaaataacgagttttttacccatgcggctcagagctggcgggagcgcctggctgatggtgaatttactcatgagatgcaagtcaggatacgacaggaaatggagaaggaaaagaaggtggaacaatggaaagaaaagttctttgaagactactatggacagaagctgggtttgaccaaagaagagtcattgcagcagaacgtgggccaggaggaggctgaaatcaaaagtggcttgtgtgtcccaggagaatcagtgcgtatacagcgtggtccagccacccgacagcgagatgggcattttaagaaacgctctcggccagatctccgaaccagagccagaaggaatctgtacaaaaaacaggagtcagaacaagcaggggttgctaaggatgcaaaatctgtggcctcagatgttcccctctacaaggatggggaggctaagactgacccagcagggctgagcagtccccatctgccaggcacatcctctgcagcacccgacctggagggtcccgaattcccagttgagtctgtggcttctcggatccaggctgagccagacaacttggcacgtgcctctgcatctccagacagaattcctagcctgcctcaggaaactgtggatcaggaacccaaggatcagaagaggaaatcctttgagcaggcggcctctgcatcctttcccgaaaagaagccccggcttgaagatcgtcagtcctttcgtaacacaattgaaagtgttcacaccgaaaagccacagcccactaaagaggagcccaaagtcccgcccatccggattcaactttcacgtatcaaaccaccctgggtggttaaaggtcagcccacttaccagatatgcccccggatcatccccaccacggagtcctcctgccggggttggactggcgccaggaccctcgcagacattaaagcccgtgctctgcaggtccgaggggcgagaggtcaccactgccatagagaggcggccaccactgccatcggaggggggggtggcccgggtggaggtggcggcggggccaccgatgagggaggtggcagaggcagcagcagtggtgatggtggtgaggcctgtggccaccctgagcccaggggaggcccgagcacccctggaaagtgtacgtcagatctacagcgaacacaactactgccgccttatcctctaaatggggagcatacccaggccggaactgccatgtccagagctaggagagaggacctgccttctctgagaaaggaggaaagctgcctactacagagggctacagttggactcacagatgggctaggagatgcctcccaactccccgttgctcccactggggaccagccatgccaggccttgcccctactgtcctcccaaacctcagtagctgagagattagtggagcagcctcagttgcatccggatgttagaactgaatgtgagtctggcaccacttcctgggaaagtgatgatgaggagcaaggacccaccgttcctgcagacaatggtcccattctgtctctagtgggagatgatacattagagaaaggaactggccaagctcttgacagtcatcccactatgaaggatcctgtaaatgtgacccccagttccacacctgaatcctcaccgactgattgcctgcagaacagagcatttgatgacgaattagggcttggtggctcatgccctcctatgagggaaagtgatactagacaagaaaacttgaaaaccaaggctctcgtttctaacagttctttgcattggatacccatcccatcgaatgatgaggtagtgaaacagcccaaaccagaatccagagaacacataccatctgttgagccccaggttggagaggagtgggagaaagctgctcccacccctcctgcattgcctggggatttgacagctgaggagggtctagatcctcttgacagccttacttcactctggactgtgccatctcgaggaggcagtgacagcaatggcagttactgtcaacaggtggacattgaaaagctgaaaatcaacggagactctgaagcactgagtcctcacggtgagtccacggatacagcctctgactttgaaggtcacctcacggaggacagcagtgaggctgacactagagaagctgcagtgacaaagggatcttcggtggacaaggatgagaaacccaattggaaccaatctgccccactgtccaaggtgaatggtgacatgcgtctggttacaaggacagatgggatggttgctcctcagagctgggtgtctcgagtatgtgcggtccgccaaaagatcccagattccctactgctggccagtactgagtaccagccaagagccgtgtgcctgtccatgcctgggtcctcagtggaggccactaacccacttgtgatgcagttgctgcagggtagcttgcccctagagaaggttcttccaccagcccacgatgacagcatgtcagaatccccacaagtaccacttacaaaagaccagagccatggctcgctacgcatgggatctttacatggtcttggaaaaaacagtggcatggttgatggaagcagccccagttctttaagggctttgaaggagcctcttctgccagatagctgtgaaacaggcactggtcttgccaggattgaggccacccaggctcctggagcaccccaaaagaattgcaaggcagtcccaagttttgactccctccatccagtgacaaatcccattacatcctctaggaaactggaagaaatggattccaaagagcagttctcttcctttagttgtgaagatcagaaggaagtccgtgctatgtcacaggacagtaattcaaatgctgctccaggaaagagcccaggagatcttactacctcgagaacacctcgtttctcatctccaaatgtgatctcctttggtccagagcagacaggtcgggccctgggtgatcagagcaatgttacaggccaagggaagaagctttttggctctgggaatgtggctgcaacccttcagcgccccaggcctgcggacccgatgcctcttcctgctgagatccctccagtttttcccagtgggaagttgggaccaagcacaaactccatgtctggtggggtacagactccaagggaagactgggctccaaagccacatgcctttgttggcagcgtcaagaatgagaagacttttgtggggggtcctcttaaggcaaatgccgagaacaggaaagctactgggcatagtcccctggaactggtgggtcacttggaagggatgccctttgtcatggacttgcccttctggaaattaccccgagagccagggaaggggctcagtgagcctctggagccttcttctctcccctcccaactcagcatcaagcaggcattttatgggaagctttctaaactccaactgagttccaccagctttaattattcctctagctctcccacctttcccaaaggccttgctggaagtgtggtgcagctgagccacaaagcaaactttggtgcgagccacagtgcatcactttccttgcaaatgttcactgacagcagcacggtggaaagcatctcgctccagtgtgcgtgcagcctgaaagccatgatcatgtgccaaggctgcggtgcgttctgtcacgatgactgtattggaccctcaaagctctgtgtattgtgccttgtggtgagataataaattatggccatgggaaacattgtatatttagtgtgtgtattttgataatgattgatcttaaatctgtatacagaatatcattgatataatactctttaggcaggagcactcttgccttcccccaaaatttacactgctaaagccctctgtcacttggcgacccttctggtcttgctggaggggtttcctgggtataacccattgggctgcccaaggccagccagcctgagctctcctgcaagacagagcctgatgtggcacggagtggggttgcggggggtggggggactgcctgactcccagagggacttgaaactgaagcaagaaggttgcattctccaccaagggagttaacctacctgaactaagtagaaatgccagtcttccactaccccctccctgccatcttttcttctgctactttggggagttgatggccaggaaagaagccagcacagggttaaagtaactcctggcattgcccaccagggggctggtgcacctgctgacctcagggtcacagttgagtcatttgccagttgacggagcaagtttgaccttggttctgttgctgaagcaaatttggaacttttctgtctcagtgtgatccactaacccacaggatcatttggaaccttgaatagctctgcttggacaatggggttggggaatagggttgtctttcctatgaaaatgccatctgtagaccttgtgagtcagccgtccagatgtttgcaggtgaattcctctgcttgacatcctccctgtcactttggaccctatgggagtgggcatctccacgcacctgtgtatgtgaaagtcattttacatttcaaagcagtgtgtgtttcttatttttatatttttaactctttattcttggatgtataaagtgaactttttggcttctgtaagtatgctctatgcacctctaatgttttatcatgtatttatatgttgtacacagtactggctgattctgtaaatggatgtattgtacagagaacatgaacgtctcttcctaattttacatcttcagcatcattgcattaaagtggtgtaatctccttctctacatctgttgtcagagccactgagtgctgtgctgctcgacgtgagggtgaaatgattgacttgtgacctgccaggttgcccgatgccctgttgggtcaccggctggacctgctgcagcctgcagagccacagtcagcctgcccacatgccaccgagcaaacgcatcttgcttttcacatctctcctcctacagccttaatggctgcttgctgccatatgtgacaaatcaccaccaccagtgttaagtgcttctggattcatgggtgagttccctgggcagcccccaggaaggccttccagatctggctccagggtcaccacctgtcacagcaatacctgggaccatgctctcctgggactgtgaggctccttttgacgtacttttgacatcaggcaggtttgggaagaaacaaagccatgcctgctcctgcctctctcccaacatgtttccagcaagtagatgcccctgtgtgtgttttcccttgccttgtttcctgccttatatcttgtatttcgacttattacagagttgagggttcttgcttaatttagatcaagtataaaatttgtatgacttcaagtctcattttatctgaaaggtttttttctcatttaatctgatgtggcattttcgtcatctgaagcatgagtgacaagttgggaatgatgtggtgatttagaatgcagtattggccaagtccaagttgtcaacttaagcgtctgtttaccaaagaccgggaacaggggcccaaacatgtccagtcctcttcttccctctgctggaacctttggggacactcaagggtacagtttgacactgatctggtccatgaggctgcccagagaaagcactgcttctgtatgtctcttgtggtattggaacaataaacccgtacaacctgc

SEQ ID NO: 185993 - DNA, 7031 bp, Artificial Sequence
  derived and/or modified sequence
cggcagacacgcacgcacccgggcgccgaagggaaagccgcgtctcgccctcccgccccgccgtcggtcctgtctcagtccctcagcagagcgggaaagcggaggccggagccgtgacctctgaccccgtggttatgcggagccgccgcattccttagcgatcgcggggcagccgccgctgccgccgtgggcgactgacgcagcgcgggcgcgtggagccgccgccgcccctcccccaccgccgctctcgcgccagccggtccccgcgtgcccgccccttctccccggccgcacccgagacctcgcgcgccgccgctgccacgcgccccccccaccgccgccgccgccccagccccgcgccaccgccccagcccgcccagcccggaggtcccgcgtggagctgccgccgccgccggggagaaggatgaaggacaaacagaagaagaagaaggagcgcacgtgggccgaggccgcgcgcctggtattagaaaactactcggatgctccaatgacaccaaaacagattctgcaggtcatagaggcagaaggactaaaggaaatgagaagtgggacttcccctctcgcatgcctcaatgctatgctacattccaattcaagaggaggagaggggttgttttataaactgcctggccgaatcagccttttcacgctcaagaaggatgccctgcagtggtctcgccatccagctacagtggagggagaggagccagaggacacggctgatgtggagagctgtgggtctaatgaagccagcactgtgagtggtgaaaacgatgtatctcttgatgaaacatcttcgaacgcatcctgttctacagaatctcagagtcgacctctttccaatcccagggacagctacagagcttcctcacaggcgaacaaacaaaagaaaaagactggggtgatgctgcctcgagttgtcctgactcctctgaaggtaaacggggcccacgtggaatctgcatcagggttctcgggctgccacgccgatggcgagagcggcagcccgtccagcagcagcagcggctctctggccctgggcagcgctgctattcgtggccaggccgaggtcacccaggaccctgccccgctcctgagaggcttccggaagccagccacaggtcaaatgaagcgcaacagaggggaagaaatagattttgagacacctgggtccattcttgtcaacaccaacctccgtgccctgatcaactctcggaccttccatgccttaccatcacacttccagcagcagctcctcttcctcctgcctgaagtagacagacaggtggggacggatggcctgttgcgtctcagcagcagtgcactaaataacgagttttttacccatgcggctcagagctggcgggagcgcctggctgatggtgaatttactcatgagatgcaagtcaggatacgacaggaaatggagaaggaaaagaaggtggaacaatggaaagaaaagttctttgaagactactatggacagaagctgggtttgaccaaagaagagtcattgcagcagaacgtgggccaggaggaggctgaaatcaaaagtggcttgtgtgtcccaggagaatcagtgcgtatacagcgtggtccagccacccgacagcgagatgggcattttaagaaacgctctcggccagatctccgaaccagagccagaaggaatctgtacaaaaaacaggagtcagaacaagcaggggttgctaaggatgcaaaatctgtggcctcagatgttcccctctacaaggatggggaggctaagactgacccagcagggctgagcagtccccatctgccaggcacatcctctgcagcacccgacctggagggtcccgaattcccagttgagtctgtggcttctcggatccaggctgagccagacaacttggcacgtgcctctgcatctccagacagaattcctagcctgcctcaggaaactgtggatcaggaacccaaggatcagaagaggaaatcctttgagcaggcggcctctgcatcctttcccgaaaagaagccccggcttgaagatcgtcagtcctttcgtaacacaattgaaagtgttcacaccgaaaagccacagcccactaaagaggagcccaaagtcccgcccatccggattcaactttcacgtatcaaaccaccctgggtggttaaaggtcagcccacttaccagatatgcccccggatcatccccaccacggagtcctcctgccggggttggactggcgccaggaccctcgcagacattaaagcccgtgctctgcaggtccgaggggcgagaggtcaccactgccatagagaggcggccaccactgccatcggaggggggggtggcccgggtggaggtggcggcggggccaccgatgagggaggtggcagaggcagcagcagtggtgatggtggtgaggcctgtggccaccctgagcccaggggaggcccgagcacccctggaaagtgtacgtcagatctacagcgaacacaactactgccgccttatcctctaaatggggagcatacccaggccggaactgccatgtccagagctaggagagaggacctgccttctctgagaaaggaggaaagctgcctactacagagggctacagttggactcacagatgggctaggagatgcctcccaactccccgttgctcccactggggaccagccatgccaggccttgcccctactgtcctcccaaacctcagtagctgagagattagtggagcagcctcagttgcatccggatgttagaactgaatgtgagtctggcaccacttcctgggaaagtgatgatgaggagcaaggacccaccgttcctgcagacaatggtcccattctgtctctagtgggagatgatacattagagaaaggaactggccaagctcttgacagtcatcccactatgaaggatcctgtaaatgtgacccccagttccacacctgaatcctcaccgactgattgcctgcagaacagagcatttgatgacgaattagggcttggtggctcatgccctcctatgagggaaagtgatactagacaagaaaacttgaaaaccaaggctctcgtttctaacagttctttgcattggatacccatcccatcgaatgatgaggtagtgaaacagcccaaaccagaatccagagaacacataccatctgttgagccccaggttggagaggagtgggagaaagctgctcccacccctcctgcattgcctggggatttgacagctgaggagggtctagatcctcttgacagccttacttcactctggactgtgccatctcgaggaggcagtgacagcaatggcagttactgtcaacaggtggacattgaaaagctgaaaatcaacggagactctgaagcactgagtcctcacggtgagtccacggatacagcctctgactttgaaggtcacctcacggaggacagcagtgaggctgacactagagaagctgcagtgacaaagggatcttcggtggacaaggatgagaaacccaattggaaccaatctgccccactgtccaaggtgaatggtgacatgcgtctggttacaaggacagatgggatggttgctcctcagagctgggtgtctcgagtatgtgcggtccgccaaaagatcccagattccctactgctggccagtactgagtaccagccaagagccgtgtgcctgtccatgcctgggtcctcagtggaggccactaacccacttgtgatgcagttgctgcagggtagcttgcccctagagaaggttcttccaccagcccacgatgacagcatgtcagaatccccacaagtaccacttacaaaagaccagagccatggctcgctacgcatgggatctttacatggtcttggaaaaaacagtggcatggttgatggaagcagccccagttctttaagggctttgaaggagcctcttctgccagatagctgtgaaacaggcactggtcttgccaggattgaggccacccaggctcctggagcaccccaaaagaattgcaaggcagtcccaagttttgactccctccatccagtgacaaatcccattacatcctctaggaaactggaagaaatggattccaaagagcagttctcttcctttagttgtgaagatcagaaggaagtccgtgctatgtcacaggacagtaattcaaatgctgctccaggaaagagcccaggagatcttactacctcgagaacacctcgtttctcatctccaaatgtgatctcctttggtccagagcagacaggtcgggccctgggtgatcagagcaatgttacaggccaagggaagaagctttttggctctgggaatgtggctgcaacccttcagcgccccaggcctgcggacccgatgcctcttcctgctgagatccctccagtttttcccagtgggaagttgggaccaagcacaaactccatgtctggtggggtacagactccaagggaagactgggctccaaagccacatgcctttgttggcagcgtcaagaatgagaagacttttgtggggggtcctcttaaggcaaatgccgagaacaggaaagctactgggcatagtcccctggaactggtgggtcacttggaagggatgccctttgtcatggacttgcccttctggaaattaccccgagagccagggaaggggctcagtgagcctctggagccttcttctctcccctcccaactcagcatcaagcaggcattttatgggaagctttctaaactccaactgagttccaccagctttaattattcctctagctctcccacctttcccaaaggccttgctggaagtgtggtgcagctgagccacaaagcaaactttggtgcgagccacagtgcatcactttccttgcaaatgttcactgacagcagcacggtggaaagcatctcgctccagtgtgcgtgcagcctgaaagccatgatcatgtgccaaggctgcggtgcgttctgtcacgatgactgtattggaccctcaaagctctgtgtattgtgccttgtggtgagataataaattatggccatgggaaacattgtatatttagtgtgtgtattttgataatgattgatcttaaatctgtatacagaatatcattgatataatactctttaggcaggagcactcttgccttcccccaaaatttacactgctaaagccctctgtcacttggcgacccttctggtcttgctggaggggtttcctgggtataacccattgggctgcccaaggccagccagcctgagctctcctgcaagacagagcctgatgtggcacggagtggggttgcggggggtggggggactgcctgactcccagagggacttgaaactgaagcaagaaggttgcattctccaccaagggagttaacctacctgaactaagtagaaatgccagtcttccactaccccctccctgccatcttttcttctgctactttggggagttgatggccaggaaagaagccagcacagggttaaagtaactcctggcattgcccaccagggggctggtgcacctgctgacctcagggtcacagttgagtcatttgccagttgacggagcaagtttgaccttggttctgttgctgaagcaaatttggaacttttctgtctcagtgtgatccactaacccacaggatcatttggaaccttgaatagctctgcttggacaatggggttggggaatagggttgtctttcctatgaaaatgccatctgtagaccttgtgagtcagccgtccagatgtttgcaggtgaattcctctgcttgacatcctccctgtcactttggaccctatgggagtgggcatctccacgcacctgtgtatgtgaaagtcattttacatttcaaagcagtgtgtgtttcttatttttatatttttaactctttattcttggatgtataaagtgaactttttggcttctgtaagtatgctctatgcacctctaatgttttatcatgtatttatatgttgtacacagtactggctgattctgtaaatggatgtattgtacagagaacatgaacgtctcttcctaattttacatcttcagcatcattgcattaaagtggtgtaatctccttctctacatctgttgtcagagccactgagtgctgtgctgctcgacgtgagggtgaaatgattgacttgtgacctgccaggttgcccgatgccctgttgggtcaccggctggacctgctgcagcctgcagagccacagtcagcctgcccacatgccaccgagcaaacgcatcttgcttttcacatctctcctcctacagccttaatggctgcttgctgccatatgtgacaaatcaccaccaccagtgttaagtgcttctggattcatgggtgagttccctgggcagcccccaggaaggccttccagatctggctccagggtcaccacctgtcacagcaatacctgggaccatgctctcctgggactgtgaggctccttttgacgtacttttgacatcaggcaggtttgggaagaaacaaagccatgcctgctcctgcctctctcccaacatgtttccagcaagtagatgcccctgtgtgtgttttcccttgccttgtttcctgccttatatcttgtatttcgacttattacagagttgagggttcttgcttaatttagatcaagtataaaatttgtatgacttcaagtctcattttatctgaaaggtttttttctcatttaatctgatgtggcattttcgtcatctgaagcatgagtgacaagttgggaatgatgtggtgatttagaatgcagtattggccaagtccaagttgtcaacttaagcgtctgtttaccaaagaccgggaacaggggcccaaacatgtccagtcctcttcttccctctgctggaacctttggggacactcaagggtacagtttgacactgatctggtccatgaggctgcccagagaaagcactgcttctgtatgtctcttgtggtattggaacaataaacccgtacaacctgca

SEQ ID NO: 185994 - DNA, 5374 bp, Artificial Sequence
  derived and/or modified sequence
cgtcggtcctgtctcagtccctcagcagagcgggaaagcggaggccggagccgtgacctctgaccccgtggttatgcggagccgccgcattccttagcgatcgcggggcagccgccgctgccgccgtgggcgactgacgcagcgcgggcgcgtggagccgccgccgcccctcccccaccgccgccggggagaaggatgaaggacaaacagaagaagaagaaggagcgcacgtgggccgaggccgcgcgcctggtattagaaaactactcggatgctccaatgacaccaaaacagattctgcaggtcatagaggcagaaggactaaaggaaatgaggagtgggacttcccctctcgcatgcctcaatgctatgctacattccaattcaagaggaggagaggggttgttttataaactgcctggccgaatcagccttttcacgctcaagaaggatgccctgcagtggtctcgccatccagctacagtggagggagaggagccagaggacacggctgatgtggagagctgtgggtctaatgaagccagcactgtgagtggtgaaaacgatgtatctcttgatgaaacatcttcgaacgcatcctgttctacagaatctcagagtcgacctctttccaatcccagggacagctacagagcttcctcacaggcgaacaaacaaaagaaaaagactggggtgatgctgcctcgagttgtcctgactcctctgaaggtaaacggggcccacgtggaatctgcatcagggttctcgggctgccacgccgatggcgagagcggcagcccgtccagcagcagcagcggctctctggccctgggcagcgctgctattcgtggccaggccgaggtcacccaggaccctgccccgctcctgagaggcttccggaagccagccacaggtcaaatgaagcgcaacagaggggaagaaatagattttgagacacctgggtccattcttgtcaacaccaacctccgtgccctgatcaactctcggaccttccatgccttaccatcacacttccagcagcagctcctcttcctcctgcctgaagtagacagacaggtggggacggatggcctgttgcgtctcagcagcagtgcactaaataacgagttttttacccatgcggctcagagctggcgggagcgcctggctgatggtgaatttactcatgagatgcaagtcaggatacgacaggaaatggagaaggaaaagaaggtggaacaatggaaagaaaagttctttgaagactactatggacagaagctgggtttgaccaaagaagagtcattgcagcagaacgtgggccaggaggaggctgaaatcaaaagtggcttgtgtgtcccaggagaatcagtgcgtatacagcgtggtccagccacccgacagcgagatgggcattttaagaaacgctctcggccagatctccgaaccagagccagaaggaatctgtacaaaaaacaggagtcagaacaagcaggggttgctaaggatgcaaaatctgtggcctcagatgttcccctctacaaggatggggaggctaagactgacccagcagggctgagcagtccccatctgccaggcacatcctctgcagcacccgacctggagggtcccgaattcccagttgagtctgtggcttctcggatccaggctgagccagacaacttggcacgtgcctctgcatctccagacagaattcctagcctgcctcaggaaactgtggatcaggaacccaaggatcagaagaggaaatcctttgagcaggcggcctctgcatcctttcccgaaaagaagccccggcttgaagatcgtcagtcctttcgtaacacaattgaaagtgttcacaccgaaaagccacagcccactaaagaggagcccaaagtcccgcccatccggattcaactttcacgtatcaaaccaccctgggtggttaaaggtcagcccacttaccagatatgcccccggatcatccccaccacggagtcctcctgccggggttggactggcgccaggaccctcgcagacattaaagcccgtgctctgcaggtccgaggggcgagaggtcaccactgccatagagaggcggccaccactgccatcggaggggggggtggcccgggtggaggtggcggcggggccaccgatgagggaggtggcagaggcagcagcagtggtgatggtggtgaggcctgtggccaccctgagcccaggggaggcccgagcacccctggaaagtgtacgtcagatctacagcgaacacaactactgccgccttatcctctaaatggggagcatacccaggccggaactgccatgtccagagctaggagagaggacctgccttctctgagaaaggaggaaagctgcctactacagagggctacagttggactcacagatgggctaggagatgcctcccaactccccgttgctcccactggggaccagccatgccaggccttgcccctactgtcctcccaaacctcagtagctgagagattagtggagcagcctcagttgcatccggatgttagaactgaatgtgagtctggcaccacttcctgggaaagtgatgatgaggagcaaggacccaccgttcctgcagacaatggtcccattctgtctctagtgggagatgatacattagagaaaggaactggccaagctcttgacagtcatcccactatgaaggatcctgtaaatgtgacccccagttccacacctgaatcctcaccgactgattgcctgcagaacagagcatttgatgacgaattagggcttggtggctcatgccctcctatgagggaaagtgatactagacaagaaaacttgaaaaccaaggctctcgtttctaacagttctttgcattggatacccatcccatcgaatgatgaggtagtgaaacagcccaaaccagaatccagagaacacataccatctgttgagccccaggttggagaggagtgggagaaagctgctcccacccctcctgcattgcctggggatttgacagctgaggagggtctagatcctcttgacagccttacttcactctggactgtgccatctcgaggaggcagtgacagcaatggcagttactgtcaacaggtggacattgaaaagctgaaaatcaacggagactctgaagcactgagtcctcacggtgagtccacggatacagcctctgactttgaaggtcacctcacggaggacagcagtgaggctgacactagagaagctgcagtgacaaagggatcttcggtggacaaggatgagaaacccaattggaaccaatctgccccactgtccaaggtgaatggtgacatgcgtctggttacaaggacagatgggatggttgctcctcagagctgggtgtctcgagtatgtgcggtccgccaaaagatcccagattccctactgctggccagtactgagtaccagccaagagccgtgtgcctgtccatgcctgggtcctcagtggaggccactaacccacttgtgatgcagttgctgcagggtagcttgcccctagagaaggttcttccaccagcccacgatgacagcatgtcagaatccccacaagtaccacttacaaaagaccagagccatggctcgctacgcatgggatctttacatggtcttggaaaaaacagtggcatggttgatggaagcagccccagttctttaagggctttgaaggagcctcttctgccagatagctgtgaaacaggcactggtcttgccaggattgaggccacccaggctcctggagcaccccaaaagaattgcaaggcagtcccaagttttgactccctccatccagtgacaaatcccattacatcctctaggaaactggaagaaatggattccaaagagcagttctcttcctttagttgtgaagatcagaaggaagtccgtgctatgtcacaggacagtaattcaaatgctgctccaggaaagagcccaggagatcttactacctcgagaacacctcgtttctcatctccaaatgtgatctcctttggtccagagcagacaggtcgggccctgggtgatcagagcaatgttacaggccaagggaagaagctttttggctctgggaatgtggctgcaacccttcagcgccccaggcctgcggacccgatgcctcttcctgctgagatccctccagtttttcccagtgggaagttgggaccaagcacaaactccatgtctggtggggtacagactccaagggaagactgggctccaaagccacatgcctttgttggcagcgtcaagaatgagaagacttttgtggggggtcctcttaaggcaaatgccgagaacaggaaagctactgggcatagtcccctggaactggtgggtcacttggaagggatgccctttgtcatggacttgcccttctggaaattaccccgagagccagggaaggggctcagtgagcctctggagccttcttctctcccctcccaactcagcatcaagcaggcattttatgggaagctttctaaactccaactgagttccaccagctttaattattcctctagctctcccacctttcccaaaggccttgctggaagtgtggtgcagctgagccacaaagcaaactttggtgcgagccacagtgcatcactttccttgcaaatgttcactgacagcagcacggtggaaagcatctcgctccagtgtgcgtgcagcctgaaagccatgatcatgtgccaaggctgcggtgcgttctgtcacgatgactgtattggaccctcaaagctctgtgtattgtgccttgtggtgagataataaattatggccatgggaaacattgtatatttagtgtgtgtattttgataatgattgatcttaaatctgtatacagaatatcattgatataatactctttaggcaggagcactcttgccttcccccaaaatttacactgctaaagccctctgtcacttggcgacccttctggtcttgctggaggggtttcctgggtataacccattgggctgcccaaggccagccagcctgagctctcctgcaagacagagcctgatgtggcacggagtggggttgcggggggtggggggactgcctgactcccagagggacttgaaactgaagcaagaaggttgcattctccaccaagggagttaacctacctgaactaagtagaaatgccagtcttccactaccccctccctgccatcttttcttctgctactttggggagttgatggccaggaaagaagccagcacagggttaaagtaactcctggcattgcccaccagggggctggtgcacctgctgacctcagggtcacagttgagtcatttgccagttgacggagca

SEQ ID NO: 185995 - DNA, 4626 bp, Artificial Sequence
  derived and/or modified sequence
atgaaggacaagcagaagaagaagaaggagaggacctgggccgaggccgcccggctggtgctggagaactacagtgatgcccccatgacccccaagcagatcctgcaggtgattgaggccgagggcctgaaggagatgaggagcggcaccagccccctggcctgcctgaatgccatgctgcacagcaacagccggggcggggagggcctcttctacaagctgcccggccgcatcagcctcttcaccctgaagaaggatgccctgcagtggagccgccacccagccaccgtggagggggaggagcctgaggacacagcagatgtggagagctgtggcagcaatgaggccagcacagtgtctggagaaaatgatgtgtccctggatgagaccagcagcaatgccagctgcagcacagagagccagagccggcccctgagcaacccccgggacagctaccgggccagcagccaggccaacaagcagaagaagaagacaggagtgatgctgccccgggtggtgctgacccccctgaaggtgaatggagcccacgtggagagcgccagcggcttcagcggctgccacgcagatggagagagcggcagccccagcagcagcagcagcggcagcctggccctgggcagcgctgccatccggggccaggccgaggtgacccaggaccctgcccccctgctgcggggcttcaggaagccagccaccggccagatgaagaggaacagaggagaggagattgactttgagaccccaggcagcatcctggtgaacaccaacctgcgggccctgatcaacagcaggaccttccacgccctgcccagccacttccagcagcagctgctcttcctgctgcctgaggtggaccggcaggtgggcacagatggcctgctgcggctgagcagcagcgccctgaacaatgagttcttcacccacgccgcccagagctggagggagcggctggctgatggagagttcacccatgagatgcaggtgcgcatccggcaggagatggagaaggagaagaaggtggagcagtggaaggagaagttctttgaggactactacggccagaagctgggcctgaccaaggaggagagcctgcagcagaatgtgggccaggaggaggccgagatcaagagcggcctgtgtgtgcctggagagagcgtgcgcatccagaggggccctgccacccggcagagagatggccacttcaagaagaggagcaggccagacctgcggacccgggcccggaggaacctgtacaagaagcaggagagcgagcaggccggcgtggccaaggatgccaagtctgtggccagtgatgtgcccctgtacaaggatggagaggccaagacagatcctgctggcctgagcagcccccacctgcccggcaccagcagcgctgccccagacctggagggccctgagttccctgtggagagcgtggccagccgcatccaggccgagccagacaacctggcccgggccagcgccagcccagaccgcatccccagcctgccccaggagaccgtggaccaggagcccaaggaccagaagaggaagagctttgagcaggccgccagcgccagcttccctgagaagaagccccggctggaggaccggcagagcttcaggaacaccatcgagagcgtgcacacagagaagccccagcccaccaaggaggagcccaaggtgccccccatccgcatccagctgagccgcatcaagccaccctgggtggtgaagggccagcccacctaccagatctgcccccgcatcatccccaccacagagagcagctgccggggctggacaggagcccggaccctggccgacatcaaggcccgggccctgcaggtgcggggggcccggggccaccactgccaccgggaggccgccaccacagccatcggcggcggcggcggccctgggggcggcggcggcggggccacagatgagggcggcggccggggcagcagcagtggagatggaggagaggcctgtggccaccctgagccccggggcggccccagcacccctgggaagtgcaccagtgacctgcagaggacccagctgctgcccccctaccccctgaatggagagcacacccaggccggcacagccatgagccgggcccggcgggaggacctgcccagcctgaggaaggaggagagctgcctgctgcagagggccaccgtgggcctgacagatggcctgggagatgccagccagctgcctgtggcccccaccggggaccagccctgccaggccctgcccctgctgagcagccagacctctgtggccgagcggctggtggagcagccccagctgcacccagatgtgaggacagaatgtgagagcggcaccacctcctgggagagtgatgatgaggagcagggccccaccgtgcctgctgacaatggccccatcctgagcctggtgggagatgacaccctggagaagggcaccggccaggccctggacagccaccccaccatgaaggaccctgtgaatgtgacccccagcagcaccccagagagcagccccacagactgcctgcagaacagagcctttgatgatgagctgggcctgggcggcagctgcccccccatgagggagagtgacacccggcaggagaacctgaagaccaaggccctggtgagcaacagcagcctgcactggatccccatccccagcaatgatgaggtggtgaagcagcccaagccagagagccgggagcacatccccagcgtggagccccaggtgggggaggagtgggagaaggccgcccccaccccaccagccctgcccggggacctgacagctgaggagggcctggaccccctggacagcctgaccagcctgtggacagtgcccagccggggcggcagtgacagcaatggcagctactgccagcaggtggacatcgagaagctgaagatcaacggggacagcgaggccctgagcccccatggagagagcacagacacagccagtgactttgagggccacctgacagaggacagcagcgaggccgacacccgggaggccgctgtgaccaagggcagctctgtggacaaggatgagaagcccaactggaaccagagcgcccccctgagcaaggtgaatggagacatgaggctggtgaccaggacagatggcatggtggccccccagagctgggtgtcccgggtgtgtgctgtgcggcagaagatcccagacagcctgctgctggccagcacagagtaccagcccagggctgtgtgcctgtccatgcctggcagctctgtggaggccaccaaccccctggtgatgcagctgctgcagggcagcctgcccctggagaaggtgctgcccccagcccatgatgacagcatgtctgagagcccccaggtgcccctgaccaaggaccagagccacggcagcctgaggatgggcagcctgcacggcctgggcaagaacagcggcatggtggatggcagcagccccagcagcctgcgggccctgaaggagcccctgctgcctgacagctgtgagaccggcaccggcctggccagaattgaggccacccaggcccctggggccccccagaagaactgcaaggctgtgcccagctttgacagcctgcaccctgtgaccaaccccatcaccagcagcaggaagctggaggagatggacagcaaggagcagttcagcagcttcagctgtgaggaccagaaggaggtgcgggccatgagccaggacagcaacagcaatgctgcccctgggaagagccctggggacctgaccaccagcaggaccccccgcttcagcagccccaacgtcatcagctttggacctgagcagacaggccgggccctgggggaccagagcaatgtgacaggccagggcaagaagctgtttggaagtggaaatgtggccgccaccctgcagaggcccaggcctgctgaccccatgcccctgcctgctgagatcccccctgtgttccccagcggcaagctgggccccagcaccaacagcatgtctgggggcgtgcagaccccccgggaggactgggcccccaagccccacgcctttgtgggctctgtgaagaatgagaagacctttgtgggcggccccctgaaggccaatgcagaaaataggaaggccaccggccacagccccctggagctggtgggccacctggagggcatgccctttgtgatggacctgcccttctggaagctgccccgggagcccgggaagggcctgtctgagcccctggagcccagcagcctgcccagccagctgagcatcaagcaggccttctacggcaagctgagcaagctgcagctgagcagcaccagcttcaactacagcagcagcagccccaccttccccaagggcctggccggctctgtggtgcagctgagccacaaggccaactttggagccagccacagcgccagcctgagcctgcagatgttcacagacagcagcacagtggagagcatcagcctgcagtgtgcctgcagcctgaaggccatgatcatgtgccagggctgtggggccttctgccatgatgactgcatcggccccagcaagctgtgtgtgctgtgcctggtggtgaggtag

SEQ ID NO: 185996 - DNA, 4626 bp, Artificial Sequence
  derived and/or modified sequence
atgaaggacaagcagaagaagaagaaggagcggacctgggccgaggccgctaggctagtgctcgagaattattctgacgcacccatgacaccgaaacaaatcctgcaggtgatagaggccgaagggctgaaggagatgcggtctgggaccagtcccctcgcctgcctgaatgcaatgctgcactccaacagccggggaggagaagggttgttttataaattgcccgggcgtatctcgttattcactctgaagaaggatgctctgcagtggagtcgacaccctgctaccgtcgaaggcgaggaacccgaagataccgcagacgtggaatcctgcggctctaatgaagcctccaccgttagcggagaaaatgatgttagcctggacgagacctcaagcaatgcttcctgttctaccgagtcccagagcaggccgctatcaaatcctagagacagctacagagcctcatctcaggccaacaaacaaaagaaaaaaaccggcgtcatgcttccaagggtcgtactcacaccactaaaggtgaatggcgctcacgtcgaaagcgccagtgggttttccggctgtcacgctgacggagagtcaggtagtccatcctctagcagctcagggagcctcgctcttggatcagccgcaatccgtggtcaggcagaagtcactcaagatcctgcaccgctccttaggggatttagaaaaccggccacagggcagatgaagcgcaataggggcgaggagattgatttcgaaacaccaggctccatcctagtgaacacaaacctgcgggcacttattaactctcgtacctttcacgccctgcctagccacttccagcaacagctgctgtttctgctgccagaggtcgaccgccaggtgggaaccgatggtcttcttagactgtcgtctagtgcacttaacaacgagttcttcactcatgcagcacagagttggcgggagcggctcgcggacggcgaatttacgcacgaaatgcaggtaagaatccgacaggagatggagaaagaaaagaaagtcgaacagtggaaggaaaagtttttcgaggactactacggccagaagctagggttgacaaaggaagaaagtctccagcagaatgtcggacaggaggaggcagagataaagagcggtctgtgtgttcctggagagtccgtgcggattcagcgtggacccgccacgaggcaacgggacgggcacttcaaaaaaaggtccaggcctgacctgcgcacccgcgctcgaagaaacctgtataaaaaacaagaaagcgagcaagcaggagtcgccaaagatgcaaagtctgtggcgtcagatgtccctctgtataaagacggagaggcaaagacagatcccgcagggttatcctcccctcatctgccgggaaccagcagcgccgcaccggacttggaggggccagagttcccagtcgagtccgttgcctccagaattcaagccgaaccggacaatcttgcccgggccagtgcaagcccggatcggattcccagcctgccacaagagaccgtcgaccaggagcccaaggaccagaagaggaaatcgttcgaacaggccgcttctgcctccttccccgagaagaagcctcgtctagaggatcgccagagcttcagaaacaccatcgaaagtgtgcatacagagaaaccccaacctaccaaggaggaaccaaaagtacctccaattagaattcaactttctcgcattaagcctccctgggttgtgaaaggacagccgacctaccaaatctgccctcggattattcctacaaccgagagttcttgccgagggtggactggggcccgtaccctcgccgacataaaagcacgggcactacaagtaagaggggctcggggccatcattgtcaccgtgaggccgccacaacagccataggcggcggaggcggtcccggcgggggtggagggggcgccaccgacgagggtggaggccggggtagctctagtggagatggcggagaagcctgtggccacccagagccaagaggcggaccttctaccccgggtaaatgcaccagcgacctgcagcgcacccagcttttgccaccataccctctgaacggcgaacatacccaggcaggcaccgctatgtctagagcccgccgggaggacctgccgagtttacgtaaagaagagtcctgcctcctccagcgagcgaccgtgggactcaccgatgggctgggagatgccagccagctgcccgtggcccctacaggcgaccaaccctgtcaggctctgccattgctgtcctcacaaaccagtgtggctgagcgattagttgagcagccccagctccatcccgacgttcgaaccgaatgtgagagcggcacgaccagctgggaatcagatgatgaggagcaggggcctaccgtccctgctgataatggccctattctgtccctggtgggggacgatacgctggaaaagggaaccggccaggccctagactcacatccgaccatgaaagatcctgttaatgtgacccccagcagtacccccgagagcagtcccaccgattgcctccaaaacagagcattcgacgacgagctcggacttgggggcagctgccccccaatgagagagtcggatacgcgtcaggaaaacttaaaaacaaaagccctggtgtcaaacagtagcctgcactggatccccatcccaagcaatgacgaggttgtcaagcaacctaaacccgaaagcagggagcatatcccttctgttgagccacaggtgggcgaggaatgggagaaggcagctcccacgcctcctgccttacctggggatctgaccgccgaagaggggctggatccattggattctctcacgagcctatggaccgtgcccagcagaggcggatcggatagcaacgggtcctattgtcagcaagttgatatagagaagctaaaaattaatggggactccgaagccctctctccccatggggagtccaccgacaccgcatcggactttgaaggccacctgaccgaagattcatcagaggcagacacaagggaagctgcagtaactaagggcagttccgtggacaaggatgagaagcctaactggaatcaatcagcccctttgtccaaagttaatggagacatgcggctcgtgacaagaaccgatggaatggtcgctcctcagtcctgggtcagcagagtgtgcgcagtgagacagaaaatccctgactccttgttacttgctagcaccgagtaccagccccgagcagtctgcctgtctatgcctggttctagcgtcgaagccacaaaccccctcgtgatgcagctgctccagggctctctgcccctggagaaagtgctccctccggcacacgacgattccatgagcgagtcaccacaggtcccattgacaaaggatcagagtcacggttcactgagaatgggatccttgcatggtcttggcaagaactctggcatggtggacggaagctccccctctagcttacgcgctctgaaggagcccttacttcccgactcttgtgagacaggcaccggtctcgcccgtatcgaagcaacccaggcaccaggcgctcctcagaagaactgcaaagccgtgccctccttcgactccctgcaccccgtgacaaatcctattacgagctctaggaagctggaagaaatggacagcaaggaacaattctcgagcttctcttgcgaagaccaaaaagaagtgagggccatgtctcaggacagcaatagcaacgccgctccgggaaagagtcccggggatctgactaccagccgcacaccgaggttctcctcacccaatgtgatctctttcggaccagagcagactgggagggcactgggtgatcaaagcaacgtcacggggcaaggaaagaaactttttggcagcggtaacgtggcggctacgcttcagcgcccacggcccgcggacccgatgcccttacccgctgaaatcccgcctgtattcccatctggcaaattgggtcccagcactaacagtatgtcgggcggcgtgcaaacccctcgggaagactgggcaccaaaaccccacgcgttcgttgggagcgtcaagaatgaaaagacttttgtaggtggcccactcaaagccaacgctgagaatcggaaagctacagggcacagccccctggagctagtaggacatctggaagggatgcctttcgtcatggatcttcccttttggaagctgccgcgtgagcctggaaaagggctctcagaacccctggagccgtcttctctgccttcgcaattgagcatcaaacaagctttttacggaaagctctctaagctccagctgtctagtacaagtttcaactacagttctagctcacccactttccctaagggcctcgcggggtcagtggtccaactgtcccataaagcaaacttcggtgcttcgcactcagctagtctaagtctgcagatgtttacagattccagcactgtggagtccatctcattgcagtgcgcctgttcacttaaggcaatgataatgtgccagggatgcggcgccttctgccatgatgactgtattggaccttctaaactttgcgtgctgtgtctcgtcgtaagatag

SEQ ID NO: 185997 - DNA, 4626 bp, Artificial Sequence
  derived and/or modified sequence
atgaaggacaagcagaagaagaagaaggagcggacctgggccgaggccgcccgactggtgcttgagaactacagtgatgcaccaatgaccccaaagcagattctgcaggtgattgaggcagaggggctgaaggaaatgaggagtgggacctccccactcgcgtgtctgaatgctatgcttcattccaactctaggggaggtgaaggactcttctataagctgccgggcagaattagtctcttcactctaaaaaaggacgctcttcaatggtcaaggcaccctgcaactgtggaaggtgaggaacccgaggacactgccgatgtggaaagctgcggttctaatgaagcaagcactgtctccggggagaacgacgtgtcacttgatgaaacatcctctaatgccagctgtagcaccgagtcacaatcccgccctctgtccaatccccgtgatagctacagagcctccagccaagccaacaagcagaagaagaaaacgggtgtgatgctgcctcgggtagttctcactccactgaaggttaatggtgctcacgtcgaatcagcctcggggttcagtggttgccacgctgatggcgagtcgggctccccctcatcaagctctagcggctcactggcactcggctcggctgcaatccgagggcaggctgaggtgacccaagacccggctcctttactgaggggcttcaggaaacccgccaccgggcagatgaagcgtaataggggagaggagatcgactttgagaccccaggctccatcctggtgaacaccaatctgagggccctcataaacagtcggacattccacgctctgccaagccacttccagcaacaactgctgtttttgctccccgaggtggacagacaggtgggaaccgatggactgctgaggctgtcatccagcgccctaaacaacgaatttttcactcacgccgcccagtcgtggagggaaaggctggctgacggtgagttcactcacgaaatgcaagtcagaatcagacaggaaatggaaaaagagaaaaaggtcgaacagtggaaagaaaagtttttcgaggactattatggtcagaagctgggtctcacaaaggaggagtctctccaacagaacgtgggtcaggaggaggctgagattaaatccggtctttgtgtgcctggggagtctgtccggattcagcgagggccggcgaccagacagcgcgacggccactttaagaaaaggtctagacctgacctgcgaacccgagctaggcgcaacttgtataagaagcaggaaagcgagcaggcaggagtggcgaaggatgctaagtcagtggccagtgatgtccctctttataaggatggggaggctaaaacagaccccgctgggctcagcagcccacatttacctggtactagttcagcggcacctgaccttgagggccctgaattcccagtagagtctgtcgcaagtaggattcaggccgagccagacaacttggccagagcttcggctagcccggatcggatccccagccttcctcaggaaaccgtcgaccaggagcccaaggatcaaaagaggaagagcttcgaacaggcagcctctgcctctttccccgaaaagaagccgagattagaggacaggcagtcattcagaaatacaattgagtcggtacataccgagaagcctcaaccaacaaaagaggagccaaaggttcctccaatccgcatacaactctcgagaattaagcccccctgggtcgttaagggccagcccacataccaaatctgcccgagaattataccgacaactgaaagcagctgcagggggtggactggggcaaggacactggcagatatcaaagcccgcgcactgcaagttaggggagcccgaggtcaccactgccacagagaggcggcgaccaccgccataggcggggggggaggtcccggaggcggagggggaggggccactgacgagggcggaggccggggatcatcctccggagacgggggcgaagcttgtgggcacccagaaccgaggggcgggccctcaacacctggaaagtgtacctcagacctccaaagaacccagcttcttcctccatatccactcaacggtgagcacacacaggccggcactgcgatgagtcgcgctaggagagaggacctgccatctctccgtaaggaggagtcttgcctactgcagcgggcgactgttggcctgacagacggacttggagacgcctcccagctcccagtagcgcccacaggggatcaaccctgccaagccctgcccctgctaagttctcagacatctgtagctgaaagactggtggaacagccccagctccatccagacgtccggacggaatgtgagagcggcactacatcatgggagtcagacgacgaagaacaaggacccaccgtgcctgctgacaatggacctattctcagcttagtgggtgatgataccctagagaaaggcacaggccaggcactagacagtcacccaaccatgaaagacccagtgaacgtgactccttcatccacccccgaatcctcccctaccgattgcttgcagaatcgcgccttcgacgacgaactgggactggggggcagttgcccgcctatgagggagtcagacacaaggcaagagaatctgaagaccaaggcactggtctcgaattcgtcactccactggatccctattccttccaacgatgaggtcgtgaagcaacctaagcccgagtcccgcgagcatatccctagtgtcgagcctcaggttggcgaggaatgggagaaagctgctcctacacctcccgccctacctggcgacttgaccgctgaagagggactggacccattagatagccttaccagcctgtggaccgttccctctcgcggaggtagcgatagcaatggttcttactgccagcaggtcgacatcgagaagctgaagattaacggagactctgaggccctctcgcctcatggagagtcgaccgacaccgcaagtgactttgaaggccacctaaccgaggacagctccgaggcagacaccagggaggcagccgtcaccaaggggagttccgttgataaggatgagaagcctaactggaaccagtccgctcctctgtctaaggtgaacggagacatgcgtctggttactcgtactgacggaatggtcgctcctcagtcatgggtcagtcgagtctgcgccgtgcggcagaagatcccagactcgctgttgttagcatcaacagagtatcagccccgcgcagtgtgcttgagcatgcccggttcatcagtggaagcaacaaatccactggttatgcagctgctccaaggttccttgcctctggagaaggtcctaccccctgcacacgacgattccatgagcgaaagccctcaagtgcccctgaccaaagaccaaagccacgggtctcttcgaatgggctcactgcatggcttgggaaagaacagcggaatggtggatggtagctctccttcaagtcttcgagctttgaaggaacctcttctgcccgacagctgtgaaacaggaactggattagcacgtattgaggccacacaggcccccggtgctcctcaaaagaactgtaaagctgtccccagtttcgactccttgcatcccgtgacaaatccaataacgagttcacgtaagctcgaagagatggactctaaagagcagttttcctccttttcatgcgaggatcagaaagaagtgcgggccatgagccaggatagtaactcgaacgccgctcccggtaaatccccaggagacttaaccacctcaagaaccccacgtttcagttcacccaacgttatctccttcgggcccgagcagacaggccgcgcattgggagatcaaagcaatgttactggacagggaaagaaactcttcggttctggaaacgtggccgcaacacttcagaggcctcggcctgctgatcccatgcccctccctgccgaaattcctcccgtttttcccagtgggaaactcggaccttcaacaaattccatgagtggtggcgtccagacgccaagagaggattgggcaccaaaaccgcacgccttcgtcggttccgtgaaaaatgaaaaaacctttgtcggtggcccattaaaagcgaatgcagagaatcgaaaggctaccggacacagtcctctcgaacttgtgggacacctggaaggtatgcctttcgtcatggacctgcccttctggaaactgccacgcgagcctggaaagggactttccgaacccctcgagcccagctcactgccctctcagctgtccatcaaacaggccttctatgggaagctgtcaaagctgcagctctcaagcacttccttcaattactccagcagcagtcccacatttcccaaaggcctagctgggagcgtggtacagcttagccacaaagctaacttcggagcctctcatagtgccagccttagcttacagatgttcaccgatagtagcacggtggaatctatcagcttgcagtgtgcctgctctctcaaggctatgattatgtgtcagggctgcggcgcattttgtcacgatgactgtatcggcccttctaaactgtgtgtgctctgcctggttgtgagatag

SEQ ID NO: 185998 - DNA, 4626 bp, Artificial Sequence
  derived and/or modified sequence
atgaaggacaagcagaagaagaagaaggagcggacctgggccgaggcggcccgtctggtccttgagaactattccgatgcacctatgacgccaaaacagattctgcaagtcatagaggcggaaggtctcaaggagatgcggtccggcacttcccctcttgcttgcctcaatgccatgttgcactctaacagtagagggggtgaagggctcttctataaactccctgggcggataagtctgttcaccctcaaaaaggacgccttacaatggagccggcaccctgctacagtagaaggggaggagcccgaagacaccgccgacgtggaatcttgcgggagcaacgaggccagcaccgtaagcggagagaacgatgtgagcctggacgaaactagctctaacgccagttgctctacagagtcccaatcccggccactcagtaacccccgcgacagctaccgcgcatctagtcaggccaataaacaaaagaagaaaactggtgtaatgctacctagagttgtcttaaccccactcaaggtaaacggcgcacacgtcgaaagtgccagtggattctccggatgtcatgcagacggcgagtctgggtcaccctcctcgagttcgtcaggctccctagcccttgggtcagcagccataagagggcaggccgaggtcacccaagatcctgctccattgctgcgcggctttcggaaaccagccaccggacaaatgaagcgaaacagaggcgaagaaatagattttgaaactccaggctctattttggttaacacaaaccttcgtgccctgattaacagccgcacttttcatgctttaccttctcattttcagcagcagttgctgttcttactcccggaggtcgatcggcaggttggcacggacgggcttctgcgactgagcagttcagccttgaacaacgaattctttactcacgctgcacaaagctggcgtgaaagactcgccgacggtgagttcactcatgagatgcaagtcaggatccgccaggagatggaaaaggaaaaaaaggtcgagcaatggaaagagaagttcttcgaggactactatggacagaagctcgggctgactaaggaagaatcgctgcagcagaatgtgggccaagaagaggccgagatcaagtcaggtctctgtgtgccaggggagtccgttagaattcagcggggccctgcgacacgacagagagacgggcattttaaaaaacggtctcgacctgacctccgcacccgagctcgcagaaacctgtacaagaagcaggagagcgagcaggcgggcgtggcgaaggacgcaaaatcagttgctagcgatgtacctctctacaaggacggggaggcaaagacagaccctgctgggttatcaagtccgcacctccccggcacctcaagtgccgccccagatctggagggtccagaatttccagtggagtctgtcgcctctcggatccaagctgagccggacaatctggcccgcgcaagcgcttcccccgataggattccctccctaccacaggagaccgttgatcaggaacctaaggaccagaagcgcaaaagctttgagcaggctgcttcagcgagcttccctgagaaaaaaccaaggctggaggacaggcaatctttcagaaacaccattgaatccgttcacactgaaaagccccagccgaccaaagaggagccaaaggttccgcccatcagaattcagctaagccggataaaacccccttgggtggtcaaaggacagccaacatatcaaatttgcccaaggattatccctacgacagaatcgtcatgcaggggatggactggtgcaagaacccttgccgatattaaggccagggccttgcaagttcgcggcgcaagaggtcatcattgtcaccgagaggctgccaccaccgccattgggggtggtggagggcctgggggaggcgggggtggcgctaccgacgagggaggcggtagaggcagttcatctggggacgggggggaagcatgtggccacccagaaccacggggaggcccctctacacccggaaaatgcacaagcgacctacaacggactcaactcctgcccccttacccgctgaatggagaacatacccaggcggggaccgcaatgagcagggcacgcagggaggatctgccctcattgagaaaggaagagtcttgcctgttacaacgcgcaacagtggggctcacagatgggttgggggacgccagccagctgccagtggcacctaccggtgaccagccctgccaagcgttgccgctcctgtcttcccaaacatctgttgccgaaagactcgtggagcagccccagctgcaccccgatgtgaggacagagtgtgagagtggcacgacgtcttgggaaagcgacgacgaggaacagggccctaccgtgcccgcagacaacggacctattttgtcactcgtgggcgatgacacactcgaaaagggaacagggcaggcgctcgatagccaccccacgatgaaagatcccgtcaatgtgacaccttcctccacacccgagagcagtccaacagactgcctacaaaatcgggccttcgacgacgagctcggcctcgggggaagctgtcctcccatgcgcgaatcggataccagacaggaaaacctgaaaacaaaggcactagtgagcaattcctcactgcactggatacctatcccctcaaatgacgaagtggtgaaacagcctaaacctgagtctcgggagcatatcccttccgtggaacctcaggttggtgaggaatgggagaaggctgcaccgaccccccctgctttgccaggcgatttgacagcagaagaaggcctggatcctttagactccttgacgtccctgtggacagttccttcacggggcggaagtgactccaacggatcttactgtcaacaagtcgatatcgaaaagctcaaaattaatggagactcggaggctcttagtccccacggcgaatccactgacacggcgagtgatttcgaagggcacctgacagaggattcgtctgaagcagatacccgtgaggccgcagtaaccaaaggtagcagcgtagataaggacgagaagccaaactggaatcagtctgctcctctaagcaaagtgaacggagacatgcgcctcgtgacaaggacagacggaatggtagctccacagtcctgggtctcccgcgtgtgcgcggttcgccagaagattccagactcacttctcttagcaagcaccgagtaccagccaagagccgtctgcttgtccatgcccggatcatctgtggaggctactaaccccttggtgatgcagctcctccaaggctcgttacctctggaaaaagttctcccacccgcccatgacgatagcatgtccgagagtccccaggtcccactgaccaaggaccagtcccatgggtccctgcgcatgggaagcttacatggcctgggcaagaacagtgggatggtggacggaagcagcccgtcaagtctccgagcactcaaagaacctctgcttcctgattcttgcgaaacaggaacgggcctcgctaggatcgaagctacacaggctcccggcgccccgcagaagaattgtaaggccgttcccagcttcgattcactgcaccctgtaacgaacccgatcaccagctcgcgcaagctggaggagatggacagcaaggaacaattcagtagcttcagttgtgaggaccagaaggaggtgcgggctatgtctcaggattccaactcaaatgccgctccgggcaagagtccaggagacctcaccacctccaggacaccccgctttagctctcccaacgtgatttccttcggccccgaacagactggacgggcgctgggagatcaaagcaacgtgactgggcaaggaaaaaagctgttcggctccggcaatgttgccgccacactccagcggcccaggcctgccgatccaatgcctctgccagcagagataccgccagtcttccccagcggtaaactaggcccaagcacgaactccatgtccggcggcgtccagacaccgagggaggactgggcccccaagcctcacgcattcgtggggagcgtgaagaatgagaagactttcgttgggggacctctgaaagctaacgcggaaaataggaaagcaaccggacattcccctttggaactcgttgggcaccttgaggggatgccgtttgtgatggacctgcccttttggaagcttccacgcgaacctggaaagggcctttccgagccactcgaaccatccagtttaccgagccaactatcgattaagcaggccttttacggcaagctgtccaagctccagctgtcttccacctcatttaactattcttcatcgagccctacattccctaagggtctcgctgggagcgttgtccaactgagccacaaggccaacttcggggcttcccattctgccagtctgtccttacagatgttcactgactcctcaacagtggagtcaatcagcctgcagtgcgcatgcagcctgaaggccatgatcatgtgtcaaggatgcggggccttctgccacgacgactgtattggtcctagtaaactgtgcgtcttgtgcctggtagtcagatag

SEQ ID NO: 185999 - DNA, 4626 bp, Artificial Sequence
  derived and/or modified sequence
atgaaagacaagcagaagaagaagaaggaaaggacgtgggcagaggctgcccgactggtgctggagaactacagtgatgcacctatgacgcccaaacagatactccaggtgatagaagcagaggggttaaaggaaatgaggtccgggacgagccccctggcttgcctgaatgctatgctgcattctaacagccgaggcggagaagggctcttttataaacttccaggcaggataagtctctttactctgaaaaaagacgctctgcagtggtcaaggcaccctgctactgtggagggtgaggagcctgaagacactgctgatgtggagagctgcgggagcaatgaagcctctacagtctctggtgagaacgacgtgagcctcgatgagacgtcctcgaacgctagctgtagcactgagagccaaagtaggcctttgagcaaccctcgcgactcgtaccgagccagctcccaggcaaacaaacagaagaaaaagaccggagtcatgcttccccgtgtcgttctcacgccccttaaagtcaatggcgctcacgtggaatcagccagcggattctccggctgccacgcggacggtgaaagcgggtccccttcctcttcctcttcagggtccctggcactgggatcagctgccattaggggtcaagcagaggtcactcaggatcctgccccattgctgcggggtttcagaaaaccagcaacggggcagatgaagagaaataggggggaggaaatagactttgaaactcccggaagcatcctcgttaatactaatctgcgggcattaatcaattcccggaccttccacgccctacccagccacttccaacagcagttgctgtttctcctccccgaagtagaccgacaagtgggcactgatggcttgctccgcctgtcctctagcgcactaaacaacgagttcttcacacacgctgctcagtcttggagagaacgcctggctgacggggagttcactcacgaaatgcaggtacggattagacaagaaatggagaaggagaagaaggtcgagcagtggaaagagaagttcttcgaagactactacggacagaagttgggcttgactaaagaagagagcttgcagcagaatgtgggacaggaggaagcggagatcaagagtggtctgtgtgtgccaggggagtccgtacgtattcagaggggccctgctacccggcagagagatggccattttaagaaacggtcgcggccagacctgagaaccagagctaggaggaatctgtacaagaagcaagagagtgaacaggccggagtagctaaggacgcgaagagtgtggccagcgacgtcccgttgtacaaagacggcgaagccaaaacagaccctgctggtctcagtagccctcatttgccaggaaccagctctgcagctcccgatttagaaggcccagaatttcccgtagagtcggtggcaagccggatccaagccgaaccagacaatctggctcgggcttccgccagcccggatcggattcccagtctgccacaagagacagtggatcaggagcccaaagaccagaagcggaagagctttgaacaggcagcttctgctagctttcctgagaaaaaaccacgactcgaagatcggcaatcctttaggaatactatcgagagcgtccacacagaaaaacctcagccaactaaggaggagccaaaggtgccccctataaggatacagttatctcggataaagcccccatgggtcgtgaaaggtcagcccacctaccaaatttgcccccgaatcatccctacaaccgagtcatcttgcaggggatggaccggtgcacggacattggcagacattaaggcgagagctctccaagtcagaggtgctaggggtcaccattgtcatcgggaggccgctaccactgccataggcggagggggtggtcccggagggggtggcggaggagccactgacgaaggtgggggaagggggtctagtagcggcgatgggggagaagcatgtggccaccccgagccccgagggggaccgtctacccccggaaaatgcactagcgacctgcagcgcactcagctgctaccaccttatcccctaaatggggaacatacgcaggctggaaccgcgatgagccgggcacgcagagaagacctcccaagcctccgcaaggaggagtcctgcctactgcagcgcgctacggtaggcctgactgatggactgggtgatgctagccaactccctgtagcccctacgggtgatcagccttgtcaagccttgccactgctgtccagtcagacatcagtggccgagaggctcgttgagcagcctcagctccatcccgacgtgcggacagagtgtgaatctgggaccacttcctgggagtccgacgacgaggaacaagggcctaccgtgcctgctgataacggacccatcctctcattggtaggcgacgatacccttgagaagggtactggccaggcactcgattcacaccctacgatgaaggatcccgtgaacgtgaccccatcttccacccctgagagcagccctactgactgtctgcagaatcgtgcctttgatgacgaattagggctgggcggatcatgtccacccatgagagagtctgacacacggcaggaaaatcttaagaccaaggctctggtgagtaattctagtcttcactggatcccaatcccatcaaacgacgaagttgtaaagcagcccaaaccagagagcagagaacatatcccaagcgtggagccgcaggtgggggaagagtgggaaaaagctgcacctaccccacccgcattaccgggagatttgaccgctgaagaagggctcgaccctctcgacagcctcactagtctgtggactgtgcccagccgtggcggaagcgactctaacggttcgtattgccagcaagtggacatcgagaagctgaaaatcaatggggatagtgaggccctgtccccacacggagagtccacagacacggccagtgatttcgaaggccacctgaccgaggattcgtccgaggctgatacacgcgaagctgcggtgacgaagggatcttccgtggataaggacgaaaaacctaattggaaccagagcgcacccctctcgaaggtaaacggagacatgcggctcgtgactcgaactgatggtatggtagcccctcagagctgggtgtccagggtgtgcgctgtgcgccagaagatccctgactcattattactggcttctacagagtatcagccacgcgctgtttgtctttccatgcccggttctagcgtggaggcgacaaaccctttggtcatgcagctactacagggcagccttcccttggagaaagtcttaccgcctgcacacgacgatagcatgtccgaatcccctcaggttcccctgacaaaagaccagtcgcatggttcactgcgcatgggatcacttcatgggctgggaaaaaacagcgggatggtggacgggtcgtcccctagtagcctccgcgctctaaaagagcccttgttacctgatagttgcgagacaggcacgggtctcgctcgcatcgaagctacacaagccccaggtgcacctcagaaaaattgtaaagcagtcccctcatttgactcactgcaccccgtcacaaacccaattacttcttccagaaagctcgaggaaatggattcaaaagaacagttctcttcctttagttgcgaggaccaaaaggaagtgcgggcaatgtcacaggacagtaacagcaacgctgctcccggtaagagcccgggtgatctgaccacatcacgaacgcccagattcagctctcccaatgtgatctcattcggcccagaacagactgggagagcccttggcgatcagtctaatgtgacggggcagggcaaaaagctattcggttccggcaacgtagcagctacacttcaacgcccacggccagctgacccaatgcctctgccggctgagattccccctgtattcccttctggcaaattggggccttcgaccaattccatgagtggcggagtccagaccccgagagaggactgggccccaaagccccacgctttcgtgggctccgtgaagaacgagaagactttcgtgggcggtcccctgaaggccaatgccgagaatcggaaagccaccggccattccccactggagctcgtcgggcacctggaagggatgcccttcgtaatggacctcccattctggaagctgccaagggagcctggcaaaggcctttctgagccactggagccttcaagccttcccagccaactgtccatcaagcaggcgttttacgggaaactttctaagttgcaactgagtagtacgagcttcaactactctagttcttcacctacttttccaaaaggcctggcaggctccgtggtgcaactgagccataaagcaaattttggggcaagccacagcgcttccttgtctctgcaaatgttcacagacagctccacagtggagtcaatctccctgcaatgtgcatgttctctgaaggcaatgatcatgtgtcagggctgcggggctttctgccacgacgactgcatagggccttccaagctctgcgtgttatgcttggtggtgaggtag

SEQ ID NO: 186000 - DNA, 4626 bp, Artificial Sequence
  derived and/or modified sequence
atgaaggacaagcagaaaaaaaaaaaagagcgcacttgggctgaggctgccaggctagtgctggagaattattcagacgctcctatgactcctaaacagattctccaggtcatagaagctgaagggttgaaagagatgcgcagcggcacgagcccattagcatgcctaaacgcaatgttgcatagcaactcaagagggggtgaggggctcttttacaaactacccggaagaatcagcctgttcacattgaaaaaggatgccctccagtggagtcgacaccccgcaaccgtagagggcgaggaacccgaggacacagctgatgtcgagagctgtggcagcaatgaggcctccacagtgagcggtgaaaacgacgtcagcctagacgaaacctcaagcaatgcttcatgctcgaccgaatcacagtcgcgcccactatccaatcccagagatagctacagagcctcaagccaggctaacaagcagaagaagaagacaggggtcatgctaccacgcgtggtgctcaccccccttaaggtgaacggagcccatgtcgagtccgcaagcgggttttctgggtgtcatgccgacggggagtctgggagcccatcgagcagctccagtggctctttggctctggggtctgccgcaattagaggacaagcagaggtcacacaggacccggcaccattgcttagaggtttccgcaagccagcgaccggccagatgaagaggaaccgaggggaagagatcgacttcgaaactcctggctcaattcttgtaaatacaaatctccgtgccctaatcaacagccgcacctttcatgctctgcccagccactttcagcaacagttgctcttcctcctgccagaggtggatcgccaggtaggcaccgatggcctgctgcgtttaagctcatctgccctcaataacgagttttttactcacgcggctcagagttggagggagaggttagcagatggagagttcacccatgaaatgcaggtgaggattagacaggagatggagaaagaaaagaaggtggaacagtggaaggagaagttctttgaggattattatgggcagaagcttggcctgacgaaggaggaatccctgcagcagaatgtgggacaggaagaagcagagatcaaaagcggactgtgtgttccaggtgaaagcgtgcggatccagagagggcctgctacccgacagagggacggccacttcaagaagaggtcaagacctgacttgcgaacacgcgctcggaggaatctgtataaaaagcaggagagtgagcaggccggagtagcaaaggatgcaaagtccgtcgcctcagacgtgcctttatacaaggatggagaagcaaaaactgatccagcaggactgtcctcccctcatctgccaggtacatcctccgcagcccctgatcttgagggccctgagttcccagtggaatctgtagcctcacgaatccaagctgagccagacaacctcgctcgagcctcagcgtcaccagaccgcattccaagcctcccacaggaaacagtcgatcaggagcccaaagaccaaaagaggaagagctttgaacaggccgctagcgcctctttccccgaaaagaaacctcgcctggaggacaggcaaagcttccgaaacaccatagaatctgttcacaccgaaaaaccccagcccacaaaagaagagcctaaggtgcctccaattcggatccagctgtcacgaatcaaaccaccatgggtggttaaggggcaacccacataccagatctgcccacgaatcataccaacgaccgagtcttcgtgcaggggctggactggcgcacgcacactcgccgatattaaagcccgagcgctacaggttcgtggtgccagagggcatcactgccacagggaggctgcaacaacggcaatcggtgggggtggcggtccaggcggaggcggaggcggtgcaaccgacgaggggggaggcaggggatccagctccggtgatggcggagaagcttgtggccatcctgaacctaggggcggacccagcacccctggcaagtgtactagcgatctccagcgcactcagcttctgcctccctacccgctgaacggagagcacacccaggcaggcactgccatgtccagggcacggagagaggatcttccaagcctccgaaaagaagaaagctgcctgcttcagcgcgcaacagtggggctcaccgacggcctcggtgatgcatcgcaactgcccgtggccccaacgggcgaccagccttgtcaggcactgcctcttctgtcttctcagacctcggtcgccgaacgccttgtagagcagccccagctgcaccctgatgtgagaacagagtgtgaaagtggcacgacttcatgggagtcagatgatgaggaacaggggccaaccgttccagccgacaacggtccaatcttatctctggttggagacgacacattggaaaaggggacaggacaggcccttgactctcatcccactatgaaggatcccgtcaatgtcactccatctagcactcccgaaagctctcctaccgactgcctgcagaaccgtgcttttgatgacgaactgggactcggaggtagctgccctcctatgcgggaaagcgacacccggcaggaaaacctgaagactaaagctctcgtgtcaaacagttcactgcactggattccaattccatctaacgatgaggtggtgaagcagcctaagcccgagagcagggaacatattccatcggtggaaccacaggtcggcgaagagtgggaaaaggctgcccctacgccaccggcattaccaggcgacctcaccgccgaggaggggcttgacccactggactcactgactagtctgtggacagtgcctagccgcggtggctctgatagtaacggctcttattgccagcaggtggacatagagaaattgaaaatcaacggggatagcgaagcgttgagcccccatggcgaaagtacagataccgcttcagattttgaggggcaccttaccgaagactcctcggaggccgatacacgggaggccgcagttaccaaaggcagctcagtggacaaggacgagaaacctaactggaaccaatcggctcccctttctaaggtgaacggcgatatgaggctggtcacacgtactgatggaatggtcgcaccccagagctgggttagcagagtttgcgccgtcagacagaagatacccgattctcttctcctcgcatccacagaatatcagcccagggctgtgtgtctgtccatgcccggtagctcagttgaggccactaatccattggttatgcagctcctgcaagggtctcttcctctcgagaaagtgctgccccctgcccatgatgatagtatgtcagagagcccgcaggttccactcacaaaggatcaaagccacggatccctgcggatgggctctcttcacggcctcgggaagaactccggaatggtagacgggtctagcccgtcctccttacgggcactaaaggagcccctgctgcccgatagctgcgaaactggcacagggttggcccgtatcgaggccactcaagctcccggagcgcctcaaaaaaactgcaaggcagtgccctctttcgatagccttcatcccgttaccaatcccattacatcctccagaaaacttgaagagatggactccaaggagcagttcagttcattctcctgtgaagatcagaaggaggttagggccatgtctcaggactccaattctaatgccgctccagggaagtcacctggagacttaacaacatctcggacccctaggttctcatctcccaacgtgatcagttttggcccagaacagacggggagagcactgggagatcagtctaacgtgaccggtcagggcaaaaagctgtttgggtccggaaacgttgctgcaacactgcagcgccctcgccctgccgatccaatgcccctacccgctgagatcccaccagtgtttccaagcggcaagctgggcccttccacgaattccatgagcggcggtgtacagaccccaagggaggattgggcgccaaagccccacgcctttgtgggttccgtgaagaacgagaaaacatttgtgggcggtcccctgaaagcgaacgcggagaataggaaggcaacggggcatagcccactggaactagtgggccacctggaggggatgccgttcgtgatggaccttcccttctggaagctcccacgcgagccaggaaaggggctatcagagccactcgagcccagttcgcttccttcacagctgtccattaaacaggctttttatgggaagttgagtaaattacagctctcttcaacaagtttcaactatagctctagctctcctacatttcctaagggccttgctggttccgtggtgcagttgagccataaggctaacttcggagctagccacagcgcatccctgagtctccagatgttcaccgattcttctacagtcgagagcatcagtcttcaatgcgcgtgctctctcaaagctatgattatgtgccaagggtgtggcgctttttgccatgacgactgcatcggacccagcaagctgtgcgtgctatgtctcgtagtgagatag

SEQ ID NO: 186001 - DNA, 4626 bp, Artificial Sequence
  derived and/or modified sequence
atgaaggacaagcagaagaagaaaaaagagcgaacttgggccgaggctgcacgccttgttttggaaaattattctgacgctcccatgactcctaagcagatactccaggtgatcgaggccgagggactaaaagaaatgcggtccgggacttccccattggcgtgtctcaatgcaatgctgcatagcaattcccgcggaggcgaaggcctgttctataagttgcccggtcgcatttcactttttacgcttaagaaagacgctttacagtggagtagacacccagccactgtcgaaggcgaggagccagaagatactgccgacgtggagtcatgcggctcaaacgaagcctccacggtgtcaggcgagaatgacgtcagcttagatgagaccagtagcaatgcttcttgtagcaccgaatcacaatcccgcccactgtccaaccctagggacagctatagagcgagttcccaggccaacaagcaaaagaaaaagaccggcgtgatgcttccacgcgtcgtcttgacacccttgaaggtgaacggggctcacgtagaatctgcgagcgggttttccgggtgccatgctgacggcgaatctggctctccttcgtcgagctctagcgggtcactcgccttgggatcggctgccatcagaggacaggcagaggtgacgcaagatcccgcaccccttctccggggtttcaggaagccagcaacgggccaaatgaagaggaatcgaggagaagaaatcgatttcgaaacacctgggagtatccttgttaacacaaatcttagagcgctgattaattctcgtacattccacgccttacctagtcactttcagcagcagctgctgtttctcttaccagaagtggaccgtcaagtcgggaccgatggtctactcagactgtcaagttcggctctcaataacgaattctttacccacgccgcacaatcctggcgggaaaggctagcagacggagagttcactcacgagatgcaggtccggattagacaggaaatggagaaggaaaagaaggttgaacagtggaaggaaaagttttttgaagactattacgggcagaagctcggtctaactaaggaggagtcacttcagcagaatgttggccaggaagaggccgaaattaagtctggtctgtgtgtgccaggtgaaagcgttcgcatacagaggggccctgcaaccagacagcgcgacggacacttcaaaaagagatctcgcccagacctgcgaacaagggcaagacgtaacctttacaaaaagcaggagtccgagcaggccggtgtcgcaaaagatgctaagtctgttgcttcagatgtccccctgtataaagacggcgaggccaagaccgaccccgctggcctttctagcccccatttacccggtacctcaagcgctgccccagacctggagggaccagagttcccggtagagtctgtcgcttctcggatccaagccgaacccgacaatctggcccgtgcaagcgccagtccagaccggattccttcactgccgcaagagactgtcgaccaggagcccaaggaccaaaagcggaagagctttgaacaggcggcatcagcatcattccccgagaaaaaaccgaggcttgaggatagacagagctttcggaacactatagaatcggttcacactgagaagccacagccgactaaagaggaacccaaagtaccccctatccgcattcagctgagcaggatcaagcctccatgggtcgttaaagggcaaccgacgtaccaaatctgtccccgtataatcccaaccacagaatcttcctgccggggatggacgggagcaagaacacttgctgacatcaaggctcgcgctctgcaggttcgcggagctcggggtcaccactgccacagagaagcagcaaccaccgccattggtggtgggggtggacctggcggtggagggggaggcgcaaccgacgagggcggtggacggggatctagcagcggcgacggcggagaggcctgcgggcatcctgagcccaggggcggaccttcaacgccgggtaagtgtacgtccgacctgcagaggactcaacttcttcctccttatcctttgaacggcgaacacacgcaagcaggaaccgccatgtcccgagccaggagagaagatctcccaagcctacgcaaagaggaaagctgtctgctccaaagagctactgttggtctgacagatggtctgggcgacgcctcccagctgcccgtggcgccaaccggcgatcaaccatgtcaagctttgcccctactcagctctcaaacttccgtcgcggagcgattggtcgagcaacctcagctccaccccgatgtgcgtacggagtgtgagtctggcacgacatcctgggagtctgatgatgaggaacaagggccaaccgtgccagctgacaatggcccaattttgtctctggtcggcgatgataccctagaaaagggcaccggccaggcgctagacagccatcctacgatgaaggatcccgtcaacgtcacaccctccagcaccccagaaagctcaccaaccgactgtcttcagaatagggctttcgacgatgagttaggcctgggcggtagttgtccgcctatgcgggaaagcgatacaagacaagagaacttgaaaacgaaggccttagtgagtaactcctccttgcactggattcctatcccctctaacgacgaggtggtaaagcagcctaagccagaaagccgagaacacatcccatcggtggagccccaggtgggagaggagtgggaaaaagcggctccaacccctcccgctctgcctggggacctcaccgccgaggagggcctggaccctttggattcactcacaagcctgtggactgttccatcccgcggtgggagcgactcaaacggaagttactgccaacaagtggacatcgagaagttgaagattaacggagatagtgaggccctcagccctcacggcgaatccactgacaccgcttctgatttcgagggtcacctgacagaggactcgagcgaggcggacacacgggaagctgcagtgacaaaaggctcatcagttgataaagacgagaagccgaactggaatcagagcgcacctctgagcaaggttaacggcgacatgcgcctcgtgacccgcaccgacggtatggtagcccctcagagctgggtatctagggtgtgcgctgttaggcagaagattccagactccctcctcttggccagcaccgaataccaaccacgggctgtttgcctgtccatgccaggaagctcagtcgaagccaccaatcccctggtgatgcaacttctccagggtagcctccctctggaaaaagtgctcccacccgctcatgacgacagcatgtctgagtcaccacaggtcccactcaccaaagatcaatctcatgggtcgttgcggatgggtagcctgcatgggctcgggaagaacagtggcatggtggatggaagctcccccagtagtctgagagccctgaaggaacctttgttacctgattcatgcgagaccggaacaggactggctaggatcgaagcaacacaagcgccaggtgctcctcagaagaactgcaaggccgtgccatcttttgactccctgcacccggttaccaatcctattacgagctcaagaaagttggaagagatggacagcaaggaacagttcagttctttctcctgcgaggatcagaaagaggtgagagctatgtcgcaggatagtaatagcaacgccgctccaggtaaatcccccggtgatctgaccacgtcacggactccaagattttcgtcacctaatgtgatcagttttggcccagagcagaccggacgagccctcggtgatcaaagcaatgttacagggcaaggtaagaaacttttcggaagcggtaacgtggccgctactctccagaggccaaggcccgctgaccccatgccgctgcccgcagagattcctcccgtgttcccgtccgggaaactcggcccttccacaaattccatgagtggaggagtacagacccccagggaggactgggcccctaagccccacgcctttgtggggtcagtcaaaaatgagaaaacctttgtcggagggccactcaaagccaatgccgaaaaccggaaggctactggacactcaccgctcgaactggtgggccacttggaaggtatgccctttgtgatggacctgccgttctggaaactacctcgggaaccaggtaagggtctctctgaacctctggagccctcctcattgccgtctcagctaagcattaaacaggcattttacggcaaactcagtaaattgcagctgtccagcacctcctttaactattcctcatcctcacccacatttcctaaaggtttggcaggcagtgtcgttcagttatcccacaaggccaacttcggtgcctcacatagtgcaagtctgagcctacagatgtttacggacagcagtactgtggagagcatcagcctccagtgcgcttgttccctcaaagcgatgattatgtgccaggggtgcggcgctttctgccacgacgactgtatcggaccctcgaaactgtgtgttctgtgtctcgttgtgcgttag

SEQ ID NO: 186002 - DNA, 4626 bp, Artificial Sequence
  derived and/or modified sequence
atgaaggacaagcagaagaagaagaaggagagaacctgggccgaggccgccagactggtgctggagaactacagcgacgcccccatgacccccaagcagatcctgcaggtgatcgaggccgagggcctgaaggagatgagaagcggcaccagccccctggcctgcctgaacgccatgctgcacagcaacagcagaggcggcgagggcctgttctacaagctgcccggcagaatcagcctgttcaccctgaagaaggacgccctgcagtggagcagacaccccgccaccgtggagggcgaggagcccgaggacaccgccgacgtggagagctgcggcagcaacgaggccagcaccgtgagcggcgagaacgacgtgagcctggacgagaccagcagcaacgccagctgcagcaccgagagccagagcagacccctgagcaaccccagagacagctacagagccagcagccaggccaacaagcagaagaagaagaccggcgtgatgctgcccagagtggtgctgacccccctgaaggtgaacggcgcccacgtggagagcgccagcggcttcagcggctgccacgccgacggcgagagcggcagccccagcagcagcagcagcggcagcctggccctgggcagcgccgccatcagaggccaggccgaggtgacccaggaccccgcccccctgctgagaggcttcagaaagcccgccaccggccagatgaagagaaacagaggcgaggagatcgacttcgagacccccggcagcatcctggtgaacaccaacctgagagccctgatcaacagcagaaccttccacgccctgcccagccacttccagcagcagctgctgttcctgctgcccgaggtggacagacaggtgggcaccgacggcctgctgagactgagcagcagcgccctgaacaacgagttcttcacccacgccgcccagagctggagagagagactggccgacggcgagttcacccacgagatgcaggtgagaatcagacaggagatggagaaggagaagaaggtggagcagtggaaggagaagttcttcgaggactactacggccagaagctgggcctgaccaaggaggagagcctgcagcagaacgtgggccaggaggaggccgagatcaagagcggcctgtgcgtgcccggcgagagcgtgagaatccagagaggccccgccaccagacagagagacggccacttcaagaagagaagcagacccgacctgagaaccagagccagaagaaacctgtacaagaagcaggagagcgagcaggccggcgtggccaaggacgccaagagcgtggccagcgacgtgcccctgtacaaggacggcgaggccaagaccgaccccgccggcctgagcagcccccacctgcccggcaccagcagcgccgcccccgacctggagggccccgagttccccgtggagagcgtggccagcagaatccaggccgagcccgacaacctggccagagccagcgccagccccgacagaatccccagcctgccccaggagaccgtggaccaggagcccaaggaccagaagagaaagagcttcgagcaggccgccagcgccagcttccccgagaagaagcccagactggaggacagacagagcttcagaaacaccatcgagagcgtgcacaccgagaagccccagcccaccaaggaggagcccaaggtgccccccatcagaatccagctgagcagaatcaagcccccctgggtggtgaagggccagcccacctaccagatctgccccagaatcatccccaccaccgagagcagctgcagaggctggaccggcgccagaaccctggccgacatcaaggccagagccctgcaggtgagaggcgccagaggccaccactgccacagagaggccgccaccaccgccatcggcggcggcggcggccccggcggcggcggcggcggcgccaccgacgagggcggcggcagaggcagcagcagcggcgacggcggcgaggcctgcggccaccccgagcccagaggcggccccagcacccccggcaagtgcaccagcgacctgcagagaacccagctgctgcccccctaccccctgaacggcgagcacacccaggccggcaccgccatgagcagagccagaagagaggacctgcccagcctgagaaaggaggagagctgcctgctgcagagagccaccgtgggcctgaccgacggcctgggcgacgccagccagctgcccgtggcccccaccggcgaccagccctgccaggccctgcccctgctgagcagccagaccagcgtggccgagagactggtggagcagccccagctgcaccccgacgtgagaaccgagtgcgagagcggcaccaccagctgggagagcgacgacgaggagcagggccccaccgtgcccgccgacaacggccccatcctgagcctggtgggcgacgacaccctggagaagggcaccggccaggccctggacagccaccccaccatgaaggaccccgtgaacgtgacccccagcagcacccccgagagcagccccaccgactgcctgcagaacagagccttcgacgacgagctgggcctgggcggcagctgcccccccatgagagagagcgacaccagacaggagaacctgaagaccaaggccctggtgagcaacagcagcctgcactggatccccatccccagcaacgacgaggtggtgaagcagcccaagcccgagagcagagagcacatccccagcgtggagccccaggtgggcgaggagtgggagaaggccgcccccaccccccccgccctgcccggcgacctgaccgccgaggagggcctggaccccctggacagcctgaccagcctgtggaccgtgcccagcagaggcggcagcgacagcaacggcagctactgccagcaggtggacatcgagaagctgaagatcaacggcgacagcgaggccctgagcccccacggcgagagcaccgacaccgccagcgacttcgagggccacctgaccgaggacagcagcgaggccgacaccagagaggccgccgtgaccaagggcagcagcgtggacaaggacgagaagcccaactggaaccagagcgcccccctgagcaaggtgaacggcgacatgagactggtgaccagaaccgacggcatggtggccccccagagctgggtgagcagagtgtgcgccgtgagacagaagatccccgacagcctgctgctggccagcaccgagtaccagcccagagccgtgtgcctgagcatgcccggcagcagcgtggaggccaccaaccccctggtgatgcagctgctgcagggcagcctgcccctggagaaggtgctgccccccgcccacgacgacagcatgagcgagagcccccaggtgcccctgaccaaggaccagagccacggcagcctgagaatgggcagcctgcacggcctgggcaagaacagcggcatggtggacggcagcagccccagcagcctgagagccctgaaggagcccctgctgcccgacagctgcgagaccggcaccggcctggccagaatcgaggccacccaggcccccggcgccccccagaagaactgcaaggccgtgcccagcttcgacagcctgcaccccgtgaccaaccccatcaccagcagcagaaagctggaggagatggacagcaaggagcagttcagcagcttcagctgcgaggaccagaaggaggtgagagccatgagccaggacagcaacagcaacgccgcccccggcaagagccccggcgacctgaccaccagcagaacccccagattcagcagccccaacgtgatcagcttcggccccgagcagaccggcagagccctgggcgaccagagcaacgtgaccggccagggcaagaagctgttcggcagcggcaacgtggccgccaccctgcagagacccagacccgccgaccccatgcccctgcccgccgagatcccccccgtgttccccagcggcaagctgggccccagcaccaacagcatgagcggcggcgtgcagacccccagagaggactgggcccccaagccccacgccttcgtgggcagcgtgaagaacgagaagaccttcgtgggcggccccctgaaggccaacgccgagaacagaaaggccaccggccacagccccctggagctggtgggccacctggagggcatgcccttcgtgatggacctgcccttctggaagctgcccagagagcccggcaagggcctgagcgagcccctggagcccagcagcctgcccagccagctgagcatcaagcaggccttctacggcaagctgagcaagctgcagctgagcagcaccagcttcaactacagcagcagcagccccaccttccccaagggcctggccggcagcgtggtgcagctgagccacaaggccaacttcggcgccagccacagcgccagcctgagcctgcagatgttcaccgacagcagcaccgtggagagcatcagcctgcagtgcgcctgcagcctgaaggccatgatcatgtgccagggctgcggcgccttctgccacgacgactgcatcggccccagcaagctgtgcgtgctgtgcctggtggtgagatag

SEQ ID NO: 186003 - protein, 903 aa, Artificial Sequence
  derived and/or modified sequence
MASVWQRLGFYASLLKRQLNGGPDVIKWERRVIPGCTRSIYSATGKWTKEYTLQTRKDVEKWWHQRIKEQASKISEADKSKPKFYVLSMFPYPSGKLHMGHVRVYTISDTIARFQKMRGMQVINPMGWDAFGLPAENAAVERNLHPQSWTQSNIKHMRKQLDRLGLCFSWDREITTCLPDYYKWTQYLFIKLYEAGLAYQKEALVNWDPVDQTVLANEQVDEHGCSWRSGAKVEQKYLRQWFIKTTAYAKAMQDALADLPEWYGIKGMQAHWIGDCVGCHLDFTLKVHGQATGEKLTAYTATPEAIYGTSHVAISPSHRLLHGHSSLKEALRMALVPGKDCLTPVMAVNMLTQQEVPVVILAKADLEGSLDSKIGIPSTSSEDTILAQTLGLAYSEVIETLPDGTERLSSSAEFTGMTRQDAFLALTQKARGKRVGGDVTSDKLKDWLISRQRYWGTPIPIVHCPVCGPTPVPLEDLPVTLPNIASFTGKGGPPLAMASEWVNCSCPRCKGAAKRETDTMDTFVDSAWYYFRYTDPHNPHSPFNTAVADYWMPVDLYIGGKEHAVMHLFYARFFSHFCHDQKMVKHREPFHKLLAQGLIKGQTFRLPSGQYLQREEVDLTGSVPVHAKTKEKLEVTWEKMSKSKHNGVDPEEVVEQYGIDTIRLYILFAAPPEKDILWDVKTDALPGVLRWQQRLWTLTTRFIEARASGKSPQPQLLSNKEKAEARKLWEYKNSVISQVTTHFTEDFSLNSAISQLMGLSNALSQASQSVILHSPEFEDALCALMVMAAPLAPHVTSEIWAGLALVPRKLCAHYTWDASVLLQAWPAVDPEFLQQPEVVQMAVLINNKACGKIPVPQQVARDQDKVHEFVLQSELGVRLLQGRSIKKSFLSPRTALINFLVQD

SEQ ID NO: 186004 - protein, 860 aa, Artificial Sequence
  derived and/or modified sequence
MASVWQRLGFYASLLKRQLNGGPDVIKWERRVIPGCTRSIYSATGKWTKEYTLQTRKDVEKWWHQRIKEQASKISEADVINPMGWDAFGLPAENAAVERNLHPQSWTQSNIKHMRKQLDRLGLCFSWDREITTCLPDYYKWTQYLFIKLYEAGLAYQKEALVNWDPVDQTVLANEQVDEHGCSWRSGAKVEQKYLRQWFIKTTAYAKAMQDALADLPEWYGIKGMQAHWIGDCVGCHLDFTLKVHGQATGEKLTAYTATPEAIYGTSHVAISPSHRLLHGHSSLKEALRMALVPGKDCLTPVMAVNMLTQQEVPVVILAKADLEGSLDSKIGIPSTSSEDTILAQTLGLAYSEVIETLPDGTERLSSSAEFTGMTRQDAFLALTQKARGKRVGGDVTSDKLKDWLISRQRYWGTPIPIVHCPVCGPTPVPLEDLPVTLPNIASFTGKGGPPLAMASEWVNCSCPRCKGAAKRETDTMDTFVDSAWYYFRYTDPHNPHSPFNTAVADYWMPVDLYIGGKEHAVMHLFYARFFSHFCHDQKMVKHREPFHKLLAQGLIKGQTFRLPSGQYLQREEVDLTGSVPVHAKTKEKLEVTWEKMSKSKHNGVDPEEVVEQYGIDTIRLYILFAAPPEKDILWDVKTDALPGVLRWQQRLWTLTTRFIEARASGKSPQPQLLSNKEKAEARKLWEYKNSVISQVTTHFTEDFSLNSAISQLMGLSNALSQASQSVILHSPEFEDALCALMVMAAPLAPHVTSEIWAGLALVPRKLCAHYTWDASVLLQAWPAVDPEFLQQPEVVQMAVLINNKACGKIPVPQQVARDQDKVHEFVLQSELGVRLLQGRSIKKSFLSPRTALINFLVQD

SEQ ID NO: 186005 - protein, 114 aa, Artificial Sequence
  derived and/or modified sequence
MASVWQRLGFYASLLKRQLNGGPDVIKWERRVIPGCTRSIYSATGKWTKEYTLQTRKDVEKWWHQRIKEQASKISEADKSKPKFYVLSMFPYPSGKLHMGHVRVYTISDTIARF

SEQ ID NO: 186006 - DNA, 2712 bp, Artificial Sequence
  derived and/or modified sequence
atggcatccgtgtggcaaagactgggcttttacgcctcactcctgaaaaggcagctgaatggcggtccagatgttattaagtgggaaagaagggttattcccggatgcaccaggtctatctacagcgccactgggaaatggactaaagagtacactctccagactagaaaagatgttgaaaaatggtggcaccagcgcattaaggaacaggcttccaagatctccgaggccgacaaatcaaaacctaagttctacgtccttagcatgtttccctatcccagcgggaagctgcacatggggcacgtgcgcgtgtacacaatttctgataccattgctcgcttccagaagatgcggggcatgcaggtgattaacccaatgggctgggacgccttcggcctgcctgccgagaatgcggctgtggaaaggaacctgcaccctcagagttggacacagagcaatattaaacacatgcgcaaacaacttgatcgcttggggctatgcttcagttgggacagagaaataactacatgcctgcccgactattacaagtggactcaatacctgttcattaaactttacgaggccggtctcgcctatcagaaggaggcgctggtgaactgggatcccgtggaccagactgtccttgccaatgaacaggtggacgagcacggatgctcttggcggagcggagctaaggtcgagcagaagtatttgaggcaatggttcatcaagactacagcatacgccaaggctatgcaggatgccctggccgatctgcccgagtggtatgggattaagggcatgcaagcacactggattggcgattgcgtggggtgtcatctggactttaccttaaaggtgcatggccaggcgacaggggagaaacttactgcttatacggccactcctgaggcaatttacggcacaagccacgtagcgatctctccatcccacaggttgctgcacggtcattccagcctgaaagaggccttgaggatggcgctggttcctggaaaggattgtctgacgcccgtgatggcggtaaatatgctcacgcagcaggaagtccccgtcgtgatcctggccaaagcagaccttgagggttccctggactctaagattgggattccgagcacaagttctgaggacacaatcctagctcagacccttggtctggcatacagcgaagttatcgagacccttcctgacgggaccgaacggctgagctcttccgccgagttcaccggaatgacacgacaggatgctttcttagctctcacgcagaaggctcgaggaaagagagtgggcggcgacgtcactagtgacaaactaaaggattggcttatctcccgccagcgctactgggggactccaattcccattgtccactgtccagtgtgcggaccaactcctgtccctttggaggatcttcccgtgactctgcccaatatagcttccttcaccggcaaaggtggccctcctctggcaatggcaagcgagtgggttaactgctcatgtccgcgctgtaaaggagccgccaaacgtgagacagataccatggataccttcgtggatagtgcttggtactatttccggtacaccgacccacacaacccacactcacctttcaacaccgctgtggccgactattggatgcctgtggatctgtatatcggaggtaaagagcacgcggtgatgcatctgttctacgcccgttttttttcccatttctgccacgaccagaagatggtcaagcatagagagccgttccacaagctcctggcacagggcctgataaaggggcaaacattcaggctaccaagtggacagtacctgcagcgggaggaagtggatctgaccggttcagttccggtgcatgccaaaaccaaagaaaagctggaagtgacctgggaaaagatgagcaaatcaaagcataatggtgtggatcctgaagaagtagttgaacagtatggcatcgataccatccgcttgtacatactgttcgccgccccaccagagaaagatatcctatgggacgtgaagactgatgcgctgccgggcgttctgcggtggcagcagaggctgtggacattgaccacccgattcatcgaagctagagcctctggcaagagcccccaaccccagcttctcagcaacaaagaaaaagctgaggcaaggaaactgtgggaatataagaattccgtaatttctcaggtgacgactcacttcaccgaagacttttctcttaattccgcgatttcacagctcatgggactttcgaatgcactcagtcaggcctcacagtccgtgattctgcacagccccgagtttgaggatgctctgtgtgctctgatggtaatggctgcacctctggccccgcacgtgacctctgaaatatgggctggcctagcattggttccacgaaagctctgcgcccactacacgtgggacgcttctgtcctcctgcaagcttggcctgccgtagaccccgagtttctgcaacagccggaggtcgtgcagatggccgtgcttatcaacaataaagcctgcggtaaaattcccgtgccccaacaggttgcaagagatcaagacaaggtacatgaattcgtgctccagtccgagttaggtgttcggcttctgcagggacggagcatcaaaaaaagttttctgtcaccacggaccgcactcatcaattttctagtgcaggactag

SEQ ID NO: 186007 - DNA, 2583 bp, Artificial Sequence
  derived and/or modified sequence
atggcctccgtgtggcaacgcctggggttttacgccagcctccttaagagacagctaaacggcgggccagatgtgataaagtgggagagacgtgtcatccctggatgtactaggtctatctattcagctactggcaaatggacaaaggagtacaccctccagacccggaaggatgtggagaagtggtggcatcaaagaattaaagagcaggcttcaaaaatatcagaggcggacgtgattaaccccatgggatgggatgcattcggtctgcccgccgaaaacgccgctgtggaaaggaacctccatccccagtcctggacacagagtaatatcaagcacatgagaaaacagctcgatcgtttaggtctgtgcttctcctgggatcgagaaatcactacatgcctgcccgattactacaagtggacacagtacttgttcattaaactgtatgaggccggcttagcttatcagaaggaggctctggtgaactgggatcctgttgaccagaccgtactcgcaaacgagcaggttgatgaacacgggtgctcgtggcgcagtggagccaaggtcgagcagaaatatttgcgccaatggttcatcaagaccactgcatacgcaaaagctatgcaggacgctctggccgatctgcccgaatggtatgggatcaaagggatgcaggcccattggataggggactgcgtagggtgccatctggactttactctgaaggtgcacggccaggcgactggcgagaagctgacggcctacaccgcgacacccgaggctatttacggcacttctcatgtggcaattagccccagccaccgcctccttcatggccacagctcattaaaggaggccctacgcatggccctggtcccaggcaaagactgccttacgccggtgatggcggttaatatgctgactcagcaagaggtgcctgtagtgatcctggccaaggcagaccttgagggatccttggatagtaaaatcggcatcccgtcgacttccagcgaggataccatactagcccagactctcggtctggcatactccgaagttatcgagacactcccagatgggacagaacggttaagttcatccgccgagtttacgggaatgacacgacaagatgccttcttggctctcactcagaaagcccgggggaaacgggtgggcggtgacgtgacaagcgataaactgaaggattggctcatttcccggcagcgctactggggcacacccatccccatcgtgcactgtccagtgtgcgggcccactccagtgcccctggaagatctgccagtgacattgcccaatattgcctcctttacaggtaaaggagggcctcccttggctatggcctctgagtgggttaattgtagttgtccccgctgtaagggcgctgccaaacgagaaacagacacaatggatacctttgttgactcggcctggtactacttccgttacaccgacccacataacccacactcacctttcaatacggccgttgccgattactggatgcccgttgatctatacatcggtggcaaggaacacgcggtgatgcacctgttctacgcccgctttttttcccatttctgccacgaccagaaaatggtcaaacacagagagccttttcataaactgctggcacaggggttgattaagggtcagacattccggctcccgtcagggcagtacctgcagcgtgaggaagttgacctgactggcagcgtgccggttcacgccaaaaccaaggaaaagctcgaggtgacctgggagaagatgagtaaaagcaaacacaacggcgttgacccagaggaggtcgtcgagcagtacgggatcgacaccataaggctttatatcctgttcgcagcccctccggagaaggatatcctatgggatgtcaaaaccgacgcactgcctggcgttctgagatggcagcagcgcctatggaccctgaccacaaggtttatcgaggctcgcgctagtggcaagagtccccaaccccagcttttatcaaataaggaaaaagcagaagctagaaagctgtgggagtataagaatagtgtgatttcccaggtcactacgcactttacagaggacttttctctgaactctgccatttcccagctcatgggcctctccaatgcgctaagccaggcaagccagagcgtgatcttgcatagcccagaattcgaagacgctctctgtgctctgatggttatggccgccccactggcacctcacgtgacaagtgagatctgggccggactggccctggtgccccggaaactgtgtgcgcattacacttgggacgcgagcgtgttgcttcaggcatggcccgccgtggacccagaattcctccagcagccagaagtggtgcagatggccgttctgattaacaataaggcctgtggtaaaattccagtcccccaacaggttgcaagggaccaggataaggtccacgaattcgtgcttcagagcgaactgggggttcggctgctgcagggacgatcaataaaaaagtcattcttgtctcctcgaacagctctgatcaattttctggttcaggactag

SEQ ID NO: 186008 - DNA, 2712 bp, Artificial Sequence
  derived and/or modified sequence
atggcctcagtgtggcaaagactgggcttttacgcctctctgttgaagcgtcagctgaatggaggccccgacgtgattaagtgggagcggcgagtgatccccggctgtactcgaagtatttacagcgccactggtaagtggaccaaagaatacacccttcagacccgtaaagacgtggagaagtggtggcatcagaggatcaaggaacaggcctccaagatctctgaagccgataagagtaaacccaaattctacgtgctttcaatgtttccctacccatccggcaaactgcacatggggcacgttcgcgtttacaccatctccgatactattgcacgatttcaaaagatgcgcggcatgcaggtgattaacccaatggggtgggacgcttttggccttcccgccgaaaatgctgccgtggaacggaacctgcacccacagagttggacccagtctaacattaaacatatgcggaaacagttggatcgcctcggcctgtgtttttcctgggacagggagataactacttgtctgcctgattattataagtggacgcagtacctctttattaaactgtacgaggcagggttagcctatcagaaggaagccctggtgaactgggatccggtggaccagactgtgctggccaatgaacaggtggatgaacacggttgctcctggcggtcaggcgcaaaggtggaacaaaagtacttaaggcagtggtttataaagactacagcctacgccaaagccatgcaggacgccttggctgacctgccagagtggtacgggataaagggcatgcaggcccattggatcggcgactgcgtggggtgccatctggatttcaccttaaaggtacacggtcaagcaaccggtgaaaagctgactgcatatactgctacccctgaggcaatttacggcacctcccatgtggccatctctccaagtcaccggctactccatggccattcaagcctaaaggaggcactccgtatggcgctcgtgcctgggaaagactgtcttacgcctgtcatggctgtgaacatgctaacccagcaggaggtccctgtggtgatcctggctaaagcagacctcgagggatccttagacagcaagatcggcataccttctaccagtagcgaggacacaattctggcccaaaccctgggactcgcctattcggaagtgatcgaaactctgccagacggtaccgagagactcagctcttccgcggagtttactgggatgacccgccaggacgctttcctggcgctgacacagaaggcgcggggcaaacgagtgggaggcgatgttacttccgataagctgaaggattggctaatttctcggcaacggtactggggtacacctatacctatcgtgcattgcccagtctgcggtcccacccccgtacccctcgaagaccttccagtgacactgccaaacattgccagtttcaccgggaaaggaggtcccccactggcaatggcaagcgaatgggtgaactgcagttgtccccgatgcaaaggggcggcaaagagagaaaccgacactatggacacatttgttgattcggcatggtattattttcggtacacggaccctcacaaccctcattctccctttaataccgcggtggccgactactggatgccagtggacctttacatcggaggtaaagagcatgcggtgatgcatcttttttacgccagattttttagccacttttgccacgatcaaaaaatggtcaagcatcgtgagccttttcacaagttgttggctcaggggctgattaaagggcagacctttaggctgcctagtggacaataccttcaacgggaagaggtggatcttacaggctcagtccccgtccacgctaagactaaggagaagctagaagtgacgtgggaaaaaatgtccaaatccaaacataatggggtcgatcccgaagaggtagtggagcaatatggtatcgacaccatcagactatatatcctgttcgccgcgcccccagagaaggacattctttgggacgtgaagaccgatgcccttcctggcgtgctgaggtggcagcaacggctgtggacactaactactcggttcatcgaagcacgcgcatcagggaagtcacctcagccacagcttttgagtaataaagagaaggctgaggcgcgaaagctgtgggagtataaaaacagtgttatcagtcaggtcacaacccactttactgaagactttagtcttaatagtgcgatctcccaactgatggggttgagtaacgcgctgtctcaggcctctcaaagtgttattttacactctcccgagtttgaggacgccctatgtgccttgatggtaatggccgctcctttggccccccatgttacttctgagatttgggcagggctggccctcgttccaagaaaactctgcgcccactatacttgggacgccagtgtgctcctccaggcttggcccgcggtggatccggaatttctgcagcagccagaagttgtacaaatggccgtgctcattaataacaaggcttgcggtaagatccctgtgccacagcaagttgctcgagaccaagacaaggtccatgaattcgttctccagtccgagctaggtgtgcggctcctgcagggccgctcaatcaaaaaatcctttctatctccccggacagccctgattaattttttagtgcaggactag

SEQ ID NO: 186009 - DNA, 2712 bp, Artificial Sequence
  derived and/or modified sequence
atggcctctgtgtggcagaggctgggcttctacgccagcctgctgaagaggcagctgaatggaggcccagatgtgatcaagtgggagcggcgggtcatccctggctgcaccaggagcatctacagcgccaccgggaagtggaccaaggagtacaccctgcagaccaggaaggatgtggagaagtggtggcaccagaggatcaaggagcaggccagcaagatcagcgaggccgacaagagcaagcccaagttctacgtgctgtccatgttcccctaccccagcggcaagctgcacatgggccacgtgcgggtgtacaccatcagtgacaccatcgcccgcttccagaagatgaggggcatgcaggtgatcaaccccatgggctgggatgccttcggcctgcctgcagaaaatgctgctgtggagaggaacctgcacccccagagctggacccagagcaacatcaagcacatgaggaagcagctggaccggctgggcctgtgcttctcctgggaccgggagatcaccacctgcctgcctgactactacaagtggacccagtacctgttcatcaagctgtatgaagctggcctggcctaccagaaggaggccctggtgaactgggaccctgtggaccagacagtgctggccaatgagcaggtggatgaacatggctgctcctggaggtctggggccaaggtggagcagaagtacctgcggcagtggttcatcaagaccacagcctatgccaaggccatgcaggatgccctggccgacctgcctgagtggtacggcatcaagggcatgcaggcccactggattggagactgtgtgggctgccacctggacttcaccctgaaggtgcacggccaggccaccggggagaagctgacagcctacacagccaccccagaggccatctacggcaccagccacgtggccatcagccccagccaccggctgctgcacggccacagcagcctgaaggaggccctgaggatggccctggtgcctgggaaggactgcctgacccctgtgatggctgtgaacatgctgacccagcaggaggtgcctgtggtgatcctggccaaggctgacctggagggcagcctggacagcaagattggcatccccagcaccagcagcgaggacaccatcctggcccagaccctgggcctggcctacagcgaggtgattgagaccctgcctgatggaacagagcggctgagcagcagcgctgagttcaccggcatgacccggcaggatgccttcctggccctgacccagaaggcccggggcaagagggtgggcggagatgtgaccagtgacaagctgaaggactggctgatcagccggcagcgctactggggcacccccatccccatcgtgcactgccctgtgtgtggccccacccctgtgcccctggaggacctgcctgtgaccctgcccaacatcgccagcttcaccgggaagggcggcccccccctggccatggccagcgagtgggtgaactgcagctgcccccgctgcaagggggccgccaagcgggagacagacaccatggacacctttgtggacagcgcctggtactacttccgctacacagacccccacaacccccacagccccttcaacacagctgtggccgactactggatgcctgtggacctgtacatcggcggcaaggagcacgctgtgatgcacctgttctacgcccgcttcttcagccacttctgccacgaccagaagatggtgaagcaccgggagcccttccacaagctgctggcccagggcctcatcaagggccagaccttccggctgcccagcggccagtacctgcagcgggaggaggtggacctgaccggctctgtgcctgtgcacgccaagaccaaggagaagctggaggtgacctgggagaagatgagcaagagcaagcacaacggggtggaccctgaggaggtggtggagcagtatggaattgacaccatccggctgtacatcctgtttgctgcccctcctgagaaggacatcctgtgggatgtgaagacagatgccctgcccggggtgctgcgctggcagcagaggctgtggaccctgaccacccgcttcatcgaggcccgggccagcggcaagagcccccagccccagctgctgagcaacaaggagaaggccgaggccaggaagctgtgggagtacaagaacagcgtcatcagccaggtgaccacccacttcacagaggacttcagcctgaacagcgccatcagccagctgatgggcctgagcaatgccctgagccaggccagccagagcgtcatcctgcacagccctgagtttgaagatgccctgtgtgccctgatggtgatggccgcccccctggccccccacgtgaccagcgagatctgggccggcctggccctggtgcccaggaagctgtgtgcccactacacctgggatgcctctgtgctgctgcaggcctggccagctgtggaccctgagttcctgcagcagcctgaggtggtgcagatggctgtgctgatcaacaacaaggcctgtgggaagatccctgtgccccagcaggtggcccgggaccaggacaaggtgcatgaatttgtgctgcagagcgagctgggcgtgcggctgctgcagggccgcagcatcaagaagagcttcctgagccccaggacagccctgatcaacttcctggtgcaggactag

SEQ ID NO: 186010 - DNA, 2583 bp, Artificial Sequence
  derived and/or modified sequence
atggcctctgtgtggcagaggctgggcttctacgccagcctgctgaagaggcagctgaatggaggcccagatgtgatcaagtgggagcggcgggtcatccctggctgcaccaggagcatctacagcgccaccgggaagtggaccaaggagtacaccctgcagaccaggaaggatgtggagaagtggtggcaccagaggatcaaggagcaggccagcaagatcagcgaggctgatgtgatcaaccccatgggctgggatgccttcggcctgcctgcagaaaatgctgctgtggagaggaacctgcacccccagagctggacccagagcaacatcaagcacatgaggaagcagctggaccggctgggcctgtgcttctcctgggaccgggagatcaccacctgcctgcctgactactacaagtggacccagtacctgttcatcaagctgtatgaggccggcctggcctaccagaaggaggccctggtgaactgggaccctgtggaccagacagtgctggccaatgagcaggtggatgagcacggctgctcctggaggtctggggccaaggtggagcagaagtacctgcggcagtggttcatcaagaccacagcctatgccaaggccatgcaggatgccctggccgacctgcctgagtggtacggcatcaagggcatgcaggcccactggattggagactgtgtgggctgccacctggacttcaccctgaaggtgcacggccaggccactggagagaagctgacagcctacacagccaccccagaggccatctacggcaccagccacgtggccatcagccccagccaccggctgctgcacggccacagcagcctgaaggaggccctgaggatggccctggtgcctgggaaggactgcctgacccctgtgatggctgtgaacatgctgacccagcaggaggtgcctgtggtgatcctggccaaggctgacctggagggcagcctggacagcaagattggcatccccagcaccagcagcgaggacaccatcctggcccagaccctgggcctggcctacagcgaggtgattgagaccctgcctgatggaacagagcggctgagcagcagcgctgagttcaccggcatgacccggcaggatgccttcctggccctgacccagaaggcccggggcaagagggtgggcggagatgtgaccagtgacaagctgaaggactggctgatcagccggcagcgctactggggcacccccatccccatcgtgcactgccctgtgtgtggccccacccctgtgcccctggaggacctgcctgtgaccctgcccaacatcgccagcttcaccggaaaaggaggcccccccctggccatggccagcgagtgggtgaactgcagctgcccccgctgcaagggagctgccaagcgggagacagacaccatggacacctttgtggacagcgcctggtactacttccgctacacagacccccacaacccccacagccccttcaacacagctgtggccgactactggatgcctgtggacctgtacatcggcggcaaggagcacgctgtgatgcacctgttctacgcccgcttcttcagccacttctgccacgaccagaagatggtgaagcaccgggagcccttccacaagctgctggcccagggcctcatcaagggccagaccttccggctgcccagcggccagtacctgcagcgggaggaggtggacctgactggatctgtgcctgtgcacgccaagaccaaggagaagctggaggtgacctgggagaagatgagcaagagcaagcacaatggagtggaccctgaggaggtggtggagcagtatggcatcgacaccatccggctgtacatcctgtttgctgcccctcctgagaaggacatcctgtgggatgtgaagacagatgccctgcccggggtgctgcgctggcagcagaggctgtggaccctgaccacccgcttcatcgaggcccgggccagcggcaagagcccccagccccagctgctgagcaacaaggagaaggccgaggccaggaagctgtgggagtacaagaacagcgtcatcagccaggtgaccacccacttcacagaggacttcagcctgaacagcgccatcagccagctgatgggcctgagcaatgccctgagccaggccagccagagcgtcatcctgcacagccctgagtttgaagatgccctgtgtgccctgatggtgatggccgcccccctggcccctcatgtgaccagcgagatctgggccggcctggccctggtgcccaggaagctgtgtgcccactacacctgggatgcctctgtgctgctgcaggcctggccagctgtggaccctgagttcctgcagcagcctgaggtggtgcagatggctgtgctgatcaacaacaaggcctgtgggaagatccctgtgccccagcaggtggcccgggaccaggacaaggtgcatgaatttgtgctgcagagcgagctgggcgtgcggctgctgcagggccgcagcatcaagaagagcttcctgagccccaggacagccctgatcaacttcctggtgcaggactag

SEQ ID NO: 186011 - DNA, 4281 bp, Artificial Sequence
  derived and/or modified sequence
gttgctctcctcccttccccggtcccgcccccgtctgtctgtgtcgactgcggacgctatcgataaagttgctgttttgacaacatggcggcgcccatggtccgtggcccggcagtgctcgcctaaaggtggagaacgaggagtagaggagccgcaggccagagcctgtgagcagatccagacctacagataaaaaacattatttaatctatctgggatttactccggcttatgatttgagggccttctcaccttctgaagaatggcttctgtttggcagagattgggtttttatgcctctcttctgaaaagacagctaaatggtgggccagatgtcatcaagtgggaaaggagagtaattcccggatgtaccagaagcatctacagtgccacgggaaagtggacaaaagagtatacattgcagacaagaaaggatgttgagaaatggtggcatcaacgaataaaagaacaggcctccaaaatttcagaagctgataaatcgaagccaaaattttacgtgctttccatgttcccttatccttctggtaagctgcacatgggccatgtgcgtgtctacaccatcagcgacaccatagcacggttccagaagatgagagggatgcaggtcatcaaccccatgggatgggatgcttttggattgcctgctgaaaatgccgcagtcgagaggaatctacatccacaaagttggacacaaagtaatattaaacacatgaggaaacagcttgatcgtctgggcctgtgtttcagctgggatagggaaataactacgtgtttgccagattactacaagtggactcagtatctctttattaaactgtatgaggctgggctggcctatcaaaaggaggccctggttaactgggacccagtggatcaaacagtgcttgccaatgagcaggtggatgaacatggctgttcatggcgttctggagcaaaggtggaacagaagtacctcagacaatggtttattaagacaaccgcttatgcaaaggccatgcaggacgcgttggcagaccttccagaatggtatggaataaaaggcatgcaagcccactggattggggactgtgtgggctgccacctggacttcacattaaaggttcatgggcaagccacgggcgaaaagctgactgcctatacggccacccctgaagccatttatggcacctcccacgtggccatctcgcccagccacagactcctacatgggcacagctctctgaaggaagccttgaggatggcccttgtccctggcaaagattgcctcacgcctgtaatggctgtgaacatgcttacccagcaggaggtccctgtcgttattttggccaaagctgacttggaaggctctctggattcaaaaataggaattcccagtactagctcagaggacaccatcttagcccaaaccctgggcctggcctactctgaagtcattgaaactttgccagatggcacagagagactgagcagctctgctgagttcacaggtatgacccggcaggatgcttttctagccctgactcagaaagcccgggggaagagagtgggtggagacgtgacaagtgataaactgaaagactggctgatttcacggcagcggtactggggcacaccaatccccattgtccactgcccagtctgtggccccacacctgtgcccctggaggacttgcctgtgaccctgcccaacatcgcgtctttcactggcaagggaggccccccactggccatggcttcagagtgggtgaactgctcctgcccaaggtgcaagggagcagccaagagagagacagacacgatggatacctttgttgattctgcttggtactacttcagatacactgaccctcataatccacacagcccttttaacacagcagtggccgattactggatgcctgtggatttgtacattggagggaaagaacatgccgtcatgcacttgttctatgcaagattctttagtcatttttgccatgatcaaaaaatggttaaacatagggagccttttcataagctgctggcccaaggccttatcaaggggcagacattccgcctaccatctggacagtatctacagagagaggaagtggatctcacaggttccgttcctgttcatgcaaaaacgaaagagaagttagaggtgacgtgggagaagatgagtaagtccaaacacaacggggtggacccagaggaagttgtggagcagtatgggatcgacacgattcggctctacatcctttttgctgcccctcctgagaaggatatcttgtgggatgtgaaaactgatgctctccctggggtgctgagatggcaacaacgactgtggaccttgacaactcggtttattgaggccagggcttctgggaagtctccccagcctcagctgctgagtaacaaggagaaagctgaggccaggaagctctgggagtacaagaactccgtcatctctcaggtgaccacccatttcacagaggacttctcactgaattctgcaatttctcagctgatgggactcagcaatgccctctcgcaagcctctcagagcgtcattctccacagccccgagtttgaggatgctttgtgtgccctgatggtaatggctgctccactggcccctcatgtaacctcagagatctgggcaggcctggcgctggtgccgaggaagctctgtgcccactacacttgggatgccagtgtgctgctccaggcatggcctgctgtggacccggagttcctgcagcagcctgaggttgtccagatggcagttctgatcaacaataaagcttgtggcaaaattcctgtgccccaacaagttgcccgggaccaggacaaagtccacgaatttgttcttcaaagcgagctgggtgtcaggcttttgcaaggacgaagcatcaagaagtccttcctttccccgagaactgccctcatcaacttcctggtgcaagattgacagccaggaggctgcagctaccacgagggcctctgaggaacctccttccaggcctgggatgagggggcgatgtctgctggcccaggggaagggaaaagacaaatgtcttgactgttgacctcggtcctgtggcagactgcagtcaacagtgtgcctctgtagtgtggcctggtgctggggtgaaggtgagctgggcaaaggagaaatatgagctactgaggagggggttggacatcctgcccctcaccccccacccacactgcaggtagaggaggccatctgatcccatgggaagccatcagagacactgctggtgggagcaggaaggagcagtgcccctcgagcagccaggaagcctgcggatctgggaaatggctctgccttaggcacttctcgggaatttgaggccagcctgaggaactgcaggactcaggtgcaatgtgccagccacttggaactgctaactgagcctccagatggtagtgaatggtctctttgccttcaggctggatgaggaagtcatttaggaaatgttcaaataaccaatatgtggaaatggacacagggatcttctgaagttgctttgaatcaaaaggcaggcagtgctggttcctctgcctgtgtccccaccactccccagctctgtcatgcaggcctgtcctccccaaccccagctggatgtgcctcccaggcctgctgtggttctgacacacaggatcccaggcaaggcaccacttcctcacatgaatgaggagcagcaagtcataaccactcccttgggtatacaatttgctgtgtagtgaagtggaaccaggctcaggctgctggtcccaacctcagagccccaccgcagcccagtagggatgcagcacgccccagagggctcatgtgggccccagatggcaatgccaccattgttgatgtgactccagagccagttattaggaagagcaagctcaccacagaggagtggaactgaggccccccagatgttgcctccggtgtccaagccacagcggtctggctgttgggaagatggccaggaatggactcataccattggcacattaggctaatcctggttttatgtgaagtcagcaattaagtgttcccactagaactgacctaagccactgattaatatttaatgagggaaggtaggggagaatctagccattttataatgccagaaatctatatatgttatctgatgccatttttctgaagtagcctcacatgtggtccccctgcagttcagcagttaacagatgacttttttagtgtaataaaatgtttatcatctatga

SEQ ID NO: 186012 - DNA, 2800 bp, Artificial Sequence
  derived and/or modified sequence
atcgataaagttgctgttttgacaacatggcggcgcccatggtccgtggcccggcagtgctcgcctaaaggtggagaacgaggagtagaggagccgcaggccagagcctgtgagcagggccttctcaccttctgaagaatggcttctgtttggcagagattgggtttttatgcctctcttctgaaaagacagctaaatggtgggccagatgtcatcaagtgggaaaggagagtaattcccggatgtaccagaagcatctacagtgccacgggaaagtggacaaaagagtatacattgcagacaagaaaggatgttgagaaatggtggcatcaacgaataaaagaacaggcctccaaaatttcagaagctgatgtcatcaaccccatgggatgggatgcttttggattgcctgctgaaaatgccgcagtcgagaggaatctacatccacaaagttggacacaaagtaatattaaacacatgaggaaacagcttgatcgtctgggcctgtgtttcagctgggatagggaaataactacgtgtttgccagattactacaagtggactcagtatctctttattaaactgtatgaggctgggctggcctatcaaaaggaggccctggttaactgggacccagtggatcaaacagtgcttgccaatgagcaggtggatgaacatggctgttcatggcgttctggagcaaaggtggaacagaagtacctcagacaatggtttattaagacaaccgcttatgcaaaggccatgcaggacgcgttggcagaccttccagaatggtatggaataaaaggcatgcaagcccactggattggggactgtgtgggctgccacctggacttcacattaaaggttcatgggcaagccacgggcgaaaagctgactgcctatacggccacccctgaagccatttatggcacctcccacgtggccatctcgcccagccacagactcctacatgggcacagctctctgaaggaagccttgaggatggcccttgtccctggcaaagattgcctcacgcctgtaatggctgtgaacatgcttacccagcaggaggtccctgtcgttattttggccaaagctgacttggaaggctctctggattcaaaaataggaattcccagtactagctcagaggacaccatcttagcccaaaccctgggcctggcctactctgaagtcattgaaactttgccagatggcacagagagactgagcagctctgctgagttcacaggtatgacccggcaggatgcttttctagccctgactcagaaagcccgggggaagagagtgggtggagacgtgacaagtgataaactgaaagactggctgatttcacggcagcggtactggggcacaccaatccccattgtccactgcccagtctgtggccccacacctgtgcccctggaggacttgcctgtgaccctgcccaacatcgcgtctttcactggcaagggaggccccccactggccatggcttcagagtgggtgaactgctcctgcccaaggtgcaagggagcagccaagagagagacagacacgatggatacctttgttgattctgcttggtactacttcagatacactgaccctcataatccacacagcccttttaacacagcagtggccgattactggatgcctgtggatttgtacattggagggaaagaacatgccgtcatgcacttgttctatgcaagattctttagtcatttttgccatgatcaaaaaatggttaaacatagggagccttttcataagctgctggcccaaggccttatcaaggggcagacattccgcctaccatctggacagtatctacagagagaggaagtggatctcacaggttccgttcctgttcatgcaaaaacgaaagagaagttagaggtgacgtgggagaagatgagtaagtccaaacacaacggggtggacccagaggaagttgtggagcagtatgggatcgacacgattcggctctacatcctttttgctgcccctcctgagaaggatatcttgtgggatgtgaaaactgatgctctccctggggtgctgagatggcaacaacgactgtggaccttgacaactcggtttattgaggccagggcttctgggaagtctccccagcctcagctgctgagtaacaaggagaaagctgaggccaggaagctctgggagtacaagaactccgtcatctctcaggtgaccacccatttcacagaggacttctcactgaattctgcaatttctcagctgatgggactcagcaatgccctctcgcaagcctctcagagcgtcattctccacagccccgagtttgaggatgctttgtgtgccctgatggtaatggctgctccactggcccctcatgtaacctcagagatctgggcaggcctggcgctggtgccgaggaagctctgtgcccactacacttgggatgccagtgtgctgctccaggcatggcctgctgtggacccggagttcctgcagcagcctgaggttgtccagatggcagttctgatcaacaataaagcttgtggcaaaattcctgtgccccaacaagttgcccgggaccaggacaaagtccacgaatttgttcttcaaagcgagctgggtgtcaggcttttgcaaggacgaagcatcaagaagtccttcctttccccgagaactgccctcatcaacttcctggtgcaagattgacagccaggaggctgcagctaccacgagggcctctgaggaacctccttccaggcctgggatgagggggcgatgtctgctg

SEQ ID NO: 186013 - DNA, 4744 bp, Artificial Sequence
  derived and/or modified sequence
gctatcgataaagttgctgttttgacaacatggcggcgcccatggtccgtggcccggcagtgctcgcctaaaggtggagaacgaggagtagaggagccgcaggccagagcctgtgagcagggccttctcaccttctgaagaatggcttctgtttggcagagattgggtttttatgcctctcttctgaaaagacagctaaatggtgggccagatgtcatcaagtgggaaaggagagtaattcccggatgtaccagaagcatctacagtgccacgggaaagtggacaaaagagtatacattgcagacaagaaaggatgttgagaaatggtggcatcaacgaataaaagaacaggcctccaaaatttcagaagctgataaatcgaagccaaaattttacgtgctttccatgttcccttatccttctggtaagctgcacatgggccatgtgcgtgtctacaccatcagcgacaccatagcacggttccagaagatgagagggatgcaggtcatcaaccccatgggatgggatgcttttggattgcctgctgaaaatgccgcagtcgagaggaatctacatccacaaagttggacacaaagtaatattaaacacatgaggaaacagcttgatcgtctgggcctgtgtttcagctgggatagggaaataactacgtgtttgccagattactacaagtggactcagtatctctttattaaactgtatgaggctgggctggcctatcaaaaggaggccctggttaactgggacccagtggatcaaacagtgcttgccaatgagcaggtggatgaacatggctgttcatggcgttctggagcaaaggtggaacagaagtacctcagacaatggtttattaagacaaccgcttatgcaaaggccatgcaggacgcgttggcagaccttccagaatggtatggaataaaaggcatgcaagcccactggattggggactgtgtgggctgccacctggacttcacattaaaggttcatgggcaagccacgggcgaaaagctgactgcctatacggccacccctgaagccatttatggcacctcccacgtggccatctcgcccagccacagactcctacatgggcacagctctctgaaggaagccttgaggatggcccttgtccctggcaaagattgcctcacgcctgtaatggctgtgaacatgcttacccagcaggaggtccctgtcgttattttggccaaagctgacttggaaggctctctggattcaaaaataggaattcccagtactagctcagaggacaccatcttagcccaaaccctgggcctggcctactctgaagtcattgaaactttgccagatggcacagagagactgagcagctctgctgagttcacaggtatgacccggcaggatgcttttctagccctgactcagaaagcccgggggaagagagtgggtggagacgtgacaagtgataaactgaaagactggctgatttcacggcagcggtactggggcacaccaatccccattgtccactgcccagtctgtggccccacacctgtgcccctggaggacttgcctgtgaccctgcccaacatcgcgtctttcactggcaagggaggccccccactggccatggcttcagagtgggtgaactgctcctgcccaaggtgcaagggagcagccaagagagagacagacacgatggatacctttgttgattctgcttggtactacttcagatacactgaccctcataatccacacagcccttttaacacagcagtggccgattactggatgcctgtggatttgtacattggagggaaagaacatgccgtcatgcacttgttctatgcaagattctttagtcatttttgccatgatcaaaaaatggttaaacatagggagccttttcataagctgctggcccaaggccttatcaaggggcagacattccgcctaccatctggacagtatctacagagagaggaagtggatctcacaggttccgttcctgttcatgcaaaaacgaaagagaagttagaggtgacgtgggagaagatgagtaagtccaaacacaacggggtggacccagaggaagttgtggagcagtatgggatcgacacgattcggctctacatcctttttgctgcccctcctgagaaggatatcttgtgggatgtgaaaactgatgctctccctggggtgctgagatggcaacaacgactgtggaccttgacaactcggtttattgaggccagggcttctgggaagtctccccagcctcagctgctgagtaacaaggagaaagctgaggccaggaagctctgggagtacaagaactccgtcatctctcaggtgaccacccatttcacagaggacttctcactgaattctgcaatttctcagctgatgggactcagcaatgccctctcgcaagcctctcagagcgtcattctccacagccccgagtttgaggatgctttgtgtgccctgatggtaatggctgctccactggcccctcatgtaacctcagagatctgggcaggcctggcgctggtgccgaggaagctctgtgcccactacacttgggatgccagtgtgctgctccaggcatggcctgctgtggacccggagttcctgcagcagcctgaggttgtccagatggcagttctgatcaacaataaagcttgtggcaaaattcctgtgccccaacaagttgcccgggaccaggacaaagtccacgaatttgttcttcaaagcgagctgggtgtcaggcttttgcaaggacgaagcatcaagaagtccttcctttccccgagaactgccctcatcaacttcctggtgcaagattgacagccaggaggctgcagctaccacgagggcctctgaggaacctccttccaggcctgggatgagggggcgatgtctgctggcccaggggaagggaaaagacaaatgtcttgactgttgacctcggtcctgtggcagactgcagtcaacagtgtgcctctgtagtgtggcctggtgctggggtgaaggtgagctgggcaaaggagaaatatgagctactgaggagggggttggacatcctgcccctcaccccccacccacactgcaggtagaggaggccatctgatcccatgggaagccatcagagacactgctggtgggagcaggaaggagcagtgcccctcgagcagccaggaagcctgcggatctgggaaatggctctgccttaggcacttctcgggaatttgaggccagcctgaggaactgcaggactcaggtgcaatgtgccagccacttggaactgctaactgagcctccagatggtagtgaatggtctctttgccttcaggctggatgaggaagtcatttaggaaatgttcaaataaccaatatgtggaaatggacacagggatcttctgaagttgctttgaatcaaaaggcaggcagtgctggttcctctgcctgtgtccccaccactccccagctctgtcatgcaggcctgtcctccccaaccccagctggatgtgcctcccaggcctgctgtggttctgacacacaggatcccaggcaaggcaccacttcctcacatgaatgaggagcagcaagtcataaccactcccttgggtatacaatttgctgtgtagtgaagtggaaccaggctcaggctgctggtcccaacctcagagccccaccgcagcccagtagggatgcagcacgccccagagggctcatgtgggccccagatggcaatgccaccattgttgatgtgactccagagccagttattaggaagagcaagctcaccacagaggagtggaactgaggccccccagatgttgcctccggtgtccaagccacagcggtctggctgttgggaagatggccaggaatggactcataccattggcacattaggctaatcctggttttatgtgaagtcagcaattaagtgttcccactagaactgacctaagccactgattaatatttaatgagggaaggtaggggagaatctagccattttataatgccagaaatctatatatgttatctgatgccatttttctgaagtagcctcacatgtggtccccctgcagttcagcagttaacagatgacttttttagtgtaataaaatgtttatcatctatgacttcaggacatatgtgtgatcctggaatacaccatattccaatttcagagttaattacaaacagattgaggtattccatcatcatcggaagcattggctgtgtgtctgactccacatggaatgctataaagtgggatacatgtggttcttcttgttccagaacttacagtccatggtagacaacactgatacaggcaaactagcaacagcaattaagtcactggttctcagacttaatactctgcctggtcctcatgcccagatattccaatttaattggtccatggtgtggcttgaacaccaggaatctttaaaactccacaagtgattctaatgggcagcaaagtttgagaatcactggacacattgatgcacttgagccatcatttctatctagttcttcctcttcctaatcttcaggttagcggggataagtttggtccaggaccaagagttggaccaaaagggaagacaggggccagaagtctagagtgctagagccgacttgaatgtactcagtctcattgcacatggcagtgaatatggattaaatataagcccatgaaaatatttggtacaaggaa

SEQ ID NO: 186014 - DNA, 2712 bp, Artificial Sequence
  derived and/or modified sequence
atggccagcgtgtggcagcggctgggcttctacgccagcctgctgaagaggcagcttaatggtggcccagatgtcataaagtgggagcggcgggtcatccctggttgcacgcggagcatctatagtgccaccgggaaatggactaaggagtacaccctgcaaactcgtaaagatgttgagaaatggtggcaccagcgtatcaaggaacaggcgagtaagatatccgaagcagataaatctaagcccaagttctatgtactcagcatgtttccttatccatctggcaagttgcacatgggtcatgtgcgtgtatacactatcagtgacaccattgctaggttccagaaaatgcgaggtatgcaggtgattaacccaatgggctgggacgccttcggcttgcccgccgaaaacgcggccgtggagcggaacctgcaccctcagtcttggacgcagagcaacataaagcacatgaggaagcaactggataggctcggcttgtgtttctcatgggaccgcgaaattaccacgtgtctgcccgattactacaagtggacccagtatctttttataaaattgtatgaggccggactggcctaccagaaagaggcccttgtcaactgggatcctgttgaccagacggtgctggccaatgaacaagtcgatgaacacggatgttcatggaggagcggagccaaggtggaacagaaatatttaaggcagtggtttattaagacgacagcctatgcaaaagcgatgcaggacgctctcgccgacctgcctgaatggtatggtattaagggcatgcaggcccactggataggggattgtgttggatgtcacttggacttcaccctgaaagtgcatgggcaggccaccggtgaaaagctgacagcttacactgcaacacccgaagcgatctacggcaccagccacgttgcgatctcaccttctcaccgcttgctgcatggccatagcagtcttaaggaagcattgaggatggcgttggtgcccggaaaagattgcctcacgccggtcatggcagttaatatgctgacccaacaggaggtacctgttgtcatccttgcaaaggccgatcttgaggggagtctcgatagcaagatcgggatcccaagtacttcaagcgaggacactatcctggctcagaccctgggcctggcctattctgaggtaatcgaaacacttccagatggaaccgagcgtcttagcagctccgccgaattcaccggcatgacacggcaggacgcatttttggctctgacccaaaaggcacgtggtaaaagggtcgggggggatgtaacctctgacaagttgaaggactggctgattagtagacagcgctattggggcacccccattccgattgtccactgcccagtttgcggtccgactcccgtccccctcgaggacctccccgtcactctgcccaatatcgcctccttcactggtaaagggggccccccccttgccatggcaagtgagtgggtgaactgcagttgtcccagatgcaagggcgccgccaagcgggagacagacactatggataccttcgtggattccgcctggtattactttagatacaccgatccacataacccgcatagtcccttcaacaccgccgtagctgactattggatgcccgtggacctttacatcggagggaaggagcatgccgtcatgcacctgttttacgcgagatttttctcccacttttgtcatgatcaaaagatggtaaaacatcgtgagccctttcacaaacttctcgcccagggtttgatcaaaggacaaacattcagattgccctcgggtcagtatctgcaacgagaggaggttgatctgactggaagcgtgcccgtgcacgccaagactaaggagaaactggaggtgacgtgggagaagatgtctaagtctaagcacaatggagtggatcctgaggaggtggtggaacaatatggaatagacaccattcgtctgtatatcctcttcgccgccccccccgaaaaggacattctgtgggatgtgaaaactgatgctctaccgggagtgctgagatggcagcagcggttgtggacccttaccacaaggttcatcgaggcccgagcctctggaaagtcgccgcagccacagctcctgtctaacaaggaaaaggctgaggccaggaagttatgggagtacaaaaactcagtgataagtcaggttacgacccacttcactgaggatttcagcctgaactcagctataagccagttaatgggcctgagcaatgccctgtcacaggcatcccaaagcgtcatcctgcattctcctgaatttgaggacgcactgtgcgcgttgatggtcatggcagcaccactggcaccacacgtgactagcgagatttgggcgggactagcactagtgccacgaaaattgtgcgcacattatacgtgggacgcctctgtcctcctgcaagcttggcctgcagtggatcccgagttcctccagcagcctgaggtggtgcagatggctgtgctcatcaacaacaaggcttgcggaaaaattcctgtgcctcagcaggtggctagggaccaagacaaggtacacgagtttgttttgcagtctgaactgggcgtaaggctgctgcaggggcggagcatcaagaagagctttctgagcccccgcaccgccctcattaacttcctagtgcaggattag

SEQ ID NO: 186015 - DNA, 2583 bp, Artificial Sequence
  derived and/or modified sequence
atggccagcgtgtggcagcggctgggcttctacgccagcctgctgaagcgccaattgaatggaggacccgacgtgattaagtgggaacgcagagtgattccaggctgtacaaggtccatctatagtgccaccgggaaatggactaaggagtatactcttcagacccgaaaggatgtggaaaagtggtggcatcaacggatcaaggagcaggcttccaaaataagcgaagcggacgtcattaatcccatggggtgggatgcttttggactaccagcagaaaacgccgctgtggaacggaatctacacccacagtcctggacccagagcaacattaaacacatgaggaaacagctggacaggctagggttgtgcttcagttgggatagagaaattaccacgtgtctgccagattactataagtggacacaatacctatttataaagttatatgaagcagggttagcgtaccagaaagaggcccttgtcaattgggacccagtagatcaaactgtattggctaacgaacaagtggacgagcacggttgtagttggagaagtggcgccaaagtggagcagaaatacttgcgccagtggtttattaaaactacggcctacgcaaaggccatgcaggacgctttagcggacctgcctgaatggtatgggattaagggcatgcaggcccattggatcggcgattgtgtgggctgccatttagacttcaccctgaaggttcacggtcaggctaccggggaaaaactgaccgcttacactgctacgcctgaggctatctatggcacatcccatgttgccatatcaccctcccatcgcctcctgcacggacactcatcactgaaggaggcacttcgaatggcactggtccctggcaaggactgcctcactcccgtgatggccgtgaatatgctaactcagcaagaagtgccggtggtgatcctggccaaggcggatctggagggctcactggacagcaaaatcggtatcccctctacatcctctgaggatacaatcttggcgcaaaccctcggtctggcctacagcgaggtgatagagacactaccagacgggactgagcgcctgtctagctctgcagaattcaccggtatgacccggcaggatgcttttcttgctctgacacaaaaagcacgggggaaacgagtcggcggcgatgtgacctccgataagctgaaagactggttgatttctagacaacggtactggggaacaccaattcctatcgttcactgtccagtttgcggacccacacctgtaccactggaggacctcccagtcaccctgcccaatatcgcctcatttactggtaagggcggcccaccgctcgctatggcctctgaatgggtcaactgtagctgccccagatgtaaaggcgcagcgaagcgggagacagacacgatggacacgttcgtcgacagcgcctggtactattttcgctatactgacccccataacccccacagccccttcaacactgcggtggctgactactggatgccagtcgatctctacattgggggtaaagagcatgccgttatgcatctgttctatgcaagattcttctcccatttctgccacgatcagaaaatggtcaagcaccgcgaaccattccacaaattactggcccagggccttattaagggacagacttttcgtctccccagcggccaatatctacagcgcgaggaggtggacttgaccgggagtgttcctgtacacgctaaaaccaaagaaaaactggaggtgacttgggaaaagatgtctaagagtaaacacaacggggtggatccagaagaggttgtcgagcaatatggcattgacaccataaggctgtatatcctgttcgccgcacctccagagaaggacatattgtgggacgtaaaaacggacgcgctgccgggagtgctccgttggcagcagcggctgtggaccctgacgacgagattcatcgaggctcgggcatctgggaagagcccccaacctcagctcctgtctaacaaggaaaaggctgaggccagaaagttatgggaatacaagaattctgttatctctcaggtcaccactcactttactgaggacttttctctgaatagtgcaatttctcagctcatgggcctgagtaacgcactgtcccaggcatctcaatccgtgattctgcacagtccagagtttgaagacgcactttgcgcactgatggtgatggcggctcctcttgcgccgcacgttacaagtgagatctgggcaggactggccctggtgcctcgcaagttgtgtgcacattacacatgggatgcttctgtgctcctccaggcgtggcctgcagtggatccagaatttcttcagcagccggaagtggtgcagatggccgtcctgattaataacaaggcttgcggtaagatccccgtgccccagcaggtcgctagagaccaggacaaagtgcatgagtttgtgctgcagtccgagttgggtgtgagattacttcagggcaggagtattaaaaagagtttcctgtcgccccggaccgccttgatcaattttctcgttcaggactag

SEQ ID NO: 186016 - DNA, 2712 bp, Artificial Sequence
  derived and/or modified sequence
atggccagcgtgtggcagcggctgggcttctacgccagcctgctgaagcgccagttgaatggcggaccggatgttatcaagtgggagcggcgcgtgatccccggatgtacaaggtccatttattccgccaccggcaagtggaccaaggagtatacactccagacgagaaaagatgtggagaaatggtggcaccaacgcatcaaagagcaggcctccaagatctcggaggccgacaagtctaagccgaagttttacgtgctgtctatgtttccatatccgtctgggaagctccacatgggacatgtgcgggtttacaccatctctgacacaatcgcccggtttcaaaaaatgcgcgggatgcaggttatcaatccgatggggtgggacgcatttggactgcctgcagagaatgccgcggtggagcgtaacctgcacccccagagctggacgcaatctaatattaagcatatgagaaagcagctggacaggctaggcctgtgtttttcttgggatagagagatcacaacgtgcctgcccgactactataaatggacgcagtacttgttcatcaagctctacgaggctgggctggcttatcagaaagaagccctggtgaattgggaccctgttgaccaaaccgtattggcaaatgaacaagtcgacgagcatgggtgctcctggcgatccggcgcaaaagtagaacagaagtatcttcgccaatggtttattaagacaaccgcttatgcgaaggccatgcaggatgccttggcagatctgcctgaatggtacggcattaaaggtatgcaagcgcattggatcggtgactgcgtggggtgccatctggatttcaccttaaaagtacatggacaggccaccggcgagaagttaacggcttacaccgccacgccagaagcgatttatggcactagccacgtcgccatctctccgagtcacaggcttcttcacgggcactcatcactgaaagaggcgctgcgcatggctcttgtgcccggaaaagactgcctgacgccagtgatggcagtcaacatgctgacccagcaggaagttcctgttgtcatcctggccaaagccgatctggaaggtagcctggactcaaagataggaattccctcgacatccagtgaggataccattttggctcagaccttgggcttggcctattccgaggtcatcgaaacattaccagatggcaccgagcgcctctcttcctcagctgagtttacaggcatgacaaggcaggacgcattccttgcattgacacaaaaagctagaggaaagagagtgggtggcgatgtcacaagcgataaacttaaagactggttaatctctcggcagagatattggggcacccctataccaattgtgcactgccctgtctgtgggcccactcctgtccctttagaggacctccctgtcaccctgccaaatattgcttcgtttactggaaagggcggtccccctctggcgatggctagcgagtgggtaaattgctcatgcccccgatgtaaaggcgctgcaaagcgcgaaactgacactatggacacatttgtcgattccgcttggtattactttaggtacacggatccacacaacccccactcccctttcaataccgcagtggctgactattggatgcccgtggacctgtatatcggcggaaaagaacatgccgttatgcacctcttctacgcacgctttttctctcatttctgtcacgaccagaaaatggtcaagcatagggaaccgtttcacaagttgttggctcagggtctcatcaagggacagactttccgcctgcccagtggccagtacctccaacgtgaagaggtcgatttgacaggctccgtaccagtccatgcaaagactaaagaaaaattggaggtcacctgggagaaaatgtccaaaagtaagcacaacggggtggatccagaagaagtcgttgaacaatacggtatcgacaccattaggctgtacatccttttcgccgctccccctgaaaaggacatattatgggatgtcaagactgatgcactccctggggtgctccgttggcagcagagactgtggaccctgaccacccggttcatcgaggcacgtgcaagcggaaagagtccccagcctcagctgctcagcaacaaggaaaaggctgaggcacggaaactctgggaatacaaaaattctgtcatctctcaggtgacgacccattttaccgaggatttcagtctgaattccgctatttcgcagcttatgggcctttccaatgctctttcccaggcaagccaaagtgtcatcctccactctccagagttcgaagatgctctgtgtgccctgatggtgatggccgcacctctggctccacatgtcacatccgagatctgggctgggctagccctggtgccaagaaaactttgcgcccactacacctgggacgcgtccgtgctgcttcaggcctggccggccgtagatccagagttcttacagcagcccgaagtggtgcagatggctgttctcatcaacaacaaggcctgtggaaagattccagttccccagcaagtcgcaagggaccaggacaaggtgcacgaattcgttttacaaagcgagttaggcgtacgtttactgcagggacgttcaattaagaaaagtttcctgagtccacgcacggcccttatcaatttcttagtgcaggactag

SEQ ID NO: 186017 - DNA, 2712 bp, Artificial Sequence
  derived and/or modified sequence
atggcgtcagtgtggcaacggctaggtttctacgcttccctcctgaagaggcagttaaacggcggtcctgacgtcataaaatgggagcggagggtcatccctgggtgcacacgttccatatacagcgccaccggaaagtggaccaaagagtacacgctgcaaaccaggaaggatgtggagaagtggtggcatcagcgcattaaggaacaggcctccaaaatctccgaagctgacaaatcaaagcccaagttttacgttctctctatgttcccctatcccagcgggaaactacacatgggccacgttagggtatatacgatctctgataccatcgctagatttcagaaaatgcggggtatgcaagtaatcaatcctatgggatgggacgccttcggcctgccagcagaaaatgccgctgtcgaaagaaatctccacccccagtcctggacacagagcaacatcaaacatatgcggaaacagttagaccggttaggactgtgtttcagttgggatagagaaattaccacttgtctccccgactattacaaatggacacaatatctgtttataaagctttatgaagccggactagcttaccagaaagaggctcttgtgaactgggatcccgttgatcagacagtgctggcaaacgagcaagtggatgagcacggctgcagctggcggagcggcgctaaagtcgaacagaaatatctccgccagtggttcattaagaccacggcttacgcaaaggccatgcaggacgcgttggcggacctccctgaatggtacgggataaaaggcatgcaggcccactggattggcgattgtgtaggctgccatcttgacttcacgcttaaggtgcatgggcaggctaccggagagaaactgacagcctacaccgcaacccctgaggcaatctacggaacctctcacgtggcgatctcaccttcacataggctgcttcacgggcactcctccctgaaggaagcccttcggatggcgttggtgccgggtaaagattgcctgacccctgtgatggccgttaacatgctcacccagcaggaagtgcccgtcgttattctggcgaaagccgacctcgagggctcattggatagcaaaattggcattccttctacttccagcgaagacaccatcctggcacagaccctgggacttgcctacagcgaagtgatcgaaacattacccgacggcaccgaacggctgtcctcttcagctgaattcaccgggatgaccaggcaggatgcctttctggccttgacacagaaggctcgcggtaagcgtgtgggtggcgacgtaacaagtgacaaactaaaggactggctgatcagccgacagcgatactgggggactccaattcccatcgtgcattgtcccgtgtgtgggccaacccccgtgcctctggaggacctcccagttacactcccaaacatcgcttcatttacaggtaaaggtggcccacccttagctatggcatccgagtgggtgaattgtagttgcccccgttgcaagggggctgcgaagcgcgaaacagataccatggacaccttcgttgactctgcctggtactactttagatacaccgacccacacaatccgcatagcccattcaatactgctgtggcggattattggatgccagtggatctgtatattggaggtaaagaacatgccgtgatgcatttgttctacgcacgatttttctcgcacttctgccacgatcagaagatggtcaaacatcgcgaaccgttccataagctcctcgctcagggtctcatcaaaggacagaccttcagactcccttccgggcaatacctgcagcgagaagaggtagacctgacaggaagcgtacccgtgcacgccaagacaaaagagaagcttgaagttacctgggaaaaaatgagtaagtctaagcataacggcgtggaccccgaagaagtggtggaacagtacggaattgatacgatacggctgtatatcctttttgcagcaccccctgagaaggatattctgtgggatgtgaagacagacgcattaccaggagtcctgcggtggcagcagcggctttggacactaacgacgcgctttatcgaggctcgagcaagcgggaaaagtccacagccccagctgctctccaataaggagaaagccgaggctagaaaactctgggaatataagaatagcgtcatttctcaggtgactacgcactttactgaggatttcagcctcaattcagctattagtcagttgatgggcctctccaatgccctgtcccaggcgtcccaatccgtgatcctgcatagtccggagtttgaagatgcactttgcgcccttatggtcatggccgcacccctggctccacacgtgacctccgaaatctgggcaggacttgcgcttgtcccgaggaaactgtgcgcacactacacttgggatgcttcagtcctccttcaggcatggccagccgtcgatccagagtttctccaacagccagaagtggtgcagatggcagtcctgatcaataataaggcatgcggaaagattcccgtcccacaacaggtggctcgggaccaagataaagtccacgaatttgtgttacagagcgagttgggggttagactactacaaggaaggtcaattaagaagagcttcctgtccccaagaaccgcactgattaattttctagtccaggactag

SEQ ID NO: 186018 - DNA, 2583 bp, Artificial Sequence
  derived and/or modified sequence
atggcttcagtctggcagagacttggcttttatgcttctctgctcaagcggcaactgaatggaggcccagacgttatcaagtgggaaagacgcgtgatccctggatgtactcggtcaatctactctgccacaggcaaatggacaaaggagtacacacttcagactcggaaagatgtcgagaagtggtggcaccagcggatcaaagaacaggcttcaaagatttcggaggcggatgtgatcaatcccatgggatgggatgcatttgggctgcctgccgaaaacgcagccgtagagcgtaacctgcaccctcaatcctggactcaatcgaacatcaaacacatgcggaagcagctcgatcggcttggcctgtgtttctcctgggaccgggaaatcactacctgcctgccagactattacaagtggacacagtatctttttatcaaactttacgaagcaggattggcataccagaaggaggccctcgtgaactgggaccccgtggaccagaccgtgctcgcgaatgagcaggtcgatgaacatggctgcagctggagaagcggcgctaaggtggagcagaaatacttgcgccaatggttcataaagaccacagcatacgccaaggcgatgcaggacgccttggccgacctgccagaatggtacggtatcaagggcatgcaggctcactggatcggcgattgcgtcgggtgccacctggactttacactgaaggttcacggccaggctacaggagagaaactgaccgcctataccgccacaccagaggcaatttacggcacctcccatgtcgccatctctccttcacatcgcctgctccacgggcactcatcactgaaggaagccttacgcatggcgctggtgcctgggaaagattgtctgacacctgtaatggctgtaaacatgctgactcaacaagaggtgcccgtggtcattctggccaaggcagatctggaaggaagcctggattctaagatagggatcccctccacatctagcgaagacacgatcctggcccaaacgttagggctggcctattctgaagtcattgagaccctgccagatgggacagagcgactctcaagctccgcggagttcacaggaatgacaaggcaggacgcgtttctcgccctgacacagaaggccaggggtaaacgcgtggggggtgatgtaacatcagataaactcaaggattggctgatctcccgtcagagatactggggaaccccaattcccatcgtgcactgccctgtctgcggacccacaccagttccccttgaagacctgcccgtgaccttgccaaatatcgcttcgttcacaggaaagggaggcccacccttggcaatggcgagtgaatgggtaaactgcagctgccccagatgcaaaggcgctgcaaagcgagaaactgatacaatggacaccttcgtggacagtgcctggtactactttagatacacagatcctcacaaccctcatagtccctttaataccgccgtagctgattattggatgcctgttgacctgtatatcggtggaaaggaacacgccgtgatgcacctgttctatgctcgctttttctctcacttttgccacgaccagaagatggtgaaacatcgtgaacccttccataaactcttagcccagggactgattaaaggccagacctttcgcctgccaagcggccaatacctccagagagaggaagttgatcttactgggtccgtaccagtgcacgcaaagaccaaggagaagctggaagtgacgtgggagaagatgtctaaatccaaacataacggcgtagacccggaagaggttgtcgaacaatacggcatcgacaccatcaggttatatattctgttcgccgcaccacctgagaaagatatcctctgggatgtgaagacggatgcactaccgggagtcctgaggtggcagcaacgactgtggactctgactactaggttcatcgaagcaagggcatctggtaaatctccccagcctcagctactgagcaataaagaaaaggcagaggcaaggaaattatgggaatataagaacagtgtcatcagtcaagtcactacccacttcacagaggacttctctttgaatagcgcaattagccagctgatgggtctgtccaacgccttgagtcaggctagtcagagcgtcatactccactcacccgaattcgaagacgccctgtgcgcgctgatggtgatggctgctccactagcaccgcacgtgacctcggagatttgggctggactggcgctagtgcccagaaagttgtgcgcccattacacctgggatgccagcgtcctattacaggcatggcccgcagtggatcctgagtttctgcagcaaccggaggtggttcagatggccgtattgatcaataataaggcatgtggaaagatccctgtgccacagcaggttgcacgcgaccaagacaaagtgcacgaatttgtgctccaatccgagttgggagttaggctgttgcaagggcgaagcattaagaagagctttcttagtcctcgaacggctttgattaatttcctggtgcaggactag

SEQ ID NO: 186019 - DNA, 2712 bp, Artificial Sequence
  derived and/or modified sequence
atggccagcgtgtggcaaaggctcggcttctacgcatctttgctgaagaggcagctgaatggagggcctgacgtaattaaatgggaaagacgggttatcccgggttgcacacgtagcatttattctgccacggggaaatggaccaaagagtataccctccagactaggaaggacgtggagaagtggtggcatcagaggattaaggaacaggcctccaagatctccgaagccgacaaatccaaacctaagttctatgtgctgagtatgtttccttatccctctgggaagttgcacatggggcacgttcgggtctacactatttccgatacaattgccaggttccagaaaatgcgcggaatgcaggtcatcaatccgatgggttgggatgccttcggcctccccgcagaaaacgctgctgtggagcggaatcttcaccctcagagctggacacagtctaatatcaagcatatgcgaaagcagctggatagactgggcctgtgtttcagctgggatcgggaaatcactacatgcctgcccgactattacaaatggactcaatacctgtttataaagctgtacgaagccggactggcctatcagaaggaggccttagtcaactgggatccagtggaccagacggtgctagcaaacgagcaagttgacgaacacggctgtagctggagaagtggagcaaaggtagaacagaaatatttaaggcaatggttcattaaaacaacggcttatgccaaggccatgcaagacgcactggccgacttgcctgaatggtatgggattaagggcatgcaggcgcattggataggcgactgtgtgggatgtcatctcgattttacgctgaaggtacacggacaggccacaggcgagaagctgaccgcttacacagctaccccagaggccatttacggaacttcccatgtggccatcagcccatctcatcgcttgctgcatggtcatagctccctcaaagaggccctgagaatggctttggtccccggtaaggactgcctgacccccgtcatggccgtcaacatgttgactcagcaggaagtaccggtggtgatcctagcgaaggccgacctggagggaagcttggatagtaagatcgggatcccgtcaacctcttctgaggacacaatattggcccagactcttggcctggcctacagtgaggtcattgagactttgccagatggaaccgaacgcctgtctagctctgctgagtttacaggcatgactaggcaggatgcattcttggctttgactcagaaggccaggggaaagcgggtcggcggtgatgttacgagcgacaagcttaaggactggctgatttctcgacagaggtactggggcacacctatcccaatagttcactgtcccgtgtgcggtccgacccccgtccctctcgaagacttaccagtgactttgcccaacatagcaagctttacaggcaagggtggaccccctctagcgatggcctctgagtgggtgaattgttcatgcccccgttgtaagggtgccgcaaaacgggagactgacactatggacacttttgtggactcagcttggtactacttcaggtacactgacccccataatccccattccccttttaataccgctgtcgctgattattggatgcctgtggatctatacattgggggaaaagagcacgcagtgatgcacctcttctacgccaggttcttcagccacttttgtcatgatcaaaagatggtgaagcaccgtgaacccttccacaagctcctggcccagggactcatcaaggggcagactttccggcttccctccggccaatatctccagagagaagaagtcgatctgaccgggtccgtgccagtccatgctaagactaaagaaaaactcgaggtgacttgggaaaaaatgagcaagtccaagcacaatggcgtcgatccggaggaagttgtggagcagtatgggatcgataccatccgcctctatattttgttcgccgctcctcccgagaaagatatcctctgggatgtgaagacggatgcactgcccggagtgcttaggtggcaacaacggctgtggacacttacaactcgtttcattgaagccagagcatcgggtaagagcccacaacctcaacttctgagtaataaagaaaaggccgaagccagaaagctctgggagtataaaaactccgtgatttctcaggtcactactcacttcacagaggattttagtcttaactcagcgatttctcagctgatgggcctgtcgaacgctttatcccaggcaagccagtctgttattctgcactctccagaattcgaggatgccctgtgcgcactcatggtgatggctgcgcctctggcgcctcacgtgactagcgaaatatgggcaggactagccctcgtgccaaggaagttgtgcgcacactatacgtgggacgccagcgtgctcctccaggcatggcccgctgtcgatccagagtttctgcagcagcctgaggtggttcaaatggcagtgctaatcaataacaaagcctgtggcaaaatccctgtgccgcaacaagtcgcgagagaccaagataaggtgcatgagttcgtgcttcaatctgagctgggcgtaagactgctgcaggggcgatccatcaagaaatcctttttgagtcccagaactgccctgataaatttcttagttcaagattag

SEQ ID NO: 186020 - DNA, 2712 bp, Artificial Sequence
  derived and/or modified sequence
atggccagcgtgtggcagagactgggcttctacgccagcctgctgaagagacagctgaacggcggccccgacgtgatcaagtgggagagaagagtgatccccggctgcaccagaagcatctacagcgccaccggcaagtggaccaaggagtacaccctgcagaccagaaaggacgtggagaagtggtggcaccagagaatcaaggagcaggccagcaagatcagcgaggccgacaagagcaagcccaagttctacgtgctgagcatgttcccctaccccagcggcaagctgcacatgggccacgtgagagtgtacaccatcagcgacaccatcgccagattccagaagatgagaggcatgcaggtgatcaaccccatgggctgggacgccttcggcctgcccgccgagaacgccgccgtggagagaaacctgcacccccagagctggacccagagcaacatcaagcacatgagaaagcagctggacagactgggcctgtgcttcagctgggacagagagatcaccacctgcctgcccgactactacaagtggacccagtacctgttcatcaagctgtacgaggccggcctggcctaccagaaggaggccctggtgaactgggaccccgtggaccagaccgtgctggccaacgagcaggtggacgagcacggctgcagctggagaagcggcgccaaggtggagcagaagtacctgagacagtggttcatcaagaccaccgcctacgccaaggccatgcaggacgccctggccgacctgcccgagtggtacggcatcaagggcatgcaggcccactggatcggcgactgcgtgggctgccacctggacttcaccctgaaggtgcacggccaggccaccggcgagaagctgaccgcctacaccgccacccccgaggccatctacggcaccagccacgtggccatcagccccagccacagactgctgcacggccacagcagcctgaaggaggccctgagaatggccctggtgcccggcaaggactgcctgacccccgtgatggccgtgaacatgctgacccagcaggaggtgcccgtggtgatcctggccaaggccgacctggagggcagcctggacagcaagatcggcatccccagcaccagcagcgaggacaccatcctggcccagaccctgggcctggcctacagcgaggtgatcgagaccctgcccgacggcaccgagagactgagcagcagcgccgagttcaccggcatgaccagacaggacgccttcctggccctgacccagaaggccagaggcaagagagtgggcggcgacgtgaccagcgacaagctgaaggactggctgatcagcagacagagatactggggcacccccatccccatcgtgcactgccccgtgtgcggccccacccccgtgcccctggaggacctgcccgtgaccctgcccaacatcgccagcttcaccggcaagggcggcccccccctggccatggccagcgagtgggtgaactgcagctgccccagatgcaagggcgccgccaagagagagaccgacaccatggacaccttcgtggacagcgcctggtactacttcagatacaccgacccccacaacccccacagccccttcaacaccgccgtggccgactactggatgcccgtggacctgtacatcggcggcaaggagcacgccgtgatgcacctgttctacgccagattcttcagccacttctgccacgaccagaagatggtgaagcacagagagcccttccacaagctgctggcccagggcctgatcaagggccagaccttcagactgcccagcggccagtacctgcagagagaggaggtggacctgaccggcagcgtgcccgtgcacgccaagaccaaggagaagctggaggtgacctgggagaagatgagcaagagcaagcacaacggcgtggaccccgaggaggtggtggagcagtacggcatcgacaccatcagactgtacatcctgttcgccgccccccccgagaaggacatcctgtgggacgtgaagaccgacgccctgcccggcgtgctgagatggcagcagagactgtggaccctgaccaccagattcatcgaggccagagccagcggcaagagcccccagccccagctgctgagcaacaaggagaaggccgaggccagaaagctgtgggagtacaagaacagcgtgatcagccaggtgaccacccacttcaccgaggacttcagcctgaacagcgccatcagccagctgatgggcctgagcaacgccctgagccaggccagccagagcgtgatcctgcacagccccgagttcgaggacgccctgtgcgccctgatggtgatggccgcccccctggccccccacgtgaccagcgagatctgggccggcctggccctggtgcccagaaagctgtgcgcccactacacctgggacgccagcgtgctgctgcaggcctggcccgccgtggaccccgagttcctgcagcagcccgaggtggtgcagatggccgtgctgatcaacaacaaggcctgcggcaagatccccgtgccccagcaggtggccagagaccaggacaaggtgcacgagttcgtgctgcagagcgagctgggcgtgagactgctgcagggcagaagcatcaagaagagcttcctgagccccagaaccgccctgatcaacttcctggtgcaggactag

SEQ ID NO: 186021 - DNA, 2583 bp, Artificial Sequence
  derived and/or modified sequence
atggccagcgtgtggcagagactgggcttctacgccagcctgctgaagagacagctgaacggcggccccgacgtgatcaagtgggagagaagagtgatccccggctgcaccagaagcatctacagcgccaccggcaagtggaccaaggagtacaccctgcagaccagaaaggacgtggagaagtggtggcaccagagaatcaaggagcaggccagcaagatcagcgaggccgacgtgatcaaccccatgggctgggacgccttcggcctgcccgccgagaacgccgccgtggagagaaacctgcacccccagagctggacccagagcaacatcaagcacatgagaaagcagctggacagactgggcctgtgcttcagctgggacagagagatcaccacctgcctgcccgactactacaagtggacccagtacctgttcatcaagctgtacgaggccggcctggcctaccagaaggaggccctggtgaactgggaccccgtggaccagaccgtgctggccaacgagcaggtggacgagcacggctgcagctggagaagcggcgccaaggtggagcagaagtacctgagacagtggttcatcaagaccaccgcctacgccaaggccatgcaggacgccctggccgacctgcccgagtggtacggcatcaagggcatgcaggcccactggatcggcgactgcgtgggctgccacctggacttcaccctgaaggtgcacggccaggccaccggcgagaagctgaccgcctacaccgccacccccgaggccatctacggcaccagccacgtggccatcagccccagccacagactgctgcacggccacagcagcctgaaggaggccctgagaatggccctggtgcccggcaaggactgcctgacccccgtgatggccgtgaacatgctgacccagcaggaggtgcccgtggtgatcctggccaaggccgacctggagggcagcctggacagcaagatcggcatccccagcaccagcagcgaggacaccatcctggcccagaccctgggcctggcctacagcgaggtgatcgagaccctgcccgacggcaccgagagactgagcagcagcgccgagttcaccggcatgaccagacaggacgccttcctggccctgacccagaaggccagaggcaagagagtgggcggcgacgtgaccagcgacaagctgaaggactggctgatcagcagacagagatactggggcacccccatccccatcgtgcactgccccgtgtgcggccccacccccgtgcccctggaggacctgcccgtgaccctgcccaacatcgccagcttcaccggcaagggcggcccccccctggccatggccagcgagtgggtgaactgcagctgccccagatgcaagggcgccgccaagagagagaccgacaccatggacaccttcgtggacagcgcctggtactacttcagatacaccgacccccacaacccccacagccccttcaacaccgccgtggccgactactggatgcccgtggacctgtacatcggcggcaaggagcacgccgtgatgcacctgttctacgccagattcttcagccacttctgccacgaccagaagatggtgaagcacagagagcccttccacaagctgctggcccagggcctgatcaagggccagaccttcagactgcccagcggccagtacctgcagagagaggaggtggacctgaccggcagcgtgcccgtgcacgccaagaccaaggagaagctggaggtgacctgggagaagatgagcaagagcaagcacaacggcgtggaccccgaggaggtggtggagcagtacggcatcgacaccatcagactgtacatcctgttcgccgccccccccgagaaggacatcctgtgggacgtgaagaccgacgccctgcccggcgtgctgagatggcagcagagactgtggaccctgaccaccagattcatcgaggccagagccagcggcaagagcccccagccccagctgctgagcaacaaggagaaggccgaggccagaaagctgtgggagtacaagaacagcgtgatcagccaggtgaccacccacttcaccgaggacttcagcctgaacagcgccatcagccagctgatgggcctgagcaacgccctgagccaggccagccagagcgtgatcctgcacagccccgagttcgaggacgccctgtgcgccctgatggtgatggccgcccccctggccccccacgtgaccagcgagatctgggccggcctggccctggtgcccagaaagctgtgcgcccactacacctgggacgccagcgtgctgctgcaggcctggcccgccgtggaccccgagttcctgcagcagcccgaggtggtgcagatggccgtgctgatcaacaacaaggcctgcggcaagatccccgtgccccagcaggtggccagagaccaggacaaggtgcacgagttcgtgctgcagagcgagctgggcgtgagactgctgcagggcagaagcatcaagaagagcttcctgagccccagaaccgccctgatcaacttcctggtgcaggactag

SEQ ID NO: 186022 - protein, 131 aa, Artificial Sequence
  derived and/or modified sequence
MAGIKALISLSFGGAIGLMFLMLGCALPIYNKYWPLFVLFFYILSPIPYCIARRLVDDTDAMSNACKELAIFLTTGIVVSAFGLPIVFARAHLIEWGACALVLTGNTVIFATILGFFLVFGSNDDFSWQQW

SEQ ID NO: 186023 - DNA, 396 bp, Artificial Sequence
  derived and/or modified sequence
atggccggaatcaaggcactcataagcctgtcgttcggcggcgccatcggcctgatgtttttgatgctgggctgcgcactgcctatatacaacaagtattggccactctttgtgctcttcttttatatcctttcccccataccatattgcatagcccggagacttgtcgacgatacagacgccatgtccaacgcctgcaaggaacttgcaatttttctaactacgggcatcgtggtcagcgccttcggcttgccgatagtgtttgcacgagcacaccttatcgagtggggcgcatgtgctctggttctcactggaaatacggtcatctttgcaactattctcggttttttcctggtctttggaagtaatgacgattttagttggcaacagtggtag

SEQ ID NO: 186024 - DNA, 396 bp, Artificial Sequence
  derived and/or modified sequence
atggccggcatcaaggccctgatcagcctgagctttggaggagccatcggcctgatgttcctgatgctgggctgtgccctgcccatctacaacaagtactggcccctgtttgtgctcttcttctacatcctgagccccatcccctactgcatcgcccggcggctggtggatgacacagatgccatgagcaatgcctgcaaggagctggccatcttcctgaccactggaattgtggtgtctgccttcggcctgcccatcgtgtttgcccgggcccacctgattgagtggggcgcctgtgccctggtgctgaccggcaacacagtcatctttgccaccatcctgggcttcttcctggtgtttggcagcaatgatgacttctcctggcagcagtggtag

SEQ ID NO: 186025 - DNA, 3173 bp, Artificial Sequence
  derived and/or modified sequence
gctgcgtcgcgcacttccgggtgttgtctggccgccgtagcgcgtcttgggtctcccggctgccgctgctgccgccgccgcctcgggtcgtggagccaggagcgacgtcaccgccatggcaggcatcaaagctttgattagtttgtcctttggaggagcaatcggactgatgtttttgatgcttggatgtgcccttccaatatacaacaaatactggcccctctttgttctatttttttacatcctttcacctattccatactgcatagcaagaagattagtggatgatacagatgctatgagtaacgcttgtaaggaacttgccatctttcttacaacgggcattgtcgtgtcagcttttggactccctattgtatttgccagagcacatctgattgagtggggagcttgtgcacttgttctcacaggaaacacagtcatctttgcaactatactaggctttttcttggtctttggaagcaatgacgacttcagctggcagcagtggtgaaaagaaattactgaactattgtcaaatggacttcctgtcatttgttggccattcacgcacacaggagatggggcagttaatgctgaatggtatagcaagcctcttgggggtattttaggtgctcccttctcacttttattgtaagcatactattttcacagagacttgctgaaggattaaaaggattttctcttttggaaaagcttgactgatttcacacttatctatagtatgctttttgtggtgtcctgctgaatttaaatatttatgtgtttttcctgttaggttgattttttttggaatcaatatgcaatgttaaacacttttttaatgtaatcatttgcattggttaggaattcagaattccgccggctctattactggtcaagtacatcttttctcttaaaattatttagcctccattattacaaaaaattataaaaataagttttcagtcagtcaggatgacatcactcccaatgttatgcagacatacagacggttggcatacgttatagactgtatactcagtgcaaatatagctgcatttatacctcagaggggccaagtgttaatgcccatgccctccgttaagggttgttggttttactggtagacagatgttttgtggattgaaaattattttatggaattgctacagaggagtgcttttcttctcaattgttagaagaatttatgttaaactttaaggtaagggtgtaaaaacatttttgagataaggtttttatttatgtttattattgttagagtgagttgcaatgtgggaagaaatgacattgaaattccagtttttgaatcctgtttctatttataagtgaaatttgtgatctcctatcaacctttcatgttttaccctgttaaaatggacatacatggaaccactactgatgagggacagttgtatgtttgcatcatatatgccagaaaaccttcctctgcttcctccttttgacttatttggtatgttgtatatattacataaaataacttttcaaatatagtttaataacacttagaagtgtttacttacctggaaaataattgctatgccgtacattcagagtgccccctcccctgcaaggccttgccatgattaacaagtaacttgttagtcttacagataattcatgcattaacagtttaagatttagaccatggtaatagtagttcttattctctaaggttatatcatatgtaatttaaaagtatttttaagacaagtttcctgtatacctctgaactgttttgattttgagttcatcatgatagatctgctgtttccttataaaaggcatttgttgtgtgagttaatgcaaagtagccaagtccagctatatagcagcttcagaaacatacctgaccaaaaaattcccagtaaccaggcatgatcaatttatagtggtcgtttacatctaataattatcaggacttttttcaggagtgggttataaaaacattcaagttggtctgacagtattttgttaaggatatttgtttgtatgtttattcagtatacttacataaaaattatttcgccatcagccaaaactcagtaatcatgacagctgtctgttgttttatgaagtttatttctcaagaaaatgggaataaatttgggatttgttcagcttttttactaaagatgcctaaagccacaggttttattgcctaacttaagccatgacttttagatatgagatgacgggaagcaggacgaaatatcggcgtgtggctggagccttcccactggaggctgaaagtggcttgtggtattataatgttcagatttcaagaggaaggtgcaggtacacatgagttagagagctggtgagacagttgggaactctttgtgcttgtgatctactggacttttttttgcaggaagtgcattctctggtccttccctattttctgttctggatgtcagtgcagtgcactgctactgttttatccacttggccacagactttttctaacagctgcgtattatttctatatactaactgcattggcagcattgtgtctttgaccttgtatactagcttgacatagtgctgtctctgatttctaggctagttacttgagatatgaattttccatagaatatgcactgatacaatattaccattcttctatggaaagaaaacttttgatgatgaaacaataaagattttaaatatctattttagtttgtgggtgtttttgaaatgaaaatatatggcacactttcattctgaagtgcattaacattctaataaggtgatgtaaagcaagatgacattggtgtaatgttagagttgcagaagtttccattccaaaataaaatggaaaccatagttacagatattacaatgcagccctgtaattttgagctgtagtaaaaggattggtaatctgggaagtagaatttttacaaaatcttttacaaaaatagtcataaaaggttttgttgacatttaagactactactgatctaaaggcaaggtcctacttcttaaattttcagaacatttttatgacttcttattatgtatttattaccactcattattatagcatgttactttttgcaaacattttaaacaaaaaatatttctgtttggtacactgtgaagagagaaaagtactgttctgtattttc

SEQ ID NO: 186026 - DNA, 396 bp, Artificial Sequence
  derived and/or modified sequence
atggccggcatcaaggccctgatcagcctgagcttcggcggcgccattggtctgatgtttctgatgctagggtgcgctctgccaatatataacaaatactggcccctgttcgttctctttttctacattctgtcccccattccatactgcatcgcaagaaggctggtggacgataccgatgccatgagcaatgcctgtaaagaactagccatcttcctaaccaccggtatcgtcgtaagcgcattcggcctccccatcgtttttgcccgagcacatttgatagagtggggggcctgtgctttggttctgaccggcaataccgttatttttgccaccattctaggcttctttttggtgtttgggtctaatgacgactttagctggcaacaatggtag

SEQ ID NO: 186027 - DNA, 396 bp, Artificial Sequence
  derived and/or modified sequence
atggcagggatcaaggcactgattagtctgtccttcgggggtgctattgggctgatgttcctcatgctggggtgtgcccttcctatctacaacaagtattggccactgttcgtgctgttcttttatatcctttccccaatcccttattgtatcgccaggagactggtggacgataccgatgcaatgtccaacgcgtgcaaggagctcgcaatttttctcaccactggcattgtcgtgtccgctttcggcctgcctatagtgtttgctagggcgcaccttatcgaatggggggcatgcgctctggtactgaccggaaataccgtaattttcgcaaccatcctgggctttttcctggtcttcgggagtaacgacgacttctcatggcaacagtggtag

SEQ ID NO: 186028 - DNA, 396 bp, Artificial Sequence
  derived and/or modified sequence
atggccggcatcaaggccctgatcagcctgagcttcggcggcgccatcggcctgatgttcctgatgctgggctgcgccctgcccatctacaacaagtactggcccctgttcgtgctgttcttctacatcctgagccccatcccctactgcatcgccagaagactggtggacgacaccgacgccatgagcaacgcctgcaaggagctggccatcttcctgaccaccggcatcgtggtgagcgccttcggcctgcccatcgtgttcgccagagcccacctgatcgagtggggcgcctgcgccctggtgctgaccggcaacaccgtgatcttcgccaccatcctgggcttcttcctggtgttcggcagcaacgacgacttcagctggcagcagtggtag

SEQ ID NO: 186029 - protein, 1067 aa, Artificial Sequence
  derived and/or modified sequence
MAPRKRSHHGLGFLCCFGGSDIPEINLRDNHPLQFMEFSSPIPNAEELNIRFAELVDELDLTDKNREAMFALPPEKKWQIYCSKKKEQEDPNKLATSWPDYYIDRINSMAAMQSLYAFDEEETEMRNQVVEDLKTALRTQPMRFVTRFIELEGLTCLLNFLRSMDHATCESRIHTSLIGCIKALMNNSQGRAHVLAQPEAISTIAQSLRTENSKTKVAVLEILGAVCLVPGGHKKVLQAMLHYQVYAAERTRFQTLLNELDRSLGRYRDEVNLKTAIMSFINAVLNAGAGEDNLEFRLHLRYEFLMLGIQPVIDKLRQHENAILDKHLDFFEMVRNEDDLELARRFDMVHIDTKSASQMFELIHKKLKYTEAYPCLLSVLHHCLQMPYKRNGGYFQQWQLLDRILQQIVLQDERGVDPDLAPLENFNVKNIVNMLINENEVKQWRDQAEKFRKEHMELVSRLERKERECETKTLEKEEMMRTLNKMKDKLARESQELRQARGQVAELVAQLSELSTGPVSSPPPPGGPLTLSSSMTTNDLPPPPPPLPFACCPPPPPPPLPPGGPPTPPGAPPCLGMGLPLPQDPYPSSDVPLRKKRVPQPSHPLKSFNWVKLNEERVPGTVWNEIDDMQVFRILDLEDFEKMFSAYQRHQKELGSTEDIYLASRKVKELSVIDGRRAQNCIILLSKLKLSNEEIRQAILKMDEQEDLAKDMLEQLLKFIPEKSDIDLLEEHKHEIERMARADRFLYEMSRIDHYQQRLQALFFKKKFQERLAEAKPKVEAILLASRELVRSKRLRQMLEVILAIGNFMNKGQRGGAYGFRVASLNKIADTKSSIDRNISLLHYLIMILEKHFPDILNMPSELQHLPEAAKVNLAELEKEVGNLRRGLRAVEVLEYQRRQVREPSDKFVPVMSDFITVSSFSFSELEDQLNEARDKFAKALMHFGEHDSKMQPDEFFGIFDTFLQAFSEARQDLEAMRRRKEEEERRARMEAMLKEQRERERWQRQRKVLAAGSSLEEGGEFDDLVSALRSGEVFDKDLCKLKRSRKRSGSQALEVTRERAINRLNY

SEQ ID NO: 186030 - DNA, 399 bp, Artificial Sequence
  derived and/or modified sequence
atggctcctagaaagcgttctcaccacgggctcggcttcctgtgctgcttcggtggtagcgatatccccgagatcaatctccgggataatcatccccttcagtttatggagtttagcagccccatccccaacgcagaggagctgaacatacgatttgcagagctggtggacgagttagacctgacggacaaaaatcgagaggcaatgtttgctctccctcccgagaagaagtggcaaatctactgttcaaagaagaaggtgcctagcctgactccactggcgacaagccagggctcatggcacggcgtggcccttgcggcgcttgcctgttcatgtattcatctaatgtttatcacctgccaaccgtgctccaggtgctggaggaataattcagaatag

SEQ ID NO: 186031 - DNA, 3204 bp, Artificial Sequence
  derived and/or modified sequence
atggcccctcgcaagcggagccatcacggactgggctttctctgctgctttggcggaagcgatatccctgagatcaatctacgtgataaccatcctcttcagttcatggaattctcttcacctattccgaacgcagaagaactgaatatcagatttgcagagctggtcgacgaattggatcttactgataagaatagagaagccatgttcgctcttcctcctgagaagaagtggcagatatactgtagtaaaaagaaggagcaggaagaccccaataagcttgccacctcttggcctgattattatattgatcgtataaatagcatggccgccatgcagtccttgtacgccttcgatgaggaggagacagagatgcgcaaccaagttgtggaagatctgaagacagcattgaggacccagcccatgagatttgttaccagatttatcgagctcgaaggtctgacatgtctgctcaattttttgcggtcaatggaccacgccacctgtgaatcacgcatccacacctcccttatcggatgcataaaggcgctaatgaacaactcccaggggcgtgctcatgttttggcccaaccagaggccatatcaaccattgctcagtcgttgagaactgagaatagtaagactaaagtagctgtgcttgaaatcctgggcgccgtctgcctcgtccccgggggtcacaagaaggtgttacaggcaatgttgcattatcaggtctatgcggctgaacggactaggttccagacccttcttaacgaactagaccgctccctcgggcgatatcgggacgaggtgaacttgaagacagccatcatgagtttcatcaacgccgtgctaaatgcaggcgctggggaagataacttggagttcagactgcacctgcgttacgagttcttgatgctgggcatccagccagtaatcgataagctgcgacagcatgaaaatgccatcttggacaagcaccttgatttttttgagatggtgaggaacgaggatgaccttgagctggcccgtaggttcgatatggtgcatatcgatactaaaagtgcttcacaaatgttcgagctgattcataagaagctgaagtacactgaagcctacccttgtctgctttcagtgctccaccactgcctgcagatgccgtataagcgtaacgggggctacttccagcagtggcagttgcttgacaggatcttgcaacaaatagttcttcaggacgagaggggagttgacccggatttagcacccctggagaacttcaacgtgaagaacatagtgaatatgctgattaacgagaacgaagtcaaacagtggagggatcaagcagagaagttccggaaagagcatatggagttagtgtcaaggcttgagcggaaagaaagagaatgcgagacaaaaaccttagagaaggaagagatgatgcgcaccttgaataagatgaaagataagctggcccgtgagtcccaggagcttcgccaggcacggggccaagtggccgagttagtggcccagctatccgagttgtctaccggccctgtgtcatctccgcctcctccgggaggcccactgacactgagctcctcgatgaccactaacgatctgccaccgccacctccgccccttccttttgcctgctgccctccaccaccccctcctcctctgccccctggcgggcctcctacgccccccggagcacccccttgtctcggcatgggcctccccctgccccaagacccttacccttcttccgacgtgcctctgcgcaagaaacgcgtgcctcagcctagccacccactcaagtctttcaactgggtgaaactgaatgaagaaagggttccaggaaccgtttggaatgagatcgatgatatgcaggtttttcggatactggacttggaagattttgaaaagatgttttctgcttaccagaggcatcaaaaagagcttggatccaccgaggacatctacctagcgagtcggaaagttaaggaattgagcgtgatagacggaagaagagcccagaattgtattatcctcttgagtaagctgaagctcagtaacgaagagatcagacaggctattctgaagatggacgagcaggaagacctggcaaaggacatgttggagcagctgctcaaatttattccagagaagtccgatatagacctcttggaggagcataagcacgagattgaacgaatggcacgggccgaccgcttcctgtatgaaatgagtcggattgaccactaccaacaacggctacaggctctgttctttaaaaagaagtttcaggagaggctagcggaggccaaaccaaaggttgaagccattctgctggcttctcgggagctggtgaggtccaaacggctgagacagatgctggaggtaattttggccattggcaactttatgaacaagggccagcgcggaggagcgtatggcttccgcgtggcatccctcaacaagatagcagatacgaagtcatcaatcgataggaatatcagcctgctgcactacctgatcatgatccttgaaaaacatttcccagatattctgaacatgccttccgagctacagcacctgcctgaagctgcgaaagtaaacttggccgaactcgagaaggaagttggcaatctgcgtaggggactcagagctgtcgaggtgctggaataccaacgcaggcaggtcagggagccttccgataaatttgtaccagtcatgtccgattttattactgtgtcttctttctcgttctcagagttagaagaccaactgaacgaagcacgcgataaattcgccaaggctcttatgcatttcggcgagcatgacagtaagatgcagcccgacgaatttttcggtattttcgacacatttctgcaagccttttctgaggcaaggcaggatctagaagcgatgagacgacgaaaagaggaagaagagcgtcgtgctcgtatggaagctatgctgaaagagcagcgggaaagggaaaggtggcaacgacagcgaaaagtcctggctgccggcagttccctggaggaaggaggcgagttcgatgacctggtgagcgcgctaaggagcggcgaagtgtttgacaaagacctgtgcaagctcaagcgtagccgaaagcgctcgggaagccaggccctggaagtcacacgcgaacgcgccattaacaggcttaactactag

SEQ ID NO: 186032 - DNA, 399 bp, Artificial Sequence
  derived and/or modified sequence
atggcccccaggaagaggagccaccacggcctgggcttcctgtgctgctttggaggcagtgacatccctgagatcaacctgcgggacaaccaccccctgcagttcatggagttcagcagccccatccccaatgctgaggagctgaacatccgctttgctgagctggtggatgagctggacctgacagacaagaaccgggaggccatgtttgccctgcccccagagaagaagtggcagatctactgcagcaagaagaaggtgcccagcctgacccccctggccaccagccagggctcctggcatggagtggccctggccgccctggcctgcagctgcatccacctgatgttcatcacctgccagccctgcagccgctgctggaggaacaacagcgagtag

SEQ ID NO: 186033 - DNA, 3204 bp, Artificial Sequence
  derived and/or modified sequence
atggcccccaggaagaggagccaccacggcctgggcttcctgtgctgctttggaggcagtgacatccctgagatcaacctgcgggacaaccaccccctgcagttcatggagttcagcagccccatccccaatgctgaggagctgaacatccgctttgctgagctggtggatgagctggacctgacagacaagaaccgggaggccatgtttgccctgcccccagagaagaagtggcagatctactgcagcaagaagaaggagcaggaggaccccaacaagctggccacctcctggccagactactacatcgaccgcatcaacagcatggccgccatgcagagcctgtatgcctttgatgaggaggagacagagatgaggaaccaggtggtggaggacctgaagacagccctgcggacccagcccatgagatttgtgacccgcttcatcgagctggagggcctgacctgcctgctgaacttcctgcgctccatggaccacgccacctgtgagagccgcatccacaccagcctcatcggctgcatcaaggccctgatgaacaacagccagggccgggcccacgtgctggcccagcctgaggccatcagcaccatcgcccagagcctgaggacagagaacagcaagaccaaggtggccgtgctggagatcctgggcgctgtgtgcctggtgcctgggggccacaagaaggtgctgcaggccatgctgcactaccaggtgtatgctgctgagaggacccgcttccagaccctgctgaatgagctggacaggagcctgggccgctacagagatgaggtgaacctgaagacagccatcatgtccttcatcaatgctgtgctgaatgctggagctggggaggacaacctggagttccggctgcacctgcgctatgagttcctgatgctgggcatccagcctgtgattgacaagctgcggcagcatgaaaatgccatcctggacaagcacctggacttctttgagatggtgagaaatgaagatgacctggagctggccaggagatttgacatggtgcacatcgacaccaagagcgccagccagatgtttgagctgatccacaagaagctgaagtacacagaggcctacccctgcctgctgtctgtgctgcaccactgcctgcagatgccctacaagagaaatggaggctacttccagcagtggcagctgctggaccgcatcctgcagcagatcgtgctgcaggatgagcggggcgtggaccctgacctggcccccctggagaacttcaacgtgaagaacatcgtgaacatgctgatcaatgaaaatgaggtgaagcagtggagggaccaggccgagaagttcaggaaggagcacatggagctggtgtcccggctggagaggaaggagcgggagtgtgagaccaagaccctggagaaggaggagatgatgaggaccctgaacaagatgaaggacaagctggcccgggagagccaggagctgcggcaggcccggggccaggtggccgagctggtggcccagctgtctgagctgagcacaggccctgtgagcagccccccacctcctgggggccccctgaccctgagcagctccatgaccaccaatgacctgcccccacctcctccacccctgccctttgcctgctgccccccacctcctcctccacccctgcccccaggcggcccccccaccccacctggggccccaccctgcctgggcatgggcctgcccctgccccaggacccctaccccagcagtgatgtgcccctgaggaagaagagggtgccccagcccagccaccccctgaagagcttcaactgggtgaagctgaatgaggagcgggtgcccggcaccgtgtggaatgaaattgatgacatgcaggtgttccgcatcctggacctggaggactttgagaagatgttttctgcctaccagaggcaccagaaggagctgggcagcacagaggacatctacctggccagcaggaaggtgaaggagctgtctgtgattgatggccggcgggcccagaactgcatcatcctgctgagcaagctgaagctgagcaatgaggagatccggcaggccatcctgaagatggatgagcaggaggacctggccaaggacatgctggagcagctgctgaagttcatccctgagaagagtgacatcgacctgctggaggagcacaagcatgaaattgaaagaatggcccgggctgaccgcttcctgtatgagatgagcagaattgaccactaccagcagaggctgcaggccctcttcttcaagaagaagttccaggagcggctggccgaggccaagcccaaggtggaggccatcctgctggccagccgggagctggtgcgcagcaagaggctgcggcagatgctggaggtgatcctggccatcggcaacttcatgaacaagggccagagaggaggagcctacggcttccgggtggccagcctgaacaagattgctgacaccaagagcagcattgacaggaacatcagcctgctgcactacctgatcatgatcctggagaagcacttcccagacatcctgaacatgcccagcgagctgcagcacctgcctgaggccgccaaggtgaacctggccgagctggagaaggaggtgggcaacctgcggcggggcctgcgggctgtggaggtgctggagtaccagaggcggcaggtgcgggagcccagcgacaagtttgtgcctgtgatgtctgacttcatcaccgtgagcagcttctccttcagcgagctggaggaccagctgaatgaggcccgggacaagtttgccaaggccctgatgcactttggagaacatgacagcaagatgcagccagatgagttcttcggcatctttgacaccttcctgcaggccttcagcgaggcccggcaggacctggaggccatgagaagaaggaaggaggaggaggagcggcgggccaggatggaggccatgctgaaggagcagcgggagcgggagcgctggcagaggcagaggaaggtgctggccgccggcagcagcctggaggagggcggggagtttgatgacctggtgtctgccctgcggtctggagaggtgtttgacaaggacctgtgcaagctgaagaggagcaggaagaggagcggcagccaggccctggaggtgacccgggagcgggccatcaaccggctgaactactag

SEQ ID NO: 186034 - DNA, 399 bp, Artificial Sequence
  derived and/or modified sequence
atggccccccggaagcggagccaccacggcctgggcttcctgtgctgctttggaggttcagacattcccgagatcaatctgagagataaccatccactgcagtttatggagttcagttccccaatccccaacgcagaggaactcaacattcgattcgccgagttagtggatgaattggatctcaccgataagaatagagaagctatgttcgcgctccctccagaaaagaaatggcagatttactgctccaaaaaaaaagtgccctcactgacccccttggctactagccagggatcatggcacggggtggccctggccgctctggcatgctcgtgtatacacttgatgttcatcacatgtcaaccatgtagcagatgttggcgtaataactccgaatag

SEQ ID NO: 186035 - DNA, 3204 bp, Artificial Sequence
  derived and/or modified sequence
atggccccccggaagcggagccaccacggcctgggcttcctgtgctgtttcggggggtcagacatacccgagatcaacctccgggacaatcacccactacagtttatggaattctcctcgcccatacccaatgctgaggagttgaacattagattcgcagagctggtcgatgagctcgatctgactgacaaaaacagggaggcgatgttcgcactgccacctgaaaagaaatggcagatctattgcagtaagaagaaggaacaggaggaccctaacaaacttgccaccagttggccagattattatatcgaccgtatcaactccatggcagcaatgcagtcactgtatgcctttgacgaggaggagacggagatgagaaaccaggtggttgaagacttgaaaactgccctccggacacagcctatgaggttcgtcacacggtttattgaactggagggcctgacatgtcttttgaatttcctgcgatcaatggatcatgccacgtgtgagtctcggatccatacaagcttaatcggctgtatcaaagcgctaatgaacaacagccagggccgagcccacgtccttgcacagccagaggccattagtaccattgcccagtccctgcgtacagagaacagcaagacgaaggtggctgtcctggagatactcggcgctgtgtgcctcgtccctgggggtcataagaaagtactgcaggctatgctgcactatcaggtctacgccgcggaacgaacgcgttttcagactctgctgaacgaacttgatagatcattgggtagatatagggacgaggttaatctgaagacagcaatcatgtcttttataaacgccgtgctcaatgccggcgcaggcgaagataatttagagtttcggctgcatctgcgatacgagtttctgatgctcgggatccaacccgttattgacaagctccgacagcatgagaacgccatattggacaaacatctcgacttcttcgagatggtgcggaatgaagacgacctagaacttgcgcgaagatttgacatggtccacatagacactaagtccgcctcacagatgttcgagctgatccacaaaaagctcaaatataccgaagcatacccctgcttgttgagtgttctccaccactgtctccaaatgccatataaaagaaatggcggatattttcagcagtggcagctgctggacagaatcctccagcagatcgtgctgcaggatgagaggggtgtggaccctgatctggctccactagagaatttcaatgtcaagaacattgtcaatatgctcatcaacgagaatgaagtcaagcagtggagagatcaggctgagaaatttcggaaggagcatatggaactggttagtagattggaaaggaaggaacgggaatgcgaaactaaaaccctggaaaaggaggaaatgatgcgcactctgaataagatgaaagacaagctggcccgcgagagccaggagctgcgccaagctaggggccaagttgctgagctagtggcacagctgtcagagctcagcactggacccgtaagctccccacctcctccagggggccccctgacattgagctccagtatgaccaccaacgacctaccacccccaccgcctcccctgccttttgcatgttgtccacctcctccccccccgcccttgcccccgggaggtccacccaccccacccggcgcgccgccatgtctcggtatgggtttgccacttccacaagacccctatccctcatctgacgttccccttaggaaaaagcgcgtgccacagccgtctcacccactaaagtcctttaactgggtcaaattgaatgaagagagagtccctggcacggtctggaacgaaatcgatgatatgcaagtcttcaggatactagacctcgaggattttgagaagatgttctctgcttaccaaaggcatcagaaggagctagggtccaccgaagatatctatttggcttcccgcaaggttaaggagctttctgtgattgatggccggcgtgcgcaaaactgcattatcctgttgtccaagctcaagttaagtaacgaggaaatcaggcaggccatcctcaaaatggatgaacaggaggatttggccaaagacatgcttgaacagctcctcaagtttatcccagaaaagtccgacattgacctgctggaagaacacaaacatgaaattgagagaatggcgagagccgatcgctttctatacgaaatgtctcggatagaccactaccaacagcgtttacaggccttgttttttaaaaaaaaattccaggagaggctcgctgaggccaaacctaaggtggaagcaattctcctagcatctcgggaactagttcgctcaaagcggttaaggcagatgctggaagtgatcctggctattgggaatttcatgaataaggggcaacggggcggagcctatgggtttcgagtcgcgtcactgaataagatagctgacactaaaagcagcattgaccgcaatatatccctccttcattacctgattatgattctcgagaagcacttccccgatattctcaatatgcctagtgagctgcagcatctgccagaggccgccaaggtcaatttggcggagctggagaaggaggtggggaatctgaggagagggcttcgcgccgtggaggtgctggagtatcagcggcgtcaagttagagaacctagcgacaagttcgtgcccgtgatgagtgacttcattaccgtgtcctctttttcattctctgagttagaggaccagctgaacgaagcccgtgacaagtttgcgaaagccttgatgcacttcggggagcatgactctaagatgcagccggatgaattttttggtatctttgataccttcttgcaggccttttccgaggccaggcaggacctcgaagccatgagacgccgcaaagaggaagaggagagacgggccaggatggaggctatgctgaaagaacagcgagagcgcgagcgatggcagaggcagcgcaaagttctcgctgccggctcttctttggaagaaggcggtgaattcgatgatcttgtgtcggctttgagatcaggcgaagttttcgataaggacctgtgcaaactgaagcggtctcgaaagcggtccggatctcaggcactagaagtcacacgagagcgggcaataaaccggttgaactactag

SEQ ID NO: 186036 - DNA, 399 bp, Artificial Sequence
  derived and/or modified sequence
atggctccaaggaagcgatcccaccatggcctgggattcctctgttgttttggagggagcgacatacccgaaataaatttgcgggacaatcaccctctgcaatttatggagttcagctcccccatcccaaacgctgaggagctcaacatcaggtttgcggagctggtagatgaactggacctcacggacaagaaccgcgaggccatgttcgcgttgcctccagaaaagaagtggcagatttactgcagcaagaagaaggtcccgtcacttaccccattagccacaagtcaagggtcctggcatggggttgctctcgctgctctggcatgctcctgtatccacctgatgttcattacgtgtcagccttgtagcaggtgttggcgaaataactccgagtag

SEQ ID NO: 186037 - DNA, 3204 bp, Artificial Sequence
  derived and/or modified sequence
atggcccctagaaaacggagccaccacggactgggattcctgtgttgttttggcggatccgatatccctgaaatcaatttgcgggacaatcaccccctgcagttcatggaattttcaagccctattccaaacgccgaagagctcaacataaggttcgcagaactggtcgacgagctcgacctaactgacaagaatagggaagccatgtttgcattaccacctgaaaaaaagtggcaaatatattgctcaaagaagaaggaacaggaagacccaaataagttggcaacctcatggccagactattacatagacaggattaacagtatggccgcaatgcagtcactgtatgctttcgacgaagaagagaccgagatgcgcaatcaggtggtggaagaccttaaaactgccttacgcacacagccaatgagatttgtgacccggtttattgagctcgaggggttgacatgcctgctgaactttctgagaagtatggatcacgcgacctgcgagagtcgcatccacacatctctaatcggctgcatcaaagcactcatgaacaactctcagggcagggcccacgtgcttgcccaacctgaagcaatctctaccattgcacagagcctacggaccgaaaatagtaagactaaagtagcggtacttgagattctcggagccgtttgcttggtccctgggggacacaaaaaggtgttgcaggcgatgctccactatcaggtctacgcagccgagagaactagattccagacactgctgaacgaactggatcgcagcctgggacgttacagagacgaggtcaacctgaagacagccattatgtctttcattaatgctgttctgaacgccggtgcaggagaagacaacctcgagttcagattgcacttacgctacgagttcctgatgctgggaattcaacctgttatcgacaaactgcgtcagcacgagaatgccattcttgataagcacctggactttttcgagatggtccggaacgaggatgacctggaactggcccgacggttcgatatggtgcacatcgatacaaaatcagcctcccagatgttcgagctgattcataagaagctgaagtacaccgaggcatacccttgtctgttgagcgtgctgcatcactgcctccagatgccttataagagaaacggtgggtattttcagcagtggcagctactggacagaatccttcaacagattgtcctgcaggatgagcgaggcgtggacccagatctggccccactcgagaatttcaacgtcaagaacatcgtgaacatgcttatcaacgagaatgaggtgaagcaatggcgggaccaagctgaaaaattccgtaaggaacacatggaattagtgtcccgcctggagcgaaaggaaagagagtgtgaaacaaaaactcttgagaaggaggagatgatgaggacactgaataaaatgaaagacaagcttgcgagggagagccaggagttgaggcaagccagggggcaggtggcagagttagtggcccaattgagcgagctatccacagggcctgtgtcttcccctccaccacccggtggcccactgacactttcatcctcaatgacgacaaatgatctgcccccaccaccaccccctctgccctttgcctgttgtcctccacctcctccacctcctctgccacctggcggaccacccaccccacccggagctccaccatgtctgggcatggggctgcctctgccccaggacccgtaccctagctctgatgtacccctccggaaaaagcgcgtgccacaaccaagccatccccttaagtccttcaactgggttaagctgaacgaggagcgtgtgcccggtaccgtgtggaatgagatcgatgacatgcaggtgtttcgaatccttgacctagaagatttcgaaaaaatgttcagcgcctaccagaggcaccagaaagaactggggtcaacagaggacatctacctggcgagtaggaaagtcaaagaactctcagttattgacgggagacgggcacagaattgcatcatcctgctaagtaagctcaaattaagtaatgaggaaatcaggcaggccatcctcaagatggatgagcaggaggatctggccaaagatatgcttgagcagcttctcaagtttattcctgagaagtccgatatcgacctcctggaggagcataaacacgaaattgagcgaatggcccgtgccgaccgattcttgtacgaaatgagccggattgaccactatcagcaacgcctccaagctctatttttcaaaaagaagtttcaggaacgtcttgcggaagcaaaacccaaagttgaagctattttgttggcctctcgagaactggtacgttctaaacgtctgcgccagatgttggaggtgatactcgccatcggcaattttatgaataaaggccagcgaggtggagcttatggtttccgcgtagcctccctcaataagatcgctgataccaaatcgtctatcgatcgcaacatcagcctgctccattacctgattatgattctggagaagcacttccctgacattctcaatatgccttctgagctccagcacctccctgaggccgcaaaggtgaatctcgccgagctcgagaaagaggtggggaacctgcggcgagggctccgtgcagtagaggtcttggaataccagcgtagacaggttagagagccctcagacaaatttgtgcccgttatgtcagactttattacggtgtcaagcttctccttctcggagttggaagaccaactcaatgaggcacgggataagtttgcaaaagcactgatgcatttcggcgagcatgactctaaaatgcaaccagacgaattcttcggtatatttgacacctttctgcaggcattcagtgaggctcggcaggacctagaagccatgcgccgacgcaaggaggaagaagagcgtagagcacgcatggaggcaatgctaaaagagcagcgggagcgtgagagatggcagcgccaacgtaaggtactggccgcaggctctagtctagaggagggcggagagtttgacgatttagtgtcagctctgagaagtggtgaggtctttgataaagacctgtgcaagctgaaaaggtctcgcaaacggtccggcagtcaggccctcgaggttacaagggagcgggctataaacaggctgaactactag

SEQ ID NO: 186038 - DNA, 399 bp, Artificial Sequence
  derived and/or modified sequence
atggcccccagaaagagaagccaccacggcctgggcttcctgtgctgcttcggcggcagcgacatccccgagatcaacctgagagacaaccaccccctgcagttcatggagttcagcagccccatccccaacgccgaggagctgaacatcagattcgccgagctggtggacgagctggacctgaccgacaagaacagagaggccatgttcgccctgccccccgagaagaagtggcagatctactgcagcaagaagaaggtgcccagcctgacccccctggccaccagccagggcagctggcacggcgtggccctggccgccctggcctgcagctgcatccacctgatgttcatcacctgccagccctgcagcagatgctggagaaacaacagcgagtag

SEQ ID NO: 186039 - DNA, 3204 bp, Artificial Sequence
  derived and/or modified sequence
atggcccccagaaagagaagccaccacggcctgggcttcctgtgctgcttcggcggcagcgacatccccgagatcaacctgagagacaaccaccccctgcagttcatggagttcagcagccccatccccaacgccgaggagctgaacatcagattcgccgagctggtggacgagctggacctgaccgacaagaacagagaggccatgttcgccctgccccccgagaagaagtggcagatctactgcagcaagaagaaggagcaggaggaccccaacaagctggccaccagctggcccgactactacatcgacagaatcaacagcatggccgccatgcagagcctgtacgccttcgacgaggaggagaccgagatgagaaaccaggtggtggaggacctgaagaccgccctgagaacccagcccatgagattcgtgaccagattcatcgagctggagggcctgacctgcctgctgaacttcctgagaagcatggaccacgccacctgcgagagcagaatccacaccagcctgatcggctgcatcaaggccctgatgaacaacagccagggcagagcccacgtgctggcccagcccgaggccatcagcaccatcgcccagagcctgagaaccgagaacagcaagaccaaggtggccgtgctggagatcctgggcgccgtgtgcctggtgcccggcggccacaagaaggtgctgcaggccatgctgcactaccaggtgtacgccgccgagagaaccagattccagaccctgctgaacgagctggacagaagcctgggcagatacagagacgaggtgaacctgaagaccgccatcatgagcttcatcaacgccgtgctgaacgccggcgccggcgaggacaacctggagttcagactgcacctgagatacgagttcctgatgctgggcatccagcccgtgatcgacaagctgagacagcacgagaacgccatcctggacaagcacctggacttcttcgagatggtgagaaacgaggacgacctggagctggccagaagattcgacatggtgcacatcgacaccaagagcgccagccagatgttcgagctgatccacaagaagctgaagtacaccgaggcctacccctgcctgctgagcgtgctgcaccactgcctgcagatgccctacaagagaaacggcggctacttccagcagtggcagctgctggacagaatcctgcagcagatcgtgctgcaggacgagagaggcgtggaccccgacctggcccccctggagaacttcaacgtgaagaacatcgtgaacatgctgatcaacgagaacgaggtgaagcagtggagagaccaggccgagaagttcagaaaggagcacatggagctggtgagcagactggagagaaaggagagagagtgcgagaccaagaccctggagaaggaggagatgatgagaaccctgaacaagatgaaggacaagctggccagagagagccaggagctgagacaggccagaggccaggtggccgagctggtggcccagctgagcgagctgagcaccggccccgtgagcagcccccccccccccggcggccccctgaccctgagcagcagcatgaccaccaacgacctgccccccccccccccccccctgcccttcgcctgctgccccccccccccccccccccccctgccccccggcggcccccccaccccccccggcgcccccccctgcctgggcatgggcctgcccctgccccaggacccctaccccagcagcgacgtgcccctgagaaagaagagagtgccccagcccagccaccccctgaagagcttcaactgggtgaagctgaacgaggagagagtgcccggcaccgtgtggaacgagatcgacgacatgcaggtgttcagaatcctggacctggaggacttcgagaagatgttcagcgcctaccagagacaccagaaggagctgggcagcaccgaggacatctacctggccagcagaaaggtgaaggagctgagcgtgatcgacggcagaagagcccagaactgcatcatcctgctgagcaagctgaagctgagcaacgaggagatcagacaggccatcctgaagatggacgagcaggaggacctggccaaggacatgctggagcagctgctgaagttcatccccgagaagagcgacatcgacctgctggaggagcacaagcacgagatcgagagaatggccagagccgacagattcctgtacgagatgagcagaatcgaccactaccagcagagactgcaggccctgttcttcaagaagaagttccaggagagactggccgaggccaagcccaaggtggaggccatcctgctggccagcagagagctggtgagaagcaagagactgagacagatgctggaggtgatcctggccatcggcaacttcatgaacaagggccagagaggcggcgcctacggcttcagagtggccagcctgaacaagatcgccgacaccaagagcagcatcgacagaaacatcagcctgctgcactacctgatcatgatcctggagaagcacttccccgacatcctgaacatgcccagcgagctgcagcacctgcccgaggccgccaaggtgaacctggccgagctggagaaggaggtgggcaacctgagaagaggcctgagagccgtggaggtgctggagtaccagagaagacaggtgagagagcccagcgacaagttcgtgcccgtgatgagcgacttcatcaccgtgagcagcttcagcttcagcgagctggaggaccagctgaacgaggccagagacaagttcgccaaggccctgatgcacttcggcgagcacgacagcaagatgcagcccgacgagttcttcggcatcttcgacaccttcctgcaggccttcagcgaggccagacaggacctggaggccatgagaagaagaaaggaggaggaggagagaagagccagaatggaggccatgctgaaggagcagagagagagagagagatggcagagacagagaaaggtgctggccgccggcagcagcctggaggagggcggcgagttcgacgacctggtgagcgccctgagaagcggcgaggtgttcgacaaggacctgtgcaagctgaagagaagcagaaagagaagcggcagccaggccctggaggtgaccagagagagagccatcaacagactgaactactag

SEQ ID NO: 186040 - protein, 2539 aa, Artificial Sequence
  derived and/or modified sequence
MNHPFGKEEAASQKQLFGFFCECLRRGEWELAQACVPQLQEGQGDIPKRVEDILQALVVCPNLLRCGQDINPQRVAWVWLLVLEKWLAREKKLLPVVFRRKLEFLLLSEDLQGDIPENILEELYETLTQGAVGHVPDGNPRRESWTPRLSSEAVSVLWDLLRQSPQPAQALLELLLEEDDGTGLCHWPLQNALVDLIRKALRALQGPDSVPPGVVDAIYGALRTLRCPAEPLGVELHLLCEELLEACRTEGSPLREERLLSCLLHKASRGLLSLYGHTYAEKVTEKPPRATASGKVSPDHLDPERAMLALFSNPNPAEAWKVAYFYCLSNNKHFLEQILVTALTLLKEEDFPNLGCLLDREFRPLSCLLVLLGWTHCQSLESAKRLLQTLHRTQGPGCDELLRDACDGLWAHLEVLEWCIQQSSNPIPKRDLLYHLHGGDSHSVLYTLHHLTNLPALREEDVLKLLQKVPAKDPQQEPDAVDAPVPEHLSQCQNLTLYQGFCAMKYAIYALCVNSHQHSQCQDCKDSLSEDLASATEPANDSLSSPGAANLFSTYLARCQQYLCSIPDSLCLELLENIFSLLLITSADLHPEPHLPEDYAEDDDIEGKSPSGLRSPSESPQHIAHPERKSERGSLGVPKTLAYTMPSHVKAEPKDSYPGPHRHSFLDLKHFTSGISGFLADEFAIGAFLRLLQEQLDEISSRSPPEKPKQESQSCSGSRDGLQSRLHRLSKVVSEAQWRHKVVTSNHRSEEQPSRRYQPATRHPSLRRGRRTRRSQADGRDRGSNPSLESTSSELSTSTSEGSLSAMSGRNELHSRLHPHPQSSLIPMMFSPPESLLASCILRGNFAEAHQVLFTFNLKSSPSSGELMFMERYQEVIQELAQVEHKIENQNSDAGSSTIRRTGSGRSTLQAIGSAAAAGMVFYSISDVTDKLLNTSGDPIPMLQEDFWISTALVEPTAPLREVLEDLSPPAMAAFDLACSQCQLWKTCKQLLETAERRLNSSLERRGRRIDHVLLNADGIRGFPVVLQQISKSLNYLLMSASQTKSESVEEKGGGPPRCSITELLQMCWPSLSEDCVASHTTLSQQLDQVLQSLREALELPEPRTPPLSSLVEQAAQKAPEAEAHPVQIQTQLLQKNLGKQTPSGSRQMDYLGTFFSYCSTLAAVLLQSLSSEPDHVEVKVGNPFVLLQQSSSQLVSHLLFERQVPPERLAALLAQENLSLSVPQVIVSCCCEPLALCSSRQSQQTSSLLTRLGTLAQLHASHCLDDLPLSTPSSPRTTENPTLERKPYSSPRDSSLPALTSSALAFLKSRSKLLATVACLGASPRLKVSKPSLSWKELRGRREVPLAAEQVARECERLLEQFPLFEAFLLAAWEPLRGSLQQGQSLAVNLCGWASLSTVLLGLHSPIALDVLSEAFEESLVARDWSRALQLTEVYGRDVDDLSSIKDAVLSCAVACDKEGWQYLFPVKDASLRSRLALQFVDRWPLESCLEILAYCISDTAVQEGLKCELQRKLAELQVYQKILGLQSPPVWCDWQTLRSCCVEDPSTVMNMILEAQEYELCEEWGCLYPIPREHLISLHQKHLLHLLERRDHDKALQLLRRIPDPTMCLEVTEQSLDQHTSLATSHFLANYLTTHFYGQLTAVRHREIQALYVGSKILLTLPEQHRASYSHLSSNPLFMLEQLLMNMKVDWATVAVQTLQQLLVGQEIGFTMDEVDSLLSRYAEKALDFPYPQREKRSDSVIHLQEIVHQAADPETLPRSPSAEFSPAAPPGISSIHSPSLRERSFPPTQPSQEFVPPATPPARHQWVPDETESICMVCCREHFTMFNRRHHCRRCGRLVCSSCSTKKMVVEGCRENPARVCDQCYSYCNKDVPEEPSEKPEALDSSKNESPPYSFVVRVPKADEVEWILDLKEEENELVRSEFYYEQAPSASLCIAILNLHRDSIACGHQLIEHCCRLSKGLTNPEVDAGLLTDIMKQLLFSAKMMFVKAGQSQDLALCDSYISKVDVLNILVAAAYRHVPSLDQILQPAAVTRLRNQLLEAEYYQLGVEVSTKTGLDTTGAWHAWGMACLKAGNLTAAREKFSRCLKPPFDLNQLNHGSRLVQDVVEYLESTVRPFVSLQDDDYFATLRELEATLRTQSLSLAVIPEGKIMNNTYYQECLFYLHNYSTNLAIISFYVRHSCLREALLHLLNKESPPEVFIEGIFQPSYKSGKLHTLENLLESIDPTLESWGKYLIAACQHLQKKNYYHILYELQQFMKDQVRAAMTCIRFFSHKAKSYTELGEKLSWLLKAKDHLKIYLQETSRSSGRKKTTFFRKKMTAADVSRHMNTLQLQMEVTRFLHRCESAGTSQITTLPLPTLFGNNHMKMDVACKVMLGGKNVEDGFGIAFRVLQDFQLDAAMTYCRAARQLVEKEKYSEIQQLLKCVSESGMAAKSDGDTILLNCLEAFKRIPPQELEGLIQAIHNDDNKVRAYLICCKLRSAYLIAVKQEHSRATALVQQVQQAAKSSGDAVVQDICAQWLLTSHPRGAHGPGSRK

SEQ ID NO: 186041 - protein, 2518 aa, Artificial Sequence
  derived and/or modified sequence
MNHPFGKEEAASQKQLFGFFCECLRRGEWELAQACVPQLQEGQGDIPKRVEDILQALVVCPNLLRCGQDINPQRVAWVWLLVLEKWLAREKKLLPVVFRRKLEFLLLSEDLQGDIPENILEELYETLTQGAVGHVPDGNPRRESWTPRLSSEAVSVLWDLLRQSPQPAQALLELLLEEDDGTGLCHWPLQNALVDLIRKALRTLRCPAEPLGVELHLLCEELLEACRTEGSPLREERLLSCLLHKASRGLLSLYGHTYAEKVTEKPPRATASGKVSPDHLDPERAMLALFSNPNPAEAWKVAYFYCLSNNKHFLEQILVTALTLLKEEDFPNLGCLLDREFRPLSCLLVLLGWTHCQSLESAKRLLQTLHRTQGPGCDELLRDACDGLWAHLEVLEWCIQQSSNPIPKRDLLYHLHGGDSHSVLYTLHHLTNLPALREEDVLKLLQKVPAKDPQQEPDAVDAPVPEHLSQCQNLTLYQGFCAMKYAIYALCVNSHQHSQCQDCKDSLSEDLASATEPANDSLSSPGAANLFSTYLARCQQYLCSIPDSLCLELLENIFSLLLITSADLHPEPHLPEDYAEDDDIEGKSPSGLRSPSESPQHIAHPERKSERGSLGVPKTLAYTMPSHVKAEPKDSYPGPHRHSFLDLKHFTSGISGFLADEFAIGAFLRLLQEQLDEISSRSPPEKPKQESQSCSGSRDGLQSRLHRLSKVVSEAQWRHKVVTSNHRSEEQPSRRYQPATRHPSLRRGRRTRRSQADGRDRGSNPSLESTSSELSTSTSEGSLSAMSGRNELHSRLHPHPQSSLIPMMFSPPESLLASCILRGNFAEAHQVLFTFNLKSSPSSGELMFMERYQEVIQELAQVEHKIENQNSDAGSSTIRRTGSGRSTLQAIGSAAAAGMVFYSISDVTDKLLNTSGDPIPMLQEDFWISTALVEPTAPLREVLEDLSPPAMAAFDLACSQCQLWKTCKQLLETAERRLNSSLERRGRRIDHVLLNADGIRGFPVVLQQISKSLNYLLMSASQTKSESVEEKGGGPPRCSITELLQMCWPSLSEDCVASHTTLSQQLDQVLQSLREALELPEPRTPPLSSLVEQAAQKAPEAEAHPVQIQTQLLQKNLGKQTPSGSRQMDYLGTFFSYCSTLAAVLLQSLSSEPDHVEVKVGNPFVLLQQSSSQLVSHLLFERQVPPERLAALLAQENLSLSVPQVIVSCCCEPLALCSSRQSQQTSSLLTRLGTLAQLHASHCLDDLPLSTPSSPRTTENPTLERKPYSSPRDSSLPALTSSALAFLKSRSKLLATVACLGASPRLKVSKPSLSWKELRGRREVPLAAEQVARECERLLEQFPLFEAFLLAAWEPLRGSLQQGQSLAVNLCGWASLSTVLLGLHSPIALDVLSEAFEESLVARDWSRALQLTEVYGRDVDDLSSIKDAVLSCAVACDKEGWQYLFPVKDASLRSRLALQFVDRWPLESCLEILAYCISDTAVQEGLKCELQRKLAELQVYQKILGLQSPPVWCDWQTLRSCCVEDPSTVMNMILEAQEYELCEEWGCLYPIPREHLISLHQKHLLHLLERRDHDKALQLLRRIPDPTMCLEVTEQSLDQHTSLATSHFLANYLTTHFYGQLTAVRHREIQALYVGSKILLTLPEQHRASYSHLSSNPLFMLEQLLMNMKVDWATVAVQTLQQLLVGQEIGFTMDEVDSLLSRYAEKALDFPYPQREKRSDSVIHLQEIVHQAADPETLPRSPSAEFSPAAPPGISSIHSPSLRERSFPPTQPSQEFVPPATPPARHQWVPDETESICMVCCREHFTMFNRRHHCRRCGRLVCSSCSTKKMVVEGCRENPARVCDQCYSYCNKDVPEEPSEKPEALDSSKNESPPYSFVVRVPKADEVEWILDLKEEENELVRSEFYYEQAPSASLCIAILNLHRDSIACGHQLIEHCCRLSKGLTNPEVDAGLLTDIMKQLLFSAKMMFVKAGQSQDLALCDSYISKVDVLNILVAAAYRHVPSLDQILQPAAVTRLRNQLLEAEYYQLGVEVSTKTGLDTTGAWHAWGMACLKAGNLTAAREKFSRCLKPPFDLNQLNHGSRLVQDVVEYLESTVRPFVSLQDDDYFATLRELEATLRTQSLSLAVIPEGKIMNNTYYQECLFYLHNYSTNLAIISFYVRHSCLREALLHLLNKESPPEVFIEGIFQPSYKSGKLHTLENLLESIDPTLESWGKYLIAACQHLQKKNYYHILYELQQFMKDQVRAAMTCIRFFSHKAKSYTELGEKLSWLLKAKDHLKIYLQETSRSSGRKKTTFFRKKMTAADVSRHMNTLQLQMEVTRFLHRCESAGTSQITTLPLPTLFGNNHMKMDVACKVMLGGKNVEDGFGIAFRVLQDFQLDAAMTYCRAARQLVEKEKYSEIQQLLKCVSESGMAAKSDGDTILLNCLEAFKRIPPQELEGLIQAIHNDDNKVRAYLICCKLRSAYLIAVKQEHSRATALVQQVQQAAKSSGDAVVQDICAQWLLTSHPRGAHGPGSRK

SEQ ID NO: 186042 - DNA, 7620 bp, Artificial Sequence
  derived and/or modified sequence
atgaaccaccccttcggcaaggaggaggccgccagccagaagcagctgttcggcttcttctgcgagtgcctgagaagaggcgagtgggagctggcccaggcctgcgtgccccagctgcaggagggccagggcgacatccccaagagagtggaggacatcctgcaggccctggtggtgtgccccaacctgctgagatgcggccaggacatcaacccccagagagtggcctgggtgtggctgctggtgctggagaagtggctggccagagagaagaagctgctgcccgtggtgttcagaagaaagctggagttcctgctgctgagcgaggacctgcagggcgacatccccgagaacatcctggaggagctgtacgagaccctgacccagggcgccgtgggccacgtgcccgacggcaaccccagaagagagagctggacccccagactgagcagcgaggccgtgagcgtgctgtgggacctgctgagacagagcccccagcccgcccaggccctgctggagctgctgctggaggaggacgacggcaccggcctgtgccactggcccctgcagaacgccctggtggacctgatcagaaaggccctgagagccctgcagggccccgacagcgtgccccccggcgtggtggacgccatctacggcgccctgagaaccctgagatgccccgccgagcccctgggcgtggagctgcacctgctgtgcgaggagctgctggaggcctgcagaaccgagggcagccccctgagagaggagagactgctgagctgcctgctgcacaaggccagcagaggcctgctgagcctgtacggccacacctacgccgagaaggtgaccgagaagccccccagagccaccgccagcggcaaggtgagccccgaccacctggaccccgagagagccatgctggccctgttcagcaaccccaaccccgccgaggcctggaaggtggcctacttctactgcctgagcaacaacaagcacttcctggagcagatcctggtgaccgccctgaccctgctgaaggaggaggacttccccaacctgggctgcctgctggacagagagttcagacccctgagctgcctgctggtgctgctgggctggacccactgccagagcctggagagcgccaagagactgctgcagaccctgcacagaacccagggccccggctgcgacgagctgctgagagacgcctgcgacggcctgtgggcccacctggaggtgctggagtggtgcatccagcagagcagcaaccccatccccaagagagacctgctgtaccacctgcacggcggcgacagccacagcgtgctgtacaccctgcaccacctgaccaacctgcccgccctgagagaggaggacgtgctgaagctgctgcagaaggtgcccgccaaggacccccagcaggagcccgacgccgtggacgcccccgtgcccgagcacctgagccagtgccagaacctgaccctgtaccagggcttctgcgccatgaagtacgccatctacgccctgtgcgtgaacagccaccagcacagccagtgccaggactgcaaggacagcctgagcgaggacctggccagcgccaccgagcccgccaacgacagcctgagcagccccggcgccgccaacctgttcagcacctacctggccagatgccagcagtacctgtgcagcatccccgacagcctgtgcctggagctgctggagaacatcttcagcctgctgctgatcaccagcgccgacctgcaccccgagccccacctgcccgaggactacgccgaggacgacgacatcgagggcaagagccccagcggcctgagaagccccagcgagagcccccagcacatcgcccaccccgagagaaagagcgagagaggcagcctgggcgtgcccaagaccctggcctacaccatgcccagccacgtgaaggccgagcccaaggacagctaccccggcccccacagacacagcttcctggacctgaagcacttcaccagcggcatcagcggcttcctggccgacgagttcgccatcggcgccttcctgagactgctgcaggagcagctggacgagatcagcagcagaagcccccccgagaagcccaagcaggagagccagagctgcagcggcagcagagacggcctgcagagcagactgcacagactgagcaaggtggtgagcgaggcccagtggagacacaaggtggtgaccagcaaccacagaagcgaggagcagcccagcagaagataccagcccgccaccagacaccccagcctgagaagaggcagaagaaccagaagaagccaggccgacggcagagacagaggcagcaaccccagcctggagagcaccagcagcgagctgagcaccagcaccagcgagggcagcctgagcgccatgagcggcagaaacgagctgcacagcagactgcacccccacccccagagcagcctgatccccatgatgttcagcccccccgagagcctgctggccagctgcatcctgagaggcaacttcgccgaggcccaccaggtgctgttcaccttcaacctgaagagcagccccagcagcggcgagctgatgttcatggagagataccaggaggtgatccaggagctggcccaggtggagcacaagatcgagaaccagaacagcgacgccggcagcagcaccatcagaagaaccggcagcggcagaagcaccctgcaggccatcggcagcgccgccgccgccggcatggtgttctacagcatcagcgacgtgaccgacaagctgctgaacaccagcggcgaccccatccccatgctgcaggaggacttctggatcagcaccgccctggtggagcccaccgcccccctgagagaggtgctggaggacctgagcccccccgccatggccgccttcgacctggcctgcagccagtgccagctgtggaagacctgcaagcagctgctggagaccgccgagagaagactgaacagcagcctggagagaagaggcagaagaatcgaccacgtgctgctgaacgccgacggcatcagaggcttccccgtggtgctgcagcagatcagcaagagcctgaactacctgctgatgagcgccagccagaccaagagcgagagcgtggaggagaagggcggcggcccccccagatgcagcatcaccgagctgctgcagatgtgctggcccagcctgagcgaggactgcgtggccagccacaccaccctgagccagcagctggaccaggtgctgcagagcctgagagaggccctggagctgcccgagcccagaaccccccccctgagcagcctggtggagcaggccgcccagaaggcccccgaggccgaggcccaccccgtgcagatccagacccagctgctgcagaagaacctgggcaagcagacccccagcggcagcagacagatggactacctgggcaccttcttcagctactgcagcaccctggccgccgtgctgctgcagagcctgagcagcgagcccgaccacgtggaggtgaaggtgggcaaccccttcgtgctgctgcagcagagcagcagccagctggtgagccacctgctgttcgagagacaggtgccccccgagagactggccgccctgctggcccaggagaacctgagcctgagcgtgccccaggtgatcgtgagctgctgctgcgagcccctggccctgtgcagcagcagacagagccagcagaccagcagcctgctgaccagactgggcaccctggcccagctgcacgccagccactgcctggacgacctgcccctgagcacccccagcagccccagaaccaccgagaaccccaccctggagagaaagccctacagcagccccagagacagcagcctgcccgccctgaccagcagcgccctggccttcctgaagagcagaagcaagctgctggccaccgtggcctgcctgggcgccagccccagactgaaggtgagcaagcccagcctgagctggaaggagctgagaggcagaagagaggtgcccctggccgccgagcaggtggccagagagtgcgagagactgctggagcagttccccctgttcgaggccttcctgctggccgcctgggagcccctgagaggcagcctgcagcagggccagagcctggccgtgaacctgtgcggctgggccagcctgagcaccgtgctgctgggcctgcacagccccatcgccctggacgtgctgagcgaggccttcgaggagagcctggtggccagagactggagcagagccctgcagctgaccgaggtgtacggcagagacgtggacgacctgagcagcatcaaggacgccgtgctgagctgcgccgtggcctgcgacaaggagggctggcagtacctgttccccgtgaaggacgccagcctgagaagcagactggccctgcagttcgtggacagatggcccctggagagctgcctggagatcctggcctactgcatcagcgacaccgccgtgcaggagggcctgaagtgcgagctgcagagaaagctggccgagctgcaggtgtaccagaagatcctgggcctgcagagcccccccgtgtggtgcgactggcagaccctgagaagctgctgcgtggaggaccccagcaccgtgatgaacatgatcctggaggcccaggagtacgagctgtgcgaggagtggggctgcctgtaccccatccccagagagcacctgatcagcctgcaccagaagcacctgctgcacctgctggagagaagagaccacgacaaggccctgcagctgctgagaagaatccccgaccccaccatgtgcctggaggtgaccgagcagagcctggaccagcacaccagcctggccaccagccacttcctggccaactacctgaccacccacttctacggccagctgaccgccgtgagacacagagagatccaggccctgtacgtgggcagcaagatcctgctgaccctgcccgagcagcacagagccagctacagccacctgagcagcaaccccctgttcatgctggagcagctgctgatgaacatgaaggtggactgggccaccgtggccgtgcagaccctgcagcagctgctggtgggccaggagatcggcttcaccatggacgaggtggacagcctgctgagcagatacgccgagaaggccctggacttcccctacccccagagagagaagagaagcgacagcgtgatccacctgcaggagatcgtgcaccaggccgccgaccccgagaccctgcccagaagccccagcgccgagttcagccccgccgccccccccggcatcagcagcatccacagccccagcctgagagagagaagcttcccccccacccagcccagccaggagttcgtgccccccgccaccccccccgccagacaccagtgggtgcccgacgagaccgagagcatctgcatggtgtgctgcagagagcacttcaccatgttcaacagaagacaccactgcagaagatgcggcagactggtgtgcagcagctgcagcaccaagaagatggtggtggagggctgcagagagaaccccgccagagtgtgcgaccagtgctacagctactgcaacaaggacgtgcccgaggagcccagcgagaagcccgaggccctggacagcagcaagaacgagagccccccctacagcttcgtggtgagagtgcccaaggccgacgaggtggagtggatcctggacctgaaggaggaggagaacgagctggtgagaagcgagttctactacgagcaggcccccagcgccagcctgtgcatcgccatcctgaacctgcacagagacagcatcgcctgcggccaccagctgatcgagcactgctgcagactgagcaagggcctgaccaaccccgaggtggacgccggcctgctgaccgacatcatgaagcagctgctgttcagcgccaagatgatgttcgtgaaggccggccagagccaggacctggccctgtgcgacagctacatcagcaaggtggacgtgctgaacatcctggtggccgccgcctacagacacgtgcccagcctggaccagatcctgcagcccgccgccgtgaccagactgagaaaccagctgctggaggccgagtactaccagctgggcgtggaggtgagcaccaagaccggcctggacaccaccggcgcctggcacgcctggggcatggcctgcctgaaggccggcaacctgaccgccgccagagagaagttcagcagatgcctgaagccccccttcgacctgaaccagctgaaccacggcagcagactggtgcaggacgtggtggagtacctggagagcaccgtgagacccttcgtgagcctgcaggacgacgactacttcgccaccctgagagagctggaggccaccctgagaacccagagcctgagcctggccgtgatccccgagggcaagatcatgaacaacacctactaccaggagtgcctgttctacctgcacaactacagcaccaacctggccatcatcagcttctacgtgagacacagctgcctgagagaggccctgctgcacctgctgaacaaggagagcccccccgaggtgttcatcgagggcatcttccagcccagctacaagagcggcaagctgcacaccctggagaacctgctggagagcatcgaccccaccctggagagctggggcaagtacctgatcgccgcctgccagcacctgcagaagaagaactactaccacatcctgtacgagctgcagcagttcatgaaggaccaggtgagagccgccatgacctgcatcagattcttcagccacaaggccaagagctacaccgagctgggcgagaagctgagctggctgctgaaggccaaggaccacctgaagatctacctgcaggagaccagcagaagcagcggcagaaagaagaccaccttcttcagaaagaagatgaccgccgccgacgtgagcagacacatgaacaccctgcagctgcagatggaggtgaccagattcctgcacagatgcgagagcgccggcaccagccagatcaccaccctgcccctgcccaccctgttcggcaacaaccacatgaagatggacgtggcctgcaaggtgatgctgggcggcaagaacgtggaggacggcttcggcatcgccttcagagtgctgcaggacttccagctggacgccgccatgacctactgcagagccgccagacagctggtggagaaggagaagtacagcgagatccagcagctgctgaagtgcgtgagcgagagcggcatggccgccaagagcgacggcgacaccatcctgctgaactgcctggaggccttcaagagaatccccccccaggagctggagggcctgatccaggccatccacaacgacgacaacaaggtgagagcctacctgatctgctgcaagctgagaagcgcctacctgatcgccgtgaagcaggagcacagcagagccaccgccctggtgcagcaggtgcagcaggccgccaagagcagcggcgacgccgtggtgcaggacatctgcgcccagtggctgctgaccagccaccccagaggcgcccacggccccggcagcagaaagtag

SEQ ID NO: 186043 - DNA, 7557 bp, Artificial Sequence
  derived and/or modified sequence
atgaaccaccccttcggcaaggaggaggccgccagccagaagcagctgttcggcttcttctgcgagtgcctgagaagaggcgagtgggagctggcccaggcctgcgtgccccagctgcaggagggccagggcgacatccccaagagagtggaggacatcctgcaggccctggtggtgtgccccaacctgctgagatgcggccaggacatcaacccccagagagtggcctgggtgtggctgctggtgctggagaagtggctggccagagagaagaagctgctgcccgtggtgttcagaagaaagctggagttcctgctgctgagcgaggacctgcagggcgacatccccgagaacatcctggaggagctgtacgagaccctgacccagggcgccgtgggccacgtgcccgacggcaaccccagaagagagagctggacccccagactgagcagcgaggccgtgagcgtgctgtgggacctgctgagacagagcccccagcccgcccaggccctgctggagctgctgctggaggaggacgacggcaccggcctgtgccactggcccctgcagaacgccctggtggacctgatcagaaaggccctgagaaccctgagatgccccgccgagcccctgggcgtggagctgcacctgctgtgcgaggagctgctggaggcctgcagaaccgagggcagccccctgagagaggagagactgctgagctgcctgctgcacaaggccagcagaggcctgctgagcctgtacggccacacctacgccgagaaggtgaccgagaagccccccagagccaccgccagcggcaaggtgagccccgaccacctggaccccgagagagccatgctggccctgttcagcaaccccaaccccgccgaggcctggaaggtggcctacttctactgcctgagcaacaacaagcacttcctggagcagatcctggtgaccgccctgaccctgctgaaggaggaggacttccccaacctgggctgcctgctggacagagagttcagacccctgagctgcctgctggtgctgctgggctggacccactgccagagcctggagagcgccaagagactgctgcagaccctgcacagaacccagggccccggctgcgacgagctgctgagagacgcctgcgacggcctgtgggcccacctggaggtgctggagtggtgcatccagcagagcagcaaccccatccccaagagagacctgctgtaccacctgcacggcggcgacagccacagcgtgctgtacaccctgcaccacctgaccaacctgcccgccctgagagaggaggacgtgctgaagctgctgcagaaggtgcccgccaaggacccccagcaggagcccgacgccgtggacgcccccgtgcccgagcacctgagccagtgccagaacctgaccctgtaccagggcttctgcgccatgaagtacgccatctacgccctgtgcgtgaacagccaccagcacagccagtgccaggactgcaaggacagcctgagcgaggacctggccagcgccaccgagcccgccaacgacagcctgagcagccccggcgccgccaacctgttcagcacctacctggccagatgccagcagtacctgtgcagcatccccgacagcctgtgcctggagctgctggagaacatcttcagcctgctgctgatcaccagcgccgacctgcaccccgagccccacctgcccgaggactacgccgaggacgacgacatcgagggcaagagccccagcggcctgagaagccccagcgagagcccccagcacatcgcccaccccgagagaaagagcgagagaggcagcctgggcgtgcccaagaccctggcctacaccatgcccagccacgtgaaggccgagcccaaggacagctaccccggcccccacagacacagcttcctggacctgaagcacttcaccagcggcatcagcggcttcctggccgacgagttcgccatcggcgccttcctgagactgctgcaggagcagctggacgagatcagcagcagaagcccccccgagaagcccaagcaggagagccagagctgcagcggcagcagagacggcctgcagagcagactgcacagactgagcaaggtggtgagcgaggcccagtggagacacaaggtggtgaccagcaaccacagaagcgaggagcagcccagcagaagataccagcccgccaccagacaccccagcctgagaagaggcagaagaaccagaagaagccaggccgacggcagagacagaggcagcaaccccagcctggagagcaccagcagcgagctgagcaccagcaccagcgagggcagcctgagcgccatgagcggcagaaacgagctgcacagcagactgcacccccacccccagagcagcctgatccccatgatgttcagcccccccgagagcctgctggccagctgcatcctgagaggcaacttcgccgaggcccaccaggtgctgttcaccttcaacctgaagagcagccccagcagcggcgagctgatgttcatggagagataccaggaggtgatccaggagctggcccaggtggagcacaagatcgagaaccagaacagcgacgccggcagcagcaccatcagaagaaccggcagcggcagaagcaccctgcaggccatcggcagcgccgccgccgccggcatggtgttctacagcatcagcgacgtgaccgacaagctgctgaacaccagcggcgaccccatccccatgctgcaggaggacttctggatcagcaccgccctggtggagcccaccgcccccctgagagaggtgctggaggacctgagcccccccgccatggccgccttcgacctggcctgcagccagtgccagctgtggaagacctgcaagcagctgctggagaccgccgagagaagactgaacagcagcctggagagaagaggcagaagaatcgaccacgtgctgctgaacgccgacggcatcagaggcttccccgtggtgctgcagcagatcagcaagagcctgaactacctgctgatgagcgccagccagaccaagagcgagagcgtggaggagaagggcggcggcccccccagatgcagcatcaccgagctgctgcagatgtgctggcccagcctgagcgaggactgcgtggccagccacaccaccctgagccagcagctggaccaggtgctgcagagcctgagagaggccctggagctgcccgagcccagaaccccccccctgagcagcctggtggagcaggccgcccagaaggcccccgaggccgaggcccaccccgtgcagatccagacccagctgctgcagaagaacctgggcaagcagacccccagcggcagcagacagatggactacctgggcaccttcttcagctactgcagcaccctggccgccgtgctgctgcagagcctgagcagcgagcccgaccacgtggaggtgaaggtgggcaaccccttcgtgctgctgcagcagagcagcagccagctggtgagccacctgctgttcgagagacaggtgccccccgagagactggccgccctgctggcccaggagaacctgagcctgagcgtgccccaggtgatcgtgagctgctgctgcgagcccctggccctgtgcagcagcagacagagccagcagaccagcagcctgctgaccagactgggcaccctggcccagctgcacgccagccactgcctggacgacctgcccctgagcacccccagcagccccagaaccaccgagaaccccaccctggagagaaagccctacagcagccccagagacagcagcctgcccgccctgaccagcagcgccctggccttcctgaagagcagaagcaagctgctggccaccgtggcctgcctgggcgccagccccagactgaaggtgagcaagcccagcctgagctggaaggagctgagaggcagaagagaggtgcccctggccgccgagcaggtggccagagagtgcgagagactgctggagcagttccccctgttcgaggccttcctgctggccgcctgggagcccctgagaggcagcctgcagcagggccagagcctggccgtgaacctgtgcggctgggccagcctgagcaccgtgctgctgggcctgcacagccccatcgccctggacgtgctgagcgaggccttcgaggagagcctggtggccagagactggagcagagccctgcagctgaccgaggtgtacggcagagacgtggacgacctgagcagcatcaaggacgccgtgctgagctgcgccgtggcctgcgacaaggagggctggcagtacctgttccccgtgaaggacgccagcctgagaagcagactggccctgcagttcgtggacagatggcccctggagagctgcctggagatcctggcctactgcatcagcgacaccgccgtgcaggagggcctgaagtgcgagctgcagagaaagctggccgagctgcaggtgtaccagaagatcctgggcctgcagagcccccccgtgtggtgcgactggcagaccctgagaagctgctgcgtggaggaccccagcaccgtgatgaacatgatcctggaggcccaggagtacgagctgtgcgaggagtggggctgcctgtaccccatccccagagagcacctgatcagcctgcaccagaagcacctgctgcacctgctggagagaagagaccacgacaaggccctgcagctgctgagaagaatccccgaccccaccatgtgcctggaggtgaccgagcagagcctggaccagcacaccagcctggccaccagccacttcctggccaactacctgaccacccacttctacggccagctgaccgccgtgagacacagagagatccaggccctgtacgtgggcagcaagatcctgctgaccctgcccgagcagcacagagccagctacagccacctgagcagcaaccccctgttcatgctggagcagctgctgatgaacatgaaggtggactgggccaccgtggccgtgcagaccctgcagcagctgctggtgggccaggagatcggcttcaccatggacgaggtggacagcctgctgagcagatacgccgagaaggccctggacttcccctacccccagagagagaagagaagcgacagcgtgatccacctgcaggagatcgtgcaccaggccgccgaccccgagaccctgcccagaagccccagcgccgagttcagccccgccgccccccccggcatcagcagcatccacagccccagcctgagagagagaagcttcccccccacccagcccagccaggagttcgtgccccccgccaccccccccgccagacaccagtgggtgcccgacgagaccgagagcatctgcatggtgtgctgcagagagcacttcaccatgttcaacagaagacaccactgcagaagatgcggcagactggtgtgcagcagctgcagcaccaagaagatggtggtggagggctgcagagagaaccccgccagagtgtgcgaccagtgctacagctactgcaacaaggacgtgcccgaggagcccagcgagaagcccgaggccctggacagcagcaagaacgagagccccccctacagcttcgtggtgagagtgcccaaggccgacgaggtggagtggatcctggacctgaaggaggaggagaacgagctggtgagaagcgagttctactacgagcaggcccccagcgccagcctgtgcatcgccatcctgaacctgcacagagacagcatcgcctgcggccaccagctgatcgagcactgctgcagactgagcaagggcctgaccaaccccgaggtggacgccggcctgctgaccgacatcatgaagcagctgctgttcagcgccaagatgatgttcgtgaaggccggccagagccaggacctggccctgtgcgacagctacatcagcaaggtggacgtgctgaacatcctggtggccgccgcctacagacacgtgcccagcctggaccagatcctgcagcccgccgccgtgaccagactgagaaaccagctgctggaggccgagtactaccagctgggcgtggaggtgagcaccaagaccggcctggacaccaccggcgcctggcacgcctggggcatggcctgcctgaaggccggcaacctgaccgccgccagagagaagttcagcagatgcctgaagccccccttcgacctgaaccagctgaaccacggcagcagactggtgcaggacgtggtggagtacctggagagcaccgtgagacccttcgtgagcctgcaggacgacgactacttcgccaccctgagagagctggaggccaccctgagaacccagagcctgagcctggccgtgatccccgagggcaagatcatgaacaacacctactaccaggagtgcctgttctacctgcacaactacagcaccaacctggccatcatcagcttctacgtgagacacagctgcctgagagaggccctgctgcacctgctgaacaaggagagcccccccgaggtgttcatcgagggcatcttccagcccagctacaagagcggcaagctgcacaccctggagaacctgctggagagcatcgaccccaccctggagagctggggcaagtacctgatcgccgcctgccagcacctgcagaagaagaactactaccacatcctgtacgagctgcagcagttcatgaaggaccaggtgagagccgccatgacctgcatcagattcttcagccacaaggccaagagctacaccgagctgggcgagaagctgagctggctgctgaaggccaaggaccacctgaagatctacctgcaggagaccagcagaagcagcggcagaaagaagaccaccttcttcagaaagaagatgaccgccgccgacgtgagcagacacatgaacaccctgcagctgcagatggaggtgaccagattcctgcacagatgcgagagcgccggcaccagccagatcaccaccctgcccctgcccaccctgttcggcaacaaccacatgaagatggacgtggcctgcaaggtgatgctgggcggcaagaacgtggaggacggcttcggcatcgccttcagagtgctgcaggacttccagctggacgccgccatgacctactgcagagccgccagacagctggtggagaaggagaagtacagcgagatccagcagctgctgaagtgcgtgagcgagagcggcatggccgccaagagcgacggcgacaccatcctgctgaactgcctggaggccttcaagagaatccccccccaggagctggagggcctgatccaggccatccacaacgacgacaacaaggtgagagcctacctgatctgctgcaagctgagaagcgcctacctgatcgccgtgaagcaggagcacagcagagccaccgccctggtgcagcaggtgcagcaggccgccaagagcagcggcgacgccgtggtgcaggacatctgcgcccagtggctgctgaccagccaccccagaggcgcccacggccccggcagcagaaagtag

SEQ ID NO: 186044 - DNA, 7620 bp, Artificial Sequence
  derived and/or modified sequence
atgaaccatccgttcgggaaggaagaagccgcaagtcagaagcagttattcggctttttttgcgagtgcttgagaagaggggagtgggagctagcgcaggcctgcgttccccaactgcaagagggccagggggacatccctaaacgcgtcgaggatatattgcaggctctggtggtatgtccaaatctgctcaggtgtggccaggatatcaatccgcagcgggttgcttgggtctggttgttagtgctagagaagtggttggcacgagagaagaagctcctgccggtggtcttccgcagaaaactcgaatttcttctcctctccgaggatctgcagggggacatccctgagaacattctggaggaactgtacgaaaccctaacgcagggggcagtgggtcacgtcccagacggcaacccccgacgcgaaagctggaccccaagactctcttctgaggccgtgtcggtcctgtgggatctcctcaggcagagccctcagccagcccaggcactgctcgagctgttgctcgaagaggacgatggaacaggcttatgtcattggcctcttcagaatgcactcgttgatttgatcagaaaggccctgcgagctctccagggcccagactctgtgccccctggtgtggtcgacgccatctatggcgcgctccggacccttaggtgtccagccgagcctctaggggtagaactccatctgctgtgcgaggaattactggaagcctgcagaacggaagggtctcctttgcgagaggaaaggctactctcttgcctcctccataaagcttctagaggactactgtccctttatggccacacctacgcagagaaggtgaccgaaaaaccacctcgagccacggcttctgggaaggtcagtcctgatcacctcgatcccgagagggcgatgctggccctgttcagtaatccaaatcccgccgaggcttggaaagtggcatacttttactgtcttagcaacaacaagcacttcttggagcaaattctggtgacagcgcttacgctactgaaggaggaggatttccccaatctggggtgcctgttggaccgcgagttcagacccctgtcctgtctcttggtgttactcggatggacacactgtcagagtctggaatctgcaaaacgacttctccagaccctccaccgtacccagggtccaggctgtgacgaattactgagagacgcctgtgatggtctctgggctcacctggaagtcttggagtggtgtattcagcagagcagtaatcctatccctaagagggacttgctctatcatctgcacggcggcgacagccacagcgttttgtacactctgcaccacctgaccaatcttcctgctctccgagaagaagacgtcctgaagttgctgcagaaagtccccgctaaggatcctcagcaggagccagacgcagtggatgcccccgtcccagagcatctatcccagtgtcagaacctaacactgtatcaaggcttctgcgccatgaagtacgcaatctatgcgctgtgcgtgaactcacatcaacactctcaatgccaggactgcaaggacagcctatctgaagacctcgcctccgccaccgaacctgccaatgacagtttaagcagcccaggcgctgccaacctgttttcaacttatctcgcacgatgtcagcagtatttgtgttccatccccgattcattatgtctggagctgctggaaaacattttttccctcctgctcatcactagcgcagatctgcatccggaaccacacttgcccgaggattatgccgaggacgacgacatagagggtaaaagcccatccgggctgcgtagcccgtctgaatcacctcagcacatcgctcaccctgaaagaaaatctgaacggggctccctgggagtgcctaaaacgctcgcatacacaatgcctagtcacgtgaaggctgagcccaaggacagttatcctggcccacaccgccacagttttctggacctgaagcatttcacaagcggtattagtggcttcctggccgacgagtttgcgatcggtgcatttctgcggctgctacaggagcagctggacgagatttcgtcaaggagtccccccgaaaaaccaaagcaagaaagccagagctgtagcggaagccgcgacgggctccagagtcgcctacacaggttatctaaagtggtgagtgaggctcagtggagacataaagtcgtgacttctaaccatcgctcagaggagcagccttctcgaagataccagcctgctacccgtcacccctccctgcggcgcgggcgcagaacaaggcggtctcaggccgatggacgcgaccgtgggagcaatccaagcctggagtctacaagctctgagctgagcacttcaacgtcagaggggtcactctccgcaatgtccggccggaacgagctccacagtcgactgcaccctcaccctcaatcctcactgattcccatgatgttttccccccctgaatcattgttggcgagctgcatcctgaggggcaacttcgccgaagcccatcaggtgctgttcacctttaatctgaagagttccccttcttccggggaattaatgtttatggaaaggtaccaggaggtgattcaggagctggcccaggtggaacacaagatcgagaaccagaactctgatgctggtagttctacaatcagaagaactggctccggaagatctacattgcaggcgatcggatccgccgctgcggctggcatggtattctatagcattagtgacgtcaccgataagctgctcaacacctcaggcgatcccatacctatgttacaggaggatttctggatttcaacggctcttgtggagcctaccgctcctctaagggaggttctcgaagatctgagcccacctgccatggccgcctttgatttagcatgtagccagtgccagctgtggaaaacttgtaaacagctgttggagacagcagaacggaggctcaattcatcgctggaaaggagaggccgtaggatcgatcacgttctactgaacgccgatggcattcgtggattccctgtggttcttcagcaaatcagtaagagtttgaactacctcctgatgagtgcctcccaaactaagagcgagtcagttgaggaaaaagggggcggccctccgcggtgctcaattacagagttacttcagatgtgctggccatccctgagcgaagactgtgtggcaagccatactaccttaagtcagcagcttgatcaggttttacagtccttgcgtgaggccctcgaactcccagaacctcgcacacccccgctctcctcattggtagagcaggcagcccagaaggctcccgaagcagaggcacatcctgtccaaatacaaactcagctcctccagaaaaacttaggcaaacagactccgagcggctctagacagatggactacctgggtactttcttctcatactgtagcacgctggccgcagtgctactgcagtccctgtcgtcagaacctgaccatgtcgaggtgaaggtgggcaatccatttgtgctgttgcagcagagttcttcccagctggtgagtcatctgttgttcgaaagacaggttcccccagaaagactggctgcgctgctggcacaagagaacctatctttgagtgtcccacaggtgattgtatcgtgctgctgtgaacccctggctctgtgtagttctaggcaatcacaacagaccagttccctgttgacacggctgggaactcttgcgcagctacatgctagtcactgcctagatgacctgccactgtccacaccaagctctccgcgcacgacagaaaatccgactctggagagaaaaccgtactcctctcccagggatagtagcctcccagcactcacctctagcgcattggcatttttgaagtctagatctaagctccttgccaccgtggcttgcttgggcgctagcccacgcctgaaagtttcgaaaccttctctgtcttggaaagagctgcgcgggcggagggaagtgcccctcgcggcagaacaggtggcaagagagtgcgagagacttctggagcagtttcctctgtttgaggccttcttgctggcggcttgggaacccctgaggggatcccttcagcagggccagtctctggcggtaaatctgtgtggctgggcttccctgtcaaccgtgctcttaggccttcacagccctatcgccctggacgttttgtcagaggctttcgaggagagtctggtagcccgggactggtcacgggcactgcaattaactgaggtgtatggcagagacgtcgacgacctgtcatccattaaggatgctgtcctctcatgtgcagtggcttgtgataaagagggttggcagtacctgtttcccgtaaaagacgctagcctgcggtctagactagctctccagtttgtggaccgctggcccctggagagttgtctggagattctggcctattgcatctctgacaccgcggtgcaggaagggcttaagtgtgagctgcagcgcaagctggccgagctgcaggtctaccagaagatcctggggctccagtctccccccgtgtggtgcgattggcagaccctgcgcagttgttgtgtggaagacccaagtactgtgatgaacatgattttagaagctcaagagtacgaactctgcgaagagtggggatgcctgtaccctatacccagggaacatttaatttccctgcaccagaagcacttactgcatctactggagcggcgggaccatgataaagccctacagctcctcaggagaatccccgaccctacgatgtgtctggaagtgacagaacagtccctggaccaacatacatcgctggctacatcccacttcctggctaattacctgacgacccacttctatggccagttaacagcggtccggcatcgcgagatccaggcactgtacgttggcagtaagatcctgctcacactccctgaacagcaccgagcttcctactcacatttgtcctcaaatccgctttttatgcttgagcagctgcttatgaacatgaaggtagattgggccaccgtcgctgtccagactttacaacaactgctagtgggtcaggagatcggtttcaccatggacgaagtcgactctctcttgtcaagatacgctgagaaggccctcgactttccttatcctcaacgagaaaagcggtccgactctgtgatacatctgcaggaaattgtacaccaggcagcagatccggaaacattaccacggagccccagtgcagagttctcccctgccgcccccccggggatctcatcaatccactccccaagtttgcgcgagcgctcttttccgccaacccagccatcccaggaattcgtacctcccgcgacacccccggcgcgtcatcagtgggttccagatgagactgagtccatctgtatggtgtgctgccgcgagcactttacaatgtttaaccgacggcatcattgccgcagatgcggccggctggtctgttcgtcatgtagcactaaaaagatggtggtggagggctgtcgcgagaatcccgcccgagtttgtgaccagtgttatagctattgtaacaaggatgttcctgaggaacctagcgaaaagcccgaagccctggattcatctaagaacgagagcccgccatatagttttgtggtgagagtccctaaagcagacgaggtcgaatggattctcgatttgaaagaagaagagaacgaactagttcgcagcgaattctactatgaacaagcacccagcgcctctctgtgcatcgccattctgaacctacacagggattccatagcatgtggccatcagctgatcgagcattgttgcagattgtcgaaagggctgaccaacccggaggtggacgccgggctgctcactgatattatgaagcagctgctattttctgctaagatgatgtttgttaaagcagggcagagccaggacctggctctctgtgattcctacatctctaaagtagatgtcttaaacatcctggtcgcagcagcctatcgccacgttccttccctggaccagatcttgcagcccgccgccgttacacgcttgcgtaatcaactcctagaggcagagtattatcagttgggtgttgaagtatccaccaaaaccggcctcgacactaccggagcgtggcatgcctgggggatggcgtgtctcaaggccgggaacctgaccgcagcgagagagaagttcagcagatgtctaaaaccaccattcgatcttaatcagttgaaccacggtagtaggcttgttcaggatgtcgtcgagtacctggagtccacagtgcggcccttcgttagccttcaggatgatgattactttgcgacactccgcgagcttgaggccacactacgtacacagtcactctccctggctgtgatacccgaggggaaaatcatgaataacacatactaccaggaatgtctgttctaccttcataactatagcacaaacctggcaataatctcattctatgtccgtcactcatgtctgcgcgaagccctgcttcacctcctgaataaggagtcccccccggaagttttcatagaagggatttttcagcctagttataaatccggcaagctgcacaccctggaaaatttgctggaatcaatcgatcccaccctggagagctggggaaagtatctgattgccgcttgccagcatctccagaaaaaaaattactatcacatcctgtacgagctgcaacaatttatgaaagaccaggtgcgcgccgcaatgacctgtatccggtttttctcccataaagcaaagtcttatactgaattaggggagaaattgagctggcttctgaaagccaaggatcacttgaagatctacttacaagagacgagtagatcctcaggtcggaagaagacaacgtttttccgcaagaagatgactgcagccgatgtcagccggcatatgaataccctgcaattacagatggaggtgacacgatttctgcatcggtgtgaaagtgctggtacatcccagatcactacccttcccctccccaccctctttggaaacaatcatatgaaaatggatgtggcctgtaaggtgatgctgggtggaaagaatgtagaggatggcttcggcattgcatttagagtcctgcaagactttcagcttgacgcagccatgacctactgccgcgctgctcgtcaactcgtcgagaaagagaagtattccgagatccaacagctgcttaagtgcgtgagcgagtctggtatggccgctaagtccgacggagatacaattctgctcaattgcctggaagcctttaaacgcatcccgccccaggaactcgagggcctgattcaggccattcacaatgatgacaacaaggtgagagcctatctgatctgctgcaagctccggtctgcttacttaatcgcggtgaaacaggaacacagccgggctaccgcactggttcagcaggtgcagcaggccgcaaagagttccggagacgccgtcgtgcaggatatatgtgcccagtggttgcttacgtctcatccccggggcgctcacggaccaggctcacgcaagtag

SEQ ID NO: 186045 - DNA, 7557 bp, Artificial Sequence
  derived and/or modified sequence
atgaaccatcctttcggaaaggaggaggcagcctcgcagaaacagctgttcggcttcttctgcgaatgcctgagacgcggagaatgggaactggcccaggcctgtgtgccccagctgcaggagggacagggggatatccccaaaagagttgaagacattctacaggctctggtagtctgccctaatctgctccgatgcggtcaggatatcaacccccaacgagtcgcatgggtgtggctcctggtgctcgaaaaatggcttgcaagagaaaaaaagctcttaccagtcgttttcaggagaaagctggaatttttactcttgtccgaagaccttcagggggacataccagaaaacatcctggaggagctatatgaaaccctcacccagggtgcagtcggtcacgtgccggatggcaacccccgacgggaaagttggacgcctagattatcctcagaggccgtcagcgttttatgggacttgctgcgccaaagtccccagccagctcaggctctcctcgagttgctgctggaagaggacgatgggaccggtctgtgtcattggcccctgcagaatgccctcgtagacttgattcggaaggcacttaggaccctgcggtgtccagccgaacccctgggagtggagctgcacctgctctgcgaggagctgttagaagcctgccgtaccgaagggagtccactgcgggaagagcgactacttagttgtttgctgcataaggcttctagaggtctgctgagcctctacggacacacttacgccgaaaaggtcaccgagaagccccctcgggccacagcctccggaaaagtctcacccgaccacctggatcctgagcgggcaatgctggctctcttttctaatcccaatccagcggaggcttggaaggtggcatatttctactgccttagtaataataaacattttctggagcagatcctggtgaccgctctcaccctgctgaaggaggaagatttcccaaaccttggatgccttttagacagggagtttaggcccttgagctgcctgttagtgttgctgggatggacgcactgccaatctttagagagcgctaagcgcttgctacagaccttacacagaacccagggtcctgggtgtgatgagctgctcagagacgcgtgcgacgggctgtgggcacacttagaggtgctggagtggtgcatccaacaaagcagcaatccaatccccaagcgggacttactgtatcaccttcatggcggtgattcccattccgtgctctacacccttcatcatttgacaaatctgcccgcgctccgcgaggaggacgtgctcaagctactgcagaaagtaccagcgaaagatccccaacaggaaccagatgctgtagatgcgccggtgcctgaacacctttcgcagtgccagaacctaaccctctatcagggattctgtgccatgaagtacgcaatatatgcactctgtgtgaattctcatcaacacagccagtgtcaagattgcaaggactcgttatctgaggacctcgcttctgctacagaaccggccaacgattccttatcctcgcctggcgctgccaacctgttctcaacctatctagccagatgccagcagtatctatgcagcatccctgattccttgtgcttggaacttttggagaatattttctctttgttgcttatcacctccgctgacttgcatccggagccccatctgcccgaagactatgcagaggatgacgacatcgaaggaaagtccccttcgggactcaggtcaccctctgagtctccccaacatatcgcccacccagaacgcaaaagcgagcgcggctccctgggcgtacccaaaaccctggcatacaccatgcctagccacgtcaaagccgaacccaaggactcatatcctggcccgcaccgccactctttccttgacctgaagcattttacaagcggcatctctggattcctggctgatgagttcgcgatcggcgcctttctgcgcttactgcaggagcaactagacgagatctcgagtcggagccccccagagaagcccaaacaggagtcccagtcttgctctgggtccagggatggtttgcagtcccgactgcatagactgagtaaggtcgtgagcgaggcacagtggcgacacaaggttgtgacctccaaccatcgcagtgaagagcaacctagcagacggtatcagcccgcaactcgtcacccctcgctgagacgggggcgaaggaccaggcgatctcaggccgatggaagagaccgcggctcaaacccttcgttggagtccacctcaagtgaactcagtacctcaacatcggagggatcactttccgctatgagcgggagaaatgaattgcacagtcgcctgcatccacacccgcaatcctcactgatacccatgatgttctcaccccccgagtctcttctggcgagctgcattctgcgcgggaacttcgccgaggcccatcaggtgctcttcacctttaatcttaaatctagccccagctccggcgaactgatgttcatggagcgctatcaagaggtgattcaagagctcgcccaggtggagcataaaattgagaaccagaactccgacgctgggagttcaaccattcgtcgaactgggtccgggcggtctacccttcaggctattggttctgcagccgctgctggcatggttttctactcaattagcgacgtgaccgacaagttgcttaacaccagcggcgacccaattcccatgcttcaggaagacttttggattagcactgccctcgtagaaccaaccgccccattgagagaggtgcttgaagatctgtcaccccctgcaatggccgcgttcgacctggcttgttctcagtgccagttgtggaagacctgcaaacagttgctcgagaccgcggaacgccgtttgaatagctcactggaaagacgtgggcgaagaattgaccatgttctgctgaacgccgatggaattcggggctttccagtggtactccagcaaatatccaagtccctgaattacctgctcatgagcgcctcgcagaccaagagcgagtctgtggaagaaaaaggtggtgggccaccacggtgctccattaccgaactgcttcagatgtgctggccgtctctctcagaagactgcgttgcctcccacaccaccttgagccagcagttagatcaagtactccaatccttacgggaggccttagaactgcctgagccgcggacccctccactgtctagcctggtggagcaggcagcgcagaaagctccggaagccgaagcccaccccgtgcagattcagactcagcttctgcagaagaatctagggaaacagactccgtcaggtagcagacagatggattaccttggcacattcttctcttactgctctacactagctgccgtgctgttacaatccctaagttcggaacctgaccacgtcgaggtcaaggttgggaacccatttgttctgctgcagcaatcctcgtcccagcttgtgtcacacctgttgttcgaaaggcaggtccctcccgagcgcttggccgccttactcgctcaggaaaatctgagtctgagtgtccctcaagtgatcgtcagctgttgttgtgagccgctggcactgtgctccagccgtcagtcgcagcagacaagtagcttgctgactcgcctgggaactctcgctcagctccatgccagtcactgtctagacgatctgccactgtccaccccgagcagcccacgtactacagagaaccccactcttgagaggaaaccgtactcttctccacgggatagttcactccccgctcttacctcctccgcattagccttcctcaaatctcggtcgaagcttctggccacagtcgcctgcttaggtgcatccccaaggctgaaggtgtcgaaaccttccctgtcttggaaagaactgaggggtagacgtgaagtgcctctggctgctgagcaggtggcccgcgagtgcgaaagactcctcgagcaatttcctctcttcgaagccttccttctcgccgcctgggagccattgcggggctccctgcagcagggtcaatccctggcagtgaatctctgtgggtgggcttccctctccacagtgctcttaggcctgcactcacccattgcccttgatgtgctgagtgaggcattcgaggaatccctcgttgccagggattggtcccgcgctctgcaactcaccgaggtgtacggccgggacgtggacgacctgtcgtccatcaaagacgctgtgctgagctgtgccgtggcctgcgacaaggagggatggcagtacctatttcccgttaaggacgccagcctgcgctcccgtctcgcactgcaatttgtagaccggtggccactggagagctgcctggagatactcgcttattgcatatccgacacagccgtgcaagagggtctgaaatgtgagctgcagagaaaactggcagagctgcaggtgtaccagaagatactgggtctacaaagcccacctgtatggtgcgactggcagacattgagatcgtgctgtgtggaggatccgtctacggttatgaacatgatcctcgaagcccaggaatatgagctgtgtgaagagtggggctgtttatatcctatcccaagagagcatctcatttctcttcaccagaagcaccttctgcatttgctggaacggagggaccacgacaaggccctgcagctcctgagaaggattcccgaccctacaatgtgtttagaagttaccgaacagtcacttgatcagcatacaagccttgctacctcccatttccttgctaactaccttaccacccatttctacggacagttgaccgcagtgcgacaccgtgaaatccaggccctctatgtgggctcaaaaatattactgactctcccagagcaacatcgcgcttcttacagtcacttgagtagtaatccccttttcatgcttgagcagctgcttatgaatatgaaggtggattgggctaccgtcgccgtgcagactctgcagcaactgctggtggggcaagaaattggcttcaccatggatgaggtggattcgctcctatcccggtacgccgagaaggcactggatttcccctaccctcaacgagagaaacgatctgattccgtgattcatctgcaggagatcgtccatcaggccgcagatcctgagactctgccccgatccccctccgcggagttcagtccggccgcaccccctggaattagcagcatacactcaccatccttaagagagcgtagctttccccccacccaaccctcccaggagttcgtgcctccagctacaccaccagcaaggcaccaatgggttcctgacgagaccgagagtatctgcatggtgtgctgccgagagcattttacaatgttcaatcggcggcaccattgcagacgctgcggcaggctggtgtgctcttcctgctccactaagaaaatggtggttgaaggatgccgtgaaaaccctgcccgtgtgtgtgaccaatgctacagctattgtaacaaggatgttccggaagagccgtctgagaagcccgaggccctggattcgagcaaaaatgagtccccgccctattctttcgtagttcgcgtacctaaggcggacgaggtggaatggatcttagaccttaaagaggaagaaaacgagctcgtgcgttcagagttttattacgaacaggccccgagtgcgtctctgtgtatcgcgattctgaacctacacagagacagtatcgcatgtggtcaccagctcatcgagcactgctgccgcctgtctaaagggctcaccaatccggaagtcgatgcagggctgctgaccgacattatgaaacagctcttgttcagcgcaaaaatgatgtttgtaaaagctggccagtctcaggacctggctctgtgcgattcctatatatctaaggtggacgtgttgaacatcctcgtggcggccgcgtaccgacatgtgccctccctggaccaaatcctgcagcctgctgctgtaacaaggttgcgcaatcagctgctcgaggcagagtactatcagctcggtgttgaggtttccaccaaaacaggattagacactactggcgcctggcatgcctggggcatggcatgcctgaaagctgggaacctcacggccgctagggagaaatttagtagatgtttaaaacccccctttgatctgaaccagctgaatcatggctcgagattagtccaggatgttgtggaatatctcgaaagcaccgtgcggccctttgtctcactgcaagacgacgactacttcgctacactgagagaactggaggccaccctgcgcacccagtcactgtccctcgcagttatccctgaggggaaaattatgaataatacatattatcaggagtgccttttctacctgcacaactactctacaaacttggctattatctctttctatgtgcgtcatagctgtctgcgagaagctctcctacacctgcttaataaggagagtccaccggaggtttttattgaggggattttccagccgtcttacaagtccgggaagctgcacacattggaaaacctccttgagagtatcgatccgacgctcgagagttggggtaagtacctaattgcagcttgccaacatctgcaaaagaagaactactatcatattctgtatgaactgcagcagttcatgaaagaccaggtgcgtgccgccatgacatgtatccggttttttagtcataaagccaaatcatacacagagctgggcgagaaattgagctggctgttgaaggccaaggatcatctaaaaatctatctgcaagagacatccagatcaagtgggcgtaaaaaaacaacattctttagaaagaagatgaccgcggctgatgtgtcacgccatatgaacacgctccagctccagatggaggttacgcgcttcctgcatcgctgcgagtccgcaggcacttcacaaatcaccactctgcctctaccaactctgtttgggaacaaccacatgaagatggacgttgcctgcaaggtaatgctgggcggaaagaatgttgaggatggatttggtatcgcttttcgggtccttcaggatttccagctcgacgcggccatgacatattgtagagccgctagacaactggtcgaaaaggagaagtatagcgaaattcagcaactccttaaatgcgtatccgaatccggaatggccgcaaaatcagacggcgataccatcctgctcaactgtctggaagcctttaagagaatcccaccccaggaactggaggggctgattcaagccatccataacgacgataataaagtgagggcttatctgatatgttgcaaacttcggtccgcatacctcatcgccgtaaagcaggaacatagcagagcaactgcgctggtccagcaagttcaacaggctgccaagtcctcgggcgatgctgtggtgcaggacatctgtgcacaatggcttcttacctctcaccctaggggggcccacggacccggcagccgaaaatag

SEQ ID NO: 186046 - DNA, 7620 bp, Artificial Sequence
  derived and/or modified sequence
atgaaccacccctttgggaaggaggaggccgccagccagaagcagctgtttggcttcttctgtgagtgcctgcggcggggggagtgggagctggcccaggcctgtgtgccccagctgcaggagggccagggcgacatccccaagagggtggaggacatcctgcaggccctggtggtgtgccccaacctgctgcgctgtggccaggacatcaacccccagagggtggcctgggtgtggctgctggtgctggagaagtggctggcccgggagaagaagctgctgcctgtggtgttccggaggaagctggagttcctgctgctgtctgaggacctgcagggcgacatccctgagaacatcctggaggagctgtatgagaccctgacccagggcgctgtgggccacgtgcctgatggcaacccccggcgggagagctggaccccccggctgagcagcgaggccgtgtctgtgctgtgggacctgctgcggcagagcccccagcctgcccaggccctgctggagctgctgctggaggaggatgatggcaccggcctgtgccactggcccctgcagaatgccctggtggacctgatcaggaaggccctgcgggccctgcagggcccagattctgtgcccccaggagtggtggatgccatctatggagccctgcggaccctgcgctgcccagctgagcccctgggcgtggagctgcacctgctgtgtgaggagctgctggaggcctgcaggacagagggcagccccctgcgggaggagcggctgctgagctgcctgctgcacaaggccagccggggcctgctgagcctgtatggccacacctacgccgagaaggtgacagagaagccaccccgggccacagccagcggcaaggtgtccccagaccacctggaccctgagcgggccatgctggccctcttcagcaaccccaacccagctgaggcctggaaggtggcctacttctactgcctgagcaacaacaagcacttcctggagcagatcctggtgacagccctgaccctgctgaaggaggaggacttccccaacctgggctgcctgctggaccgggagttccggcccctgagctgcctgctggtgctgctgggctggacccactgccagagcctggagagcgccaagaggctgctgcagaccctgcacaggacccagggccctggctgtgatgagctgctgagagatgcctgtgatggcctgtgggcccacctggaggtgctggagtggtgcatccagcagagcagcaaccccatccccaagagggacctgctgtaccacctgcatggaggagacagccacagcgtgctgtacaccctgcaccacctgaccaacctgcctgccctgcgggaggaggatgtgctgaagctgctgcagaaggtgcctgccaaggacccccagcaggagccagatgctgtggatgcccctgtgcctgagcacctgagccagtgccagaacctgaccctgtaccagggcttctgtgccatgaagtatgccatctatgccctgtgtgtgaacagccaccagcacagccagtgccaggactgcaaggacagcctgtctgaggacctggccagcgccacagagcccgccaatgacagcctgagcagccctggggccgccaacctcttcagcacctacctggcccgctgccagcagtacctgtgcagcatcccagacagcctgtgcctggagctgctggagaacatcttcagcctgctgctgatcaccagcgctgacctgcaccctgagccccacctgcctgaagattatgcagaagatgatgacatcgagggcaagagccccagcggcctgcggagccccagcgagagcccccagcacatcgcccaccctgagaggaagtctgagcggggcagcctgggcgtgcccaagaccctggcctacaccatgcccagccacgtgaaggccgagcccaaggacagctacccaggcccccaccgccacagcttcctggacctgaagcacttcaccagcggcatcagcggcttcctggctgatgaatttgccatcggggccttcctgcggctgctgcaggagcagctggatgagatcagcagccgcagccccccagagaagcccaagcaggagagccagagctgcagcggcagcagagatggcctgcagagccggctgcaccggctgagcaaggtggtgtctgaggcccagtggaggcacaaggtggtgaccagcaaccacaggtctgaggagcagcccagccgccgctaccagcctgccaccaggcaccccagcctgcggcggggccgccgcaccaggaggagccaggctgatggccgggaccggggcagcaaccccagcctggagagcaccagcagcgagctgagcaccagcaccagcgagggcagcctgagcgccatgagcggcagaaatgagctgcacagccggctgcacccccacccccagagcagcctcatccccatgatgttcagccccccagagagcctgctggccagctgcatcctgcggggcaactttgctgaggcccaccaggtgctcttcaccttcaacctgaagagcagccccagcagcggggagctgatgttcatggagcgctaccaggaggtgatccaggagctggcccaggtggagcacaagattgagaaccagaacagtgatgctggcagcagcaccatccggaggacaggcagcggccgcagcaccctgcaggccatcggcagcgctgctgctgctggcatggtgttctacagcatcagtgatgtgacagacaagctgctgaacaccagcggggaccccatccccatgctgcaggaggacttctggatcagcacagccctggtggagcccacagcccccctgcgggaggtgctggaggacctgagccccccagccatggccgcctttgacctggcctgcagccagtgccagctgtggaagacctgcaagcagctgctggagacagctgagcggcggctgaacagcagcctggagcggcggggcagaagaattgaccacgtgctgctgaatgctgatggcatccggggcttccctgtggtgctgcagcagatcagcaagagcctgaactacctgctgatgtctgccagccagaccaagtctgagagcgtggaggagaagggcggcggccccccacgctgcagcatcacagagctgctgcagatgtgctggcccagcctgtctgaggactgtgtggccagccacaccaccctgagccagcagctggaccaggtgctgcagagcctgcgggaggccctggagctgcctgagcccaggaccccacccctgagcagcctggtggagcaggccgcccagaaggcccctgaggccgaggcccaccctgtgcagatccagacccagctgctgcagaagaacctgggcaagcagacccccagcggcagccggcagatggactacctgggcaccttcttctcctactgcagcaccctggccgctgtgctgctgcagagcctgagcagcgagccagaccacgtggaggtgaaggtgggcaacccctttgtgctgctgcagcagagcagcagccagctggtgagccacctgctgtttgagcggcaggtgcccccagagcggctggccgccctgctggcccaggagaacctgagcctgtctgtgccccaggtgattgtgtcctgctgctgtgagcccctggccctgtgcagcagccggcagagccagcagaccagcagcctgctgacccggctgggcaccctggcccagctgcacgccagccactgcctggatgacctgcccctgagcacccccagcagccccaggaccacagagaaccccaccctggagaggaagccctacagcagcccccgggacagcagcctgcctgccctgaccagcagcgccctggccttcctgaagagccgcagcaagctgctggccaccgtggcctgcctgggcgccagcccccggctgaaggtgtccaagcccagcctgtcctggaaggagctgcggggccggcgggaggtgcccctggccgctgagcaggtggccagagaatgtgagcggctgctggagcagttccccctgtttgaggccttcctgctggccgcctgggagcccctgcggggcagcctgcagcagggccagagcctggccgtgaacctgtgtggctgggccagcctgagcacagtgctgctgggcctgcacagccccatcgccctggatgtgctgtctgaggcctttgaggagagcctggtggcccgggactggagccgggccctgcagctgacagaggtgtatggaagagatgtggatgacctgagcagcatcaaggatgctgtgctgagctgtgctgtggcctgtgacaaggagggctggcagtacctgtttcctgtgaaggatgccagcctgcggagccggctggccctgcagtttgtggaccgctggcccctggagagctgcctggagatcctggcctactgcatcagtgacacagctgtgcaggagggcctgaagtgtgagctgcagaggaagctggccgagctgcaggtgtaccagaagatcctgggcctgcagagcccccctgtgtggtgtgactggcagaccctgcggagctgctgcgtggaggaccccagcacagtgatgaacatgatcctggaggcccaggagtatgagctgtgtgaggagtggggctgcctgtaccccatcccccgggagcacctgatcagcctgcaccagaagcacctgctgcacctgctggagcggcgggaccatgacaaggccctgcagctgctgcggcgcatcccagaccccaccatgtgcctggaggtgacagagcagagcctggaccagcacaccagcctggccaccagccacttcctggccaactacctgaccacccacttctacggccagctgacagctgtgcgccaccgggagatccaggccctgtatgtgggcagcaagatcctgctgaccctgcctgagcagcaccgggccagctacagccacctgagcagcaaccccctcttcatgctggagcagctgctgatgaacatgaaggtggactgggccaccgtggccgtgcagaccctgcagcagctgctggtgggccaggagatcggcttcaccatggatgaggtggacagcctgctgagccgctatgcagagaaggccctggacttcccctacccccagcgggagaagagaagtgacagcgtcatccacctgcaggagatcgtgcaccaggccgctgaccctgagaccctgcccaggagccccagcgctgagttctccccagctgcccctcctggcatcagcagcatccacagccccagcctgcgggagaggagcttcccccccacccagcccagccaggagtttgtgcccccagccaccccaccagcccggcaccagtgggtgcctgatgaaacagagagcatctgcatggtgtgctgccgggagcacttcaccatgttcaacagaagacaccactgccgccgctgtggccgcctggtgtgcagcagctgcagcaccaagaagatggtggtggagggctgccgggagaacccagcccgggtgtgtgaccagtgctacagctactgcaacaaggatgtgcctgaggagcccagcgagaagccagaggccctggacagcagcaagaatgaaagccccccctacagctttgtggtgcgggtgcccaaggcagatgaggtggagtggatcctggacctgaaggaggaggagaatgagctggtgcgctctgagttctactatgagcaggcccccagcgccagcctgtgcatcgccatcctgaacctgcaccgggacagcatcgcctgtggccaccagctgattgagcactgctgccgcctgagcaagggcctgaccaaccctgaggtggatgctggcctgctgacagacatcatgaagcagctgctcttcagcgccaagatgatgtttgtgaaggccggccagagccaggacctggccctgtgtgacagctacatcagcaaggtggatgtgctgaacatcctggtggccgccgcctaccgccacgtgcccagcctggaccagatcctgcagcctgctgctgtgacccggctgaggaaccagctgctggaggccgagtactaccagctgggcgtggaggtgtccaccaagacaggcctggacaccactggagcctggcacgcctggggcatggcctgcctgaaggccggcaacctgacagctgcccgggagaagttcagccgctgcctgaagcccccatttgacctgaaccagctgaaccacggcagccggctggtgcaggatgtggtggagtacctggagagcacagtgcggccctttgtgtccctgcaggatgatgactactttgccaccctgcgggagctggaggccaccctgcggacccagagcctgagcctggccgtcatccctgagggcaagatcatgaacaacacctactaccaggagtgcctcttctacctgcacaactacagcaccaacctggccatcatctccttctacgtgcgccacagctgcctgcgggaggccctgctgcacctgctgaacaaggagagccccccagaggtgttcatcgagggcatcttccagcccagctacaagagcggcaagctgcacaccctggagaacctgctggagagcattgaccccaccctggagagctggggcaagtacctgattgctgcctgccagcacctgcagaagaagaactactaccacatcctgtatgagctgcagcagttcatgaaggaccaggtgcgggccgccatgacctgcatccgcttcttcagccacaaggccaagagctacacagagctgggggagaagctgtcctggctgctgaaggccaaggaccacctgaagatctacctgcaggagaccagccgcagcagcggcaggaagaagaccaccttcttcaggaagaagatgacagctgctgatgtgagccgccacatgaacaccctgcagctgcagatggaggtgacccgcttcctgcaccgctgtgagagcgctggcaccagccagatcaccaccctgcccctgcccaccctgtttggaaacaaccacatgaagatggatgtggcctgcaaggtgatgctgggcggcaagaatgtggaggatggcttcggcatcgccttccgggtgctgcaggacttccagctggatgctgccatgacctactgcagagctgcccggcagctggtggagaaggagaagtacagcgagatccagcagctgctgaagtgtgtgtctgagagcggcatggccgccaagagtgatggagacaccatcctgctgaactgcctggaggccttcaagagaattcctccccaggagctggagggcctcatccaggccatccacaatgatgacaacaaggtgcgggcctacctgatctgctgcaagctgcggagcgcctacctgattgctgtgaagcaggagcacagccgggccacagccctggtgcagcaggtgcagcaggccgccaagagcagtggagatgctgtggtgcaggacatctgtgcccagtggctgctgaccagccaccccaggggggcccacggccctggcagcaggaagtag

SEQ ID NO: 186047 - DNA, 7557 bp, Artificial Sequence
  derived and/or modified sequence
atgaaccacccctttgggaaggaggaggccgccagccagaagcagctgtttggcttcttctgtgagtgcctgcggcggggggagtgggagctggcccaggcctgtgtgccccagctgcaggagggccagggcgacatccccaagagggtggaggacatcctgcaggccctggtggtgtgccccaacctgctgcgctgtggccaggacatcaacccccagagggtggcctgggtgtggctgctggtgctggagaagtggctggcccgggagaagaagctgctgcctgtggtgttccggaggaagctggagttcctgctgctgtctgaggacctgcagggcgacatccctgagaacatcctggaggagctgtatgagaccctgacccagggcgctgtgggccacgtgcctgatggcaacccccggcgggagagctggaccccccggctgagcagcgaggccgtgtctgtgctgtgggacctgctgcggcagagcccccagcctgcccaggccctgctggagctgctgctggaggaggatgatggcaccggcctgtgccactggcccctgcagaatgccctggtggacctgatcaggaaggccctgcggaccctgcgctgcccagctgagcccctgggcgtggagctgcacctgctgtgtgaggagctgctggaggcctgcaggacagagggcagccccctgcgggaggagcggctgctgagctgcctgctgcacaaggccagccggggcctgctgagcctgtatggccacacctatgcagagaaggtgacagagaagccaccccgggccacagccagcggcaaggtgtccccagaccacctggaccctgagcgggccatgctggccctcttcagcaaccccaacccagctgaggcctggaaggtggcctacttctactgcctgagcaacaacaagcacttcctggagcagatcctggtgacagccctgaccctgctgaaggaggaggacttccccaacctgggctgcctgctggaccgggagttccggcccctgagctgcctgctggtgctgctgggctggacccactgccagagcctggagagcgccaagaggctgctgcagaccctgcacaggacccagggccctggctgtgatgagctgctgagagatgcctgtgatggcctgtgggcccacctggaggtgctggagtggtgcatccagcagagcagcaaccccatccccaagagggacctgctgtaccacctgcacggcggggacagccacagcgtgctgtacaccctgcaccacctgaccaacctgcctgccctgcgggaggaggatgtgctgaagctgctgcagaaggtgcctgccaaggacccccagcaggagccagatgctgtggatgcccctgtgcctgagcacctgagccagtgccagaacctgaccctgtaccagggcttctgtgccatgaagtatgccatctatgccctgtgtgtgaacagccaccagcacagccagtgccaggactgcaaggacagcctgtctgaggacctggccagcgccacagagcccgccaatgacagcctgagcagccctggagctgccaacctcttcagcacctacctggcccgctgccagcagtacctgtgcagcatcccagacagcctgtgcctggagctgctggagaacatcttcagcctgctgctgatcaccagcgctgacctgcaccctgagccccacctgcctgaggactatgcagaagatgatgacatcgagggcaagagccccagcggcctgcggagccccagcgagagcccccagcacatcgcccaccctgagaggaagtctgagcggggcagcctgggcgtgcccaagaccctggcctacaccatgcccagccacgtgaaggccgagcccaaggacagctacccaggcccccaccgccacagcttcctggacctgaagcacttcaccagcggcatcagcggcttcctggctgatgaatttgccatcggggccttcctgcggctgctgcaggagcagctggatgagatcagcagccgcagccccccagagaagcccaagcaggagagccagagctgcagcggcagcagagatggcctgcagagccggctgcaccggctgagcaaggtggtgtctgaggcccagtggaggcacaaggtggtgaccagcaaccacaggtctgaggagcagcccagccgccgctaccagcctgccaccaggcaccccagcctgcggcggggccgccgcacccggcgcagccaggctgatggccgggaccggggcagcaaccccagcctggagagcaccagcagcgagctgagcaccagcaccagcgagggcagcctgagcgccatgtctggaagaaatgagctgcacagccggctgcacccccacccccagagcagcctcatccccatgatgttcagccccccagagagcctgctggccagctgcatcctgcggggcaactttgctgaggcccaccaggtgctcttcaccttcaacctgaagagcagccccagcagtggagagctgatgttcatggagcgctaccaggaggtgatccaggagctggcccaggtggagcacaagattgagaaccagaacagtgatgctggcagcagcaccatcagaagaactggaagtggccgcagcaccctgcaggccatcggcagcgctgctgctgctggcatggtgttctacagcatcagtgatgtgacagacaagctgctgaacaccagcggggaccccatccccatgctgcaggaggacttctggatcagcacagccctggtggagcccacagcccccctgcgggaggtgctggaggacctgagccccccagccatggccgcctttgacctggcctgcagccagtgccagctgtggaagacctgcaagcagctgctggagacagctgagcggcggctgaacagcagcctggagcggcggggcagaagaattgaccacgtgctgctgaatgctgatggcatccggggcttccctgtggtgctgcagcagatcagcaagagcctgaactacctgctgatgtctgccagccagaccaagtctgagagcgtggaggagaagggcggcggccccccacgctgcagcatcacagagctgctgcagatgtgctggcccagcctgtctgaggactgtgtggccagccacaccaccctgagccagcagctggaccaggtgctgcagagcctgcgggaggccctggagctgcctgagcccaggaccccacccctgagcagcctggtggagcaggccgcccagaaggcccctgaggccgaggcccaccctgtgcagatccagacccagctgctgcagaagaacctgggcaagcagaccccatctggcagccggcagatggactacctgggcaccttcttctcctactgcagcaccctggccgctgtgctgctgcagagcctgagcagcgagccagaccacgtggaggtgaaggtgggcaacccctttgtgctgctgcagcagagcagcagccagctggtgagccacctgctgtttgagcggcaggtgcccccagagcggctggccgccctgctggcccaggagaacctgagcctgtctgtgccccaggtgattgtgtcctgctgctgtgagcccctggccctgtgcagcagccggcagagccagcagaccagcagcctgctgacccggctgggcaccctggcccagctgcacgccagccactgcctggatgacctgcccctgagcacccccagcagccccaggaccacagagaaccccaccctggagaggaagccctacagcagcccccgggacagcagcctgcctgccctgaccagcagcgccctggccttcctgaagagccgcagcaagctgctggccaccgtggcctgcctgggcgccagcccccggctgaaggtgtccaagcccagcctgtcctggaaggagctgcggggcagaagagaggtgcccctggccgctgagcaggtggcccgggagtgtgagcggctgctggagcagttccccctgtttgaggccttcctgctggccgcctgggagcccctgcggggcagcctgcagcagggccagagcctggccgtgaacctgtgtggctgggccagcctgagcacagtgctgctgggcctgcacagccccatcgccctggatgtgctgtctgaggcctttgaggagagcctggtggcccgggactggagccgggccctgcagctgacagaggtgtatggaagagatgtggatgacctgagcagcatcaaggatgctgtgctgagctgtgctgtggcctgtgacaaggagggctggcagtacctgtttcctgtgaaggatgccagcctgcggagccggctggccctgcagtttgtggaccgctggcccctggagagctgcctggagatcctggcctactgcatcagtgacacagctgtgcaggagggcctgaagtgtgagctgcagaggaagctggccgagctgcaggtgtaccagaagatcctgggcctgcagagcccccctgtgtggtgtgactggcagaccctgcggagctgctgcgtggaggaccccagcacagtgatgaacatgatcctggaggcccaggagtatgagctgtgtgaggagtggggctgcctgtaccccatcccccgggagcacctgatcagcctgcaccagaagcacctgctgcacctgctggagcggcgggaccatgacaaggccctgcagctgctgcggcgcatcccagaccccaccatgtgcctggaggtgacagagcagagcctggaccagcacaccagcctggccaccagccacttcctggccaactacctgaccacccacttctacggccagctgacagctgtgcgccaccgggagatccaggccctgtatgtgggcagcaagatcctgctgaccctgcctgagcagcaccgggccagctacagccacctgagcagcaaccccctcttcatgctggagcagctgctgatgaacatgaaggtggactgggccaccgtggccgtgcagaccctgcagcagctgctggtgggccaggagatcggcttcaccatggatgaggtggacagcctgctgagccgctatgcagagaaggccctggacttcccctacccccagcgggagaagagaagtgacagcgtcatccacctgcaggagatcgtgcaccaggccgctgaccctgagaccctgcccaggagccccagcgctgagttcagccctgctgcccctcctggcatcagcagcatccacagccccagcctgcgggagaggagcttcccccccacccagcccagccaggagtttgtgcccccagccaccccaccagcccggcaccagtgggtgcctgatgaaacagagagcatctgcatggtgtgctgccgggagcacttcaccatgttcaacagaagacaccactgcagaagatgtggccgcctggtgtgcagcagctgcagcaccaagaagatggtggtggagggctgcagagaaaatcctgcccgggtgtgtgaccagtgctacagctactgcaacaaggatgtgcctgaggagcccagcgagaagccagaggccctggacagcagcaagaatgaaagccccccctacagctttgtggtgcgggtgcccaaggcagatgaggtggagtggatcctggacctgaaggaggaggagaatgagctggtgcgctctgagttctactatgagcaggcccccagcgccagcctgtgcatcgccatcctgaacctgcaccgggacagcatcgcctgtggccaccagctgattgagcactgctgccgcctgagcaagggcctgaccaaccctgaggtggatgctggcctgctgacagacatcatgaagcagctgctcttcagcgccaagatgatgtttgtgaaggccggccagagccaggacctggccctgtgtgacagctacatcagcaaggtggatgtgctgaacatcctggtggccgccgcctacagacatgtgcccagcctggaccagatcctgcagcctgctgctgtgacccggctgaggaaccagctgctggaggccgagtactaccagctgggcgtggaggtgtccaccaagacaggcctggacaccaccggggcctggcacgcctggggcatggcctgcctgaaggccggcaacctgacagctgcccgggagaagttcagccgctgcctgaagcccccatttgacctgaaccagctgaaccacggcagccggctggtgcaggatgtggtggagtacctggagagcacagtgcggccctttgtgtccctgcaggatgatgactactttgccaccctgcgggagctggaggccaccctgcggacccagagcctgagcctggccgtcatccctgagggcaagatcatgaacaacacctactaccaggagtgcctcttctacctgcacaactacagcaccaacctggccatcatctccttctacgtgcgccacagctgcctgcgggaggccctgctgcacctgctgaacaaggagagccccccagaggtgttcatcgagggcatcttccagcccagctacaagagcggcaagctgcacaccctggagaacctgctggagagcattgaccccaccctggagagctggggcaagtacctgattgctgcctgccagcacctgcagaagaagaactactaccacatcctgtatgagctgcagcagttcatgaaggaccaggtgcgggccgccatgacctgcatccgcttcttcagccacaaggccaagagctacacagagctgggggagaagctgtcctggctgctgaaggccaaggaccacctgaagatctacctgcaggagaccagccgcagcagcggcaggaagaagaccaccttcttcaggaagaagatgacagctgctgatgtgagccgccacatgaacaccctgcagctgcagatggaggtgacccgcttcctgcaccgctgtgagagcgctggcaccagccagatcaccaccctgcccctgcccaccctgtttggaaacaaccacatgaagatggatgtggcctgcaaggtgatgctgggcggcaagaatgtggaggatggctttggaattgccttccgggtgctgcaggacttccagctggatgctgccatgacctactgccgggccgcccggcagctggtggagaaggagaagtacagcgagatccagcagctgctgaagtgtgtgtctgagagcggcatggccgccaagagtgatggagacaccatcctgctgaactgcctggaggccttcaagaggatccccccccaggagctggagggcctcatccaggccatccacaatgatgacaacaaggtgcgggcctacctgatctgctgcaagctgcggagcgcctacctgattgctgtgaagcaggagcacagccgggccacagccctggtgcagcaggtgcagcaggccgccaagagcagtggagatgctgtggtgcaggacatctgtgcccagtggctgctgaccagccaccccaggggggcccacggccctggcagcaggaagtag

SEQ ID NO: 186048 - DNA, 7620 bp, Artificial Sequence
  derived and/or modified sequence
atgaaccaccccttcggcaaggaggaggccgccagccagaagcagctgttcggtttcttttgcgaatgtcttaggcggggcgagtgggaactggctcaggcctgtgtcccccagctgcaggagggtcagggagacataccaaagagagttgaagacatcctgcaggctctcgtcgtatgtccaaatctcctgagatgcggtcaggatataaacccacagcgagttgcctgggtctggctcctggtcctcgaaaagtggctggcccgggaaaaaaagttgttaccagtcgtctttcggagaaaattggagtttttgctgctctctgaggatctgcaaggtgatatcccggagaacattctggaagagctgtacgagactcttactcaaggggctgtcggtcacgtgccagacggtaacccaaggcgggaatcctggacaccaaggctgtcttctgaggccgtgtccgtactctgggaccttctgcgccagagtccacagcccgcacaggctctcctggaactactgctcgaagaggacgatggtactggcctgtgccactggccattgcagaatgctctcgtagacctgattcggaaagccctgcgcgccctacagggaccagattcagtacccccgggcgttgttgatgctatctacggcgctctcaggacacttcgttgccctgctgagccactcggggtagaactgcatctgctttgcgaggagcttctcgaggcttgtagaacagagggtagtccccttagagaagagcgactgctctcttgcctgcttcataaagcttcacggggactgctgtccttgtatggacacacttatgcagaaaaagtgaccgagaagccgccccgcgcgaccgcctctggcaaagtaagtcccgatcacttggatcccgagagggctatgttagctctgttcagcaaccctaatcccgcggaggcatggaaagttgcatacttttattgtttaagcaataacaagcacttcttggagcagattctggttaccgcactcactctgctcaaagaggaagatttcccaaatctaggatgtttgttagaccgcgaattccggccactgtcgtgcctgctggtactgctcggatggactcattgccagtcactggaatccgctaaacgactactccagaccctgcatagaacccagggtcccgggtgtgacgagctgctaagagacgcctgcgatgggctgtgggcacacttggaggtccttgaatggtgcattcagcagtcttccaatcccatcccaaagagggatttactgtatcacctgcacggaggagactcacattctgtgctgtataccctccatcatctcactaacttacctgctttacgagaggaggacgtgctgaagctgttgcagaaagtgcccgccaaggacccgcagcaggagccagatgccgtggatgcgcccgtcccagagcaccttagccagtgtcagaacctcacactttatcagggattttgtgcgatgaagtatgcgatttacgcgttgtgtgtaaatagccatcagcactcacagtgtcaagactgtaaagactcactgagcgaggatctggcctccgccaccgagccggcaaatgattctttaagctctccaggcgccgcaaacctcttctcaacctacctggcaaggtgtcaacagtacctctgctctatccctgactccctgtgtttagagctgttggagaacattttcagtctcttactcattacaagtgcggacttacatcccgagccccatctgcccgaagactatgccgaggatgatgacatagaaggtaagagtccgtccgggttaagatcccctagcgaaagcccccagcacatcgctcacccagagcggaaatccgagcgggggagtttgggggtaccaaaaaccctagcctatacaatgcccagccacgtgaaggccgaaccaaaagattcttaccctgggccccataggcacagcttcctggaccttaaacactttacgagcggcatctccggattcttggccgatgagttcgcaataggtgcgttcctgcgattgcttcaagagcagcttgatgagatcagctctcgctcccccccagagaagccgaagcaggaatcacagagttgtagtggatcccgggatggcctacagtcacgtctccaccgcctctccaaggtcgtgtccgaggcccagtggcgccataaggtggtgacgagtaatcatcggagcgaggaacaaccaagcaggagataccagccagccacccgccacccctcgttgcggagaggcaggagaaccagacggagccaggctgacgggcgcgaccgcggatctaaccccagtctcgaatcaacctcatcggagctcagcactagtacttcagaggggtcattgagcgccatgtctgggcggaacgaacttcactctagacttcacccacacccacaatcttccctgatccccatgatgttttctccacctgagagcctactcgctagttgcatactgaggggaaacttcgcggaggcccatcaggtgttgttcacctttaacttaaagtcaagcccttcaagtggcgagctcatgttcatggaacggtaccaggaggtgatccaagaattagcccaggtagagcataaaattgagaatcagaatagcgatgcagggtcttccaccatcagacgtactggctccgggaggtcaaccttgcaagcaatcggcagcgccgccgctgcgggcatggtgttctactcaatatctgatgtcacagataaactgctcaacacttccggcgacccaattccgatgctccaggaggatttctggatatcgacagccctggtggaacccactgctcccctgcgggaggtgctggaggatctcagcccacctgccatggcagcattcgacctagcttgcagtcagtgccagttatggaaaacatgtaagcaattacttgagaccgccgagcggcgactgaattcatcactggagaggcgtggtagacgaattgatcatgtgctgcttaatgcagacggtatccgaggctttcctgtggtactgcagcaaatcagcaaaagcctgaactatctcctgatgtctgcctcccagacaaaatcagagtctgtggaggagaagggggggggaccgcctaggtgtagtatcacagaattgcttcagatgtgctggcctagtctctccgaggattgcgtggcgtctcacactacgttatcccaacaacttgatcaggtgctccaaagcctgcgggaagctctggaactaccagagccccggacacctccgctgagcagcctggtggagcaggccgcccaaaaggctccagaggcagaggcccaccctgtgcagatccagactcaactgctgcagaaaaacctgggtaagcagacacctagcggcagccgtcaaatggattatttgggcaccttcttttcttactgctccaccttggcagcagtgctacttcaaagcctctcgagtgagcccgatcacgttgaagtaaaagtgggtaatcccttcgtgctcttgcagcagtcttcgtcacagctcgtttcccatctgttgttcgagagacaggtgcctccagaaaggctggctgcactgctcgcacaggaaaatctatccctttccgtgccccaagtgattgtgagctgctgctgcgagcccttagctctttgtagctcaagacagtcgcagcaaacatctagcctactgacccggctcgggacacttgcccagctccacgcctctcactgcctcgatgatctgcccctgagcaccccaagcagtccgaggaccacagagaatcccactttggaaagaaaaccatattcttctccaagagatagttctctaccagccctgaccagctcagcactggcctttctgaagtcacggagtaagttgctggccactgttgcatgtctgggagcaagcccccgcttaaaagtttccaaaccttcactgagctggaaagagctgcgcgggcgccgggaggtgccccttgccgccgagcaggtggcccgagaatgcgaaagactcctggagcagtttccactctttgaggcatttctcctcgccgcctgggaaccactgcggggttcccttcagcagggtcaatctctcgcggtgaacctgtgtggatgggcctccttatcaacagtgctgctggggctgcattctccaatcgcgctggacgtgctttcggaggcgttcgaggaatctctcgtggctcgcgactggagccgcgcacttcagttgaccgaggtgtatggacgagatgtggacgacttgtcaagtattaaggacgcggtattgagctgcgcagtggcttgtgataaagaagggtggcagtatttgttccctgtgaaagacgcatctctcaggagcaggctggctctccagtttgtcgaccggtggcccctagaatcctgtctggaaattctcgcttactgtatctcagacacagcggtgcaagaggggttaaaatgcgagctacaaaggaagcttgccgagctgcaggtatatcaaaagatcctgggattacagagccccccagtgtggtgtgactggcaaaccctcagatcctgctgtgtcgaagaccccagcaccgtgatgaatatgatccttgaggctcaggaatacgagttatgtgaagagtggggctgtttatatcctatccccagggaacatctcatatcattgcatcagaagcacctgcttcacttactggaacgcagagatcacgataaagcattgcagttgctgcgcagaatacccgacccaacaatgtgtcttgaggtcactgagcaatcactcgatcagcatacctctttggccacctcgcacttcctcgccaactacttaacaactcacttttacgggcagcttactgcagtgaggcaccgcgaaattcaggcactgtacgtgggttcgaagatcctgcttactctgcccgaacagcatcgagcatcctactctcatctatcgtctaacccactgttcatgctcgagcagctgctgatgaacatgaaagtggactgggcaaccgtcgctgtgcagactcttcagcaactgctcgtggggcaagagatcggattcacgatggacgaagtcgatagtctactgtctagatacgcagaaaaagctctggacttcccctaccctcagagggagaaaagaagtgatagcgtgattcacctccaggagattgtgcaccaagcggcagaccccgagacccttccgaggtctccctccgctgaattcagtcccgcggcaccacccggcatctcctccatccatagcccttccctgagagagaggtcttttcctcccacacagccgagccaggaattcgtccctcccgccacaccacctgccagacaccagtgggtccccgatgagaccgagtcgatctgcatggtttgttgtcgggagcacttcaccatgtttaacaggaggcatcactgcagacgatgcggccgcctagtttgctcaagctgttcgacgaaaaaaatggtagtagagggctgccgggagaacccagcccgcgtgtgcgatcagtgctattcttactgcaacaaagacgttcctgaagaaccaagcgaaaagcccgaggctcttgattccagtaaaaatgagtctcccccatatagttttgtcgtcagagtgcccaaggcggacgaagttgagtggatacttgatcttaaggaggaagagaacgaattggtgcgcagtgagttctattacgaacaagctcccagcgcctccctctgtattgccattttgaatctccatcgggatagcattgcatgtggccaccaattgatcgaacattgctgcagattgtcaaagggcctgaccaatcctgaggtggacgccggcctgctgacagacattatgaagcagttactattttcagctaaaatgatgttcgttaaggccggccagagccaagacttggcgctttgcgacagctacatctccaaagtcgacgtactcaacattttggtagctgcagcgtataggcacgtcccctcattggatcagatcctgcaacccgccgccgtgaccaggcttaggaaccagcttctggaagccgagtattatcagctaggagtcgaggtttctaccaaaactggtctcgatacgaccggagcatggcatgcttggggaatggcctgtctaaaggctggcaatcttacagctgcacgggaaaagttttcccgctgtctgaaacctccatttgatctaaatcagctgaaccacggttcgagacttgtccaggacgtagttgaatacctagaatcaacagtccggcccttcgtcagtctgcaggatgatgactacttcgctactctgagagagctcgaagccactttaaggacccagagtctgagcctagctgtcattcccgagggaaagattatgaataacacttactatcaagaatgtctattctatctgcataactattctaccaacctggcgataatctccttttacgtccggcactcctgccttcgcgaagccctgcttcacctgttgaacaaagagtctcctcccgaggtgttcattgaaggcatctttcagcccagttataagtccggcaagctccacaccctggagaacctgttagagagtatcgatcccacccttgagtcctggggtaagtacttaatagcagcctgccagcacttacagaaaaagaactactaccatatactgtatgagctgcaacagtttatgaaggaccaagtgagagctgcgatgacctgtatcaggttcttctcccacaaagccaagtcatatacagagctgggagagaaactcagctggctgctaaaagcgaaggatcacctaaaaatttatctgcaggaaacctcccggtctagcgggaggaaaaagactacctttttcaggaaaaaaatgactgccgctgatgtctcaagacacatgaatactctgcagttgcagatggaggtgaccaggttcctgcacagatgcgaatctgctggaacgagccagattaccacccttcctttaccaaccctgtttggaaataaccacatgaagatggatgtggcttgtaaagtaatgctcggcggtaaaaatgttgaggatggatttgggatagcctttcgcgtgctccaagatttccagctggatgctgcaatgacttattgtagggccgcaagacagctggttgagaaggaaaagtacagtgagattcaacaattgttgaaatgtgtgtctgagtcgggtatggccgcgaagtccgacggcgacacaattctcctgaattgcctggaagcattcaagcgcataccaccacaggagttagagggtctcattcaagcaattcataatgacgataacaaagtgagagcctacctgatctgctgcaaactgaggtctgcctatctgatcgcagtgaagcaggaacacagccgagccacagctctggtgcaacaagtgcagcaagctgccaagagtagcggcgacgcggtagtccaagacatttgtgctcaatggctcttaacttcacatccgagaggagctcatgggccaggtagcagaaagtag

SEQ ID NO: 186049 - DNA, 7557 bp, Artificial Sequence
  derived and/or modified sequence
atgaaccaccccttcggcaaggaggaggccgccagccagaagcagctctttggttttttctgcgaatgcttgagacgcggcgagtgggagctagcacaggcatgcgtacctcagctgcaggaggggcagggtgacattcccaagcgcgtggaagacatcctccaagccctcgttgtatgccctaatcttctgcggtgtgggcaggacatcaatccccagcgcgtcgcctgggtgtggctcctggtcctcgagaagtggctggctagggagaagaaactattaccggtcgttttcaggagaaagttggagtttttgctgctcagtgaagacctgcagggcgatatccctgagaacatcttggaagagctatacgagactctgacacagggcgcagtgggccatgttccagatggcaatccccgtagagagagctggaccccacggttgtctagcgaggccgttagcgtgctttgggacctgctgagacagagtccacagccggcacaagccctgcttgagctcttattggaggaagacgatggaaccgggctatgccactggccactgcagaacgccctcgtcgatctgatcaggaaagccctgcgcactctgcgttgccccgccgagccccttggcgtcgaactgcacttactctgcgaggagttgcttgaggcctgtaggactgagggcagtccgctgagggaggagcggttgctttcgtgcctgcttcataaagcctcacggggactcctcagcttgtatggacacacgtacgctgagaaggttactgagaagcctccaagggccactgcctctggcaaagtaagtcctgatcacctggatcctgagagagctatgttggctctgttcagcaatcctaacccagccgaggcatggaaggtggcttacttttattgtctgtcaaacaacaaacactttttagaacagattctggtgacagcactgaccctcctaaaagaggaggacttcccaaaccttggctgcctgcttgaccgggagttccggccactgagttgcctgctcgtgctgctgggatggacccactgccagtccttggagtccgccaagcggcttctccagactctgcacaggactcagggcccagggtgtgacgagctgctgagggatgcgtgcgatggcctctgggcccacttggaggtgctggagtggtgcatccagcagagttccaaccccatcccaaagagggatctcctgtaccatctgcatggcggagattcccactcagtgctatatacattgcatcatctcaccaacctgcccgcactacgcgaagaagatgtcttgaagttattacagaaggtacctgcgaaagaccctcagcaggaaccggacgctgtggacgctcccgttccagagcacctttcccagtgccagaatctgaccctgtatcaaggtttttgcgctatgaaatatgctatttatgcactgtgcgtgaattcccatcagcacagtcagtgtcaggactgtaaggacagcttaagcgaggacttggcgtccgcgacagagcctgctaacgactcgctatcctccccaggcgcggcaaacctgttttccacctacttggcaagatgtcagcagtacctgtgttcaatccccgattcactctgtttggagctgttagagaatattttttctctgctccttatcacttctgcagatctgcatccggaaccacatcttcccgaagattacgccgaggacgatgacatagaaggcaagtcgccttcgggactcaggtccccttcggaatcaccacagcacatcgcacatcctgaacgcaaatcagaaagaggatctctcggcgtgccaaagacgcttgcttatactatgcctagccacgttaaagccgagccaaaagacagctacccaggccctcacagacacagcttccttgacctgaaacatttcactagtggcatctctggatttctggctgacgaatttgcgatcggcgccttcctccgcctgttgcaagagcagttagatgagattagctccagaagccctcctgagaagcctaaacaggagagccaatcctgctccggcagtcgagatggcctgcaaagtcgactgcacaggctgtctaaggtggtctctgaggctcaatggagacacaaggtggtgacatccaatcatcggtctgaggaacaaccttctaggcgataccagccagctactcgtcacccatctcttcggcgagggagacgcacgcggcgatctcaggctgatgggagggatagggggtccaaccccagcctagagtcaacatcatctgagctgagcacatctacctctgagggctcgctgagcgctatgtctggcaggaacgagcttcactcccgcctgcatccccatcctcaaagctctctcataccaatgatgttcagtcccccggagagtctgctggcctcttgcattctgcgagggaactttgcagaggcccatcaggtgctgttcaccttcaacctcaagagtagtccctcatccggagagttaatgtttatggagcggtaccaggaggtgatccaagagctggcacaggttgagcacaagatcgaaaaccagaatagtgacgccggatccagcaccattagaagaaccggttcaggacggagcactctccaggcgattggatcagcggcagctgctgggatggtgttctatagtatatctgacgtgacagacaagttgctgaatacgtcaggagaccccattcctatgctgcaggaggatttttggataagcaccgctttggtggagcctaccgcgccactgagagaagtcctggaggatctgtccccacctgccatggcagcctttgatcttgcttgcagtcaatgccagctgtggaagacctgcaagcagctgctcgagacagccgagcgaaggctgaatagctctctcgagcggagaggaagaagaatagaccacgtactgctaaatgctgatgggatacggggcttccctgtggtgttgcaacagattagtaagtccctgaattatctcttaatgagtgcctcccagacaaagagcgaatcagtcgaggagaaagggggtggaccccccagatgtagtattacagaactgttgcagatgtgctggccctccctctccgaggattgtgtagcaagccataccacccttagccagcaactggaccaggtgctacaaagcttgagggaggcattggaactgcctgagcctagaacccctcctctgtcctctctggtggagcaggccgcccagaaggccccagaggccgaagctcaccccgtgcagatccaaacccagttgttgcagaagaacctaggaaagcaaaccccgtccggatcgaggcagatggattacctggggaccttctttagttactgctcaacgctggccgcagtactactccaatctttgtcatccgaaccggaccacgtcgaagtcaaagttggcaaccccttcgttctcttgcaacagtcatcttcacagctcgtgagccacctgctgtttgaaaggcaggttccccctgaaaggctcgccgccctgttggcacaggagaacctgagcttatctgttccacaggtcatcgtgagctgttgttgtgaacccttggctctctgttcgtctcgtcaaagccagcaaacatctagtctgctcacaagacttgggactctggctcagcttcatgcttctcattgccttgatgacctgccactttccacaccatccagtccaagaactacagagaatccaactttagagcgaaagccttactctagccccagagatagctccctgccagcgctgacctctagcgccctcgccttcttgaagtcacgctccaagttgctcgctaccgtggcatgtctcggggctagtcccagattgaaagtgtcaaaacctagcctatcatggaaagaactgcgcggccgcagggaagtccccctcgctgctgagcaggtggctagagaatgtgagaggctgcttgaacagtttcccctgtttgaggccttcttgctggccgcctgggagccccttaggggaagtttgcagcagggacagagccttgctgtgaacctgtgtggttgggcttcactctctacagtgctgttgggactccactcccctattgccctagacgtgcttagcgaagccttcgaagagagcctagttgcgagggattggtccagggcactgcagctcacggaagtgtacggacgagacgtagacgatctctcaagcatcaaggatgccgtgctgagttgtgccgtggcttgcgataaggagggatggcagtatctgtttcctgtaaaagatgcatctctcaggagccgtctcgctctgcaattcgtagaccgatggccgctggagagttgcctcgagatactggcttattgcatctccgataccgctgtgcaggaggggctgaagtgcgagctgcaaagaaagctggcggaactgcaagtctatcagaagattctcggtctccaatctcctcccgtttggtgcgactggcaaaccctccgctcttgttgcgtggaggatccctctaccgtcatgaacatgattcttgaggctcaggaatatgagctttgcgaagagtggggctgcctttatccaataccacgggaacatctcattagcctgcaccagaaacatcttctgcacctccttgagcgtagagaccacgataaggcactccaattgttacggcggataccagatcccacaatgtgtcttgaggtgaccgagcaaagcttggaccagcacactagtctagcgacttcacacttcttggcgaattatctgaccacccatttctacggtcagctcaccgccgtacgtcatcgggagatacaggcgctgtatgtgggctctaagatcctgctgaccctgccagaacagcaccgcgcctcatacagtcacctaagcagcaaccccctcttcatgttagagcagctgctgatgaatatgaaggtggattgggcgactgtcgctgtgcagacccttcagcagcttcttgttggccaagaaatcggctttactatggatgaagtggactcattacttagccgatatgctgagaaggctctcgattttccctacccccagcgggaaaaacgctccgactcagtgatccatctgcaggaaatagtgcaccaggcagccgacccagaaactctacccaggagcccctcagcagagttctctcccgcagcccctccagggatcagcagcatccacagcccctccctccgggagaggtcttttccacctacacaaccaagccaagaatttgtgcctccagccacgccgcccgcccgacatcagtgggtccctgacgaaaccgagtctatatgtatggtctgctgccgtgagcattttaccatgttcaatcgaagacaccactgtagacggtgcggccgcctcgtctgcagctcatgttctaccaagaagatggtggtcgagggctgccgcgaaaaccccgcacgcgtatgcgaccagtgctatagctactgcaacaaggatgttcctgaggaaccttccgagaaacctgaggcactcgactcatctaagaatgaatctcccccctattctttcgtggtgagggtgcctaaggccgacgaggttgagtggatcttggacttgaaggaggaggaaaatgaactggtaaggtccgagttctactatgaacaggctccttcggcctctctttgtatcgcgatacttaacctgcatcgggacagcatcgcctgcggccaccagctcatcgaacattgttgtaggctaagtaaagggctgactaaccccgaagtggatgctggtctccttaccgacattatgaagcagctgttgttttcagccaaaatgatgtttgtgaaggctgggcagtctcaggatctggccctctgcgattcctacatcagcaaagtggacgtgctgaacatcctcgtcgctgcggcctatcggcacgtgccctcccttgaccagattttacagcccgctgctgtcactagattgcgtaatcagcttttggaagccgaatattaccagctgggggttgaggtgtctaccaaaaccggcctggataccactggcgcttggcatgcctgggggatggcatgcctgaaggcaggaaatctgacagccgccagagaaaagttcagccgatgtctgaagcctcccttcgatctgaatcaattaaatcacgggagccggctggtgcaagacgtagtggagtacttggagtcaacggtcagacccttcgtttctctgcaggatgatgattatttcgccaccctaagggagctggaagcaactctcagaactcaaagtctatccctagctgtgatccctgaaggtaagattatgaacaatacgtattatcaggagtgcctgttctatctccacaactacagtaccaaccttgcaatcatttctttttacgtgcggcacagttgcttgagggaggccctactgcacttgctgaataaggagtcaccacctgaagtattcattgagggcatatttcaaccttcctacaaaagtggcaagttacatacacttgagaaccttctagagagtatcgaccctaccctggagagctggggaaagtatctcatcgcagcttgccagcatctccagaagaagaactattatcatatcctgtatgagcttcaacagttcatgaaagaccaggtccgcgccgccatgacatgtatcaggttcttttcgcacaaggcaaagagctacactgaattgggcgaaaagctgagttggctattgaaagcaaaggatcacttgaaaatatatttacaggagaccagccgatccagtggaagaaaaaaaaccacattcttccggaagaaaatgacagccgcagatgtctcacggcacatgaacacccttcagttacagatggaggttacccgtttcttgcaccgatgcgagtctgctggcacatcacagataaccaccctgccactccctacacttttcggaaacaaccacatgaagatggacgtggcgtgtaaagtcatgctaggcggaaaaaacgtagaggatgggtttggtatcgctttccgagtgctgcaggacttccaactcgacgctgctatgacatactgtagagctgcaaggcagctggtggagaaggagaagtattcagaaatccagcagcttctgaagtgcgtctcagaaagtgggatggccgccaaatctgacggcgacacaattttattaaactgcctcgaggcgttcaagcgaattccacctcaggagctcgagggtctaattcaggccattcataacgacgacaacaaagtgagggcttatctgatatgctgtaaactgagatccgcatacttgatcgccgtgaaacaggaacacagtagagccaccgcccttgttcagcaagtgcagcaggcagccaagtcgtctggtgacgccgtggtgcaagacatctgcgcccaatggctgcttactagtcatcctagaggcgcacatggtccaggcagtcgaaagtag

SEQ ID NO: 186050 - DNA, 7619 bp, Artificial Sequence
  derived and/or modified sequence
atgaaccaccccttcggaaaggaagaggcagcgtcccagaagcagctgtttgggtttttctgtgagtgtctcagacgtggggagtgggaattggcgcaggcttgtgttccccagctgcaagaaggtcagggcgatatccccaagcgagtcgaagacattctgcaggctctggtcgtatgcccaaatctgctacgctgtggccaggacattaaccctcagagagttgcatgggtgtggttactggtgctggaaaagtggctggccagagaaaagaagctactgccggtcgtgttcagaaggaagctggagttccttctcctctcggaggacctacagggggacatcccagagaacatactcgaggaactatacgaaacacttacccagggcgcagtaggacatgttccagacggcaatccccgtcgggagtcctggacaccacgactctcttcggaagcagtctccgttctgtgggacctcctcaggcagagccctcagcccgcacaagccctgctggagctacttttggaggaagacgatggaactggactgtgtcactggccacttcaaaacgcgttggtggaccttatccggaaagcccttcgggctctacagggcccagattcggtacccccaggtgtggtcgacgcaatatacggtgccttaaggacgttgcgttgcccagctgagcccctgggcgtggagctgcacttgctgtgtgaggagctgctggaggcctgcaggacagagggctctcccctgcgtgaggagaggctactgtcctgtctgctacataaagctagtagagggctgctgtccttgtacggccatacatacgctgagaaagttactgaaaaacctccaagggccacagcttccgggaaggtgtcaccagaccacctggaccccgagagggccatgcttgcactgttcagcaaccctaaccccgcagaggcttggaaagtcgcatatttctattgtctgagtaataataaacatttcctagagcagatcctcgtgaccgccttgaccctcttgaaggaggaggacttccccaatctgggatgcctgctagacagagagttcagaccgctctcctgtctgcttgtgctgctggggtggacgcattgtcagagtctggaatcagccaagcgcctgctgcagactctccatcgcacacagggcccagggtgcgatgaactgctgagagatgcctgcgacgggctttgggctcacctcgaagtcctcgagtggtgtatccagcagtcctctaatccaatccccaagcgcgatcttttgtaccacttgcacggaggagacagccacagtgtcctctacactctgcatcaccttacaaacctccccgcacttcgagaagaggacgtgttgaagctcctgcagaaggtgcctgcgaaagatccacagcaggagccagacgctgttgacgcccctgtccccgaacatctgagtcagtgccagaatctaacactttaccaggggttttgtgcgatgaagtacgcaatctacgccttatgcgtaaatagtcaccagcatagtcagtgtcaggattgcaaggactctctgagtgaagacctggcctcagctaccgaacccgctaacgactccctgtctagcccgggagcagctaacctcttcagcacctacttagctagatgccagcagtatctgtgttctatcccagacagcctttgtctcgagctgctggagaatatctttagcctgctccttattacttctgccgacctgcacccagagccgcacctgcctgaagattatgccgaagatgatgatattgaaggcaaatcaccatctggacttaggtctccaagcgagtcaccacaacacatcgcccaccccgagcgtaaatccgagagaggaagtcttggcgtgccaaagacacttgcatatacaatgccctctcacgtcaaggcagaacctaaagactcctaccctggcccacataggcattctttcctagatctgaagcattttactagcggcataagcgggttcctggcggacgaatttgcgatcggcgcattcctgcgcttacttcaggaacagttagatgagatctcatctaggtccccccctgagaaaccaaagcaggaaagccagtcttgctccggctcacgagacggacttcagagtcgcctgcatcggctctccaaagtcgtgagcgaggcccagtggcgccataaggtcgttacatcgaaccatagatctgaggagcaaccatcacggagataccagcctgctacaagacatcctagcctcaggcggggaagaagaacacgtaggtctcaagctgacggaagagaccgtggttcaaatccctccctggagagtacatcgtctgaattgtccacctctaccagtgagggatccctgagtgccatgagtgggagaaacgagctccactcaagacttcacccacatccacagtcttctctcatccctatgatgttttccccacccgaatcgttactggcatcatgtatactccggggaaacttcgctgaagcccaccaggtgctttttacattcaacctcaagtccagtccaagctctggcgagctgatgttcatggagcggtatcaggaggtcattcaagaactggctcaggttgagcataagatcgagaaccagaatagcgacgccggaagcagcaccatccgacgaacaggttcaggacgctccaccttacaggctatcggcagcgccgcagctgccggaatggtgttctatagtatatcagacgttacagacaaactgcttaacaccagcggcgatcctatacctatgctccaggaggacttttggatcagcacagcgctggtcgagccaaccgctccgttacgggaggtgttagaggacttatctccacctgccatggcagcattcgatctggcctgttcccaatgtcagctatggaaaacctgcaagcagttgctcgagactgctgagagacgcctgaactcctctctggaacgtcgtgggcgacggattgatcacgtgctgcttaacgctgacgggattcgaggctttcctgtagtgctgcaacaaattagcaaatcacttaactatctcctgatgagtgcatcacaaactaagtcagaatccgtcgaagaaaagggcggaggcccacctcggtgctcaattaccgagttgctgcagatgtgttggccgagtttatctgaggactgcgtggcctctcacacaacactcagtcagcagctggatcaggtgctgcaaagtctacgagaggcgctagagcttcctgagccacgaactccccctcttagctcccttgttgaacaggccgctcagaaggcacccgaagccgaggctcatccagtgcagattcaaactcaactcttgcaaaaaaaccttgggaaacagaccccttccggaagcaggcagatggactatctggggaccttcttctcttactgttcaaccctggcagccgtattactgcaaagtctatcctccgaacctgaccatgtagaggtcaaggtcggtaatccgtttgtgctgttacaacagtcctcttctcaactggtgagccacctgctgtttgaaagacaggtacccccagagcgcctcgctgccctgcttgcgcaggaaaacctgagccttagcgtccctcaagtgattgtgagctgctgttgcgagcccctggctctctgtagctcaaggcaaagccaacagacaagttcactgctcacccgcctgggtacactggcccagctgcatgccagccattgcctggacgatttgcccttgagtaccccatcatccccgaggacaaccgagaatcccactctcgaacgaaaaccgtatagcagtcccagagactcgagcctgcctgccctcacctctagcgccttggctttcctgaaaagccgatccaaacttcttgctaccgtggcttgtttaggtgcctctcccagactgaaagtctctaaaccgtccctgagttggaaggaactgagagggagaagggaggttccgcttgcggctgaacaggttgcgagagagtgtgagcggcttctggagcagtttcctctgtttgaggccttcctgctggctgcctgggagcccctgagagggagcctgcagcagggtcagtcattagcagtgaacctgtgtggttgggccagcctatcgacggtgctgctaggcctgcatagccccatcgccttggacgtgctatcagaggcctttgaagagagcctagtagccagagattggagccgggcactccagctcaccgaggtgtatggacgggacgtggatgacttgagcagcatcaaagatgctgtgttgtcatgtgcagtggcatgcgataaggagggctggcagtacttgttcccggtcaaagatgcatcactccggtcccgactcgcactgcagttcgttgatagatggcccctggagagctgccttgagatactggcctactgtatcagtgataccgccgtccaagagggccttaagtgcgaactacagcgcaagctagccgaattgcaggtctaccagaaaatcctgggacttcagtcccctccagtgtggtgtgactggcagacccttaggtcctgctgcgtcgaggacccaagcacggttatgaatatgatactggaggcccaggaatatgaactttgtgaagaatggggttgtttgtatccgatcccacgcgagcacctgatttcattacaccagaagcatcttctgcatctgttggagcggagagatcacgacaaggcattacagttgttgaggcgtattccagaccctacaatgtgcctcgaggtgacagagcagtctctggatcaacacacctctttggccacatctcactttctggccaactacctgacaacccatttttacggccaacttacggctgtgagacaccgggagatccaggccctctatgtggggtctaagatcttgctcacgttaccggagcagcatcgcgcttcttactcgcatttgtcaagtaaccctctctttatgctggaacagctgttgatgaatatgaaagtcgactgggccaccgttgcagtccagacccttcagcagttattggtgggccaggagattgggttcaccatggacgaggtggactcacttctttctcgttatgcagagaaggccctggatttcccctacccacagagagagaagagatccgacagcgtcatacacttgcaggagatcgtgcaccaggctgccgacccggagacattacccagatccccaagcgccgagttttcaccggctgcaccacccggaatatcctctatccattcacccagcctgcgggagcgaagcttccctcctactcagcctagccaagagtttgtgcccccagccacacctcctgctagacatcagtgggttcccgacgagaccgagtctatatgcatggtctgttgtagagagcacttcaccatgttcaataggaggcatcactgcaggaggtgtggcagattagtgtgcagctcttgttcaacgaaaaagatggttgttgagggatgtcgagagaaccccgcaagggtctgcgaccagtgctactcctattgtaataaggatgtccccgaagagccgtctgaaaagcctgaggcactggatagcagtaaaaatgagtcgcccccatacagttttgtggtccgggttcccaaggccgacgaggtagagtggattctggacctcaaggaggaagagaacgagctcgtgagaagcgaattctactatgagcaggcaccttccgccagtctgtgcatcgcaatccttaatctccacagagatagtattgcatgcggacaccagctgattgaacactgttgtcgtttaagcaaagggctgacaaaccccgaagtggatgcagggctcctgactgatataatgaaacagttactgttctctgccaaaatgatgttcgttaaagccggacaaagccaggatctcgcgctgtgcgactcctacataagtaaagtcgatgtcctgaatattctggtggcagcagcttacagacatgtccctagtttggatcagattctgcagcccgctgccgtcacacgcctgcgtaaccagttgctggaagctgaatactatcaactgggggtagaagtttcgacaaaaactgggctcgatacgacaggggcatggcatgcgtgggggatggcgtgcttgaaggctggcaacctcaccgcagcgcgagaaaagttcagcaggtgtctgaagccccctttcgatctcaatcaactgaatcacggctcccgcttagtccaggatgtggtggagtacctggagagcacagtaagaccttttgtgtctttgcaagacgacgattacttcgcaacccttcgcgaactcgaggcgaccctgaggacacagtctctctcccttgcagtcatcccagaaggtaaaatcatgaataacacctactatcaggaatgcctcttctacttgcacaactatagcacgaatctggctattatttcgttttacgtccgccactcctgtctcagagaagcactgctacatctgctgaacaaggaatctcccccagaagtctttattgaaggtatctttcaaccttcatacaagtcaggtaagctccacaccctggagaacctgctggaatcgatagacccaactctggagagctgggggaagtatctcatagctgcctgccaacaccttcagaagaagaattattaccatatactctacgaactgcagcagttcatgaaggaccaggtgagagccgcaatgacatgtatccgcttttttagtcataaagctaaatcatacactgaattgggcgagaagctgtcctggttgctgaaggctaaggatcacttgaagatctatttgcaggagacctcccggtctagcggacgaaaaaaaaccacattttttcggaaaaaaatgaccgcggctgacgtctcgcgccacatgaataccctgcaactccagatggaggtaactcgcttccttcatagatgcgaatccgccggtaccagccagatcacaactcttccattgcctacgctgttcgggaataatcacatgaagatggatgtcgcctgtaaggtgatgctgggaggcaagaatgtggaagatgggtttggaatcgccttcagagtgctgcaagattttcaactcgatgccgcaatgacctactgtagagctgccagacagctggttgagaaagagaagtatagtgagatccaacaactgctgaagtgcgtgagcgaaagcggcatggcggcaaagagcgatggtgacacgatacttctgaactgtctcgaggcgttcaagcgaatacctcctcaggaactggaagggctcatccaggccatacacaacgatgataataaggtgagagcatatctgatatgttgtaagctccgcagtgcctacctaattgctgtgaagcaagaacactcacgcgcaactgcactggtacagcaggtacaacaggccgctaagtccagcggagacgccgtagtacaggacatctgcgcccagtggctcttgacctcccacccacgtggcgcacacgggcctggttcccggaagta

SEQ ID NO: 186051 - DNA, 7556 bp, Artificial Sequence
  derived and/or modified sequence
atgaaccacccgtttgggaaagaggaagcggcatcccagaagcaactgtttgggttcttttgtgagtgcctgaggcgcggtgaatgggaactcgctcaggcttgtgttccccagctgcaggaaggacagggcgacattccaaagcgagttgaggatattcttcaggccttagttgtatgccctaacttgctcagatgtggacaagatataaacccccagcgtgtggcctgggtctggctgcttgttctcgaaaagtggctcgctcgtgagaaaaagctgttgccggtggtgtttcgtcggaaattggagtttctactcctgtccgaggaccttcagggcgatatcccggaaaacatcctagaggaactgtacgagaccttgacgcagggggctgtcggacatgtccctgatgggaacccgcgacgggaatcctggacacccagactctcaagtgaagccgtaagtgtgctctgggatctgttgaggcagagtcctcaacccgctcaggccctcctggagctgctgttggaggaggatgatggcacagggctgtgccactggcctctgcaaaacgcgttggtcgacctgatacgtaaggcactgaggaccctgcgatgtccagctgagcctttgggagtggagctgcacctgttatgtgaggagctgctggaggcatgtcggacagaagggtcacccttgcgagaagaaaggctgctttcatgcctgttacacaaggctagcagaggactactatccctgtacggccacacatacgcagagaaggtgacagaaaaaccccctagagcaacagcttcaggaaaagtgtcgcccgatcatctggatcctgaaagggcgatgctggcactcttcagcaacccaaatcccgcagaagcctggaaagtggcatatttctattgcctgagcaacaacaagcacttccttgagcaaattctggtgacagcacttaccctgcttaaggaggaagactttcccaatctcggctgcctgctggaccgcgagtttcgtcccttgtcctgtttgctggtactgttgggttggacacattgtcagtcacttgaaagcgctaagcgtctgcttcagacacttcatcgaacacagggtcccggttgtgacgagcttctgcgggacgcttgcgatggcctatgggcgcacctggaagtattggaatggtgcatacagcagtcttcaaatcccattccaaagcgggacctgttgtatcatttacacggcggagattctcactctgtcttatacaccctgcaccacttgacaaacctcccagcacttagggaggaggacgttctgaagctcttacaaaaggtgccagccaaagacccacaacaggagccggacgccgtggatgctccagtcccagagcacctctcacagtgccaaaatttaaccctttatcaaggcttttgcgccatgaagtacgctatctacgcgctgtgcgtgaacagccaccagcattcccaatgccaggattgcaaagactcgctgtcagaggacctggcttccgccacagaaccagcaaatgactctcttagtagccctggcgctgcgaatcttttttctacgtatctggcacggtgccagcagtacttgtgtagcatcccagattctctctgtctggaacttctggagaacatcttctccctccttctcatcacctccgcagatcttcatcctgagcctcatctgcctgaagattacgcagaagatgacgacatcgaagggaagagcccttccggcctgcgaagcccatcagaatcaccgcagcacatagcacacccagagagaaaaagcgagcggggatccctcggagtgcccaaaaccttggcctacaccatgccttcacatgttaaagccgagcccaaggatagttaccctggaccccacagacattccttcctcgacctcaaacactttaccagtggaatctccgggttcctggcagatgagttcgctattggcgcattcctgagattgctccaggagcagttggatgaaatttccagccggtcacctccagagaagcctaaacaggagagtcagagttgttccgggtcccgggacggcctccagtcacggctccatcggcttagcaaagtagtaagcgaggcacagtggagacataaggtcgtcacctcgaaccacagatctgaggaacagccctcgaggcgatatcagcctgcaacaaggcacccttctttgcggaggggcagaagaacccggagaagccaagcagacggccgagataggggctctaatccttcgctggagtccacctcttccgaactcagcacatctacatccgagggaagcctgagtgcgatgtctggcaggaacgaactgcatagccgcctgcacccacatccacagagcagcttaatcccgatgatgtttagcccccctgaatcactgttagcaagctgtatactgcggggaaactttgcagaggctcatcaggtgctctttacatttaacctaaagtcttccccgtccagtggagagctcatgtttatggagcgctatcaggaggtgatacaagaacttgcacaggtagagcataagattgagaaccagaatagcgatgccggatcatcgacaatccggaggaccggtagcgggaggagtaccctgcaggccatcggtagcgctgccgcagctggcatggtgttctacagtatctccgatgtcaccgacaagttactgaacacaagcggggaccctatccctatgctacaagaagacttttggatctcaaccgccctggtcgaacctaccgcacccctccgagaagtacttgaagaccttagtccccctgcgatggccgcatttgacctggcttgtagtcaatgccagctgtggaagacttgcaaacagttactcgagaccgcggaaagacggttgaactctagtctggaaaggagaggcaggagaatcgaccatgtcttgctcaatgccgatggcattagggggtttccagtcgttctgcagcagatttcaaaatccctgaattacctgctaatgtcagctagccagacgaaatccgagtcagtggaagagaaaggaggaggccctcctcggtgttctattactgagctgctgcagatgtgttggccttcactgtccgaagattgtgtcgcatcccacaccactctgagccagcagctggaccaggttttacagtctctcagggaagctttagagttgcctgaaccacgtacacctccacttagcagtctggtcgagcaggctgctcagaaggcccctgaggctgaagcccaccctgtccaaattcagacccaactgctgcagaagaacctcggcaaacagacaccatccggaagccgtcagatggattatctcggcacatttttttcgtactgcagtactcttgccgctgtgctgctgcaatccctaagttcagagccagatcatgtggaggtgaaggtgggcaatccctttgtcctattgcagcaatctagtagtcagctggtgagtcatctgctgttcgagaggcaggtgcccccagagcgacttgcggctctgctagcacaggaaaacctcagcctgagcgtcccacaggttatcgtgtcgtgttgctgtgagcctctcgccctctgtagcagcaggcaaagccaacagacctctagtctcctgacccgcctgggcaccctggcccagctacatgcttcacactgtcttgacgatctgccgttgtcaacaccctccagccccaggaccactgagaacccgactctggagagaaagccgtactcctcccccagagactccagtttaccagccctgacctcgtcggcactggcatttttaaaatcaaggtctaaacttctggcgacggtcgcctgcctgggcgcatcaccaagactgaaagtttcgaaaccctcgctgagctggaaggagctgcgtggtcggagagaggttccgcttgccgcagagcaggtcgcaagagagtgcgagagacttctcgagcaattccctcttttcgaggcgtttttactggccgcatgggaaccactacgcggaagcctccaacagggacaatccttagcagttaacttgtgcggctgggcctccctgtctacggtgctgctggggctgcattcacccatagccctggacgtgctgagtgaagcctttgaggagagtctggtcgctagggattggagtagggcgctgcaattgaccgaagtgtacggaagagatgttgatgacctgagctctatcaaagatgcagttctgagctgcgccgtggcgtgcgacaaggaggggtggcagtatctgtttcccgtgaaagacgcctcccttcgcagtcgtctggccctccaatttgtggacaggtggcctctcgagagctgtctggaaattttagcatactgcatctcggatactgcagtgcaggaaggcctcaagtgtgagctccagcgaaagctggcagagctacaggtataccagaagatcctcggactccagtctcccccagtgtggtgcgactggcagaccttaaggtcatgttgcgtggaggacccaagcactgttatgaacatgatactggaggcccaggaatacgagctgtgcgaagaatggggttgcctgtacccgatccccagagagcatctgattagcttacaccagaaacacttactgcacctgcttgaacggagggaccatgataaagcactgcagcttctgaggcgaataccggatcccactatgtgtttggaggtgacagaacagtcactggaccagcacacctcgcttgctacgagccacttcctggcaaactacttgaccacccacttttacggacaacttaccgctgtccgccacagggagatccaagccctctacgtgggaagcaaaatactgctgacgctgcccgaacagcacagagctagctacagtcacctctcatccaaccccctgttcatgctggaacagctgcttatgaacatgaaggtcgattgggcaacagtcgcagtccagacactgcagcagctgcttgtgggacaggagatcgggttcacaatggacgaagtggactcactcttatcccgatacgcagagaaggccttggactttccctacccgcaacgcgaaaagcgaagcgactcagtcatccacttgcaggaaatcgtgcatcaggctgcagaccctgagaccctccccaggtctccatccgctgaattcagcccggctgctccccctggcattagtagcattcattctccttctttgcgggagaggagctttcctcccactcaaccttcacaggagtttgtgccgcctgctaccccacctgcgagacatcagtgggtgccagacgagacagagagtatatgtatggtttgttgtcgggagcactttaccatgttcaatcgtagacatcattgccgcagatgcggcagattagtgtgcagctcctgctcgacaaagaagatggtggtggagggctgtcgggaaaaccccgctagggtgtgtgatcagtgctacagttactgcaataaggatgtccccgaagaaccgtccgaaaaacccgaggccttagactcttccaaaaatgagtcacccccttattcctttgttgtccgcgtgcctaaggcagatgaagttgaatggattctggacttaaaggaagaggagaatgaactcgttcggtcggaattctattatgaacaggccccaagcgcatccctgtgcatcgctatacttaatcttcacagagattctattgcctgcgggcatcaacttattgagcactgctgcagattatcaaagggactcactaatcctgaggttgacgccggtttactgactgatatcatgaagcaactcctcttttcagctaaaatgatgttcgtgaaggctggtcagagtcaggatctggccctgtgcgactcttatattagcaaggtggacgtcctgaatatactcgtcgccgcagcctaccgccatgtgccctcccttgatcagatactccaaccagccgcagtgacccgtctgcggaaccaacttcttgaagccgagtactatcaacttggggtcgaggtcagtacaaagacgggcctggacactacgggggcttggcatgcttggggaatggcctgtctgaaagccggaaatttaaccgctgccagggagaagttttctcgatgtctgaaaccccctttcgacctgaatcagttaaatcacggttcccggctggttcaggacgttgttgagtacctggaatctactgtgaggccattcgtatctctgcaggacgacgactattttgccactttgagagaactcgaagccaccttaaggactcagagtttatctttggcagtcatccctgagggcaagattatgaataacacatactaccaggagtgcctattctacctccataattattctactaacctcgcgatcatcagcttctatgtgcgtcacagctgccttagagaagccctcctccaccttctgaacaaagagagtccccctgaagtttttatcgaagggattttccaaccaagctacaagagcggaaagttgcacactctggaaaatttactggagtctatcgaccctactcttgagtcctggggcaagtacctcattgccgcttgtcagcatttgcagaaaaagaattattatcacattctgtacgaactgcagcagttcatgaaggatcaggtcagagccgctatgacctgcatccggttctttagtcacaaggcaaagtcttacacggagctcggcgagaagctcagctggttgctgaaagctaaagatcacctgaagatttacttgcaggagacctcccgttccagtggccgaaagaaaaccactttcttccgcaagaagatgacggcagctgacgtgagtaggcatatgaatacattgcaacttcagatggaggtgacccggtttctccacagatgcgagagcgctggaacatcacagataaccaccctgccactaccaaccctcttcggtaataatcacatgaaaatggatgttgcctgtaaggttatgctgggcggtaagaacgtggaggacggctttggtatcgctttccgcgtgctgcaggacttccagttagacgcggcaatgacatactgtcgggcagccaggcagctagtcgagaaagagaaatacagcgagattcagcagctgctaaaatgcgtctcggaaagcggcatggcggctaagagtgacggcgatacgatcctcctcaactgcctcgaagcctttaagcgcattcccccacaggaattggaagggctgatacaggcgatacacaacgacgacaataaagtccgagcttacctgatctgctgcaaactgcgctctgcatatcttatcgcagttaaacaggaacactcgcgggcaactgcgcttgtgcagcaggtacaacaggctgctaagagctctggagacgctgtggtacaggatatttgcgctcagtggctgctaaccagtcatcccagaggagcccatggcccaggatctcgaaagta

SEQ ID NO: 186052 - DNA, 9675 bp, Artificial Sequence
  derived and/or modified sequence
actcggctcaaacatggctgcgctgagagctctattgctttgggcgccgggagcaggaggtactccgcgaatgagaacattgagaatgtgttcggcataactcatttctttgtatctccctgcactctgtgctgggaaaatgaatcatccatttggaaaagaggaagctgcttcgcagaagcagctttttggatttttctgcgaatgcctgcggaggggagaatgggagctggcacaggcatgtgtacctcagctacaggagggacaaggggatatcccaaagagggtagaagacatacttcaggcattggtggtgtgtccaaatctgctgagatgtgggcaggacatcaaccctcaaagagtagcctgggtctggcttcttgtactggagaaatggttggcccgggaaaagaagttactcccagttgttttccggagaaagcttgagtttcttttattgtcagaagacctccaaggtgacattccagagaacatcctcgaggagctgtatgagaccttaacacagggtgcagtaggccacgtgcctgacggaaatccaaggagggagagctggactcctcgtctcagctccgaagctgtctctgtgctctgggatctcctgaggcagtctccccagccagcacaggccctgctggagctcctgcttgaggaggatgacggtactggcctctgtcactggcctctgcagaatgcactggtggacctcattcgaaaggcattgcgggctttgcagggccctgattcggtgccccctggggtagtcgatgccatctatggagccctgcggactctgcgttgccccgcagaaccacttggggttgagttgcatctcctgtgtgaggaactactagaggcctgcaggaccgaggggagtcccctgcgggaggagcggctgctcagctgcctgctgcacaaggccagccggggcctgctgtccctgtatggccatacctatgcagagaaggtcacagaaaagccaccgagggctacagcctcgggaaaagtctcaccggatcatctagatcctgagcgggcaatgctagccctgttctccaatcccaacccagccgaggcttggaaagtggcctatttctactgcctgagcaacaacaaacacttcctcgagcagattctggtaacagcactaacattgttgaaagaagaagacttcccaaatcttggctgcctacttgatagagaattcaggcccctcagttgcctgcttgtactcctgggctggacacactgccagagcctagagtcagccaagaggctgctccagaccctgcacaggacccagggcccaggctgtgatgagctcctcagggatgcctgtgatgggttgtgggctcacctggaggtcctggagtggtgcatacagcagagcagcaaccccataccaaagagagatctgttgtatcatttacacggtggagacagccactcagtgctctacactctccatcaccttacaaaccttccagccctcagggaggaagatgttctcaagctcttacagaaagtgccagccaaggacccccagcaagagcctgatgcagttgatgctccagtccctgagcacctgagccagtgtcagaacctgacactctaccagggcttctgtgccatgaagtatgccatctatgccctctgtgtaaactcacaccagcactcccagtgccaggactgcaaagacagcctctctgaggacctggcctcagctacagagccagcgaatgactctctctcctccccaggtgctgcaaatctcttctcaacttacctggccaggtgtcaacagtatctgtgcagtattcctgactctctgtgcctggagcttctggaaaacatcttctcattgcttctcatcacctctgctgatcttcacccagagcctcacttgcctgaggactatgctgaggatgatgacattgaggggaagagcccctcaggtttgaggtccccatcagagagccctcagcacatagcacatcctgaaaggaagtcagaacggggttccctgggagtcccaaagacccttgcttatacaatgccaagccatgtgaaggcagagccaaaagacagttacccagggcctcataggcacagctttttggacttaaaacactttactagtggtatcagtggatttctggctgatgaatttgcaataggggccttcctcaggcttctccaagagcaactggatgagatcagtagccgcagccctcctgagaagccaaagcaagaaagtcagagctgctcaggaagcagagatggactgcagagccgcctgcatcgactttccaaggttgtctctgaggcccagtggagacacaaggtggtgacaagcaaccatcgttcagaggagcaaccttcccgaagataccagcctgccacacgtcaccccagtctccgccggggtcgtcggacaagaaggagccaggcagatggccgagacagaggttcaaacccatccctggaaagtacaagtagtgagctgagcacaagtacgtcagagggaagtctgagtgccatgtctggccggaatgagctgcacagtagattgcacccccatcctcaaagttcactcatccccatgatgttctccccacctgagtcactgctggcatcctgcatccttcgcgggaacttcgcagaagcccatcaggtgctgttcacgttcaacctgaagtcctcacccagttcaggggaactgatgttcatggagcgctaccaggaagtgatccaagaactggcccaagtagagcacaagattgaaaaccagaactcagatgcgggtagcagcaccattcggagaactggcagtggccgctcaactctacaggccattggcagcgctgcagcagcaggaatggtgttttactctatctctgacgtgactgacaagctgctcaacacctctggagaccccatccccatgctccaggaggacttttggataagcacggctctagtggagcccactgctcccctgagagaggttctggaagacctcagtccccctgccatggctgcatttgacctagcttgctctcagtgccagctctggaaaacctgcaagcagcttttggagacagccgaacggcgtttgaatagtagccttgaaaggcggggtcgacggatagaccacgtactcctaaatgctgatggcattcgaggttttccagttgttcttcagcaaatcagtaagagtctcaattatctgcttatgtcagccagtcaaaccaaatcagagagtgtggaagaaaagggaggaggccctccacggtgcagcatcactgaactgcttcagatgtgctggcccagcctaagcgaggactgtgttgccagccacaccaccctctcccagcagctagatcaggtccttcagtcactgagagaggcactagagctgccagagcccaggactcctccactgtcttccctggtggagcaggcagcccagaaagctccagaggcagaggcccaccctgtgcagatccagactcagctcctccagaagaacctgggcaaacagaccccatcaggcagcaggcagatggactacttgggcaccttcttcagttactgcagcacccttgctgcagttctccttcaaagtttgagctctgagcctgatcatgtggaggtcaaggtaggaaatccctttgttctgctgcaacagagctcttcccaactggtgtcacatctcctgtttgagagacaagttcccccagagagactggcagcccttctggcccaagagaatctcagcctaagtgtgccacaggtcatcgtcagctgctgctgtgagccccttgctctttgctcatcccggcaaagccagcagacctcctccctcctgactcgtctgggtactctggcccagctacacgcctctcactgcctggatgacctcccactttctacaccgagctccccgaggacaactgagaaccctacattggaaagaaagccctactcctccccaagggactcatcactcccagccctcacctcctctgccttggcctttcttaagtcacgctcaaagctcctagctacggtggcctgcctgggggcttccccgaggttaaaggtcagcaaacccagcttgtcatggaaggaacttcgtggccgcagggaggtgcctctggctgcagagcaggtagcccgggagtgtgagcgccttctggaacaattccctctgtttgaggccttcctcctggctgcctgggagcccctgcgagggtctttgcagcaggggcagagtctggcagtgaatctctgtggttgggccagtctttctaccgttctcctgggcctacattctcccattgccctagatgtactgagtgaggcttttgaggaatccttggtggccagagattggtcccgggcccttcagctcactgaagtgtacgggcgagatgtggacgatttgagcagcataaaggatgcagtcctgagctgtgctgtggcatgtgacaaagaaggttggcaatacctgtttcccgtgaaggatgcatctctgagaagtcggctggccctacagtttgtggacaggtggcccctggagtcatgcctggagattctggcctactgcatttcagacacggctgtccaagaaggactaaagtgtgagctacagaggaagctggcggagctgcaggtgtatcagaagattctgggtttgcagtctcccccagtgtggtgtgactggcagaccttgaggagctgttgtgttgaggacccatcaactgtcatgaacatgattctagaagcacaggagtatgaactgtgtgaagagtggggctgcctgtaccccattccaagagaacatttaatcagccttcatcaaaagcatcttctccaccttctagaaagaagagatcatgacaaggctctgcaactcctgcgaagaatccctgaccccaccatgtgccttgaagtgacagagcaatccctcgaccagcacactagcttggccacttctcacttcttggccaactacctcaccacccacttctatggacaactgactgctgtccgacaccgtgaaatccaggcgctgtatgtgggatccaagattctgctgaccctgcctgagcagcaccgggccagctattcccacttgtcctctaaccccctgttcatgctggagcagctgcttatgaacatgaaggtggattgggccactgtggctgtgcagactctccagcagctgctggttggacaggagattggcttcactatggacgaggtggactcactgctttccagatacgcagagaaagccctggactttccataccctcagagggagaaacgatcagattctgtgattcacctccaagaaattgtccaccaggctgcagatcccgagaccctccctagatcaccatcagcagagttctctcctgctgctcctcctggtatctccagtatacattcccctagtctaagggaaaggagtttcccaccaacccagccctcacaggaatttgtgcccccagcgacaccccctgccaggcaccagtgggtaccggatgagactgagagtatctgcatggtctgctgcagggagcacttcaccatgtttaacaggcgtcatcattgtcgccgctgtggccggctagtgtgcagctcctgctccactaagaaaatggtggttgaaggctgcagagagaaccctgctcgtgtgtgtgatcagtgctatagttactgcaacaaagatgtaccagaggagccttcagaaaaaccagaagctctagacagctccaagaatgaaagccctccatactcgtttgtggtgagagtccccaaagcagatgaggtggaatggattttggatctcaaagaggaggaaaatgagctggtgcggagtgaattttactatgagcaggcccccagcgcctccttgtgcattgccatcctgaatctgcaccgggacagcattgcctgtggtcaccagctgattgagcactgctgcaggctctccaagggcctcaccaacccagaggtggatgccgggctgctcacggacatcatgaagcagctgctgttcagcgccaagatgatgttcgtcaaagccggccagagccaagacttggctctttgtgacagctacatcagcaaggtagatgtgctgaatattttagttgctgctgcctatcgccacgtgccatctttggatcagatcttgcagccagctgcagtaaccaggctaaggaaccagcttttggaagccgagtactaccaactgggcgttgaggtctccacaaagactgggcttgataccaccggggcgtggcatgcttggggcatggcctgcctcaaagccgggaacctcactgctgcacgggagaagttcagtcgctgtctgaagcccccatttgacctcaatcagctgaatcatggctcaaggctggtgcaggatgtggttgagtacctagagtccacagtgaggccctttgtatccttgcaagatgacgattactttgccaccctgagggaactggaagctacccttcggacgcagagcctttctctggcagtgattcctgaagggaaaatcatgaacaacacctactaccaggaatgcctcttctacctgcacaactatagcaccaacctggccatcatcagcttctacgtgaggcacagctgcctgcgggaagctcttctgcaccttctcaacaaggagagtcctccagaagtttttatagaaggcattttccaaccaagctataaaagtgggaagctacacactttggagaacttgctagaatccattgatccaaccttggagagctggggaaagtacttgattgctgcctgccaacatttacagaagaagaactactaccacattctgtatgagctgcagcagtttatgaaggaccaagttcgggccgccatgacctgtattcggttcttcagtcacaaagcaaagtcatatacagaactgggagagaagctctcatggctacttaaggccaaggaccacctgaagatctacctccaagaaacatcccgcagctctggaaggaagaaaaccacattcttcagaaagaagatgactgcagctgatgtgtcaaggcacatgaacacacttcagctgcagatggaagtgaccaggttcttgcatcggtgcgaaagtgctgggacctctcaaatcaccactttgcctctgccaaccctgtttggaaataaccacatgaaaatggatgttgcctgcaaggtcatgctgggagggaaaaatgtagaagatggttttggaattgctttccgtgttctgcaggacttccagctggatgctgccatgacctactgcagagctgcccgccagttggtggagaaagagaagtacagtgagatccagcaactgctcaaatgtgtcagtgagtcaggcatggcagccaaaagtgacggggacaccatcctcctcaactgcctggaagcgttcaagagaattccgccccaggagctggagggcctgatccaggcaatacacaatgatgacaacaaggttcgggcctacctgatatgttgcaaactgcgttctgcctacttgattgctgtgaagcaagaacactcacgggccacagcccttgtccagcaggtgcagcaggccgccaagagcagcggggatgcagtagtgcaagacatctgtgcccagtggcttctgacaagccacccccggggtgcccatggcccaggctccaggaagtgaccttgggcagtggggccaggaacacgtggcctgagagctgggcaacagcagtgatggcgatgccctccacctctttcctccagtggagtgggacttctctggctctgccctaggttggaaagagttggattggaccctacttgccttcccgggcaaggataggacctttcacgcaagtgccatgtttctctaaaattgtggaatctatgtgtgtttgtctggagatggccagttctttctacctcagagtgagtgagtgagtatgtgtgcacacacgtgtgcatgttcctgtgcgctgatgtttacgcccaagcatttctgaacaaatgaaactcttctccatttaaaagaggcactttactttagacttgccactctgaaaaccttccctgcgttttggttcttgacccgggttgtcctgtttgtatagtcccccctctgtggacgtgctttagtagctcctcttacctagagggcttttacagagaattagagcaacaccaaaaggattgcctcttttccttccttcccattccaaaattcagagatggctttggggcaagtgctacctgtggaataaacctgttttccaggtgtctcttctcccaagcacaagaagtcctggagtctttggaaggtagtctgaatagaagggttttcaggtgcaggcatctgaaagctgtgggtatgtgtataaatgatcaggtctgtgaggctaacacgggcaagagggaaagaaaggctaaccatccaaacagggatacaggggaggcggtggggggtggtggggggagcgggtgctcacaagcacagagctgcctgttgtgaatgtccctgctgcaaagttggtgggtgagagaatgggacttcctctttgagagtctggggagagaaaaggtggccaggatcctaggactgaatgactcgattttacctatttgagctgcagtcctgtttgcgctccttgaattggttaggaagctgcttccttttccctcctgcttcccttcagtctcttcaggaccacaggatggatatgcagacatgtggggtcattgggaagggagtgcgcttcttttctctgtcttagaaaagggagtcaagggttggctttggaattgggcctctggacagagtcagaatgagggaataatgaataggtcacatctggttggtggaaaactaggtgaagtgcttctttaatatgcactgtcttgtcttcccacgcaagatgtgacaatgtttgagaaaaggtgtgtcatactcagtgacttcaatttgcaaatgtggggcctaaagaaagctctgcagctctgaacctctcactggccagagctcagcctattggtcccatccatgatgctgagacaaacagaaactggaagctgaagtcagtgtctctggtgctcagaaaccctgtggatttccctctgaaccaagatttttagtagtaaaataaacaactcatggacatctgtcagatgagaagttttggtcctgttagagaggagaaagactgtaatgaaactactagacccatttgggctaaagtttggcttttccttccttgagtcatagaacgtatccatctcccaggaaatgtccttctctggcgtctgcttgcccttctgagtctgccttttttgcactgaacataagcactttatactaatgggtcacaaatcttgcagcccttaatttgggataagaccagattttcctgacattttcctctaactcattgaactatcaaattataggcaaccactgactagactgatatgagatgaggctaaaagcctttgaacaccacgctgtagtctccaacagaaaaacaccaccaaaacagatacccatgttgaggggttgaatgttttactacaaacaagccacaataaagtgtctatcaacatgtt

SEQ ID NO: 186053 - DNA, 9612 bp, Artificial Sequence
  derived and/or modified sequence
actcggctcaaacatggctgcgctgagagctctattgctttgggcgccgggagcaggaggtactccgcgaatgagaacattgagaatgtgttcggcataactcatttctttgtatctccctgcactctgtgctgggaaaatgaatcatccatttggaaaagaggaagctgcttcgcagaagcagctttttggatttttctgcgaatgcctgcggaggggagaatgggagctggcacaggcatgtgtacctcagctacaggagggacaaggggatatcccaaagagggtagaagacatacttcaggcattggtggtgtgtccaaatctgctgagatgtgggcaggacatcaaccctcaaagagtagcctgggtctggcttcttgtactggagaaatggttggcccgggaaaagaagttactcccagttgttttccggagaaagcttgagtttcttttattgtcagaagacctccaaggtgacattccagagaacatcctcgaggagctgtatgagaccttaacacagggtgcagtaggccacgtgcctgacggaaatccaaggagggagagctggactcctcgtctcagctccgaagctgtctctgtgctctgggatctcctgaggcagtctccccagccagcacaggccctgctggagctcctgcttgaggaggatgacggtactggcctctgtcactggcctctgcagaatgcactggtggacctcattcgaaaggcattgcggactctgcgttgccccgcagaaccacttggggttgagttgcatctcctgtgtgaggaactactagaggcctgcaggaccgaggggagtcccctgcgggaggagcggctgctcagctgcctgctgcacaaggccagccggggcctgctgtccctgtatggccatacctatgcagagaaggtcacagaaaagccaccgagggctacagcctcgggaaaagtctcaccggatcatctagatcctgagcgggcaatgctagccctgttctccaatcccaacccagccgaggcttggaaagtggcctatttctactgcctgagcaacaacaaacacttcctcgagcagattctggtaacagcactaacattgttgaaagaagaagacttcccaaatcttggctgcctacttgatagagaattcaggcccctcagttgcctgcttgtactcctgggctggacacactgccagagcctagagtcagccaagaggctgctccagaccctgcacaggacccagggcccaggctgtgatgagctcctcagggatgcctgtgatgggttgtgggctcacctggaggtcctggagtggtgcatacagcagagcagcaaccccataccaaagagagatctgttgtatcatttacacggtggagacagccactcagtgctctacactctccatcaccttacaaaccttccagccctcagggaggaagatgttctcaagctcttacagaaagtgccagccaaggacccccagcaagagcctgatgcagttgatgctccagtccctgagcacctgagccagtgtcagaacctgacactctaccagggcttctgtgccatgaagtatgccatctatgccctctgtgtaaactcacaccagcactcccagtgccaggactgcaaagacagcctctctgaggacctggcctcagctacagagccagcgaatgactctctctcctccccaggtgctgcaaatctcttctcaacttacctggccaggtgtcaacagtatctgtgcagtattcctgactctctgtgcctggagcttctggaaaacatcttctcattgcttctcatcacctctgctgatcttcacccagagcctcacttgcctgaggactatgctgaggatgatgacattgaggggaagagcccctcaggtttgaggtccccatcagagagccctcagcacatagcacatcctgaaaggaagtcagaacggggttccctgggagtcccaaagacccttgcttatacaatgccaagccatgtgaaggcagagccaaaagacagttacccagggcctcataggcacagctttttggacttaaaacactttactagtggtatcagtggatttctggctgatgaatttgcaataggggccttcctcaggcttctccaagagcaactggatgagatcagtagccgcagccctcctgagaagccaaagcaagaaagtcagagctgctcaggaagcagagatggactgcagagccgcctgcatcgactttccaaggttgtctctgaggcccagtggagacacaaggtggtgacaagcaaccatcgttcagaggagcaaccttcccgaagataccagcctgccacacgtcaccccagtctccgccggggtcgtcggacaagaaggagccaggcagatggccgagacagaggttcaaacccatccctggaaagtacaagtagtgagctgagcacaagtacgtcagagggaagtctgagtgccatgtctggccggaatgagctgcacagtagattgcacccccatcctcaaagttcactcatccccatgatgttctccccacctgagtcactgctggcatcctgcatccttcgcgggaacttcgcagaagcccatcaggtgctgttcacgttcaacctgaagtcctcacccagttcaggggaactgatgttcatggagcgctaccaggaagtgatccaagaactggcccaagtagagcacaagattgaaaaccagaactcagatgcgggtagcagcaccattcggagaactggcagtggccgctcaactctacaggccattggcagcgctgcagcagcaggaatggtgttttactctatctctgacgtgactgacaagctgctcaacacctctggagaccccatccccatgctccaggaggacttttggataagcacggctctagtggagcccactgctcccctgagagaggttctggaagacctcagtccccctgccatggctgcatttgacctagcttgctctcagtgccagctctggaaaacctgcaagcagcttttggagacagccgaacggcgtttgaatagtagccttgaaaggcggggtcgacggatagaccacgtactcctaaatgctgatggcattcgaggttttccagttgttcttcagcaaatcagtaagagtctcaattatctgcttatgtcagccagtcaaaccaaatcagagagtgtggaagaaaagggaggaggccctccacggtgcagcatcactgaactgcttcagatgtgctggcccagcctaagcgaggactgtgttgccagccacaccaccctctcccagcagctagatcaggtccttcagtcactgagagaggcactagagctgccagagcccaggactcctccactgtcttccctggtggagcaggcagcccagaaagctccagaggcagaggcccaccctgtgcagatccagactcagctcctccagaagaacctgggcaaacagaccccatcaggcagcaggcagatggactacttgggcaccttcttcagttactgcagcacccttgctgcagttctccttcaaagtttgagctctgagcctgatcatgtggaggtcaaggtaggaaatccctttgttctgctgcaacagagctcttcccaactggtgtcacatctcctgtttgagagacaagttcccccagagagactggcagcccttctggcccaagagaatctcagcctaagtgtgccacaggtcatcgtcagctgctgctgtgagccccttgctctttgctcatcccggcaaagccagcagacctcctccctcctgactcgtctgggtactctggcccagctacacgcctctcactgcctggatgacctcccactttctacaccgagctccccgaggacaactgagaaccctacattggaaagaaagccctactcctccccaagggactcatcactcccagccctcacctcctctgccttggcctttcttaagtcacgctcaaagctcctagctacggtggcctgcctgggggcttccccgaggttaaaggtcagcaaacccagcttgtcatggaaggaacttcgtggccgcagggaggtgcctctggctgcagagcaggtagcccgggagtgtgagcgccttctggaacaattccctctgtttgaggccttcctcctggctgcctgggagcccctgcgagggtctttgcagcaggggcagagtctggcagtgaatctctgtggttgggccagtctttctaccgttctcctgggcctacattctcccattgccctagatgtactgagtgaggcttttgaggaatccttggtggccagagattggtcccgggcccttcagctcactgaagtgtacgggcgagatgtggacgatttgagcagcataaaggatgcagtcctgagctgtgctgtggcatgtgacaaagaaggttggcaatacctgtttcccgtgaaggatgcatctctgagaagtcggctggccctacagtttgtggacaggtggcccctggagtcatgcctggagattctggcctactgcatttcagacacggctgtccaagaaggactaaagtgtgagctacagaggaagctggcggagctgcaggtgtatcagaagattctgggtttgcagtctcccccagtgtggtgtgactggcagaccttgaggagctgttgtgttgaggacccatcaactgtcatgaacatgattctagaagcacaggagtatgaactgtgtgaagagtggggctgcctgtaccccattccaagagaacatttaatcagccttcatcaaaagcatcttctccaccttctagaaagaagagatcatgacaaggctctgcaactcctgcgaagaatccctgaccccaccatgtgccttgaagtgacagagcaatccctcgaccagcacactagcttggccacttctcacttcttggccaactacctcaccacccacttctatggacaactgactgctgtccgacaccgtgaaatccaggcgctgtatgtgggatccaagattctgctgaccctgcctgagcagcaccgggccagctattcccacttgtcctctaaccccctgttcatgctggagcagctgcttatgaacatgaaggtggattgggccactgtggctgtgcagactctccagcagctgctggttggacaggagattggcttcactatggacgaggtggactcactgctttccagatacgcagagaaagccctggactttccataccctcagagggagaaacgatcagattctgtgattcacctccaagaaattgtccaccaggctgcagatcccgagaccctccctagatcaccatcagcagagttctctcctgctgctcctcctggtatctccagtatacattcccctagtctaagggaaaggagtttcccaccaacccagccctcacaggaatttgtgcccccagcgacaccccctgccaggcaccagtgggtaccggatgagactgagagtatctgcatggtctgctgcagggagcacttcaccatgtttaacaggcgtcatcattgtcgccgctgtggccggctagtgtgcagctcctgctccactaagaaaatggtggttgaaggctgcagagagaaccctgctcgtgtgtgtgatcagtgctatagttactgcaacaaagatgtaccagaggagccttcagaaaaaccagaagctctagacagctccaagaatgaaagccctccatactcgtttgtggtgagagtccccaaagcagatgaggtggaatggattttggatctcaaagaggaggaaaatgagctggtgcggagtgaattttactatgagcaggcccccagcgcctccttgtgcattgccatcctgaatctgcaccgggacagcattgcctgtggtcaccagctgattgagcactgctgcaggctctccaagggcctcaccaacccagaggtggatgccgggctgctcacggacatcatgaagcagctgctgttcagcgccaagatgatgttcgtcaaagccggccagagccaagacttggctctttgtgacagctacatcagcaaggtagatgtgctgaatattttagttgctgctgcctatcgccacgtgccatctttggatcagatcttgcagccagctgcagtaaccaggctaaggaaccagcttttggaagccgagtactaccaactgggcgttgaggtctccacaaagactgggcttgataccaccggggcgtggcatgcttggggcatggcctgcctcaaagccgggaacctcactgctgcacgggagaagttcagtcgctgtctgaagcccccatttgacctcaatcagctgaatcatggctcaaggctggtgcaggatgtggttgagtacctagagtccacagtgaggccctttgtatccttgcaagatgacgattactttgccaccctgagggaactggaagctacccttcggacgcagagcctttctctggcagtgattcctgaagggaaaatcatgaacaacacctactaccaggaatgcctcttctacctgcacaactatagcaccaacctggccatcatcagcttctacgtgaggcacagctgcctgcgggaagctcttctgcaccttctcaacaaggagagtcctccagaagtttttatagaaggcattttccaaccaagctataaaagtgggaagctacacactttggagaacttgctagaatccattgatccaaccttggagagctggggaaagtacttgattgctgcctgccaacatttacagaagaagaactactaccacattctgtatgagctgcagcagtttatgaaggaccaagttcgggccgccatgacctgtattcggttcttcagtcacaaagcaaagtcatatacagaactgggagagaagctctcatggctacttaaggccaaggaccacctgaagatctacctccaagaaacatcccgcagctctggaaggaagaaaaccacattcttcagaaagaagatgactgcagctgatgtgtcaaggcacatgaacacacttcagctgcagatggaagtgaccaggttcttgcatcggtgcgaaagtgctgggacctctcaaatcaccactttgcctctgccaaccctgtttggaaataaccacatgaaaatggatgttgcctgcaaggtcatgctgggagggaaaaatgtagaagatggttttggaattgctttccgtgttctgcaggacttccagctggatgctgccatgacctactgcagagctgcccgccagttggtggagaaagagaagtacagtgagatccagcaactgctcaaatgtgtcagtgagtcaggcatggcagccaaaagtgacggggacaccatcctcctcaactgcctggaagcgttcaagagaattccgccccaggagctggagggcctgatccaggcaatacacaatgatgacaacaaggttcgggcctacctgatatgttgcaaactgcgttctgcctacttgattgctgtgaagcaagaacactcacgggccacagcccttgtccagcaggtgcagcaggccgccaagagcagcggggatgcagtagtgcaagacatctgtgcccagtggcttctgacaagccacccccggggtgcccatggcccaggctccaggaagtgaccttgggcagtggggccaggaacacgtggcctgagagctgggcaacagcagtgatggcgatgccctccacctctttcctccagtggagtgggacttctctggctctgccctaggttggaaagagttggattggaccctacttgccttcccgggcaaggataggacctttcacgcaagtgccatgtttctctaaaattgtggaatctatgtgtgtttgtctggagatggccagttctttctacctcagagtgagtgagtgagtatgtgtgcacacacgtgtgcatgttcctgtgcgctgatgtttacgcccaagcatttctgaacaaatgaaactcttctccatttaaaagaggcactttactttagacttgccactctgaaaaccttccctgcgttttggttcttgacccgggttgtcctgtttgtatagtcccccctctgtggacgtgctttagtagctcctcttacctagagggcttttacagagaattagagcaacaccaaaaggattgcctcttttccttccttcccattccaaaattcagagatggctttggggcaagtgctacctgtggaataaacctgttttccaggtgtctcttctcccaagcacaagaagtcctggagtctttggaaggtagtctgaatagaagggttttcaggtgcaggcatctgaaagctgtgggtatgtgtataaatgatcaggtctgtgaggctaacacgggcaagagggaaagaaaggctaaccatccaaacagggatacaggggaggcggtggggggtggtggggggagcgggtgctcacaagcacagagctgcctgttgtgaatgtccctgctgcaaagttggtgggtgagagaatgggacttcctctttgagagtctggggagagaaaaggtggccaggatcctaggactgaatgactcgattttacctatttgagctgcagtcctgtttgcgctccttgaattggttaggaagctgcttccttttccctcctgcttcccttcagtctcttcaggaccacaggatggatatgcagacatgtggggtcattgggaagggagtgcgcttcttttctctgtcttagaaaagggagtcaagggttggctttggaattgggcctctggacagagtcagaatgagggaataatgaataggtcacatctggttggtggaaaactaggtgaagtgcttctttaatatgcactgtcttgtcttcccacgcaagatgtgacaatgtttgagaaaaggtgtgtcatactcagtgacttcaatttgcaaatgtggggcctaaagaaagctctgcagctctgaacctctcactggccagagctcagcctattggtcccatccatgatgctgagacaaacagaaactggaagctgaagtcagtgtctctggtgctcagaaaccctgtggatttccctctgaaccaagatttttagtagtaaaataaacaactcatggacatctgtcagatgagaagttttggtcctgttagagaggagaaagactgtaatgaaactactagacccatttgggctaaagtttggcttttccttccttgagtcatagaacgtatccatctcccaggaaatgtccttctctggcgtctgcttgcccttctgagtctgccttttttgcactgaacataagcactttatactaatgggtcacaaatcttgcagcccttaatttgggataagaccagattttcctgacattttcctctaactcattgaactatcaaattataggcaaccactgactagactgatatgagatgaggctaaaagcctttgaacaccacgctgtagtctccaacagaaaaacaccaccaaaacagatacccatgttgaggggttgaatgttttactacaaacaagccacaataaagtgtctatcaacatgtt

SEQ ID NO: 186054 - protein, 1052 aa, Artificial Sequence
  derived and/or modified sequence
MREAAERRQQLQLEHDQALAVLSAKQQEIDLLQKSKVRELEEKCRTQSEQFNLLSRDLEKFRQHAGKIDLLGGSAVAPLDISTAPSKPFPQFMNGLATSLGKGQESAIGGSSAIGEYIRPLPQPGDRPEPLSAKPTFLSRSGSARCRSESDMENERNSNTSKQRYSGKVHLCVARYSYNPFDGPNENPEAELPLTAGKYLYVYGDMDEDGFYEGELLDGQRGLVPSNFVDFVQDNESRLASTLGNEQDQNFINHSGIGLEGEHILDLHSPTHIDAGITDNSAGTLDVNIDDIGEDIVPYPRKITLIKQLAKSVIVGWEPPAVPPGWGTVSSYNVLVDKETRMNLTLGSRTKALIEKLNMAACTYRISVQCVTSRGSSDELQCTLLVGKDVVVAPSHLRVDNITQISAQLSWLPTNSNYSHVIFLNEEEFDIVKAARYKYQFFNLRPNMAYKVKVLAKPHQMPWQLPLEQREKKEAFVEFSTLPAGPPAPPQDVTVQAGVTPATIRVSWRPPVLTPTGLSNGANVTGYGVYAKGQRVAEVIFPTADSTAVELVRLRSLEAKGVTVRTLSAQGESVDSAVAAVPPELLVPPTPHPRPAPQSKPLASSGVPETKDEHLGPHARMDEAWEQSRAPGPVHGHMLEPPVGPGRRSPSPSRILPQPQGTPVSTTVAKAMAREAAQRVAESSRLEKRSVFLERSSAGQYAASDEEDAYDSPDFKRRGASVDDFLKGSELGKQPHCCHGDEYHTESSRGSDLSDIMEEDEEELYSEMQLEDGGRRRPSGTSHNALKILGNPASAGRVDHMGRRFPRGSAGPQRSRPVTVPSIDDYGRDRLSPDFYEESETDPGAEELPARIFVALFDYDPLTMSPNPDAAEEELPFKEGQIIKVYGDKDADGFYRGETCARLGLIPCNMVSEIQADDEEMMDQLLRQGFLPLNTPVEKIERSRRSGRRHSVSTRRMVALYDYDPRESSPNVDVEAELTFCTGDIITVFGEIDEDGFYYGELNGQKGLVPSNFLEEVPDDVEVYLSDAPSHYSQDTPMRSKAKRKKSVHFTP

SEQ ID NO: 186055 - DNA, 3159 bp, Artificial Sequence
  derived and/or modified sequence
atgcgagaggccgcagaacggagacaacagctgcagttggagcacgaccaagccctggccgtgctctctgccaagcagcaggaaatcgacttactacagaagtcaaaagtccgcgagctagaggaaaaatgtcgcactcagtctgagcagttcaacctgttgtcccgtgacttggagaagttccgccagcatgctggcaaaatcgatttgctgggcggctcagccgttgctccactcgatatcagcacagccccaagcaagccatttccccagttcatgaatggtctggctaccagtctgggaaaaggacaggagtccgcaataggcggaagcagcgctatcggtgaatacattcggccactccctcaaccaggagacagaccagaacccttatcagccaagccaaccttcttgagccgctctggtagtgctcgctgtcggtcggagtccgacatggagaatgaacgcaatagtaacacatctaagcagagatattcgggaaaggtacacctttgcgtagcccgttattcttataatcccttcgacggccccaacgagaatcctgaagccgagctccctttgaccgccggtaaatacctgtatgtgtatggtgatatggacgaagatgggttctacgagggagaactgctggatggacaacggggcctcgtcccctcaaactttgtggattttgtacaggataacgaatctcgactagcttccacactgggtaacgaacaagatcaaaattttataaaccacagtgggattgggcttgagggtgaacatatattagacctgcacagtccaacgcacatcgatgcaggtattactgataattccgcaggcactttagacgtgaacatcgatgatattggcgaagacatagttccataccctcgtaagatcacactaatcaagcagctggcgaagagcgtcattgttggctgggagccaccggctgtccccccaggctgggggactgtgtcctcttataatgtgctggtcgataaggaaacgcgtatgaacctaacactcggatctcgaacgaaagccttgatcgagaaattgaacatggctgcgtgcacgtatcgtattagcgtacagtgtgttacctcaagggggtcgtcggacgaactgcagtgtacacttctcgtgggcaaggacgtcgtggtcgccccatcccacctcagagtggataacatcacccagatctccgcccaactcagctggctccctacgaattcaaactatagccatgttatttttctaaatgaggaggagttcgatatcgtgaaggccgccaggtacaaatatcagttttttaatctgcgacccaacatggcgtacaaggtgaaggtgctggctaagcctcaccagatgccctggcagctgcccctagagcaacgtgagaagaaggaggcgtttgtcgaattcagtacgctaccagccggtcctcccgctcctcctcaggatgtgacagttcaggccggagttactccggctacaataagagtttcatggcgccctcccgtgctaactccaacgggattgagcaatggcgccaatgtgactggctatggagtctatgcaaaagggcagagggtggcggaagtcatctttcccactgctgactccaccgcagtggaactagttcggcttcgcagcctggaggcaaagggtgttacagtgagaaccctgtctgctcagggcgaatctgtcgatagcgcagtggccgctgtgcctcctgagctactggtcccacccacacctcacccacggcccgccccacaaagtaaacccctggcctcttctggggtacccgaaacaaaggatgagcacctgggcccccatgctcgtatggatgaagcctgggagcagtcccgcgcccccggccctgtgcacggacacatgcttgaaccccccgtagggcctggaagaagatccccttcgcctagccgcatcctgcctcaaccacagggaactccagtgtccactacagtagccaaggcaatggcaagggaggccgcccagcgagtcgccgagagcagccggcttgaaaagaggagcgtgtttctggaacgctcaagcgctgggcagtacgccgcttcagacgaggaggacgcatacgatagtcccgactttaaaaggagaggtgcctcagtcgatgatttcttgaaaggaagtgagttgggaaaacagccgcactgctgtcacggggacgaatatcacactgagtctagtaggggcagcgatctatctgatatcatggaggaggatgaggaggaactgtattccgaaatgcagttggaggacggaggacggaggcggcccagcggaacaagccataatgccttgaaaattctgggcaacccagcctccgcaggacgagtcgaccacatgggacgacgctttcccaggggaagcgctggtccacagagatccaggccagtgacagtgccctcgatcgacgattacggccgggatcggctaagcccggatttttacgaggagtccgagacggaccccggcgccgaagagctcccagcccgtattttcgtcgccttattcgattatgaccccctaaccatgagtcccaacccagatgcggctgaggaagagctgccttttaaagagggacagatcataaaagtatatggagataaagacgcagacggcttttatagaggggaaacatgcgctaggctcggcctgatcccttgcaacatggtgtcggaaattcaagctgacgacgaggaaatgatggatcagctgctgagacaaggcttcctgccccttaatacgcccgttgagaagatcgagagaagtcgaagaagcggaagaagacattctgtatctacacgccggatggtggcactctacgactatgatccgcgggagtccagtccgaacgtcgacgtagaggcagagctaacgttttgcacaggagacattatcacggttttcggagaaattgacgaagatgggttctactacggcgagctgaacggccagaaagggcttgttccgagtaatttcctcgaagaggtccccgacgacgtagaggtttacttgtctgacgctccttctcactattcacaggacaccccaatgcggtcaaaagccaagagaaaaaaatccgtccacttcactccgtag

SEQ ID NO: 186056 - DNA, 3159 bp, Artificial Sequence
  derived and/or modified sequence
atgagggaggccgctgagcggcggcagcagctgcagctggagcatgaccaggccctggccgtgctgagcgccaagcagcaggagattgacctgctgcagaagagcaaggtgcgggagctggaggagaagtgcaggacccagagcgagcagttcaacctgctgagccgggacctggagaagttccggcagcacgccggcaagattgacctgctgggcggcagcgctgtggcccccctggacatcagcacagcccccagcaagcccttcccccagttcatgaatggcctggccaccagcctgggcaagggccaggagagcgccatcggcggcagcagcgccatcggggagtacatccggcccctgccccagcccggggacaggcctgagcccctgagcgccaagcccaccttcctgagccgcagcggcagcgcccgctgccgctctgagagtgacatggagaatgaaagaaacagcaacaccagcaagcagcgctacagcggcaaggtgcacctgtgtgtggcccgctacagctacaacccctttgatggccccaatgaaaatcctgaggccgagctgcccctgacagctgggaagtacctgtatgtgtatggagacatggatgaagatggcttctatgaaggagagctgctggatggccagaggggcctggtgcccagcaactttgtggactttgtgcaggacaatgaaagccggctggccagcaccctgggcaatgagcaggaccagaacttcatcaaccacagcggcatcggcctggagggggagcacatcctggacctgcacagccccacccacattgatgctggcatcacagacaacagcgctggcaccctggatgtgaacattgatgacatcggggaggacatcgtgccctaccccaggaagatcaccctcatcaagcagctggccaagagcgtcatcgtgggctgggagcccccagctgtgcccccaggctggggcaccgtgtcctcctacaacgtgctggtggacaaggagaccaggatgaacctgaccctgggcagcaggaccaaggccctgattgagaagctgaacatggccgcctgcacctaccgcatctctgtgcagtgtgtgaccagccggggcagcagtgatgagctgcagtgcaccctgctggtgggcaaggatgtggtggtggcccccagccacctgcgggtggacaacatcacccagatcagcgcccagctgtcctggctgcccaccaacagcaactacagccacgtgatcttcctgaatgaggaggagtttgatattgtgaaggccgcccgctacaagtaccagttcttcaacctgcggcccaacatggcctacaaggtgaaggtgctggccaagccccaccagatgccctggcagctgcccctggagcagcgggagaagaaggaggcctttgtggagttcagcaccctgcctgctggccccccagccccaccccaggatgtgacagtgcaggccggcgtgaccccagccaccatccgggtgtcctggaggcctcctgtgctgacccccaccggcctgagcaatggagccaacgtgacaggctatggagtgtatgccaagggccagagggtggccgaggtgatcttccccacagctgacagcacagctgtggagctggtgcggctgcggagcctggaggccaagggcgtgacagtgaggaccctgagcgcccagggcgagagcgtggacagcgctgtggccgctgtgcccccagagctgctggtgccccccaccccccaccccaggcctgccccccagagcaagcccctggccagcagtggagtgcctgagaccaaggatgagcacctgggcccccacgccaggatggatgaggcctgggagcagagccgggcccctggccctgtgcacggccacatgctggagccccctgtgggccctggaagaagaagccccagccccagccgcatcctgccccagccccagggcacccctgtgtccaccaccgtggccaaggccatggcccgggaggccgcccagagggtggccgagagcagccggctggagaagaggagcgtcttcctggagaggagcagcgctggccagtatgctgccagtgatgaagaagatgcctatgacagcccagacttcaagagaagaggagcctctgtggatgacttcctgaagggcagcgagctgggcaagcagccccactgctgccacggagatgagtaccacacagagagcagccggggcagtgacctgagtgacatcatggaggaggatgaggaggagctgtacagcgagatgcagctggaggatggcggcagaagaagaccttctggcaccagccacaatgccctgaagatcctgggcaacccagccagcgctggccgggtggaccacatgggccgccgcttcccccggggcagcgctggcccccagaggagcaggcctgtgacagtgcccagcattgatgattatggccgggaccggctgagcccagacttctatgaggagagcgagacagatcctggagctgaggagctgcctgcccgcatctttgtggccctgtttgattatgaccccctgaccatgagccccaacccagatgctgctgaggaggagctgcccttcaaggagggccagatcatcaaggtgtatggagacaaggatgctgatggcttctacagaggagagacctgtgcccggctgggcctcatcccctgcaacatggtgtctgagatccaggctgatgatgaggagatgatggaccagctgctgcggcagggcttcctgcccctgaacacccctgtggagaagattgaaagaagccgccgcagcggccgccgccacagcgtgtccaccaggaggatggtggccctgtatgactatgacccccgggagagcagccccaacgtggatgtggaggccgagctgaccttctgcaccggggacatcatcaccgtgtttggagaaattgatgaagatggcttctactatggagagctgaatggccagaagggcctggtgcccagcaacttcctggaggaggtgcctgatgatgtggaggtgtacctgagtgatgcccccagccactacagccaggacacccccatgaggagcaaggccaagaggaagaagtctgtgcacttcaccccctag

SEQ ID NO: 186057 - DNA, 3159 bp, Artificial Sequence
  derived and/or modified sequence
atgcgggaggccgccgagcggcggcagcagctgcagctggagcacgaccaggcccttgccgtgctctcagcaaagcagcaagagatcgatcttctgcaaaagtctaaagtgcgggagctggaggaaaagtgtcgtacccagtcagagcagtttaatttgctgtccagagacctcgaaaaattcagacaacatgccggaaagatagacctactgggaggcagtgccgtggcccccttggatatttctacagctccatctaaacccttcccacagttcatgaatggattagccacaagccttggcaaaggacaggagtccgccattggtggctctagcgctatcggagagtatatccgacccctgccccagccaggggaccggcctgagccgctttccgccaagcccacttttctgtcaagatcaggctctgctcgatgccggtcagagagcgatatggaaaacgaaaggaactcgaatacatcaaaacagagatattccggaaaggtgcatttgtgtgtggctcgctacagttacaacccgttcgatggtcctaatgagaaccccgaagccgaactgccactgactgctggaaagtatttgtacgtttacggggacatggacgaagatggcttttatgagggggagcttctggacggtcaacgcggactagtgccctctaacttcgtggattttgtgcaggataacgaatctagactggcgagtactcttggcaacgaacaggaccaaaatttcattaatcactccggcattggacttgagggggagcacatacttgacctgcattcaccaacacacatagacgccggtattaccgataactctgccgggacgctggatgtcaatatcgatgacataggagaggacattgtgccatatccacggaagatcacactgatcaagcagttagccaagtcagttattgtgggctgggagcctcccgccgttccaccaggttggggcaccgtgtcctcctacaatgtgttagtggataaagagactcggatgaatctaaccctcggtagccgcaccaaagctctgatagagaagctcaacatggccgcttgcacatatagaatttcggttcaatgcgtgacctctcggggctcgagtgacgagctccagtgcacactgcttgttggcaaggacgtcgtggtggcaccgtcccatctccgggtggacaatatcactcaaatttcagctcaactgtcatggctgccaactaattccaactattcccacgtaatttttttaaacgaagaagagttcgacatcgtgaaggccgcacgttacaagtaccagttctttaatctgcgacctaatatggcctacaaggtcaaagttcttgcaaagccacaccagatgccatggcagctaccgttagagcagcgggagaagaaagaagcattcgttgaattctccacactccctgcagggccacccgcccctccccaggacgtaacagtccaggccggggttactccagccacaatcagagtgtcctggcggcctcccgtcttgacccctaccggactgagtaacggcgctaatgttacagggtacggcgtctacgccaaaggccaacgggtggccgaagtgattttcccaactgccgactcaactgccgtcgagttggttcggctacgaagtctcgaagccaagggtgtgaccgtcaggacccttagtgctcagggggaaagcgttgattcagccgtggcagccgttcccccagagctgttagtaccccccactccacacccccggccggcgccccagtctaagccactggcaagcagcggagtgcccgaaaccaaagacgaacacctaggaccccatgccaggatggacgaggcatgggagcaatcaagggctcccggacctgtgcatgggcatatgctcgagccaccagtcggtcctggtcgtcggagccccagtcccagcaggattctgccccagccgcagggcactccagtcagcactacagtcgcaaaagccatggccagggaggccgcacagagggtcgctgagtccagtagactggagaagcggagcgtgttcttggaaaggtcgagcgccgggcagtacgccgcctcagacgaggaggatgcctacgattccccagattttaaacggcgcggggcaagtgtggacgattttctcaagggatccgaattagggaaacagccacactgttgtcatggagacgaataccataccgaaagcagcaggggctctgacttgtccgacatcatggaagaggacgaggaagagctgtattccgaaatgcaactggaagacggaggcaggcgaaggcccagtgggacatcccacaatgctctgaagatcctcggcaaccccgcctcggctgggcgggtggatcacatgggaagaagattccctagaggctccgctggaccacaacgttcacggcctgtgactgtaccatccatcgacgactacggcagagaccggctctcccccgacttctacgaagagtccgagacagaccccggagccgaggagctccctgcgcgcatctttgtagccttatttgactatgacccgcttacgatgagccccaacccggacgccgcagaagaagaattgccttttaaagaggggcagatcattaaggtgtatggcgacaaggacgctgacggcttctacagaggagagacatgcgcgcgccttgggctgattccgtgcaatatggtcagcgaaattcaggccgacgacgaagaaatgatggatcagctgttgaggcaaggttttctgccgctgaacactcccgtggagaaaatcgagagaagcagaaggagcggcagacgccactctgtctcaactagacgaatggtcgcgctctacgactatgacccacgcgagagctctcccaacgttgatgtggaagctgaactcactttctgcaccggcgatatcatcactgttttcggcgagatcgacgaggatggcttttattacggcgaactgaacggccagaaaggcctcgttcctagcaacttcctggaagaggtgcctgatgacgtagaggtctatcttagcgatgcccccagccactatagtcaagatacccccatgagatctaaggcgaagcggaaaaaatcagtccatttcaccccgtag

SEQ ID NO: 186058 - DNA, 3159 bp, Artificial Sequence
  derived and/or modified sequence
atgcgtgaagcagccgaacgtagacagcagctccaactggagcacgaccaggctcttgccgtcctgtcagcaaagcaacaagagatcgacctcttgcagaaatccaaagtaagggagctggaggagaagtgtaggactcagtcagaacagtttaacctgctaagtcgagacctcgaaaaattccgacagcacgctggaaaaatagatcttcttggcggtagcgcagtagcaccacttgacatcagtactgctccatccaagcccttcccgcaattcatgaatggcctcgctaccagcctaggaaaaggtcaagaatcagcaatcggcggatcatctgctatcggagaatacatccgcccactcccgcagcccggtgacaggcctgagcctctcagtgcaaagcctacattccttagccgctccggcagcgctagatgtcgatcagaatctgacatggagaatgagcgaaacagcaacacatccaagcaacgatactccggaaaagtgcatctctgcgtggcccgatatagctacaaccccttcgacggcccaaacgagaatcccgaagccgaattgccgctcacggctgggaaatatttgtacgtatacggtgacatggatgaggacgggttttacgagggcgagctgctggatggccagcgtggccttgtaccatccaacttcgtggactttgtgcaggataacgaaagccggctcgcttcaacgctcgggaacgagcaggatcagaacttcataaatcactccgggattggtctggaaggtgagcatatcctcgatctgcacagccctacccatatagatgcgggaatcaccgataattccgctgggacactggacgtcaacattgatgatatcggagaggacatcgtaccttaccccaggaagatcaccctcataaaacaacttgctaagagcgtgatcgtgggatgggaacctccagcagtgccgcctggatggggcacagtatcctcgtacaatgtgctggtggataaggagacgcgcatgaacctgactctgggctcacggacaaaggctctaatcgaaaagctgaatatggcggcttgcacctacagaatttcagtccagtgcgtaacaagcagaggtagctctgatgagcttcagtgcacgctgctcgtgggtaaggatgtggtcgtggccccaagccacctcagggtggacaatatcactcagatctccgctcaattgagttggttgccgacaaacagtaactactcccatgtaatcttccttaatgaagaggaattcgacatcgtgaaggcagcgcgatataaatatcagttctttaacctgcggccaaatatggcctataaggtgaaggtgctcgcgaaaccgcatcagatgccatggcagctgcctttggagcagcgagaaaagaaggaggcctttgtggagttcagcaccctgcccgcaggccctcctgcccctccccaggacgtgacagtgcaggcgggagtaacccccgctactattcgcgtaagctggagaccccctgttctaacacctaccggcctctcaaatggggctaacgttacgggctacggcgtttacgctaaggggcagcgcgtagcggaggtcatatttccgacggcagatagcactgctgtcgagcttgttaggctgcgctccctagaggctaagggcgtgacagtcaggaccctgagtgcacagggggaaagtgtggacagcgccgtcgcagcggtaccgccagagctcttggtccctcccactcctcatcctagacctgccccacagtccaagcctctggctagcagcggtgtgcctgagaccaaggatgaacacctcggcccacacgctcgtatggatgaggcatgggagcagtcccgggcacctgggcctgtccatggtcatatgctggagccccctgttggtcccggaaggcgctccccatcaccttcgcgcatccttccacagccccaaggcacccccgtctccactaccgttgcgaaagctatggccagagaggctgcacagcgtgtagccgaaagttcgaggttggaaaagagatctgttttcctggagcggtccagcgcaggccagtacgccgcttccgacgaagaggacgcctacgatagtccagacttcaagcggaggggtgcctcagtggacgacttcctgaaggggtccgaattgggaaaacagccccactgttgccatggagacgaataccacactgagtcaagcagaggatcagaccttagtgacattatggaagaggacgaggaggaattatatagcgaaatgcaactggaggacggcggacgacgtagaccatctggcacgtcccataacgcattgaagatattagggaaccctgcgtccgcagggagggtggatcacatgggccgacgctttccacgcggttccgcgggaccgcagcggagcaggccagtgacggtcccttcgattgatgactacggaagggaccgcctatctcctgacttctacgaggaaagcgaaacagatcctggcgcagaggagctccccgctaggatttttgtggcactgttcgactacgatccgctcactatgtctcccaatcctgatgccgcagaggaggagctcccatttaaagagggtcagattattaaggtttacggcgacaaagacgctgacggcttctatcgtggagagacctgcgccaggttgggactgatcccatgcaacatggtctctgagatccaggctgacgatgaggaaatgatggatcagctgttgcgccagggtttcctgccattgaatacccctgtggagaagatcgagaggtctaggcgatctggccgtagacatagcgtgtccaccagaagaatggtagcattgtatgattatgatccaagagaaagcagccctaacgtcgacgtcgaggctgaactgacgttttgcacaggcgatatcatcacagtgtttggggagatcgacgaagacggattctactacggtgaactgaacggccagaaaggacttgttccttcaaacttcctggaggaagttcccgatgacgttgaagtctacttatctgatgcgcctagtcattactcgcaggatacccctatgaggtcaaaggctaagaggaagaaaagcgttcatttcactccatag

SEQ ID NO: 186059 - DNA, 3159 bp, Artificial Sequence
  derived and/or modified sequence
atgagagaggccgccgagagaagacagcagctgcagctggagcacgaccaggccctggccgtgctgagcgccaagcagcaggagatcgacctgctgcagaagagcaaggtgagagagctggaggagaagtgcagaacccagagcgagcagttcaacctgctgagcagagacctggagaagttcagacagcacgccggcaagatcgacctgctgggcggcagcgccgtggcccccctggacatcagcaccgcccccagcaagcccttcccccagttcatgaacggcctggccaccagcctgggcaagggccaggagagcgccatcggcggcagcagcgccatcggcgagtacatcagacccctgccccagcccggcgacagacccgagcccctgagcgccaagcccaccttcctgagcagaagcggcagcgccagatgcagaagcgagagcgacatggagaacgagagaaacagcaacaccagcaagcagagatacagcggcaaggtgcacctgtgcgtggccagatacagctacaaccccttcgacggccccaacgagaaccccgaggccgagctgcccctgaccgccggcaagtacctgtacgtgtacggcgacatggacgaggacggcttctacgagggcgagctgctggacggccagagaggcctggtgcccagcaacttcgtggacttcgtgcaggacaacgagagcagactggccagcaccctgggcaacgagcaggaccagaacttcatcaaccacagcggcatcggcctggagggcgagcacatcctggacctgcacagccccacccacatcgacgccggcatcaccgacaacagcgccggcaccctggacgtgaacatcgacgacatcggcgaggacatcgtgccctaccccagaaagatcaccctgatcaagcagctggccaagagcgtgatcgtgggctgggagccccccgccgtgccccccggctggggcaccgtgagcagctacaacgtgctggtggacaaggagaccagaatgaacctgaccctgggcagcagaaccaaggccctgatcgagaagctgaacatggccgcctgcacctacagaatcagcgtgcagtgcgtgaccagcagaggcagcagcgacgagctgcagtgcaccctgctggtgggcaaggacgtggtggtggcccccagccacctgagagtggacaacatcacccagatcagcgcccagctgagctggctgcccaccaacagcaactacagccacgtgatcttcctgaacgaggaggagttcgacatcgtgaaggccgccagatacaagtaccagttcttcaacctgagacccaacatggcctacaaggtgaaggtgctggccaagccccaccagatgccctggcagctgcccctggagcagagagagaagaaggaggccttcgtggagttcagcaccctgcccgccggcccccccgcccccccccaggacgtgaccgtgcaggccggcgtgacccccgccaccatcagagtgagctggagaccccccgtgctgacccccaccggcctgagcaacggcgccaacgtgaccggctacggcgtgtacgccaagggccagagagtggccgaggtgatcttccccaccgccgacagcaccgccgtggagctggtgagactgagaagcctggaggccaagggcgtgaccgtgagaaccctgagcgcccagggcgagagcgtggacagcgccgtggccgccgtgccccccgagctgctggtgccccccaccccccaccccagacccgccccccagagcaagcccctggccagcagcggcgtgcccgagaccaaggacgagcacctgggcccccacgccagaatggacgaggcctgggagcagagcagagcccccggccccgtgcacggccacatgctggagccccccgtgggccccggcagaagaagccccagccccagcagaatcctgccccagccccagggcacccccgtgagcaccaccgtggccaaggccatggccagagaggccgcccagagagtggccgagagcagcagactggagaagagaagcgtgttcctggagagaagcagcgccggccagtacgccgccagcgacgaggaggacgcctacgacagccccgacttcaagagaagaggcgccagcgtggacgacttcctgaagggcagcgagctgggcaagcagccccactgctgccacggcgacgagtaccacaccgagagcagcagaggcagcgacctgagcgacatcatggaggaggacgaggaggagctgtacagcgagatgcagctggaggacggcggcagaagaagacccagcggcaccagccacaacgccctgaagatcctgggcaaccccgccagcgccggcagagtggaccacatgggcagaagattccccagaggcagcgccggcccccagagaagcagacccgtgaccgtgcccagcatcgacgactacggcagagacagactgagccccgacttctacgaggagagcgagaccgaccccggcgccgaggagctgcccgccagaatcttcgtggccctgttcgactacgaccccctgaccatgagccccaaccccgacgccgccgaggaggagctgcccttcaaggagggccagatcatcaaggtgtacggcgacaaggacgccgacggcttctacagaggcgagacctgcgccagactgggcctgatcccctgcaacatggtgagcgagatccaggccgacgacgaggagatgatggaccagctgctgagacagggcttcctgcccctgaacacccccgtggagaagatcgagagaagcagaagaagcggcagaagacacagcgtgagcaccagaagaatggtggccctgtacgactacgaccccagagagagcagccccaacgtggacgtggaggccgagctgaccttctgcaccggcgacatcatcaccgtgttcggcgagatcgacgaggacggcttctactacggcgagctgaacggccagaagggcctggtgcccagcaacttcctggaggaggtgcccgacgacgtggaggtgtacctgagcgacgcccccagccactacagccaggacacccccatgagaagcaaggccaagagaaagaagagcgtgcacttcaccccctag

SEQ ID NO: 186060 - protein, 222 aa, Artificial Sequence
  derived and/or modified sequence
MERKGSAAGAKGNPSPPAAGEGQRPPPPLCVPGGGGGAPARGQVGAAAEPAELIRRAHEFKSQGAQCYKDKKFREAIGKYHRALLELKGLLPPPGERERDSRPASPAGALKPGRLSEEQSKTVEAIEIDCYNSLAACLLQAELVNYERVKEYCLKVLKKEGENFKALYRSGVAFYHLGDYDKALYYLKEARTQQPTDTNVIRYIQLTEMKLSRCSQREKEAM

SEQ ID NO: 186061 - DNA, 669 bp, Artificial Sequence
  derived and/or modified sequence
atggagagaaagggcagcgccgccggcgccaagggcaaccccagcccccccgccgccggcgagggccagagaccccccccccccctgtgcgtgcccggcggcggcggcggcgcccccgccagaggccaggtgggcgccgccgccgagcccgccgagctgatcagaagagcccacgagttcaagagccagggcgcccagtgctacaaggacaagaagttcagagaggccatcggcaagtaccacagagccctgctggagctgaagggcctgctgcccccccccggcgagagagagagagacagcagacccgccagccccgccggcgccctgaagcccggcagactgagcgaggagcagagcaagaccgtggaggccatcgagatcgactgctacaacagcctggccgcctgcctgctgcaggccgagctggtgaactacgagagagtgaaggagtactgcctgaaggtgctgaagaaggagggcgagaacttcaaggccctgtacagaagcggcgtggccttctaccacctgggcgactacgacaaggccctgtactacctgaaggaggccagaacccagcagcccaccgacaccaacgtgatcagatacatccagctgaccgagatgaagctgagcagatgcagccagagagagaaggaggccatgtag

SEQ ID NO: 186062 - DNA, 669 bp, Artificial Sequence
  derived and/or modified sequence
atggagagaaaaggctccgctgccggagccaagggcaatccctcaccccccgcggcaggtgaggggcaacggccaccgcccccactctgcgtgccaggcgggggcggaggcgcccccgccaggggccaggtaggtgctgccgctgagcccgctgagctcatccggagagcccatgaattcaagagccagggggcccagtgttataaagataagaagtttcgggaagcgattggaaaataccatagggctctcctggaacttaagggcttactccctcctccaggtgagcgcgagcgggacagccgccctgcctcacctgcgggtgctctgaagccaggccggctgagtgaagagcagtctaaaacagtggaagcaatcgaaatagactgttacaattcacttgcagcctgtctgctgcaggcagaattggttaactacgagcgcgtgaaagagtattgtctgaaagtattgaagaaagaaggcgagaactttaaggccctgtacagatctggcgtggctttctaccatttaggagattacgataaggctctgtactacctgaaggaggccagaacacaacaaccaaccgataccaacgtgatccgatatatccaactcaccgagatgaaattatccagatgttctcaacgggagaaggaggcaatgtag

SEQ ID NO: 186063 - DNA, 669 bp, Artificial Sequence
  derived and/or modified sequence
atggagaggaagggcagcgctgctggggccaagggcaaccccagccccccagctgctggggagggccagaggcctcctccacccctgtgtgtgcctgggggcggcggcggggccccagcccggggccaggtgggcgctgctgctgagcctgctgagctgatcagaagagcccacgagttcaagagccagggcgcccagtgctacaaggacaagaagttccgggaggccatcggcaagtaccaccgggccctgctggagctgaagggcctgctgcccccacctggagagcgggagcgggacagcaggcctgccagccctgctggggccctgaagccaggccgcctgtctgaggagcagagcaagacagtggaggccatcgagattgactgctacaacagcctggccgcctgcctgctgcaggccgagctggtgaactatgaaagagtgaaggagtactgcctgaaggtgctgaagaaggagggggagaacttcaaggccctgtaccgcagcggcgtggccttctaccacctgggggactatgacaaggccctgtactacctgaaggaggcccggacccagcagcccacagacaccaacgtcatccgctacatccagctgacagagatgaagctgagccgctgcagccagcgggagaaggaggccatgtag

SEQ ID NO: 186064 - DNA, 669 bp, Artificial Sequence
  derived and/or modified sequence
atggagcggaagggcagcgccgccggcgccaagggcaaccccagccccccggccgcaggtgaaggccaaagaccccctcctcctctctgtgttccggggggcgggggaggtgccccggccagagggcaagtaggtgcagcggctgagcccgccgaattgatccgccgtgctcatgagttcaagagtcagggagcccaatgttacaaggataagaagttccgggaagctattggaaaataccatagggcactcctcgaactgaagggacttctcccaccgccgggcgagcgggagagggatagtaggccagcttcccctgccggggccctgaaacccgggcggctcagtgaggaacagtccaagactgtcgaggcaatcgaaattgactgttataatagtttggccgcctgtttgctccaggctgaacttgtcaactacgagcgagtgaaggaatactgcctgaaagtgctgaaaaaagaaggcgaaaatttcaaggccttgtatagatctggagtcgccttttaccacctgggagattatgacaaggctctgtactatttaaaggaagccaggactcaacagcctaccgatacaaatgtcattcggtacatacagctcaccgagatgaagctcagtaggtgcagccagagggaaaaagaagctatgtag

SEQ ID NO: 186065 - DNA, 669 bp, Artificial Sequence
  derived and/or modified sequence
atggaaaggaagggcagcgcagccggagccaagggcaatcctagtccccctgcagcgggagaagggcagcgcccacccccaccactgtgtgtgccgggagggggaggtggggcaccagctaggggccaggttggcgcagctgcggaacctgccgagctgattaggagggctcacgaattcaagtcccagggcgcacaatgctataaggacaagaaattccgagaagccatcggcaaataccatagggcgcttttggagctgaaaggtttactgcctcccccaggtgagagggagcgcgactccagacctgcttcccccgctggagcactcaagccaggacgcctctccgaggagcagagcaagacggtggaagccattgagatagattgttacaactctctcgccgcttgtctgctccaggccgagctggtgaactacgagagggtaaaagagtattgtctgaaagtgctcaagaaagagggggagaacttcaaggctctctatcggtccggcgtggccttctatcacttaggcgactacgataaggcgctctactacctgaaggaagcccgtacacagcagcctactgatacgaacgtcatcagatatatccagctgaccgaaatgaagttatcaaggtgctctcagagagagaaggaggccatgtag

SEQ ID NO: 186066 - DNA, 5217 bp, Artificial Sequence
  derived and/or modified sequence
ctcggggccacggtccccccgcagcgctagtcccgggcccgcgagcaccggcccccgccacccgcaggttgcggagggaggagggcgggagcgggcggcgcggagccgggaggcgggggaggggccggcgtccgaggcggcggcggcggcggctggagcagcctctggcagcagcggggagaatgggagtgcggggcgccagaccgccgcggggtgtcacggccgccacgaagcctgcgaggcgcggggccggcgcccgcggcttttaaacccgggaaggcgcggcggcggcggcggcggcgggcagatcgcggcgcgcaccaggcgccggggcggcggccgaatggagagaaagggctcggcggccggggccaaggggaacccgagcccgcccgcggccggagaggggcagcggccaccgccgccgctgtgcgtcccgggcggcggcggaggagccccagcgaggggccaggtcggggcggcggccgagccggccgagctcatccgacgagcgcacgagttcaaaagccaaggggcgcagtgctacaaggacaagaaattccgtgaagccataggcaaataccaccgggcgttgctggagctgaaggggctgctgccgccccccggggaacgggagcgggactcgcgcccggcctccccggctggggccctgaagcccggccgcctctcggaggagcagagcaagacggtggaagccatcgagatcgactgttacaacagcctggcagcctgcctgctccaggctgagctggtaaactatgaacgagtcaaggaatattgcctcaaagtcttgaagaaggaaggggagaacttcaaggccctttaccggtctggtgtggccttctaccaccttggggactatgacaaagcactctactacctgaaagaagcaaggacccaacaaccaacagacaccaacgtgattcggtatatccagctgacggagatgaaactcagccgatgctcccagagagaaaaagaagccatgtaaccaggaagcagctccagagctgcgcccacgcctgaccggggacttccaggcatcccctggcagagagccccgtcctggattctgtccctttctccccacttcttctggctcctcatttttcctcctgttgcaccccagctctttgtctcctcccagtacgaaaaggagagatgcaaatttggaatctggtaggtcgcccagacaatggagacatcctctcctctagcaggtcagcgactgagaggggcctgacttctgctgggacagctggagaggagtctcatgggctgggatgctgttgtggctttgactttggccagtgcttctgacagaggcggagcctggcaagtgtaccatcccacaggcagcaggcacacagcccatgggctggatccttccacactttcctgacagaccagaaccagagcatctcgaggcaactgttagaaatccagggacgagacaaacagagaagcgctggtgaagccaacatagagactgtcaatgtgtacactggagttcccacccccaccccccacccgtcacttagcccctgcctccttcccccactcgttgtcttggcttgtgctttctcctctccccatcggggatccgagactctgccaggattcacatgccactgaagcccactcagtgccctctggtgaccacacataccattcccccggactcccacccagcaggcagctgtgaccgcagaagggcaggatgaagtgggccaaggtttgggacaggttgactgtgtaggtgacagggagggaaagatgatggccaggggaaagagcatcgtataggctaggggattgaactgtggactgattcagtgtaaataaaaacaaattaacaggtagtagttcctgtcagttctgttggaagcagcccactccctcacttttactccttcctccaaccctcaatcagagctacttacagccaggcaggatggggctttccccaaagcaattggccgtttgtccagtggcagacaatggtggctacagcctttgtgcttttaagagtgggctgggattgtggagactgcccaggggcttggctttgtcagaacttgtacaatcttcttttgatgaaattatctgaactcaacatctagcacatagaatgtgttcaacaaatgcttgttgaatgaataaattatgactgcagactggctctcctgccttaaactaatttcatcccagcctagtctcctgatgtctgtgctcgttatgctatgccatgttgcttcagtcaaacaagaaacacttactgagggcatattgtttgcccatcattgtgcaatatgctgtgggacatgggatgtcgtctcagtcttcaaggaaatggaagggttaagaaatgcatatgagattattaccaatgacaccgttaatttatatgatgctttaaaattatcagagcactttcatgtatttttcgtgtgactagtgaaaaagacaatgttgtacaaaattaaaatatatacagatgcaataatgtgaatagttaggatttattaaatgcattatcttcagatctttacatgtataatctcatttctttcatgcagttactctgggatactgttcccatttgatgggtaagaatattgaaaaccagaaaaattaattatcccaaggttgcatggcctttagtggcatagctaggatttgaaccaggcctgcctgactccagagctctggctagtatctatgctatacttagttgcctctctgtaagtataatattgggcaattataaccatttgagaacaggacaatatgtattaacctgaaaagtgttcatgatgtcagtgatagtacatggcctccttatgtatttactcaagggccccaaaagaccagaggccagaatccctagtagtcagagcagtgacaggtcagaaaaaggcagctgaggtccaatagttatgtctgtgtattgctcattctacttactgatggagccagcatgtatctcaacaactcacctagcattcatcacccatccccagcattgggaaagggtcacaattaagaccgaaaggaaacacaaagttaaatatgggttaattatgtaagcagatgccccaccacggcaggatccaatcacagccgaggggcccagaagagagcagcgtaagttatattcacatagttccccaaaggctttcaacgggggctacaggaaggtgctagaaatattgaggggcctgccattactcacctagagctcactctctggagaagaggaaaaggaagaagctatttcagctgccacattctccccaatccctactatattatgctgtctttcctcttcctcctagctggctttacatgaccctaacccaaaactaccctatggccccacacgggaatgtgttcaaacgccccgacccccacccccacccccattcccaagcctccaacttagaacgtttgtgatttggcagatggtttgttaggatctgaaggatgaagagaagggtagaggtcacctggagaatgagttcaaactgccagggtcttcccttggtctttgtgcgtcaggaaggactccgagtaattattccctatgcagagacaggagagaggtcttgtttacatgagtgtgctggggcagggctggacaatccaggatatgattgtagccatcccatgtagaaagatcaaaaaccagaacgaaatgaagacagcctctcagaacctcatagaacaagcgtccaggtcatctgcttgtttggtgacttagatatacaggcttactggaactccattcactgtgacctgaagttaaataatcccaaagagaaaaagctacctggggtattggttgatgtttggggtgatagggctgaattttctgtgcatttgtccaacaaaggctttagagcacaaaaccaggttcattctccctaccaaatcttcagcttccttctcctcatccctccccaaaacaagaactgtgatttaattccgtacgttgcggatgtcactgctgacctatgtagctggagtactaatcaggcatctgacctgcactgtcatcccctgcctggacttttgcgatggactctttgggggaaaaactaacgctttttaattattgtgaaagcatcatgtgtgtattgtagaagttttaggaaaaaaaggacaaaatccaatccataagcttaccacccaagacaaacgtgtattcttttgaatataccttttagttctttttggtgtaaatgtacacacgcacacacagttgtggatttttttaaacaaaaactggatacactgaatatactctttaataacttttcaagtgtgtatttatattttagaatatgtaatcctacacagatacaaaattcaaaaagtacaaactgctctgtagtcagaagtaaatcttctccctaccccgtctgccagcatctagtttccctctaatttattttgcatcctagtggagatgcttacacattgtcaaacatatgtatatattcttttatcacacacaaatggcagcatattggacactttttgttttttgctccttctgttccttcacttaataatatcacgaacattttcggcatatcaaactttctcaacagcatcttcattgtatggatggaccctttttttatcatcaatcctcaaatagtgattatttcatttgttcccaatcttcattgtaaatagtgttgcaactgacattcttgtagctaaattttgcacatgtctataacgatttccttaggataaactccaagaagagacttgcttggctatttttaagaattttgatacatgttgccaaccaccctccagaaagtttgtaccaaaacgctctcctatttggatcctagagagtaccctgtttcctgcaccctaacactaggtatcatcacttatcaaatctttcccaatttggtagctgggataatagtatgtcaatgttattttaactttctttgattcttcgcgaataacattttcatatgcttattgaccatttgtacttctttctttgtgaattttctatttatttgatattggtatgtttattatcaatttgtaattttattaagaatattatttttgtcaagaaatgctgcaaatatgctttccaagtgctttgctttcaaattttgtttatggtgctttttgacatacataaattcttaattctgc

SEQ ID NO: 186067 - protein, 388 aa, Artificial Sequence
  derived and/or modified sequence
MGAAAWARPLSVSFLLLLLPLPGMPAGSWDPAGYLLYCPCMGRFGNQADHFLGSLAFAKLLNRTLAVPPWIEYQHHKPPFTNLHVSYQKYFKLEPLQAYHRVISLEDFMEKLAPTHWPPEKRVAYCFEVAAQRSPDKKTCPMKEGNPFGPFWDQFHVSFNKSELFTGISFSASYREQWSQRFSPKEHPVLALPGAPAQFPVLEEHRPLQKYMVWSDEMVKTGEAQIHAHLVRPYVGIHLRIGSDWKNACAMLKDGTAGSHFMASPQCVGYSRSTAAPLTMTMCLPDLKEIQRAVKLWVRSLDAQSVYVATDSESYVPELQQLFKGKVKVVSLKPEVAQVDLYILGQADHFIGNCVSSFTAFVKRERDLQGRPSSFFGMDRPPKLRDEF

SEQ ID NO: 186068 - protein, 177 aa, Artificial Sequence
  derived and/or modified sequence
MVWSDEMVKTGEAQIHAHLVRPYVGIHLRIGSDWKNACAMLKDGTAGSHFMASPQCVGYSRSTAAPLTMTMCLPDLKEIQRAVKLWVRSLDAQSVYVATDSESYVPELQQLFKGKVKVVSLKPEVAQVDLYILGQADHFIGNCVSSFTAFVKRERDLQGRPSSFFGMDRPPKLRDEF

SEQ ID NO: 186069 - DNA, 1167 bp, Artificial Sequence
  derived and/or modified sequence
atgggcgccgccgcctgggccagacccctgagcgtgagcttcctgctgctgctgctgcccctgcccggcatgcccgccggcagctgggaccccgccggctacctgctgtactgcccctgcatgggcagattcggcaaccaggccgaccacttcctgggcagcctggccttcgccaagctgctgaacagaaccctggccgtgcccccctggatcgagtaccagcaccacaagccccccttcaccaacctgcacgtgagctaccagaagtacttcaagctggagcccctgcaggcctaccacagagtgatcagcctggaggacttcatggagaagctggcccccacccactggccccccgagaagagagtggcctactgcttcgaggtggccgcccagagaagccccgacaagaagacctgccccatgaaggagggcaaccccttcggccccttctgggaccagttccacgtgagcttcaacaagagcgagctgttcaccggcatcagcttcagcgccagctacagagagcagtggagccagagattcagccccaaggagcaccccgtgctggccctgcccggcgcccccgcccagttccccgtgctggaggagcacagacccctgcagaagtacatggtgtggagcgacgagatggtgaagaccggcgaggcccagatccacgcccacctggtgagaccctacgtgggcatccacctgagaatcggcagcgactggaagaacgcctgcgccatgctgaaggacggcaccgccggcagccacttcatggccagcccccagtgcgtgggctacagcagaagcaccgccgcccccctgaccatgaccatgtgcctgcccgacctgaaggagatccagagagccgtgaagctgtgggtgagaagcctggacgcccagagcgtgtacgtggccaccgacagcgagagctacgtgcccgagctgcagcagctgttcaagggcaaggtgaaggtggtgagcctgaagcccgaggtggcccaggtggacctgtacatcctgggccaggccgaccacttcatcggcaactgcgtgagcagcttcaccgccttcgtgaagagagagagagacctgcagggcagacccagcagcttcttcggcatggacagaccccccaagctgagagacgagttctag

SEQ ID NO: 186070 - DNA, 534 bp, Artificial Sequence
  derived and/or modified sequence
atggtgtggagcgacgagatggtgaagaccggcgaggcccagatccacgcccacctggtgagaccctacgtgggcatccacctgagaatcggcagcgactggaagaacgcctgcgccatgctgaaggacggcaccgccggcagccacttcatggccagcccccagtgcgtgggctacagcagaagcaccgccgcccccctgaccatgaccatgtgcctgcccgacctgaaggagatccagagagccgtgaagctgtgggtgagaagcctggacgcccagagcgtgtacgtggccaccgacagcgagagctacgtgcccgagctgcagcagctgttcaagggcaaggtgaaggtggtgagcctgaagcccgaggtggcccaggtggacctgtacatcctgggccaggccgaccacttcatcggcaactgcgtgagcagcttcaccgccttcgtgaagagagagagagacctgcagggcagacccagcagcttcttcggcatggacagaccccccaagctgagagacgagttctag

SEQ ID NO: 186071 - DNA, 1167 bp, Artificial Sequence
  derived and/or modified sequence
atgggagcggctgcatgggccaggcccctttctgtgagctttctcctgcttctgctgccactaccaggcatgcccgctggatcatgggaccctgcgggttaccttctatactgtccttgcatgggcagatttggcaaccaagcagaccattttcttggaagcctagcattcgcaaaacttcttaacaggaccctcgcagttcccccttggatcgagtaccagcaccataagccaccattcaccaatctgcatgtgtcctatcagaagtactttaaactggagccactccaggcatatcatcgtgtaatttcactggaagacttcatggaaaagctggctcctacccactggcctccagagaaacgtgttgcatattgctttgaagtggcagctcaacggagtcctgataagaagacttgtcccatgaaagagggtaaccctttcggccccttttgggaccagttccatgtgagcttcaataagagcgaactttttaccggcatctctttcagcgccagctacagagaacagtggagtcagagattcagccccaaagagcaccccgttctcgctctgcccggagcaccagcccagtttccagtcctggaggaacacagacccctgcagaagtacatggtatggtccgacgagatggtcaaaaccggcgaggcccaaatacatgcgcatctggtgaggccctacgtcgggatccaccttcgcataggttccgactggaagaatgcctgtgccatgctgaaagacggcacagcagggtctcattttatggcgagcccccagtgtgtgggctactccagatccaccgccgcccccctaacaatgactatgtgcctacctgacctcaaggaaatccagcgggcagtgaagctgtgggtaagatccctcgatgcccaatccgtgtacgtggcaacggattctgagtcctatgtcccagagctccagcagctctttaaaggaaaggtgaaagttgtctccttgaagcccgaggtggctcaggtggatctttatatcctgggccaagctgaccattttattggaaactgcgtgtcgagctttaccgcttttgtgaaacgggagagagacctacaagggcgaccctcaagttttttcggtatggatcgcccccctaagctgcgcgatgaattctag

SEQ ID NO: 186072 - DNA, 534 bp, Artificial Sequence
  derived and/or modified sequence
atggtgtggtcggatgaaatggtaaagaccggagaggcccagatacacgcccacttggtaaggccttacgtggggattcatctcaggatcggcagtgattggaaaaatgcctgtgcgatgctgaaagacgggactgctgggtcacattttatggccagccctcaatgtgtcgggtattctcggagcacagccgcccccctgacgatgacgatgtgtctacccgacttaaaggagatacagcgcgctgtcaaactgtgggtgaggtcactggatgctcaatccgtatacgtcgccacggactccgagtcttatgtacccgaattgcagcagttgttcaagggaaaagtgaaggttgtatccctcaaaccagaggtagcacaggtggacttatacattctgggtcaggctgatcattttattggtaattgtgtttccagcttcactgctttcgtgaaaagggaacgggatctccagggtagaccgtcttccttcttcggaatggacaggcctccaaaactcagggacgagttttag

SEQ ID NO: 186073 - DNA, 1167 bp, Artificial Sequence
  derived and/or modified sequence
atgggcgccgccgcctgggcccggcccctgtctgtgtccttcctgctgctgctgctgcccctgcccggcatgcctgctggctcctgggaccctgctggctacctgctgtactgcccctgcatgggccgcttcggcaaccaggccgaccacttcctgggcagcctggcctttgccaagctgctgaacagaaccctggccgtgcccccctggattgagtaccagcaccacaagccacccttcaccaacctgcacgtgtcctaccagaagtacttcaagctggagcccctgcaggcctaccacagggtcatcagcctggaggacttcatggagaagctggcccccacccactggcccccagagaagagggtggcctactgctttgaggtggccgcccagaggagcccagacaagaagacctgccccatgaaggagggcaaccccttcggccccttctgggaccagttccacgtgtccttcaacaagtctgagctgttcaccggcatctccttcagcgccagctaccgggagcagtggagccagcgcttcagccccaaggagcaccctgtgctggccctgcccggggccccagcccagtttcctgtgctggaggagcaccggcccctgcagaagtacatggtgtggagcgatgagatggtgaagacaggagaggcccagatccacgcccacctggtgcggccctacgtgggcatccacctgagaattggaagtgactggaagaatgcctgtgccatgctgaaggatggaacagctggcagccacttcatggccagcccccagtgtgtgggctacagccgcagcacagctgcccccctgaccatgaccatgtgcctgcctgacctgaaggagatccagagagctgtgaagctgtgggtgcgcagcctggatgcccagagcgtgtatgtggccacagacagcgagagctatgtgcctgagctgcagcagctgttcaagggcaaggtgaaggtggtgtccctgaagccagaggtggcccaggtggacctgtacatcctgggccaggccgaccacttcatcggcaactgtgtgtcctccttcaccgcctttgtgaagcgggagcgggacctgcagggccggcccagcagcttcttcggcatggacaggcctcccaagctgagagatgagttctag

SEQ ID NO: 186074 - DNA, 534 bp, Artificial Sequence
  derived and/or modified sequence
atggtgtggagcgatgagatggtgaagacaggagaggcccagatccacgcccacctggtgcggccctacgtgggcatccacctgcgcatcggcagtgactggaagaatgcctgtgccatgctgaaggatggaacagctggcagccacttcatggccagcccccagtgtgtgggctacagccgcagcacagctgcccccctgaccatgaccatgtgcctgcctgacctgaaggagatccagagagctgtgaagctgtgggtgcgcagcctggatgcccagagcgtgtatgtggccacagattctgagagctatgtgcctgagctgcagcagctgttcaagggcaaggtgaaggtggtgtccctgaagccagaggtggcccaggtggacctgtacatcctgggccaggccgaccacttcatcggcaactgtgtgagcagcttcaccgcctttgtgaagcgggagcgggacctgcagggccggcccagcagcttcttcggcatggaccggccccccaagctgagagatgagttctag

SEQ ID NO: 186075 - DNA, 1167 bp, Artificial Sequence
  derived and/or modified sequence
atgggcgccgccgcctgggcccggcccctgagcgtgagcttcctgctgctgctccttcccctccctggcatgcctgctgggagctgggaccctgccggttatctgctgtactgcccttgcatgggtagatttggaaatcaggccgatcattttctggggtctcttgcattcgccaaactgctgaatcggaccttggccgtgccaccgtggatagaatatcagcaccacaagcccccgtttaccaatctccatgttagctaccagaagtatttcaagctggaaccattacaggcataccatcgcgtgatcagtcttgaggattttatggaaaagctcgcaccgacacattggccccctgaaaaaagggtggcctattgcttcgaagtggcagcgcagagatccccggacaagaaaacatgcccaatgaaggagggtaacccttttgggcccttctgggatcagtttcacgtatcctttaacaagagcgaactgtttactggtattagctttagcgcttcctatagggagcagtggtcccagaggttctcccctaaagaacaccctgtcctcgcattgccaggcgcccccgcacagtttcccgtcctggaagaacatagacccctgcagaagtatatggtgtggagcgacgagatggtcaaaacaggtgaagcacagatccacgcccacctggttcgcccctatgttggaatccatctgcgaataggctctgattggaaaaatgcgtgcgcgatgctcaaggacggtacagctggttcacattttatggctagccctcagtgcgttggttatagcagaagcactgctgcacccttgaccatgaccatgtgtctccccgatctgaaagaaatacaacgggcagtgaagttatgggtacgcagtctggacgcgcagagcgtgtatgtggcaactgactcagagagttacgtgcccgaactccagcaactatttaagggaaaggtgaaggtggtgtcccttaagccagaggtggcccaggtggacctttacatattgggccaggctgaccactttatcggcaattgtgtgtcttcctttaccgctttcgttaagagagaaagagacctgcaagggcgcccttcctctttcttcggaatggacagacctcccaagctgcgcgacgaattctag

SEQ ID NO: 186076 - DNA, 534 bp, Artificial Sequence
  derived and/or modified sequence
atggtgtggagcgacgagatggtgaagaccggcgaggcccagatccatgctcacctcgtgaggccatatgtgggcatccacctgaggatcggctccgattggaagaatgcctgcgccatgctcaaagacggcactgccggaagccactttatggcctccccacagtgcgtgggatattctcgatccaccgcagcacccttaaccatgactatgtgcctaccggacctgaaggaaatacaaagggccgtgaagctatgggtgcggagtctggacgctcaaagcgtctatgtggctaccgacagcgagtcctatgtacctgagctgcagcagctcttcaaaggtaaagtgaaagttgttagcctgaagccagaggtggcccaggtggacctgtacatacttgggcaagccgaccattttatcgggaattgcgtttcaagctttactgcctttgtgaagcgcgagagggacctacaggggcgaccgtcttcctttttcggtatggaccgcccaccaaaactcagggacgagttctag

SEQ ID NO: 186077 - DNA, 5235 bp, Artificial Sequence
  derived and/or modified sequence
gctcgcgtccctccttccctccccgactgtgcgccgcggctggctcgggttcccgggccgacatgggcgccgccgcgtgggcacggccgctgagcgtgtctttcctgctgctgcttctgccgctcccggggatgcctgcgggctcctgggacccggccggttacctgctctactgcccctgcatggggcgctttgggaaccaggccgatcacttcttgggctctctggcatttgcaaagctgctaaaccgtaccttggctgtccctccttggattgagtaccagcatcacaagcctcctttcaccaacctccatgtgtcctaccagaagtacttcaagctggagcccctccaggcttaccatcgggtcatcagcttggaggatttcatggagaagctggcacccacccactggccccctgagaagcgggtggcatactgctttgaggtggcagcccagcgaagcccagataagaagacgtgccccatgaaggaaggaaacccctttggcccattctgggatcagtttcatgtgagtttcaacaagtcggagctttttacaggcatttccttcagtgcttcctacagagaacaatggagccagagattttctccaaaggaacatccggtgcttgccctgccaggagccccagcccagttccccgtcctagaggaacacaggccactacagaagtacatggtatggtcagacgaaatggtgaagacgggagaggcccagattcatgcccaccttgtccggccctatgtgggcattcatctgcgcattggctctgactggaagaacgcctgtgccatgctgaaggacgggactgcaggctcgcacttcatggcctctccgcagtgtgtgggctacagccgcagcacagcggcccccctcacgatgactatgtgcctgcctgacctgaaggagatccagagggctgtgaagctctgggtgaggtcgctggatgcccagtcggtctacgttgctactgattccgagagttatgtgcctgagctccaacagctcttcaaagggaaggtgaaggtggtgagcctgaagcctgaggtggcccaggtcgacctgtacatcctcggccaagccgaccactttattggcaactgtgtctcctccttcactgcctttgtgaagcgggagcgggacctccaggggaggccgtcttctttcttcggcatggacaggccccctaagctgcgggacgagttctgattctggccggagcaccagaccctctgatcctggagggaccagagtctgagctggtccttccagccaggcctggcagccagaggtgctccgggattgcaaactcctcttctcacctgccaaagatggagaagagtgccagggacccctcaaggagggagacgctccatatcccagggcataggacttgcaggttcctaggagcaggagcatctcccatcgcacgtgctttctgctcttctgggaatttctcacactggcaaagcagtccagcctccgtcttctggtccactctgctctgagcagcctgggatgctgaactcttcagagagatttttttatagagagatttctataattttgatacaaggtcatgactatcctagaactctctgtggtttttgaaaatcattgaattctattaatgtaggtacctaaagtgaccttaactgaatgtggatgaggctggggctggtgtgggtcttttggctgcttttcaaggtgtcccccaatgtggccctcaagagccatccccactgcctggccagagccattgttgtcccctacttcctaggccatttctggggcttgggggatgaatgctgtcctgtgctgtaaacactatgcaaatggaagttatcggttgtggtgctgtgcagcgctctgtgggcgactaagtgccactcacgcagcatgttcctggcaaggagcacataccatcaagccacactatcatggtattgttctcacagtcttttggtggttgatggccactgcaaacctggcaccatcagatctcttctgatctcttgccccagtggggcctggttggtagaatgttggcattcggttgatatccaaagcctgttctcccagccgtcctcctgcagctggagccttcaggccgtattctcacgagggaacgtttgccaaggctctgacctcacagaagatgcccagggcccagaagccatcagaattatcagtggagaagcaccttttgactcttcccttccaatgtaatctctgccaacaccatgaggcttaaggtgctctaagtcatgagtgttttggtctcaaatgctgcagttttaataatctgtgactcctgagagcccatggttttttgaccttgtggttctaaaattccttgtctgacccctgtagatcttttccttgccatgtcacctcccttggcctttgatcctggaaaggtggcagagcctccactgagccaggcccagagctccttgcagtgccttcttccttgtttacctgtgggaggaaacactttttttgtcaggggcagcctggttcagagctcagaggtcacactgtatcaaagatctcaaacagcaaagtcagcatttgctgtatagagctgccacccaactctaagcaggagaaactgtacagaaagggctttgctatttttcccttttgggaaaacaatgaagtgttttaagtcctgggtggactgagagatggtttgcctgtccagacttgctctcaagcctcatccagagaaggagctgcagatgagggagcccgtacactccctgccaccactaggttgtaagcctgtagctggctggctgatttcattttggaattcatttgccatccacagccttacactaggcacacactttagagtctggggctccagtggggcccgcctaattttttttccccccaagacagggccttgctctgtctcccaggctggagtgcagtggcatgatcatggcttactgcagccttgatctcccaggctcaagcgatccttctgcctcagcctctctggtagctgagactgcatgcccagctccaaatcaccttgattcatatcagcagtaataatcacttgtgttctgaaagaaagggcaccagaagttctagcaaaattcagttgtgttctgtgagctagcactttttcctctgacccaattttcttacctataaaatggtgataaaaaccgacaggttgttcaaaggcccagatcagctaaagcatgtatataagagcacgttgtaaacttgaaagagacaaaggcacaaatgtggctgttgattaatttgactgcttctcgttgctcgtcacctccatgccaggcactgtgcttgctaattgctttatgggggcattctcttatttattccccagccctgggaaataggagctgtcattatccttctctttctgcacaaggaaaaattaatgccctgagaattgtcataattttcccaaggctgcccagctggtggtgttaagccagaatttgacctcccagagccagtttccattagctgccatgctctgctgcctctaattcacagaatgcactttctaccctgtgtgccatggagacctcctatggaaaaatgatcagccaccttaccttctactgggtacctgctgtgagtctgcctatgccagaaggattaaggaggggaggttacccaagaaacaaagcctacatgccgcttacagcccccgttggatggttgctcagtacaacagtcttgcattcagcaggtgtttgttcatcacctactatgtgtcaggctctatgctaggtactggggatacaggagagaatcaagcgtaaagtctttgttctcaaggaatttgcattctagaaagtagaagatgtaataaatgtactgtgggacatgttaataagtgctataaagaaatataaagggtttgggagcaaaaagagggagtggatctattttagatgagcccaggtaagacctctctgaagagctgtcatgaaggagggagggagcacattcctggcagagaaaacagcacgtgcaaaggccccgagactggagtgtgttcctgaagagcagccaggaggccagcatggctggagaggcaggcataggcagggaaccgagcagcaggtcagagcaggcgagctgacattctgcagcctggacggccatggcaggaagcttttagttggagagatacaggaagcctcctagggttctgagcagaagaggggcatgagctgattcacattctgaaggacctctctagctggccagtgctgaggaggttggagagagaaagggtgaaagcagagagaccagtgcagggctgttaacagggttgcaggcgagagactggggtgctgggctcccctagactaggactccagtgccctcctctcccaagagacaaaggccattgcattgaaggaggtgggaaatgattagattctgaacatatgtaattatttttcagtctttttcaaagatacaaatatttacatagttttaatcatgtaatatatacaatttaatgtcctagtgttttacttaatagtgtatcatgttttccctgttggtatgtagcctggataaatgctcttaattataaaaaattctgtcgaggagtgttccatagtttattgttttcctattatgagaatttaggccaagtgtggtggctcatgcctgtaatcccagcactttgcgaggccgaggtgggcagatcacttgaggtgaggagttcaagaccagcctggccaacatggtgaattatctctactaaaaatacaaaaaaataataataatagccaggcgtggtggcacatgcctgtattcccagctgcttgggaggctgaggcaggagaatggcttgaacctgggaggtggaggttgcagtgagccgagatggtgccactgcattccagcctgggcaacagagcgagactccatctcaaaaaaaaggagacttcatgtgcccccaatttttcactattgttatttgaaaaaatatttttatttgtaagagtttttctttatttaaaatgttcattaataaagttgttggacgggaagcaaaaaaaaaaagttgtttaagataaattcccagaagtgaatttgttagatcaaacacttaaaactttttgttatggaagaattcaaatataaataaaaaattgtgagtaataaaatgaactcacagtttcaacaatgacccacattt

SEQ ID NO: 186078 - DNA, 983 bp, Artificial Sequence
  derived and/or modified sequence
cttccctccccgactgtgcgccgcggctggctcgggttcccgggccgacatgggcgccgccgcgtgggcacggccgctgagcgtgtctttcctgctgctgcttctgccgctcccggggatgcctgcgggctcctgggacccggccggttacctgctctactgcccctgcatggattttctccaaaggaacatccggtgcttgccctgccaggagccccagcccagttccccgtcctagaggaacacaggccactacagaagtacatggtatggtcagacgaaatggtgaagacgggagaggcccagattcatgcccaccttgtccggccctatgtgggcattcatctgcgcattggctctgactggaagaacgcctgtgccatgctgaaggacgggactgcaggctcgcacttcatggcctctccgcagtgtgtgggctacagccgcagcacagcggcccccctcacgatgactatgtgcctgcctgacctgaaggagatccagagggctgtgaagctctgggtgaggtcgctggatgcccagtcggtctacgttgctactgattccgagagttatgtgcctgagctccaacagctcttcaaagggaaggtgaaggtggtgagcctgaagcctgaggtggcccaggtcgacctgtacatcctcggccaagccgaccactttattggcaactgtgtctcctccttcactgcctttgtgaagcgggagcgggacctccaggggaggccgtcttctttcttcggcatggacaggccccctaagctgcgggacgagttctgattctggccggagcaccagaccctctgatcctggagggaccagagtctgagctggtccttccagccaggcctggcagccagaggtgctccgggattgcaaactcctcttctcacctgccaaagatggagaagagtgccagggacccctcaaggagggagacgctccatatcccagggcataggact

SEQ ID NO: 186079 - DNA, 1167 bp, Artificial Sequence
  derived and/or modified sequence
atgggagccgcagcgtgggccaggcctctgtctgtctcatttctgcttctgctgttgcctcttcccggaatgcccgctggatcttgggaccctgctgggtatctcctgtattgcccctgtatgggacggttcggcaatcaagccgatcatttcctcgggagcttggcgttcgccaaactcctcaataggacgctggccgtcccaccgtggatcgagtaccagcaccacaagcctcctttcactaatttgcatgtctcctatcaaaaatacttcaagcttgaacccctgcaagcgtaccatagggtaatatcgctggaggactttatggagaaattagcccctactcactggccgccagagaaacgcgtcgcatactgttttgaggttgcggctcagcgaagcccagataaaaagacatgtcctatgaaagaaggaaacccttttgggcctttctgggatcagtttcacgttagcttcaataagtccgaactatttacggggatttccttttcagcgtcttaccgggagcaatggtctcagcgatttagtccaaaggaacatccagtgttggcactgcccggtgctccagcccaatttcccgtgctggaggagcaccgcccactgcagaaatatatggtatggtcagatgaaatggtgaaaacaggcgaagctcagatacatgcgcatcttgtgcggccttacgtgggtatacatctcagaattggctccgattggaaaaacgcatgtgccatgttaaaagatgggactgctgggagccacttcatggccagcccacagtgcgtcggctattcccggagtaccgcggcaccattgacaatgacaatgtgcctgcccgacttaaaggagatacagcgggctgtcaagctttgggtaaggtccctagacgcacagtctgtttatgtagcaaccgactccgaaagctacgtgcctgagctgcagcagctttttaaaggcaaagtcaaggttgtttcgcttaagccagaagtggcacaggtggatttatacatcttgggtcaggcagaccattttattggtaattgtgtgtcatccttcacagcctttgtcaaacgagaacgggatctccaaggaagaccgtctagcttttttggtatggatcgacctcccaagcttagggacgaattttag

SEQ ID NO: 186080 - DNA, 534 bp, Artificial Sequence
  derived and/or modified sequence
atggtctggagcgacgagatggtgaaaactggagaggctcagatccacgcgcacttggtacgcccttatgtggggattcatctgcggatagggagtgactggaagaacgcctgcgcgatgctgaaggacggaactgcagggtcccatttcatggccagtccacagtgtgtgggttactctaggtccaccgccgcacctctgaccatgaccatgtgtcttcccgatttgaaagaaatccagcgcgctgtgaagttatgggtcaggtcactggacgcccagtccgtttatgtggccactgattccgagagctatgtgccagagcttcagcagctgttcaaggggaaggtgaaagtggtcagtctgaagcctgaggtggctcaggtagatttgtacatactcggtcaggccgatcattttatcggaaactgcgtgtcaagcttcacagcgtttgttaaaagagagagggatctccaagggagaccgagtagcttctttggaatggatcgcccacccaagctgcgagatgaattttag

SEQ ID NO: 186081 - protein, 263 aa, Artificial Sequence
  derived and/or modified sequence
MAELQLDPAMAGLGGGGGSGVGDGGGPVRGPPSPRPAGPTPRGHGRPAAAVAQPLEPGPGPPERAGGGGAARWVRLNVGGTYFVTTRQTLGREPKSFLCRLCCQEDPELDSDKDETGAYLIDRDPTYFGPILNYLRHGKLIITKELAEEGVLEEAEFYNIASLVRLVKERIRDNENRTSQGPVKHVYRVLQCQEEELTQMVSTMSDGWKFEQLISIGSSYNYGNEDQAEFLCVVSRELNNSTNGIVIEPSEKAKILQERGSRM

SEQ ID NO: 186082 - protein, 245 aa, Artificial Sequence
  derived and/or modified sequence
SLPRNGPARLRAGSSGGGGGPRWRNCSWTRRWRGWEGAPGPGPPERAGGGGAARWVRLNVGGTYFVTTRQTLGREPKSFLCRLCCQEDPELDSDKDETGAYLIDRDPTYFGPILNYLRHGKLIITKELAEEGVLEEAEFYNIASLVRLVKERIRDNENRTSQGPVKHVYRVLQCQEEELTQMVSTMSDGWKFEQLISIGSSYNYGNEDQAEFLCVVSRELNNSTNGIVIEPSEKAKILQERGSRM

SEQ ID NO: 186083 - DNA, 792 bp, Artificial Sequence
  derived and/or modified sequence
atggccgaactacagctggacccagccatggccggactcggaggaggaggggggagcggcgtgggggacggagggggccctgtgcgaggcccacctagccctaggcctgccggccccactccacgaggccatggccgtcctgccgcagccgtggcccagcccctcgagcccggcccagggccacccgaaagggccggagggggtggtgcggcgcgctgggttagactgaacgtcggcgggacatattttgtaactactcgccagacactggggcgggaacccaaatcgttcctgtgccgcctctgctgccaggaggacccggagctggactctgataaggatgaaacgggagcctacctgatcgatcgcgacccaacatattttgggccaatcctgaactacctcagacacggaaagctcatcattacaaaggagctcgcggaagagggggtcctcgaagaggccgaattttataatatcgcatctctcgtgaggctcgtgaaggaaagaattagagacaatgaaaaccggacatctcaaggcccagtcaagcatgtgtatagggtcctgcaatgtcaggaggaagagctcactcagatggttagcactatgagcgatggatggaaatttgaacagctcatttccataggcagttcctataactacggtaatgaagaccaggccgaattcctgtgcgtggtgtcaagggagcttaataattccactaacggaattgtgattgaaccaagcgagaaagctaagatcctgcaggagcgcgggtctaggatgtag

SEQ ID NO: 186084 - DNA, 738 bp, Artificial Sequence
  derived and/or modified sequence
agcttgccacgtaatgggcctgctaggttgcgagctggctcatcaggcggtggcggcgggcctagatggcggaactgcagctggacaaggaggtggcgagggtgggaaggcgctccaggtcccggccctccagagcgcgccgggggaggaggcgctgccaggtgggtgcgcctcaatgttggtggcacctacttcgtcacaacacgtcagaccctaggtcgggagcccaagtcatttctgtgcaggctctgttgtcaggaagaccctgaattggatagcgacaaggacgagacaggcgcatatctcatcgacagagaccctacgtatttcggaccaatcctcaactaccttagacacggaaagctgatcatcactaaggagctggcagaggagggcgttctagaggaggccgagttctacaacatcgcttcattggtacgcctggtcaaagaacgaatcagggataacgaaaaccgaacatctcagggacctgtcaaacatgtatacagggtgctgcagtgtcaggaggaggaactcacacaaatggtgtcgacaatgtccgacggatggaaatttgagcagctgatttcaataggatcatcttacaactacgggaacgaagatcaggctgaattcctgtgtgtggtgtcaagagaactcaacaactcaactaatggtatcgtaatcgagccttccgagaaagcaaagatcttacaggaacgaggtagtaggatgtag

SEQ ID NO: 186085 - DNA, 792 bp, Artificial Sequence
  derived and/or modified sequence
atggccgagctgcagctggaccctgccatggccggcctgggcggcggcggcggcagcggcgtgggagatggcggcggccctgtgcggggcccccccagccccaggcctgctggccccaccccccggggccacggccggcctgctgctgctgtggcccagcccctggagcccggccctggccccccagagagagctgggggcggcggggccgcccgctgggtgcggctgaatgtgggcggcacctactttgtgaccacccggcagaccctgggccgggagcccaagagcttcctgtgccgcctgtgctgccaggaggaccctgagctggacagcgacaaggatgagaccggggcctacctgattgaccgggaccccacctacttcggccccatcctgaactacctgcggcacggcaagctgatcatcaccaaggagctggccgaggagggcgtgctggaggaggccgagttctacaacatcgccagcctggtgcggctggtgaaggagcgcatccgggacaatgaaaatagaaccagccagggccctgtgaagcacgtgtacagagtgctgcagtgccaggaggaggagctgacccagatggtgtccaccatgtctgatggctggaagtttgagcagctgatcagcatcggcagcagctacaactatggaaatgaagaccaggccgagttcctgtgtgtggtgtcccgggagctgaacaacagcaccaatggaattgtgattgagcccagcgagaaggccaagatcctgcaggagcggggcagcaggatgtag

SEQ ID NO: 186086 - DNA, 738 bp, Artificial Sequence
  derived and/or modified sequence
agcctgcccagaaatggacctgcccggctgcgggccggcagcagcggcggcggcggcggcccccgctggaggaactgctcctggacccggcgctggaggggctgggagggcgcccctggccctggccccccagagagagctgggggcggcggggccgcccgctgggtgcggctgaatgtgggcggcacctactttgtgaccacccggcagaccctgggccgggagcccaagagcttcctgtgccgcctgtgctgccaggaggaccctgagctggacagcgacaaggatgagaccggggcctacctgattgaccgggaccccacctacttcggccccatcctgaactacctgcggcacggcaagctgatcatcaccaaggagctggccgaggagggcgtgctggaggaggccgagttctacaacatcgccagcctggtgcggctggtgaaggagcgcatccgggacaatgaaaatagaaccagccagggccctgtgaagcacgtgtacagagtgctgcagtgccaggaggaggagctgacccagatggtgtccaccatgtctgatggctggaagtttgagcagctgatcagcatcggcagcagctacaactatggaaatgaagaccaggccgagttcctgtgtgtggtgtcccgggagctgaacaacagcaccaatggaattgtgattgagcccagcgagaaggccaagatcctgcaggagcggggcagcaggatgtag

SEQ ID NO: 186087 - DNA, 792 bp, Artificial Sequence
  derived and/or modified sequence
atggccgagctgcagctggaccccgccatggccggcctgggcggcggcgggggctccggtgtgggggacgggggcggcccagtacggggcccaccttccccacgtcctgcggggcccaccccgagaggtcatggccgacctgcagccgcagttgcacaaccgctggaacccggaccaggaccacccgaacgtgctggcggcggcggggctgcccggtgggtcagactgaacgtggggggcacatactttgtgaccactcggcagaccctagggcgggagcctaagagcttcttatgtaggttgtgttgtcaggaagaccctgagctggacagtgataaggatgaaacgggggcctacctgattgatcgagatcccacttacttcggtcctatcctgaattacttgagacacggaaagctgatcattaccaaggagctggcagaggagggggtgctcgaggaagcagagttttataatattgcttcccttgtgcggttagtcaaagaacggatccgcgataacgagaaccgaacctcacagggccctgtaaaacacgtgtatcgggtcctgcagtgccaggaagaggagcttacgcaaatggtctcaaccatgagcgatgggtggaaattcgagcagttaatttccattggcagtagctacaactatggcaatgaagaccaggcggaattcttgtgcgtggtgagtcgcgaactcaacaactcgactaatggtatcgttattgagccgtctgaaaaagcaaagattctccaggaacgcggcagcagaatgtag

SEQ ID NO: 186088 - DNA, 738 bp, Artificial Sequence
  derived and/or modified sequence
agcctgccccggaacggccccgcccggctgcgggccggcagcagcggaggcggcggagggccaaggtggaggaactgctcatggacccggagatggaggggatgggaaggcgctccaggtccgggtcccccagagcgcgccgggggcggtggcgccgctcgttgggttaggctcaacgtgggtggcacatacttcgtgacaactcggcagaccctgggtcgtgaacctaagtcttttctttgtaggctgtgttgccaggaggatccagagctggattctgataaggatgagactggggcttacctgattgaccgggaccctacctacttcggccctatcttgaattatctgcgtcacggaaagcttatcatcacaaaggagcttgctgaagaaggcgtgcttgaggaggcagaattctataacattgcatctctggtacggctggtcaaagagagaatccgcgataatgagaacaggactagccaggggccagttaagcatgtgtaccgtgtcctgcagtgtcaggaggaagagctgactcaaatggtatccaccatgagtgacggatggaagtttgagcagctgatctcaatcggcagtagctacaactacggcaacgaagatcaggctgaatttctttgtgtggtctcccgggagcttaacaattctactaatggaatcgtcatcgagccttccgagaaagccaagatcctgcaagagcgtggatcccgtatgtag

SEQ ID NO: 186089 - DNA, 3696 bp, Artificial Sequence
  derived and/or modified sequence
tctccctgccgagaaatgggccggcccggctgcgcgcgggcagcagcggtggcggcggcggtccaagatggcggaactgcagctggacccggcgatggcggggctgggagggggcggcgggagtggggtgggcgacgggggtggcccagtccgcgggccccccagcccacgcccggctggccccacgccccgcgggcacggccgcccggctgccgccgtcgcgcagccgctggagccgggtcccggaccacccgagcgggcagggggcggcggcgcggcccgctgggtcaggctgaacgtgggaggcacctacttcgtgaccaccagacagaccttaggccgggagcccaagtcatttctctgccgcctctgctgccaggaggacccggagctggactcagacaaggatgagacaggagcctatctgattgacagggaccccacctactttggtcctatcctcaactacctccgccacgggaaactcatcatcactaaggagttggcagaagaaggtgtgctggaggaagcggagttttacaacatcgcgtcccttgtgcggctggttaaggaaaggatacgggacaatgagaacagaacttcacaaggccccgtgaagcacgtgtacagagtcctgcagtgtcaggaagaagagctcacgcagatggtgtccacgatgtccgacggctggaaattcgaacagctcatcagcatcggatcttcctataactacggcaatgaggatcaggcagaattcctctgtgttgtctccagagaactaaataattctaccaatggcatcgtcatagagccgagcgaaaaggcgaagattcttcaggagagaggatcgcggatgtaaactaagaccccgaaaactccagaccttcaggagagcagtcagcagagcccctctgtgaagtgaaacctcactcctgtccagtgaccgagccactgcaaagcacagctgatcctggccccctgtgaagaagtgttctggtcaaaactaaaggaactccctccccacctgcaggactccgaagacagtgcgacttctggctgcagaataccttttcagaaacctgctttcatttgcttagccagtattagaacagatctttacaacagcagctgggctgggttcccagtcggagcctttcggggatctgggggatgagggcggaaggcctagctccttggaaatggcctgtactttaaggacgctggagccaagaggattgttcccgtgccgtgccatggtttcaccctatgtgtgccacaatggacgttagcagctgcttcggaacaccgtccctcctatgcaccctccaagacgtgcagcagatgcaaagggttctagctgcagtttgtcgaattgaggttttaggtaaagcatagagttgccagagtaccccgcattcccatgaatagagcctccaaggaaagggaggatggggtgtcctttgttgtggttggaggttggtgatcattgctctggatttggggctcccggctgccaccacatgcagctttgcctcacctttctccagcagccgggaccctctggagagcttgttttccctccaagaagaggtttgagacaggcggcatcctgcactgagtcagacaagtgggagctgtaggaactgcacctgcagcctcttcttactccccattgaccctgtcttccttccctggctttttcaactggaccaaagatgaaggcacttatggaccctttgatggcttggagtggggaaggctgtttctttgaaagttgccaaatgtgttatgttgtgtctcagagagagttatttctgtgactctcttggaaatgccttgactgaatgtgcaatatttgtgtctcttggtttctaaccttggcggacctgctcccctctgtactgtccccagtggtatgtatgtatgtgctaggcagtctggggaccccctgtgtctctgaccacccccctgacccccgccattactttcttttctggagtgccatgctggcgaggatccggatgcggcagcaccctctttcgggctgcatccacagagtttgtgtccacactttctctccgagcatgtgggtctcgctgagcagtcatggaatgcggtagagccaggggaccctgtctgccccgaataactttcagtagtatggcagatggcacagagaaagggaaggggctctggggacttctccttctatgaaagcctcctcgagccaggtgctcctgggcaccttcagaagtgatgtcctgtgtgctccacagctcacctgcttgccaaggtacgtctgggtagtagtttctggaaatgactgcagactgtgccaaatgtcttttgagcttctgacctgaccatgcccagatggcataacttttccctaggaccctcagtctccttgtttctctgtatctgtagcatagcatagaacccggtatacaggggtttctgctgacacatcaacgtctacacacctatgcgccacattttacagctgtaaagtgttagatgaactgccgtcctcagtaaaagcagccaccccttcaagagtcacaggcatccatccagtcgtatctttcagagaaaaaaaaagttagatgtagccaaggaaagtagtgatcacgggaaggactgctctgagccgggtaggatggaggactttggaagaggcgctccttggccaggtccaatgagtaacatcagactgacagaggaaaagcagcttggtttgcggccttgtgcccagtctcgttgaggcgcttgtccctgtctgctttcctggggcatgcctgatcagcgtgggctggagctcctagaccaaccccagctttctcaccaggttcagcaaggaggcctgggggtcagacaccaatgttgagcacctcctgagggcgccgtttccttcattcctcttagattccatagttgccgccatgaaaagactgctcttgagccccaaggcacaggcacgtgctctgggaaatagacaggagtggtatttccgccctctcggagggctggtgttcaccaagtttccctcctcgctgcaacccaatgacacctgtattgttccagcgctccaggactctgggttcttaagatttctgggagcgttgttcacccaccccctttaggaaccaggctggtgttcttgcttgaaagcgttgtgccctctgagtgtctggctgatcacatcagagaggtctgcgtggcagtttggggctgtcacgtgaccagtgacccacactctctgctgcccagtactgccaagtggggagggtcctgcctttttctctgccccaggtctgggacgcaggtgatgccagccaggcccaggagtgcccagcatcccccaactgatgacacagtagcactgattctgtcttttcctcagaatctggcctttttccatggcaatgaggtggggcccagcctcctctaaagtgactttgtttctgcacagttgtaactgctcttggggatgtcagtgaggctgggagcagggagccacgggatgctgagagaggaggcccgagaggacaccccaccctccagcgtggcctttgatccagacttagggacgaggctgtcactggtgggcaccctctgttcctgtttgtgtgtttgaatagtctgaaatgctgtgactttttttgtgtgaataaagatatgaaacttctgaatctc

SEQ ID NO: 186090 - DNA, 3575 bp, Artificial Sequence
  derived and/or modified sequence
tccctgccgagaaatgggccggcccggctgcgcgcgggcagcagcggtggcggcggcggtccaagatggcggaactgcagctggacccggcgatggcggggctgggagggggcgccgggtcccggaccacccgagcgggcagggggcggcggcgcggcccgctgggtcaggctgaacgtgggaggcacctacttcgtgaccaccagacagaccttaggccgggagcccaagtcatttctctgccgcctctgctgccaggaggacccggagctggactcagacaaggatgagacaggagcctatctgattgacagggaccccacctactttggtcctatcctcaactacctccgccacgggaaactcatcatcactaaggagttggcagaagaaggtgtgctggaggaagcggagttttacaacatcgcgtcccttgtgcggctggttaaggaaaggatacgggacaatgagaacagaacttcacaaggccccgtgaagcacgtgtacagagtcctgcagtgtcaggaagaagagctcacgcagatggtgtccacgatgtccgacggctggaaattcgaacagctcatcagcatcggatcttcctataactacggcaatgaggatcaggcagaattcctctgtgttgtctccagagaactaaataattctaccaatggcatcgtcatagagccgagcgaaaaggcgaagattcttcaggagagaggatcgcggatgtaaactaagaccccgaaaactccagaccttcaggagagcagtcagcagagcccctctgtgaagtgaaacctcactcctgtccagtgaccgagccactgcaaagcacagctgatcctggccccctgtgaagaagtgttctggtcaaaactaaaggaactccctccccacctgcaggactccgaagacagtgcgacttctggctgcagaataccttttcagaaacctgctttcatttgcttagccagtattagaacagatctttacaacagcagctgggctgggttcccagtcggagcctttcggggatctgggggatgagggcggaaggcctagctccttggaaatggcctgtactttaaggacgctggagccaagaggattgttcccgtgccgtgccatggtttcaccctatgtgtgccacaatggacgttagcagctgcttcggaacaccgtccctcctatgcaccctccaagacgtgcagcagatgcaaagggttctagctgcagtttgtcgaattgaggttttaggtaaagcatagagttgccagagtaccccgcattcccatgaatagagcctccaaggaaagggaggatggggtgtcctttgttgtggttggaggttggtgatcattgctctggatttggggctcccggctgccaccacatgcagctttgcctcacctttctccagcagccgggaccctctggagagcttgttttccctccaagaagaggtttgagacaggcggcatcctgcactgagtcagacaagtgggagctgtaggaactgcacctgcagcctcttcttactccccattgaccctgtcttccttccctggctttttcaactggaccaaagatgaaggcacttatggaccctttgatggcttggagtggggaaggctgtttctttgaaagttgccaaatgtgttatgttgtgtctcagagagagttatttctgtgactctcttggaaatgccttgactgaatgtgcaatatttgtgtctcttggtttctaaccttggcggacctgctcccctctgtactgtccccagtggtatgtatgtatgtgctaggcagtctggggaccccctgtgtctctgaccacccccctgacccccgccattactttcttttctggagtgccatgctggcgaggatccggatgcggcagcaccctctttcgggctgcatccacagagtttgtgtccacactttctctccgagcatgtgggtctcgctgagcagtcatggaatgcggtagagccaggggaccctgtctgccccgaataactttcagtagtatggcagatggcacagagaaagggaaggggctctggggacttctccttctatgaaagcctcctcgagccaggtgctcctgggcaccttcagaagtgatgtcctgtgtgctccacagctcacctgcttgccaaggtacgtctgggtagtagtttctggaaatgactgcagactgtgccaaatgtcttttgagcttctgacctgaccatgcccagatggcataacttttccctaggaccctcagtctccttgtttctctgtatctgtagcatagcatagaacccggtatacaggggtttctgctgacacatcaacgtctacacacctatgcgccacattttacagctgtaaagtgttagatgaactgccgtcctcagtaaaagcagccaccccttcaagagtcacaggcatccatccagtcgtatctttcagagaaaaaaaaagttagatgtagccaaggaaagtagtgatcacgggaaggactgctctgagccgggtaggatggaggactttggaagaggcgctccttggccaggtccaatgagtaacatcagactgacagaggaaaagcagcttggtttgcggccttgtgcccagtctcgttgaggcgcttgtccctgtctgctttcctggggcatgcctgatcagcgtgggctggagctcctagaccaaccccagctttctcaccaggttcagcaaggaggcctgggggtcagacaccaatgttgagcacctcctgagggcgccgtttccttcattcctcttagattccatagttgccgccatgaaaagactgctcttgagccccaaggcacaggcacgtgctctgggaaatagacaggagtggtatttccgccctctcggagggctggtgttcaccaagtttccctcctcgctgcaacccaatgacacctgtattgttccagcgctccaggactctgggttcttaagatttctgggagcgttgttcacccaccccctttaggaaccaggctggtgttcttgcttgaaagcgttgtgccctctgagtgtctggctgatcacatcagagaggtctgcgtggcagtttggggctgtcacgtgaccagtgacccacactctctgctgcccagtactgccaagtggggagggtcctgcctttttctctgccccaggtctgggacgcaggtgatgccagccaggcccaggagtgcccagcatcccccaactgatgacacagtagcactgattctgtcttttcctcagaatctggcctttttccatggcaatgaggtggggcccagcctcctctaaagtgactttgtttctgcacagttgtaactgctcttggggatgtcagtgaggctgggagcagggagccacgggatgctgagagaggaggcccgagaggacaccccaccctccagcgtggcctttgatccagacttagggacgaggctgtcactggtgggcaccctctgttcctgtttgtgtgtttgaatagtctgaaatgctgtgactttttttgtgtgaataaagatatgaaacttctgaatctc

SEQ ID NO: 186091 - DNA, 792 bp, Artificial Sequence
  derived and/or modified sequence
atggccgagttgcagttggaccccgctatggcaggtctcggaggtggaggcggatcaggtgtgggcgatggaggcggtcccgtcagaggcccaccaagtcctagacccgcagggccaactcccaggggccatggtaggcccgcagctgccgttgcccagccactggagccaggcccaggcccacccgagcgggctggtggcggaggtgccgctagatgggtcagactgaatgtgggcggtacatactttgtcaccacaaggcagaccctgggcagagagccgaaatctttcctgtgtcgactatgctgtcaggaagatccagagctggactccgataaggatgagaccggcgcttacttgatcgatagagatccgacttactttgggccaatcctgaattatctcagacacggaaaactaatcataacaaaggaactggccgaggagggagtgctggaggaagccgagttttacaacatcgcgtccctcgtgcgcctggtgaaagaacgaatccgggacaacgagaatcgtaccagccagggacccgtgaagcatgtttatagagtgctgcagtgtcaggaagaagagctgacccagatggtgtctaccatgtccgatggatggaagttcgagcagcttatcagcatagggtcttcttataattacggcaatgaagaccaggcagagtttctgtgcgttgttagccgggagttgaacaatagtactaacggcatcgtgatcgaaccctctgaaaaggctaagattctgcaagagaggggctcgagaatgtag

SEQ ID NO: 186092 - DNA, 738 bp, Artificial Sequence
  derived and/or modified sequence
tcactaccaaggaacggtccagccagattaagggctgggagctccgggggaggtggcggaccacggtggcgcaactgctcttggaccagacgatggcggggttgggagggcgctcccggtcctggaccacctgaacgcgctgggggaggaggggcagccaggtgggttcggcttaacgtgggcggtacttactttgtcaccacaagacagacccttggcagagagcctaaaagcttcctgtgtcgactgtgttgccaggaagaccctgagctcgacagcgataaggacgagacaggtgcctacctgatagaccgtgatcctacttactttgggcctattctgaattaccttcggcatggcaaactcataatcactaaggaacttgccgaagagggcgtgttagaagaagccgaattttacaatatcgcttctcttgtgcggctcgtaaaggagcgcatccgggataatgagaaccgtactagccagggacctgtgaagcatgtgtacagagtactgcagtgtcaggaggaagaacttactcagatggtttccaccatgagcgacggctggaaattcgaacagctgatatctatcggtagctcttacaactacggaaatgaagaccaggccgagtttctgtgcgtggtgagtagagaactgaacaactctactaacggtatcgtgatcgagccctccgagaaggcgaagattctgcaagagcgcggatcccgaatgtag

SEQ ID NO: 186093 - DNA, 792 bp, Artificial Sequence
  derived and/or modified sequence
atggccgagctgcagctggaccccgccatggccggcctgggcggcggcggcggcagcggcgtgggcgacggcggcggccccgtgagaggcccccccagccccagacccgccggccccacccccagaggccacggcagacccgccgccgccgtggcccagcccctggagcccggccccggcccccccgagagagccggcggcggcggcgccgccagatgggtgagactgaacgtgggcggcacctacttcgtgaccaccagacagaccctgggcagagagcccaagagcttcctgtgcagactgtgctgccaggaggaccccgagctggacagcgacaaggacgagaccggcgcctacctgatcgacagagaccccacctacttcggccccatcctgaactacctgagacacggcaagctgatcatcaccaaggagctggccgaggagggcgtgctggaggaggccgagttctacaacatcgccagcctggtgagactggtgaaggagagaatcagagacaacgagaacagaaccagccagggccccgtgaagcacgtgtacagagtgctgcagtgccaggaggaggagctgacccagatggtgagcaccatgagcgacggctggaagttcgagcagctgatcagcatcggcagcagctacaactacggcaacgaggaccaggccgagttcctgtgcgtggtgagcagagagctgaacaacagcaccaacggcatcgtgatcgagcccagcgagaaggccaagatcctgcaggagagaggcagcagaatgtag

SEQ ID NO: 186094 - DNA, 738 bp, Artificial Sequence
  derived and/or modified sequence
agcctgcccagaaacggccccgccagactgagagccggcagcagcggcggcggcggcggccccagatggagaaactgcagctggaccagaagatggagaggctgggagggcgcccccggccccggcccccccgagagagccggcggcggcggcgccgccagatgggtgagactgaacgtgggcggcacctacttcgtgaccaccagacagaccctgggcagagagcccaagagcttcctgtgcagactgtgctgccaggaggaccccgagctggacagcgacaaggacgagaccggcgcctacctgatcgacagagaccccacctacttcggccccatcctgaactacctgagacacggcaagctgatcatcaccaaggagctggccgaggagggcgtgctggaggaggccgagttctacaacatcgccagcctggtgagactggtgaaggagagaatcagagacaacgagaacagaaccagccagggccccgtgaagcacgtgtacagagtgctgcagtgccaggaggaggagctgacccagatggtgagcaccatgagcgacggctggaagttcgagcagctgatcagcatcggcagcagctacaactacggcaacgaggaccaggccgagttcctgtgcgtggtgagcagagagctgaacaacagcaccaacggcatcgtgatcgagcccagcgagaaggccaagatcctgcaggagagaggcagcagaatgtag

SEQ ID NO: 186095 - protein, 739 aa, Artificial Sequence
  derived and/or modified sequence
MAPQKHGGGGGGGSGPSAGSGGGGFGGSAAVAAATASGGKSGGGSCGGGGSYSASSSSSAAAAAGAAVLPVKKPKMEHVQADHELFLQAFEKPTQIYRFLRTRNLIAPIFLHRTLTYMSHRNSRTNIKRKTFKVDDMLSKVEKMKGEQESHSLSAHLQLTFTGFFHKNDKPSPNSENEQNSVTLEVLLVKVCHKKRKDVSCPIRQVPTGKKQVPLNPDLNQTKPGNFPSLAVSSNEFEPSNSHMVKSYSLLFRVTRPGRREFNGMINGETNENIDVNEELPARRKRNREDGEKTFVAQMTVFDKNRRLQLLDGEYEVAMQEMEECPISKKRATWETILDGKRLPPFETFSQGPTLQFTLRWTGETNDKSTAPIAKPLATRNSESLHQENKPGSVKPTQTIAVKESLTTDLQTRKEKDTPNENRQKLRIFYQFLYNNNTRQQTEARDDLHCPWCTLNCRKLYSLLKHLKLCHSRFIFNYVYHPKGARIDVSINECYDGSYAGNPQDIHRQPGFAFSRNGPVKRTPITHILVCRPKRTKASMSEFLESEDGEVEQQRTYSSGHNRLYFHSDTCLPLRPQEMEVDSEDEKDPEWLREKTITQIEEFSDVNEGEKEVMKLWNLHVMKHGFIADNQMNHACMLFVENYGQKIIKKNLCRNFMLHLVSMHDFNLISIMSIDKAVTKLREMQQKLEKGESASPANEEITEEQNGTANGFSEINSKEKALETDSVSGVSKQSKKQKL

SEQ ID NO: 186096 - DNA, 2220 bp, Artificial Sequence
  derived and/or modified sequence
atggcccctcagaaacatggcggcggtggtggaggaggcagcggcccatcagcgggctcaggcggtggcggttttggtgggagcgctgcagtcgccgcggccacagcttctggtgggaaatccggcggcggcagctgcgggggagggggctcctattctgcgtcaagtagttctagcgccgccgcagcggccggtgccgcggtgttgcccgtgaaaaaaccaaaaatggaacatgttcaagccgatcacgagttatttcttcaagcattcgagaagcccacacaaatctacaggtttctgaggacacgcaatctgatagctcccatcttcctccaccggacactcacctacatgtcgcaccgcaattcgaggacaaacattaaacggaaaacattcaaggtcgatgacatgctctcaaaagtagagaaaatgaagggagagcaggagagccattcactctcagcccacttacagcttactttcacgggttttttccacaagaacgacaaacccagcccgaattccgaaaacgagcaaaattctgttaccctggaggtgctgcttgttaaggtgtgccacaagaagcgtaaggacgtcagttgtccaattcgccaagtcccaacgggcaagaagcaagtgcctctcaatcctgaccttaatcaaacaaaacctggcaacttccccagtctcgctgtgagtagcaacgaattcgagccttccaactctcatatggtcaaatcatactctctcttgttccgagtgacacggcctggaaggcgagagttcaacggaatgataaacggagagacaaacgaaaatatcgatgtgaacgaggagctgcctgctagaagaaagcgaaaccgggaagatggtgaaaaaactttcgtggcacagatgaccgttttcgacaagaatagaaggctacagctgctggacggagagtatgaagtcgcgatgcaagaaatggaagagtgtcccattagtaagaaacgggccacctgggagacgattctcgacggaaaaagattaccaccatttgaaactttttcccagggccccacgctgcaatttactctccggtggactggcgagaccaacgataaaagcacggctcccattgcaaagccactagcgactagaaacagcgaaagtctacaccaggaaaacaagcccggttctgtgaaacccacacagaccatcgctgttaaagaatctctgactactgacctgcagacacggaaagaaaaggacacaccaaatgaaaaccggcagaaacttagaatcttctaccaattcctctataacaataatactaggcaacagacagaggcaagggacgacctgcattgcccctggtgcaccttgaactgtcgcaagttgtacagtctattgaagcatttgaagctatgccacagccgcttcatatttaattatgtgtaccaccctaaaggtgcccgcatcgacgtgagtatcaacgaatgctatgacggtagctatgcaggcaacccccaggacatccacagacagccgggatttgccttttcccggaacggacccgtgaaacgaactcccataactcacatcttggtctgcagacctaagaggactaaagcctctatgagcgaatttctggaatcggaagacggggaagtggagcagcagcgtacctatagtagcggccacaataggttgtacttccactcagacacctgtctacctttgaggccgcaagaaatggaagttgattcagaagatgagaaggacccagagtggctccgcgaaaagaccatcacccagatcgaagaattttccgacgtgaatgagggtgagaaggaggtcatgaagttgtggaacctccatgtgatgaaacacggcttcatagccgacaatcaaatgaaccacgcttgtatgctcttcgtggaaaactacggacagaaaatcataaaaaaaaatttatgccggaactttatgttacatctcgtgtccatgcatgatttcaatctaatttccatcatgtcaatcgacaaagcagtgacaaaactccgagaaatgcagcaaaagcttgagaagggagaatcagctagtcctgccaatgaagagattacagaggagcagaatgggacagccaacggcttcagtgagattaacagcaaggagaaagctctagaaacagacagcgtgagcggagtaagcaaacaatctaaaaaacagaaactgtag

SEQ ID NO: 186097 - DNA, 2220 bp, Artificial Sequence
  derived and/or modified sequence
atggccccccagaagcacggcggcggcggcggcggcggcagcggccccagcgctggcagcggcggcggcggctttggaggcagcgctgctgtggccgccgccacagccagcggcggcaagagcggcggcggcagctgtggcggcggcggcagctacagcgccagcagcagcagcagcgctgctgctgctgctggagctgctgtgctgcctgtgaagaagcccaagatggagcacgtgcaggccgaccacgagctgttcctgcaggcctttgagaagcccacccagatctaccgcttcctgcggaccaggaacctgattgcccccatcttcctgcacaggaccctgacctacatgagccacaggaacagcaggaccaacatcaagaggaagaccttcaaggtggatgacatgctgagcaaggtggagaagatgaagggggagcaggagagccacagcctgagcgcccacctgcagctgaccttcaccggcttcttccacaagaatgacaagcccagccccaacagtgaaaatgagcagaacagcgtgaccctggaggtgctgctggtgaaggtgtgccacaagaagaggaaggatgtgtcctgccccatccggcaggtgcccaccgggaagaagcaggtgcccctgaacccagacctgaaccagaccaagccaggcaacttccccagcctggccgtgagcagcaatgaatttgagcccagcaacagccacatggtgaagagctacagcctgctcttccgggtgaccaggcctggaagaagagagttcaacggcatgatcaatggagagaccaatgaaaatattgatgtgaatgaggagctgcctgcccggaggaagaggaacagagaagatggagagaagacctttgtggcccagatgacagtgtttgacaagaacagaaggctgcagctgctggatggagaatatgaggtggccatgcaggagatggaggagtgccccatcagcaagaagagggccacctgggagaccatcctggatggcaagaggctgcccccatttgagaccttcagccagggccccaccctgcagttcaccctgcgctggacaggagagaccaatgacaagagcacagcccccatcgccaagcccctggccaccaggaacagcgagagcctgcaccaggagaacaagccaggctctgtgaagcccacccagaccatcgctgtgaaggagagcctgaccacagacctgcagaccaggaaggagaaggacaccccaaatgaaaatcggcagaagctgcgcatcttctaccagttcctgtacaacaacaacacccggcagcagacagaggccagagatgacctgcactgcccctggtgcaccctgaactgcaggaagctgtacagcctgctgaagcacctgaagctgtgccacagccgcttcatcttcaactacgtgtaccaccccaagggggccagaattgatgtgtccatcaatgaatgttatgatggcagctatgccggcaacccccaggacatccaccggcagcccggctttgccttcagcagaaatggacctgtgaagaggacccccatcacccacatcctggtgtgccggcccaagaggaccaaggcctccatgtctgagttcctggagagtgaagatggagaggtggagcagcagaggacctacagcagcggccacaaccggctgtacttccacagcgacacctgcctgcccctgcggccccaggagatggaggtggacagtgaagatgagaaggaccctgagtggctgcgggagaagaccatcacccagatcgaggagttcagtgatgtgaatgaaggagagaaggaggtgatgaagctgtggaacctgcacgtgatgaagcacggcttcatcgctgacaaccagatgaaccacgcctgcatgctgtttgtggagaactacggccagaagatcatcaagaagaacctgtgcaggaacttcatgctgcacctggtgtccatgcatgacttcaacctgatcagcatcatgagcattgacaaggctgtgaccaagctgcgggagatgcagcagaagctggagaagggggagagcgccagccctgccaatgaggagatcacagaggagcagaatggaacagccaacggcttcagcgagatcaacagcaaggagaaggccctggagacagacagcgtgtctggagtgtccaagcagagcaagaagcagaagctgtag

SEQ ID NO: 186098 - DNA, 2220 bp, Artificial Sequence
  derived and/or modified sequence
atggccccccagaagcacggcggcggcggcggcggcggcagcggccccagtgcgggcagcggcggcggcgggttcgggggctctgcggctgtggctgccgcgacagcaagcggcggaaagagcgggggcgggtcatgcggaggcggcgggagttactctgcctcatcctcttcatcagccgccgcagccgccggggccgccgtcctccccgtcaagaaaccaaaaatggaacacgtccaggccgaccatgaactgttcctgcaggcattcgagaagcctacacagatttataggttcttacgcacacggaatcttatcgcccctatcttcctgcaccggacccttacatatatgagccacagaaattcacgcaccaacataaaacggaaaactttcaaggtagacgacatgctgagcaaggtggagaaaatgaagggagaacaagagtctcactctttgagcgcacacctgcagcttacatttacaggattctttcacaaaaacgacaagccttcccccaactccgaaaatgagcagaactcagtgacattagaagttctcctggtgaaggtgtgccataagaagcgcaaggacgtatcatgtcctatacgccaggtgcccaccgggaagaagcaggttccgctgaaccccgacctcaaccagacgaagcccggtaactttccctcattggccgtgagtagcaatgaatttgagccttctaattcacacatggtcaagtcttattccttactgttcagagtcacgcgaccgggacgtagagagttcaacggaatgattaatggagaaacgaatgagaacattgatgtgaatgaggagttacctgccagaagaaagagaaacagggaagacggagagaaaactttcgtggcgcagatgactgtgtttgataagaaccggcggctgcagcttcttgatggagagtatgaagtcgcaatgcaggaaatggaggaatgccccatttccaagaagcgcgcgacctgggaaaccatactggacggtaaaagactgccaccttttgagacgttttcacaaggccccaccctgcagttcacactgcgctggacaggcgaaaccaacgacaaatcaacagcacccattgccaaacctctagctactcgcaatagtgagtcattacaccaggagaacaagccgggatctgtgaaacctacacaaacgatcgctgtaaaggagagcttgacaactgacttgcagactaggaaggaaaaagacactccaaacgaaaatcggcaaaaactgcgaatattctaccagtttctgtacaataataatacgaggcagcagactgaagcacgcgatgatctgcattgtccgtggtgcacactaaattgccggaagttatatagtctattgaagcacctgaaactgtgccattccaggttcatttttaattacgtatatcaccctaaaggggccagaatagacgtctctatcaatgaatgttatgacggtagctacgccggaaatccacaggacattcatcgacaacccggatttgcctttagtaggaatggccccgtgaaacgcacaccgatcacacacatcttggtgtgccgacccaaacgaacaaaggcttctatgagtgaattcctagaatccgaagacggggaggtagagcaacaaagaacttactcatctggtcataaccgcctatatttccactcagacacatgtttgcccctcaggccccaagaaatggaggtggattccgaggacgaaaaggatccagagtggctcagggagaagacaatcacccagatcgaagaattctctgatgtgaacgaaggtgaaaaagaagtgatgaagttatggaaccttcacgtgatgaagcacggcttcatcgcggacaatcaaatgaaccacgcctgcatgctgttcgtggaaaattacggccagaagatcatcaagaagaacctgtgccgaaacttcatgctccatttggtcagcatgcacgatttcaacctgatctcaattatgagtatagacaaagctgtcacaaagctgagggagatgcagcaaaaactggaaaaaggagagtcagctagcccggccaacgaagaaatcacagaggaacagaatgggacggctaatggcttttccgagatcaattcaaaggagaaggccctggagacagatagcgtctctggtgtttcaaagcagtccaaaaaacagaaactgtag

SEQ ID NO: 186099 - DNA, 4472 bp, Artificial Sequence
  derived and/or modified sequence
ccgaagcggagcggggctctgaggagacactttttttttcctccctccttccctcctctcctcctcccttcccttcccctctcctcccctctctcctccttcccccctcggtccgccggagcctgctggggcgagcggttggtattgcaggcgcttgctctccggggccgcccggcgggtagctggcggggggaggaggcaggaaccgcgatggcgcctcagaagcacggcggtgggggagggggcggctcggggcccagcgcggggtccgggggaggcggcttcgggggttcggcggcggtggcggcggcgacggcttcgggcggcaaatccggcggcgggagctgtggagggggtggcagttactcggcctcctcctcctcctccgcggcggcagcggcgggggctgcggtgttaccggtgaagaagccgaaaatggagcacgtccaggctgaccacgagcttttcctccaggcctttgagaagccaacacagatctatagatttcttcgaactcggaatctcatagcaccaatatttttgcacagaactcttacttacatgtctcatcgaaactccagaacaaacatcaaaaggaaaacatttaaagttgatgatatgttatcaaaagtagagaaaatgaaaggagagcaagaatctcatagcttgtcagctcatttgcagcttacgtttactggtttcttccacaaaaatgataagccatcaccaaactcagaaaatgaacaaaattctgttaccctggaagtcctgcttgtgaaagtttgccacaaaaaaagaaaggatgtaagttgtccaataaggcaagttcccacaggtaaaaagcaggtgcctttgaatcctgacctcaatcaaacaaaacccggaaatttcccgtcccttgcagtttccagtaatgaatttgaacctagtaacagccatatggtgaagtcttactcgttgctatttagagtgactcgtccaggaagaagagagtttaatggaatgattaatggagaaaccaatgaaaatattgatgtcaatgaagagcttccagccagaagaaaacgaaatcgtgaggatggggaaaagacatttgttgcacaaatgacagtatttgataaaaacaggcgcttacagcttttagatggggaatatgaagtagccatgcaggaaatggaagaatgtccaataagcaagaaaagagcaacatgggagactattcttgatgggaagaggctgcctccattcgaaacattttctcagggacctacgttgcagttcactcttcgttggacaggagagaccaatgataaatctacggctcctattgccaaacctcttgccactagaaattcagagagtctccatcaggaaaacaagcctggttcagttaaacctactcaaactattgctgttaaagaatcattgactacagatctacaaacaagaaaagaaaaggatactccaaatgaaaaccgacaaaaattaagaatattttatcagtttctctataacaacaatacaaggcaacaaactgaagcaagagatgacctgcattgcccttggtgtactctgaactgccgcaaactttatagtttactcaagcatcttaaactctgccatagcagatttatcttcaactatgtttatcatccaaaaggtgctaggatagatgtttctatcaatgagtgttatgatggctcctatgcaggaaatcctcaggatattcatcgccaacctggatttgcttttagtcgcaacggaccagttaagagaacacctatcacacatattcttgtgtgcaggccaaaacgaacaaaagcaagcatgtctgaatttcttgaatctgaagatggggaagtagaacagcaaagaacatatagtagtggccacaatcgtctgtatttccatagtgatacctgcttacctctccgtccacaagaaatggaagtagatagtgaagatgaaaaggatcctgaatggctaagagaaaaaaccattacacaaattgaagagttttctgatgttaatgaaggagagaaagaagtgatgaaactctggaatctccatgtcatgaagcatgggtttattgctgacaatcaaatgaatcatgcctgtatgctgtttgtagaaaattatggacagaaaataattaagaagaatttatgtcgaaacttcatgcttcatctagtcagcatgcatgactttaatcttattagcataatgtcaatagataaagctgttaccaagctccgtgaaatgcagcaaaaattagaaaagggggaatctgcttcccctgcaaacgaagaaataactgaagaacaaaatgggacagcaaatggatttagtgaaattaactcaaaagagaaagctttggaaacagatagtgtctcaggggtttcaaaacagagcaaaaaacaaaaactctgaaaagctctaaccccatgttatggacaaacactgaaattacattttagggaattcatcctctaagaattatgtttttgtttttaatcatatgttccaaacaggcactgttagatgaagtaaatgatttcaacaaggatatttgtatcagggttctacttcacttcattatgcagcattacatgtatatcacttttattgatgtcattaaaacattctgtactttaagcatgaaaagcaatatttcaaagtatttttaaactcaacaaatgtcatcaaatatgttgaattgatctagaaattatttcatatataaatcagaatttttttgcatttatgaacggctgtttttctactttgtaattgtgagacattttcttggggagggaaaattggaatggttcccttttttagaaattgaagtggtcttcatatgtcaactacagaaaaggaaaaaaatagaaattgaaggatttttatgaaattatattgcattactatttgcagtcaaactttgatccttgtttttgaaatcatttgtcaattcggaatgaaaaattataatgtaattttacattacataagttccttttacaattaaaaaatagcacttcttcatcttatgcctgtttgagaagatattaaattttcacattgttgacagtgaaatgctatgttggtttataagattacagaccatttgttttcatgtggataattttagtgcattgctcacccggtatgttttttttttttaacttgaacattttgcttgttttgtttttcttttttaattagataatcacacggaaaattaagctgttcatatctttaaattaggattgcaaaccaaggaaagaacgcatttgagattttaagatgtcacttataaggggagaagtgttcttaaaaagtcaaccagaaaactgttatgccttttatttgtttgcaaggatgtctttgtaatgtgtttcatgaatagaatatccaatagagataagctgacttgaatcattttgagcaattttgccctgtgttatatgtgtttcacgcacatatttgcagttggattttctccaacagaaagtggattcactactggcacattaacaagcaccaataggtttttattccaactccgagcactgtggttgagtaacatcacctcaattttttattatccttaaagatattgcattttcatattctttatttataaaggatcaatgctgctgtaaatacaggtatttttaattttaaaatttcattccaccaccatcagatgcagttccctattttgtttaatgaagggatatataagctttctaatggtgtcttcagaaatttataaaatgtaaatactgatttgactggtctttaagatgtgtttaactgtgaggctatttaacgaatagtgtggatgtgatttgtcatccagtattaagttcttagtcattgatttttgtgtttaaaaaaaaataggaaagagggaaactgcagctttcattacagattccttgattggtaagctctccaaatgatgagttctagtaaactctgatttttgcctctggatagtagatctcgagcgtttatctcgggctttaatttgctaaagctgtgcacatatgtaaaaaaaaaaaaaaaaagattattttaggggagatgtaggtgtagaattattgcttatgtcatttcttaagcagttatgctcttaatgcttaaaagaaggctagcattgtttgcacaaaaagttggtgattcccaccccaaatagtaataaaattacttctgttgagtaaactttttatgtcatcgtaaaagctgaaaaaatccctttgtttctatttataaaaaaagtgcttttctatatgtacccttgataacagattttgaagaaatcctgtaagatgataaagcatttgaatggtacagtagatgtaaaaaaaattcagtttaaaagaacatttgtttttacattaaatgtttatttgaaatcaaatgattttgtacataaagttcaataatataaaagctgtattctg

SEQ ID NO: 186100 - DNA, 2220 bp, Artificial Sequence
  derived and/or modified sequence
atggcccctcagaaacatgggggtgggggtggcggtggctccggccctagcgcgggatcgggcggtggcggtttcggaggctctgctgctgtggctgctgcaactgcctccgggggtaaatccggcggaggaagttgcggcggtggcggtagctactccgcatcctcttcgtcgagcgccgctgctgcggctggcgctgctgttctcccagtcaaaaagcctaagatggaacacgtgcaggccgatcacgaactattcctgcaagcttttgagaagcctacccaaatttaccggttccttcggactcggaaccttatcgcacctatctttctccatcggaccctgacatatatgtcacaccgtaacagcaggactaatattaagcgcaaaaccttcaaggtcgacgatatgttgagcaaagtggaaaaaatgaagggggagcaagaatctcattcgctctccgcccatctccagctgacgttcacagggttctttcacaagaatgataaaccatctcccaattctgaaaacgagcagaattccgtgaccctagaggtgctccttgttaaagtgtgtcacaagaagaggaaagatgtgagctgccctattagacaagtgccaacgggtaaaaagcaggtgcccttgaatcccgatttaaaccagactaaacctggcaacttcccatcactagctgtgtccagtaatgagttcgagccctctaactcacatatggttaagtcctatagcctcttattccgagttaccaggccaggcagaagagaattcaacgggatgataaacggggagactaatgagaacattgatgttaacgaagaattgcccgctcggaggaaaagaaaccgcgaggatggggaaaagacattcgttgcccagatgacagtattcgataagaaccggcgtctgcagctgcttgatggagaatatgaggtcgctatgcaagagatggaggaatgccctatttccaagaagcgtgccacctgggagacaattctggacggcaagcggcttccgccatttgagaccttctcccagggacccactctccaatttaccctgagatggacaggagagaccaatgataagtccactgctccaattgccaaacccctggcaacacgaaactctgagtctctgcaccaggagaacaagcccggaagtgtgaaacctacccagactattgctgtaaaggagtcactaacaactgacctccagacgcgcaaggaaaaggataccccaaatgagaatagacagaagcttagaatcttttaccaattcctctataataataataccagacaacagacagaggctcgggacgatctccactgcccatggtgcactctcaactgtcggaagctgtactcgttgcttaagcatctgaaactgtgtcacagccgcttcatcttcaattatgtttatcatccgaagggcgcacgcatcgatgtgtcgattaacgaatgttatgacgggtcgtacgccggaaacccccaagatatccatcggcaacctggctttgcttttagcaggaatgggcctgtgaaaaggactccaattactcacatcctagtctgtaggcctaagcgaacaaaggcttcaatgagtgaattcctggaaagcgaagacggtgaagtggagcagcagcgtacctatagcagcggacacaatagactgtattttcactctgatacctgtttgcctttacgaccccaggaaatggaagtggatagcgaggatgagaaggaccctgaatggctgagagaaaagactatcactcagattgaagagttctcagacgtgaatgagggcgagaaggaagtgatgaagctctggaacctgcatgtaatgaagcatggatttatagctgataaccagatgaatcacgcctgcatgttgttcgtggagaactacggccagaagatcatcaagaagaacctgtgtaggaactttatgcttcacctggtcagtatgcacgacttcaatctgatctccattatgtccattgataaagctgtgacgaagctgcgtgagatgcagcagaaactagagaagggagagagcgcatccccagccaacgaagagataactgaggaacagaacgggacggccaatggatttagcgagattaatagtaaagagaaagccctcgagaccgatagtgttagcggagtatcaaaacagtcaaagaagcagaaactgtag

SEQ ID NO: 186101 - DNA, 2220 bp, Artificial Sequence
  derived and/or modified sequence
atggccccccagaagcacggcggcggcggcggcggcggcagcggccccagcgccggcagcggcggcggcggcttcggcggcagcgccgccgtggccgccgccaccgccagcggcggcaagagcggcggcggcagctgcggcggcggcggcagctacagcgccagcagcagcagcagcgccgccgccgccgccggcgccgccgtgctgcccgtgaagaagcccaagatggagcacgtgcaggccgaccacgagctgttcctgcaggccttcgagaagcccacccagatctacagattcctgagaaccagaaacctgatcgcccccatcttcctgcacagaaccctgacctacatgagccacagaaacagcagaaccaacatcaagagaaagaccttcaaggtggacgacatgctgagcaaggtggagaagatgaagggcgagcaggagagccacagcctgagcgcccacctgcagctgaccttcaccggcttcttccacaagaacgacaagcccagccccaacagcgagaacgagcagaacagcgtgaccctggaggtgctgctggtgaaggtgtgccacaagaagagaaaggacgtgagctgccccatcagacaggtgcccaccggcaagaagcaggtgcccctgaaccccgacctgaaccagaccaagcccggcaacttccccagcctggccgtgagcagcaacgagttcgagcccagcaacagccacatggtgaagagctacagcctgctgttcagagtgaccagacccggcagaagagagttcaacggcatgatcaacggcgagaccaacgagaacatcgacgtgaacgaggagctgcccgccagaagaaagagaaacagagaggacggcgagaagaccttcgtggcccagatgaccgtgttcgacaagaacagaagactgcagctgctggacggcgagtacgaggtggccatgcaggagatggaggagtgccccatcagcaagaagagagccacctgggagaccatcctggacggcaagagactgccccccttcgagaccttcagccagggccccaccctgcagttcaccctgagatggaccggcgagaccaacgacaagagcaccgcccccatcgccaagcccctggccaccagaaacagcgagagcctgcaccaggagaacaagcccggcagcgtgaagcccacccagaccatcgccgtgaaggagagcctgaccaccgacctgcagaccagaaaggagaaggacacccccaacgagaacagacagaagctgagaatcttctaccagttcctgtacaacaacaacaccagacagcagaccgaggccagagacgacctgcactgcccctggtgcaccctgaactgcagaaagctgtacagcctgctgaagcacctgaagctgtgccacagcagattcatcttcaactacgtgtaccaccccaagggcgccagaatcgacgtgagcatcaacgagtgctacgacggcagctacgccggcaacccccaggacatccacagacagcccggcttcgccttcagcagaaacggccccgtgaagagaacccccatcacccacatcctggtgtgcagacccaagagaaccaaggccagcatgagcgagttcctggagagcgaggacggcgaggtggagcagcagagaacctacagcagcggccacaacagactgtacttccacagcgacacctgcctgcccctgagaccccaggagatggaggtggacagcgaggacgagaaggaccccgagtggctgagagagaagaccatcacccagatcgaggagttcagcgacgtgaacgagggcgagaaggaggtgatgaagctgtggaacctgcacgtgatgaagcacggcttcatcgccgacaaccagatgaaccacgcctgcatgctgttcgtggagaactacggccagaagatcatcaagaagaacctgtgcagaaacttcatgctgcacctggtgagcatgcacgacttcaacctgatcagcatcatgagcatcgacaaggccgtgaccaagctgagagagatgcagcagaagctggagaagggcgagagcgccagccccgccaacgaggagatcaccgaggagcagaacggcaccgccaacggcttcagcgagatcaacagcaaggagaaggccctggagaccgacagcgtgagcggcgtgagcaagcagagcaagaagcagaagctgtag

SEQ ID NO: 186102 - protein, 1630 aa, Artificial Sequence
  derived and/or modified sequence
MLKCIPLWRCNRHVESVDKRHCSLQAVPEEIYRYSRSLEELLLDANQLRELPKPFFRLLNLRKLGLSDNEIQRLPPEVANFMQLVELDVSRNDIPEIPESIKFCKALEIADFSGNPLSRLPDGFTQLRSLAHLALNDVSLQALPGDVGNLANLVTLELRENLLKSLPASLSFLVKLEQLDLGGNDLEVLPDTLGALPNLRELWLDRNQLSALPPELGNLRRLVCLDVSENRLEELPAELGGLVLLTDLLLSQNLLRRLPDGIGQLKQLSILKVDQNRLCEVTEAIGDCENLSELILTENLLMALPRSLGKLTKLTNLNVDRNHLEALPPEIGGCVALSVLSLRDNRLAVLPPELAHTTELHVLDVAGNRLQSLPFALTHLNLKALWLAENQAQPMLRFQTEDDARTGEKVLTCYLLPQQPPPSLEDAGQQGSLSETWSDAPPSRVSVIQFLEAPIGDEDAEEAAAEKRGLQRRATPHPSELKVMKRSIEGRRSEACPCQPDSGSPLPAEEEKRLSAESGLSEDSRPSASTVSEAEPEGPSAEAQGGSQQEATTAGGEEDAEEDYQEPTVHFAEDALLPGDDREIEEGQPEAPWTLPGGRQRLIRKDTPHYKKHFKISKLPQPEAVVALLQGMQPDGEGPVAPGGWHNGPHAPWAPRAQKEEEEEEEGSPQEEEVEEEEENRAEEEEASTEEEDKEGAVVSAPSVKGVSFDQANNLLIEPARIEEEELTLTILRQTGGLGISIAGGKGSTPYKGDDEGIFISRVSEEGPAARAGVRVGDKLLEVNGVALQGAEHHEAVEALRGAGTAVQMRVWRERMVEPENAVTITPLRPEDDYSPRERRGGGLRLPLLPPESPGPLRQRHVACLARSERGLGFSIAGGKGSTPYRAGDAGIFVSRIAEGGAAHRAGTLQVGDRVLSINGVDVTEARHDHAVSLLTAASPTIALLLEREAGGPLPPSPLPHSSPPTAAVATTSITTATPGVPGLPSLAPSLLAAALEGPYPVEEIRLPRAGGPLGLSIVGGSDHSSHPFGVQEPGVFISKVLPRGLAARSGLRVGDRILAVNGQDVRDATHQEAVSALLRPCLELSLLVRRDPAPPGLRELCIQKAPGERLGISIRGGARGHAGNPRDPTDEGIFISKVSPTGAAGRDGRLRVGLRLLEVNQQSLLGLTHGEAVQLLRSVGDTLTVLVCDGFEASTDAALEVSPGVIANPFAAGIGHRNSLESISSIDRELSPEGPGKEKELPGQTLHWGPEATEAAGRGLQPLKLDYRALAAVPSAGSVQRVPSGAAGGKMAESPCSPSGQQPPSPPSPDELPANVKQAYRAFAAVPTSHPPEDAPAQPPTPGPAASPEQLSFRERQKYFELEVRVPQAEGPPKRVSLVGADDLRKMQEEEARKLQQKRAQMLREAAEAGAEARLALDGETLGEEEQEDEQPPWASPSPTSRQSPASPPPLGGGAPVRTAKAERRHQERLRVQSPEPPAPERALSPAELRALEAEKRALWRAARMKSLEQDALRAQMVLSRSQEGRGTRGPLERLAEAPSPAPTPSPTPVEDLGPQTSTSPGRLSPDFAEELRSLEPSPSPGPQEEDGEVALVLLGRPSPGAVGPEDVALCSSRRPVRPGRRGLGPVPS

SEQ ID NO: 186103 - protein, 1549 aa, Artificial Sequence
  derived and/or modified sequence
MQLVELDVSRNDIPEIPESIKFCKALEIADFSGNPLSRLPDGFTQLRSLAHLALNDVSLQALPGDVGNLANLVTLELRENLLKSLPASLSFLVKLEQLDLGGNDLEVLPDTLGALPNLRELWLDRNQLSALPPELGNLRRLVCLDVSENRLEELPAELGGLVLLTDLLLSQNLLRRLPDGIGQLKQLSILKVDQNRLCEVTEAIGDCENLSELILTENLLMALPRSLGKLTKLTNLNVDRNHLEALPPEIGGCVALSVLSLRDNRLAVLPPELAHTTELHVLDVAGNRLQSLPFALTHLNLKALWLAENQAQPMLRFQTEDDARTGEKVLTCYLLPQQPPPSLEDAGQQGSLSETWSDAPPSRVSVIQFLEAPIGDEDAEEAAAEKRGLQRRATPHPSELKVMKRSIEGRRSEACPCQPDSGSPLPAEEEKRLSAESGLSEDSRPSASTVSEAEPEGPSAEAQGGSQQEATTAGGEEDAEEDYQEPTVHFAEDALLPGDDREIEEGQPEAPWTLPGGRQRLIRKDTPHYKKHFKISKLPQPEAVVALLQGMQPDGEGPVAPGGWHNGPHAPWAPRAQKEEEEEEEGSPQEEEVEEEEENRAEEEEASTEEEDKEGAVVSAPSVKGVSFDQANNLLIEPARIEEEELTLTILRQTGGLGISIAGGKGSTPYKGDDEGIFISRVSEEGPAARAGVRVGDKLLEVNGVALQGAEHHEAVEALRGAGTAVQMRVWRERMVEPENAVTITPLRPEDDYSPRERRGGGLRLPLLPPESPGPLRQRHVACLARSERGLGFSIAGGKGSTPYRAGDAGIFVSRIAEGGAAHRAGTLQVGDRVLSINGVDVTEARHDHAVSLLTAASPTIALLLEREAGGPLPPSPLPHSSPPTAAVATTSITTATPGVPGLPSLAPSLLAAALEGPYPVEEIRLPRAGGPLGLSIVGGSDHSSHPFGVQEPGVFISKVLPRGLAARSGLRVGDRILAVNGQDVRDATHQEAVSALLRPCLELSLLVRRDPAPPGLRELCIQKAPGERLGISIRGGARGHAGNPRDPTDEGIFISKVSPTGAAGRDGRLRVGLRLLEVNQQSLLGLTHGEAVQLLRSVGDTLTVLVCDGFEASTDAALEVSPGVIANPFAAGIGHRNSLESISSIDRELSPEGPGKEKELPGQTLHWGPEATEAAGRGLQPLKLDYRALAAVPSAGSVQRVPSGAAGGKMAESPCSPSGQQPPSPPSPDELPANVKQAYRAFAAVPTSHPPEDAPAQPPTPGPAASPEQLSFRERQKYFELEVRVPQAEGPPKRVSLVGADDLRKMQEEEARKLQQKRAQMLREAAEAGAEARLALDGETLGEEEQEDEQPPWASPSPTSRQSPASPPPLGGGAPVRTAKAERRHQERLRVQSPEPPAPERALSPAELRALEAEKRALWRAARMKSLEQDALRAQMVLSRSQEGRGTRGPLERLAEAPSPAPTPSPTPVEDLGPQTSTSPGRLSPDFAEELRSLEPSPSPGPQEEDGEVALVLLGRPSPGAVGPEDVALCSSRRPVRPGRRGLGPVPS

SEQ ID NO: 186104 - protein, 755 aa, Artificial Sequence
  derived and/or modified sequence
MQPDGEGPVAPGGWHNGPHAPWAPRAQKEEEEEEEGSPQEEEVEEEEENRAEEEEASTEEEDKEGAVVSAPSVKGVSFDQANNLLIEPARIEEEELTLTILRQTGGLGISIAGGKGSTPYKGDDEGIFISRVSEEGPAARAGVRVGDKLLEVNGVALQGAEHHEAVEALRGAGTAVQMRVWRERMVEPENAVTITPLRPEDDYSPRERRGGGLRLPLLPPESPGPLRQRHVACLARSERGLGFSIAGGKGSTPYRAGDAGIFVSRIAEGGAAHRAGTLQVGDRVLSINGVDVTEARHDHAVSLLTAASPTIALLLEREAGGPLPPSPLPHSSPPTAAVATTSITTATPGVPGLPSLAPSLLAAALEGPYPVEEIRLPRAGGPLGLSIVGGSDHSSHPFGVQEPGVFISKVLPRGLAARSGLRVGDRILAVNGQDVRDATHQEAVSALLRPCLELSLLVRRDPAPPGLRELCIQKAPGERLGISIRGGARGHAGNPRDPTDEGIFISKVSPTGAAGRDGRLRVGLRLLEVNQQSLLGLTHGEAVQLLRSVGDTLTVLVCDGFEASTDAALEVSPGVIANPFAAGIGHRNSLESISSIDRELSPEGPGKEKELPGQTLHWGPEATEAAGRGLQPLKLDYRALAAVPSAGSVQRVPSGAAGGKMAESPCSPSGQQPPSPPSPDELPANVKQAYRAFAAVPTSHPPEDAPAQPPTPGPAASPEQLSFRERQKYFELEVRVPQAEGPLRPGRRGLGPVPS

SEQ ID NO: 186105 - DNA, 4893 bp, Artificial Sequence
  derived and/or modified sequence
atgctgaagtgtatccccctctggcgctgcaacaggcacgttgaatccgtcgacaagagacattgcagcctacaggctgtccccgaagagatctaccgatatagcaggagcctcgaggaattgttattggacgcgaaccagctgcgggagttacctaaacccttttttcgcctccttaacctgagaaaactcggtttatctgataatgaaatccagaggcttcctcccgaagtcgccaattttatgcagttggtggagttagacgtcagccgaaacgatatcccagagatccctgaatcaattaagttctgcaaggcactagagattgctgactttagcggaaatcccctatcccgtctgcccgacgggtttacacaactgcggtcacttgcacacctcgctctgaatgatgtcagcctccaggcccttcctggagacgtggggaacctggctaacctggtgacactggagcttcgggagaatttacttaagtccctgccagcatcattgtcttttctcgttaagctcgaacaactggatttgggtggtaacgacctggaagtgctgcctgacacactgggcgctctgcccaaccttagggaactctggttggataggaatcagttgagtgccctgcccccagaactcggcaatcttcggcgcttagtctgtctcgatgtgtccgaaaatcgactcgaagaactccccgccgagctgggtgggctcgtgttgctgaccgaccttctccttagccagaacctgctaaggagactacctgacggcatcgggcagctgaagcagcttagtatcttaaaagttgatcagaacagattgtgcgaggtcacagaggccatcggggactgcgaaaacctctcagagctgattctgaccgaaaacctgctcatggcactgccgcgatctttgggcaagcttacgaaattaaccaatctcaatgttgatagaaatcatcttgaggcattaccacctgagattggcgggtgtgtggcactgtccgtgctatcactccgcgacaacagactggccgttctgcccccagaattggcacataccacggagctgcacgtgttggatgtagccggcaaccgcctacaatccctgccattcgcactgacgcacttgaatctgaaagcattatggctcgctgagaaccaggcccaacctatgctgagattccagaccgaagatgacgcaaggacaggcgagaaagtcctcacctgctatctgctcccccaacagccccccccctctttggaggacgctggccagcaggggtccctgtctgaaacttggtccgatgcccccccttcccgtgtatcagtcatacaattccttgaagcccctattggagatgaagatgcagaggaggcggccgcagagaaacgaggcttgcaacggcgtgctaccccacaccccagtgagttaaaagtgatgaaacgatcaatcgagggaaggagaagcgaggcttgtccctgtcagcccgatagtgggagccccttgcccgccgaggaggaaaaacgcctgagcgcggaaagcggcttgtcggaggattcccgcccttctgctagcacggtgtcagaagctgaacctgaaggtccctccgcagaggctcagggaggctctcagcaagaggctactaccgctggcggggaggaagacgccgaggaggattatcaggagccaaccgtgcactttgccgaagatgcactactcccgggtgatgatcgcgagatcgaggaaggacagcccgaggcgccttggactctgccgggcgggcggcagcggctgatcaggaaggacacgccacattacaaaaaacatttcaaaatatctaagttgccacagccggaggctgttgtggctctcctccagggcatgcagcctgacggggaagggccagtggcccccgggggctggcataatgggcctcacgccccttgggcaccacgggcccagaaggaagaggaagaggaggaggagggttccccccaggaggaagaagttgaggaagaggaagagaacagagctgaggaggaggaggcttccaccgaggaggaggataaggagggggcggtcgtttccgctccctcagtgaagggagtgagtttcgaccaggccaacaatttactgattgagcctgcaagaatcgaggaagaggaacttacattaacaatcctgcgacaaacaggcgggctcgggatttcaatcgcaggcggcaaagggagcactccttataaaggagacgatgagggaatctttatctctcgcgtgtccgaggagggaccagcagcgagagccggggtaagagtgggggataaactgctcgaagtgaacggagtggccctgcagggtgccgagcaccacgaggccgtggaagccctgcggggcgcaggcaccgccgtccagatgagggtgtggagggagagaatggtggagccggagaacgcagtgaccatcacaccattgcgtcctgaagacgactattcacctagggaacggcggggtggaggccttaggttaccactgctacctcctgagagcccagggccattgcggcagagacatgttgcgtgcctagccagaagtgagaggggactcggcttttccattgctggcgggaaaggcagcactccatatcgcgccggtgacgcgggaatcttcgtctcaagaatcgccgagggaggcgcagcccatcgcgccggcacgctgcaggtgggcgacagggtgctgtcgataaacggggtagatgttaccgaggctcgacatgatcacgctgttagtctcctcaccgctgcttcacctacgatcgctctcctcctcgaacgcgaggctggcggacccttacccccgtcccctctcccacatagtagcccccctaccgcggccgtggccacaacctccattacgaccgcgactcctggggtcccaggcctcccctcacttgcgccaagtcttctcgcagccgcattggagggaccctacccagttgaggaaatacgactgcctagggcagggggccctttggggttatctattgtgggcgggtctgaccacagttcacatcccttcggtgtgcaggagcctggggtgttcatttctaaggtcctgcctcggggcttggccgcacgcagcggcttgcgagtgggtgatcggattttggccgtgaatggacaggatgtgcgtgacgccacccatcaggaggcagtgagtgcacttcttaggccctgcctggagctgagtcttctggtgcggagggaccctgcccctcctggactgagggaactttgtatccagaaggccccaggagaaaggctcggaatcagtattagaggaggagcacgcggacatgcagggaatcctcgggaccctaccgatgagggtatttttatatccaaggtaagtcctactggcgctgctggtagggacgggagattacgggtgggactccgattactagaggtcaaccagcagtccctgttgggtctgacacacggagaggctgtccagcttctgcgctcggtgggggacactttgaccgtgttggtttgtgacggttttgaggcgtccactgatgcagcgcttgaggtgagcccaggggttatagccaatccgttcgctgccggcattggccacagaaacagccttgagtctatttcaagtattgaccgagaactcagccctgaggggccaggcaaggaaaaagaattacctggccaaacccttcactgggggccggaggctaccgaggccgccggacgcggattacaacccctcaaactggattatcgcgcactcgcggcagtccccagtgcagggagcgtgcagcgggtaccgagcggcgcggcaggtggtaaaatggctgagtctccttgcagtccatcagggcagcagccaccctcccctccttctccagatgagcttccagccaatgtgaaacaggcatacagggcatttgctgcagtacccaccagtcatcccccagaagatgcaccagctcaacccccgactccagggcctgccgcctcccctgagcaattgtcgttccgggagcggcagaaatattttgagctggaggtccgcgttccacaggcagagggtcctcccaaacgcgtgagcttggtcggtgctgatgatttaaggaaaatgcaggaggaggaggcacggaagcttcaacagaaaagagcccagatgcttagagaggcagctgaggctggggcagaagccaggttggcccttgatggagaaacattaggcgaggaggagcaggaagacgagcagccgccgtgggcctcgccgtcccctacgtctcgccagagccctgcctcgcctcctccgctaggaggaggggcaccggtccggaccgctaaagcagagcggaggcaccaggaacggctgcgggtgcaatcaccagaacctcctgctcccgaacgggccctgagccccgcagagctaagggcgcttgaagctgagaagagagcactgtggagagcagccagaatgaagagcctggagcaagatgccctgcgcgcccagatggtgctctcacgttctcaggagggacgcggaactcgaggtcctctggagcgcctcgccgaggctccctctcctgcccccactccgtcccccacgccggtggaggatctcggcccccaaaccagtactagccctggccggctctccccagattttgcagaggagctgcggtccttggaaccctcccccagtcccgggccgcaggaagaggacggagaagtggccttagtgctattggggaggccctccccgggtgcggtgggcccggaagacgtcgctctctgtagctcccgaaggccagtgcggccagggaggcgcggtctgggacccgtacctagctag

SEQ ID NO: 186106 - DNA, 4650 bp, Artificial Sequence
  derived and/or modified sequence
atgcaacttgtcgaactggatgtgtcaagaaatgatattcccgaaattccagagagtattaaattctgtaaggcactggagattgcagacttttctggaaatccacttagcaggctgcccgatggtttcacgcagcttcggtctctagcacatttggcgctcaatgacgtatcgctgcaagctctccccggcgacgttgggaacctggctaatttagtcactctcgaattgcgagagaatcttctgaagagccttccagcatctctgagctttctcgttaagcttgaacagctcgacctcgggggtaatgatctggaggtcttaccggatacacttggcgcactccctaacctcagggagctgtggctggatcgcaaccagttgtcagcccttccccctgaactgggtaacttaaggcggttagtgtgcctcgacgtgtcagagaatagacttgaggaactgcccgctgagctgggaggactggtcttgctgaccgatctgctactgagtcagaatttgctgaggcggctcccagacggaatcggacaactcaaacagctgtctattctgaaggtggatcaaaataggttgtgtgaggtgaccgaggccatcggtgactgtgagaatctgtccgagctgattcttaccgagaatctactgatggctctgccacgttcattgggaaagctgacaaagctaactaacctgaatgtggatagaaatcatttggaggccctgcccccagaaattggagggtgcgtggccctctccgttttgtctctgcgcgataaccgtcttgcagtgctccccccagaactggctcacacaactgaactgcacgtgttggacgtagcaggcaacagattgcagtctctgccattcgcccttacccatctcaacttgaaagcattatggctggccgagaatcaagcccagccgatgctgcgatttcagaccgaagacgatgcccggacaggcgagaaagtcctgacatgctatctactcccccagcagccaccaccaagcctggaagacgctggccaacagggctccctgagtgagacgtggtcagatgctccccctagccgggtctctgtcatacagttcctcgaggctcctatcggagatgaagacgctgaggaggctgccgccgaaaagagggggctgcagaggcgagccacaccccacccctccgagctcaaagtcatgaagcgaagtatcgaaggccgccgcagcgaagcctgcccctgccagcccgactcaggctcaccccttccggctgaagaggagaaacgtctatccgctgagtcagggctttcagaggacagcagaccttctgccagcactgtttctgaagcagagcccgagggcccgagtgccgaggcccagggaggctcgcaacaagaggcaaccacagccggcggtgaggaggacgccgaagaggactaccaggagcccactgttcatttcgccgaagacgcccttttgccaggagacgaccgtgagatcgaagagggccagcctgaagcaccatggacattgcccggtggcaggcagcgcctgattcggaaggatacaccccattacaagaagcattttaaaatctccaagctccctcagccggaagccgtggtcgccctgctgcagggcatgcagccggacggcgaaggacctgtggctccaggtgggtggcacaatggacctcacgccccctgggcgccgcgggcccagaaggaagaagaagaggaagaagaaggctctccccaggaggaggaagtagaggaggaggaggagaacagggccgaagaagaagaggccagcactgaagaggaggacaaagagggagcggtggtttcagcgccatcggtgaagggcgtgtcttttgaccaggccaataacctgctcatcgagccggcacggattgaggaggaggagttaactcttacaattctccggcaaaccggcggtctgggcatttctattgctggaggtaaaggatcaactccctacaaaggcgatgatgaggggatttttatttcccgggtctccgaggaaggacctgccgctagggctggggttagggtgggagacaaacttcttgaagtcaatggggtcgctttacagggggcagagcatcatgaggctgtagaggctctacgtggtgcaggcacagcagtgcagatgcgggtctggagagagagaatggttgagcctgagaacgccgtgactatcacccccctgaggcccgaagacgactactcaccccgcgagaggcggggaggcggcctccgattgcctttgctcccgcccgaatcaccggggccactcagacaaagacatgttgcgtgtctggctcgatccgagcggggcttaggatttagcatagcaggcggaaagggttctactccctaccgagccggggatgcaggtatttttgtgtcacgcatcgctgaagggggtgcagcccatagagcggggaccctgcaggtgggggaccgtgtgctatccataaacggtgtggacgtgactgaggcccgacatgaccacgcagtttcccttctgacggccgccagtcctacgattgccctgttgctggagagagaagccggaggcccactgcccccttctccccttccgcactcctcacctcctaccgccgcggttgcaactacttcgataaccacggccacgcccggggtccctggactcccttctctggcccccagcctccttgcggctgcactcgaagggccctatccagtggaagagatcagattacccagagctggaggcccgttaggcctttcaatcgttgggggctccgaccactccagtcaccctttcggcgtccaagagcccggggtctttattagcaaggtattgccccggggtctcgccgctaggagcggccttagggtgggagatcgcatccttgcagtgaacggccaagacgttcgcgacgcaactcatcaagaagcggtgagtgccttgttgcgcccatgtctggagttatcactgttagtcagaagggatcccgctccgccaggtctgagggagctctgtattcaaaaggccccaggtgagcgtttagggatcagcattcgcggcggggctcggggacatgccgggaatccacgcgaccccaccgatgaggggattttcatctccaaagtctctccaaccggggccgccggcagagacggacggctgcgagtgggcctgcgtctgctagaggtgaatcagcagagtctgcttggcttaacgcacggagaggcagtgcaattgctgaggtcagtgggtgatacactcactgtgctggtgtgtgatggctttgaggccagtacagacgctgccctagaggtcagcccgggtgtgattgcaaacccttttgctgcaggaataggacaccgtaatagcctggagagcatcagttccattgaccgcgaactttcccccgaaggaccgggcaaggagaaggaactgcctggacaaacactccactggggccctgaagctaccgaagcggcaggaagaggcctgcagccactgaagttggactaccgagccttggctgcagtgcccagtgcagggtcagtccaacgggtgccctccggggcagccggaggaaagatggccgagagtccctgctccccatcgggccagcagcccccttctccccccagtccagacgagttacctgccaacgttaagcaagcatatcgcgctttcgctgccgttcccaccagccaccctcctgaggacgcgcctgcccagccgcctacgcccgggcccgccgctagccccgagcagctcagcttccgcgagagacagaagtatttcgagctggaagtgcgcgtgccacaggctgaagggccccccaagagggtgagcctcgtgggcgcggacgatctgcggaagatgcaggaggaggaagcacgtaagcttcagcagaagcgcgcccaaatgctgcgcgaggcggctgaagctggagcagaggctcgcttggccctggacggggagacactgggcgaggaagagcaagaggatgaacaaccaccatgggcttccccctctccaacaagcaggcagtcacctgcatcccctcccccccttggcgggggcgcccccgtaagaacagctaaagccgagcggcgccaccaggaaagattgcgcgttcaatcaccggaaccacccgcccctgagcgagctctgtcaccggccgaattgagggcactggaggcagaaaaacgcgccctgtggcgagcagcacggatgaagtcgctggaacaggatgcactgagggcacagatggtcctttcgcggtcccaggaaggccgcggcactaggggaccactggagcggctcgcagaagctcccagccccgcccccacaccttcacctacaccagtggaggatctcggaccccaaacttctaccagccctgggagactctccccagactttgcagaggaactacgaagtctggagccctcaccaagtcctggaccacaagaggaagatggggaagtagctcttgtcctcttgggacgcccctctcccggcgctgtggggcccgaagacgtggccctatgttccagcaggcgccccgtgcgccctgggcggcgaggactcggaccagtccctagttag

SEQ ID NO: 186107 - DNA, 2268 bp, Artificial Sequence
  derived and/or modified sequence
atgcaaccggacggtgaagggcccgtcgctccaggtgggtggcacaatggaccccacgctccgtgggcgccgagagcccaaaaagaggaagaagaagaggaggaaggcagtcctcaagaggaggaggtggaagaggaggaggagaatagggcagaagaagaagaggcaagtactgaagaggaggataaagagggtgccgtcgtttcggctccctcagtcaaaggagtgtctttcgatcaggctaacaatctcctcattgaacccgcgcggattgaggaggaggaattgactctgaccattctgcggcagactggcggtctgggcatctctattgccgggggtaaggggagtacgccttacaaaggcgacgatgagggcatatttattagtcgcgtatcagaggaggggccagcggcaagagcaggcgtgcgggtgggagataaactcctggaggtcaacggagtcgcgttacaaggcgcagaacaccacgaggccgttgaagccctgcgcggtgccggaacagctgttcagatgcgggtctggagggagcgcatggtggagcccgagaatgcagtgaccattactcctctaagacccgaagatgactatagccccagagaacgaaggggagggggtttgaggctcccacttctccccccagagtccccaggcccattgcggcaaaggcatgttgcgtgccttgctcgctcggaacggggtttggggttttcaatcgctggaggcaagggttctactccatacagggctggggatgcagggatctttgttagtaggatcgccgagggcggtgcagctcatagagccggcaccctgcaggttggcgaccgcgtgctgtcaattaatggcgtggatgtcacagaggccaggcacgaccacgccgtctctctgctcaccgccgccagtcccacaattgcactactgctagaaagggaagccggtggtcctcttccgccctctccgttgcctcatagttctccccccacagctgccgtggcaacaactagcatcactactgcaacgcctggcgtgccaggtctcccgtctctggccccttccctgttggctgctgctctggagggcccctaccccgtggaggaaatacgcttgcctcgtgcaggcggccctctcggactcagcatcgttggaggcagcgaccacagttctcatccttttggggtacaggagcctggcgtttttatcagcaaagtactcccccgtggattggccgcccggagcggcttgagggtgggagacaggattttggctgtgaacggacaggatgttcgtgatgccactcaccaggaggccgtgtccgcactcctgaggccctgcctggagctatctctcctggtgcggagagatccggccccacctgggctgagggaactatgcatccagaaagctcccggggagagactgggtatatccattcgaggaggcgcaagaggtcacgccggcaaccctagagatcctacagatgagggcatatttatatccaaggtgtcacccaccggggcagctggcagagacggaaggttgcgagttggcttacgtctgctggaggtgaatcagcagagccttctcggactgacacacggcgaagctgtgcagcttctccgatcagtgggagatactcttactgtgttagtttgcgatggattcgaggcaagcacagacgccgcgctcgaggtttcccccggggtcatcgccaaccctttcgcggccgggatcggccacagaaattcactggagagcatcagctcaattgacagagaactgtcacccgagggccctggaaaggagaaggaactccccgggcagaccttgcattggggccctgaggccacggaagcagcgggccgcggtttacagcctctgaaactggattacagagcattggccgccgtgccctccgctggttctgtgcagcgggtgccctcaggagccgctgggggtaaaatggctgaaagcccgtgctcaccctcaggacagcagcccccaagtccaccttctcccgatgagcttccggcaaatgtcaaacaggcgtaccgagcctttgctgcggtaccaacatcacacccccccgaagatgcacccgctcagccgcctacaccaggaccggccgcgtccccagagcagctgagtttcagagagagacagaaatacttcgaattggaggtcagagtgcctcaggccgagggaccccttaggccgggaagacgtgggcttggaccagtcccctcgtag

SEQ ID NO: 186108 - DNA, 4893 bp, Artificial Sequence
  derived and/or modified sequence
atgctgaagtgcatccccctgtggcgctgcaacagacatgtggagagcgtggacaagaggcactgcagcctgcaggccgtgcctgaggagatctaccgctacagccgcagcctggaggagctgctgctggatgccaaccagctgcgggagctgcccaagcccttcttccggctgctgaacctgaggaagctgggcctgagtgacaatgagatccagaggctgcccccagaggtggccaacttcatgcagctggtggagctggatgtgtccagaaatgacatccctgagatccctgagagcatcaagttctgcaaggccctggagattgctgacttcagcggcaaccccctgagccggctgcctgatggcttcacccagctgcggagcctggcccacctggccctgaatgatgtgtccctgcaggccctgcctggagatgtgggcaacctggccaacctggtgaccctggagctgcgggagaacctgctgaagagcctgcctgccagcctgtccttcctggtgaagctggagcagctggacctgggcggcaatgacctggaggtgctgcctgacaccctgggcgccctgcccaacctgcgggagctgtggctggacaggaaccagctgagcgccctgcccccagagctgggcaacctgcggcggctggtgtgcctggatgtgtctgaaaatcggctggaggagctgcctgctgagctgggcggcctggtgctgctgacagacctgctgctgagccagaacctgctgcggcggctgcctgatggcatcggccagctgaagcagctgagcatcctgaaggtggaccagaaccggctgtgtgaggtgacagaggccatcggggactgtgagaacctgtctgagctgatcctgacagagaacctgctgatggccctgcccaggagcctgggcaagctgaccaagctgaccaacctgaatgtggacaggaaccacctggaggccctgcccccagaaattggaggctgtgtggccctgtctgtgctgagcctgcgggacaaccggctggccgtgctgcccccagagctggcccacaccacagagctgcacgtgctggatgtggccggcaaccggctgcagagcctgccctttgccctgacccacctgaacctgaaggccctgtggctggccgagaaccaggcccagcccatgctgcgcttccagacagaagatgatgccaggactggagagaaggtgctgacctgctacctgctgccccagcagcccccacccagcctggaggatgctggccagcagggcagcctgtctgagacctggagcgatgccccacccagccgggtgtctgtcatccagttcctggaggcccccatcggagatgaagatgctgaggaggccgctgctgagaagaggggcctgcagaggcgggccaccccccaccccagcgagctgaaggtgatgaagaggagcattgagggcagaagaagtgaggcctgcccctgccagcctgacagcggcagccccctgcctgctgaggaggagaagaggctgtctgctgagagcggcctgtctgaggacagccggcccagcgccagcacagtgtctgaggccgagcctgagggccccagcgctgaggcccagggcggcagccagcaggaggccaccacagctggaggagaggaggatgctgaggaggactaccaggagcccaccgtgcactttgctgaagatgccctgctgcctggagatgaccgggagattgaggagggccagcctgaggccccctggaccctgcccggcggccggcagaggctcatcaggaaggacaccccccactacaagaagcacttcaagatcagcaagctgccccagcctgaggccgtggtggccctgctgcagggcatgcagccagatggagagggccctgtggcccctgggggctggcacaacggcccccacgccccctgggccccccgggcccagaaggaggaggaggaggaggaggagggcagcccccaggaggaggaggtggaggaggaggaggagaacagagctgaggaggaggaggccagcacagaggaggaggacaaggagggcgctgtggtgtctgcccccagcgtgaagggcgtgtcctttgaccaggccaacaacctgctgattgaaccagcccgcatcgaggaggaggagctgaccctgaccatcctgcggcagacaggaggcctgggcatcagcattgctgggggcaagggcagcaccccctacaagggagatgatgagggcatcttcatcagccgggtgtctgaggagggccctgctgcccgggccggcgtgcgggtgggggacaagctgctggaggtgaatggagtggccctgcagggcgctgagcaccacgaggccgtggaggccctgcggggagctggaacagctgtgcagatgagggtgtggagggagaggatggtggagccagaaaatgctgtgaccatcacccccctgcggccagaagatgactacagcccccgggagaggagaggaggcggcctgcggctgcccctgctgcccccagagagccctggccccctgcggcagagacatgtggcctgcctggcccggtctgagcggggcctgggcttcagcattgctgggggcaagggcagcaccccctacagagctggagatgctggcatctttgtgtccagaattgctgagggcggggccgcccaccgggccggcaccctgcaggtgggggacagagtgctgagcatcaatggagtggatgtgacagaggcccggcatgaccatgctgtgtccctgctgacagctgccagccccaccatcgccctgctgctggagcgggaggccggcggccccctgccccccagccccctgccccacagcagccccccaacagctgctgtggccaccaccagcatcaccacagccaccccaggagtgcccggcctgcccagcctggcccccagcctgctggccgccgccctggagggcccctaccctgtggaggagatccggctgccccgggccggcggccccctgggcctgagcatcgtgggcggcagtgaccacagcagccacccctttggagtgcaggagcccggggtcttcatcagcaaggtgctgccccggggcctggccgcccggagcggcctgcgggtgggggaccgcatcctggccgtgaatggccaggatgtgagagatgccacccaccaggaggccgtgtctgccctgctgcggccctgcctggagctgagcctgctggtgcggcgggaccctgcccctcctggcctgcgggagctgtgcatccagaaggcccctggagagcggctgggcatcagcatccggggcggggcccggggccatgctggcaacccccgggaccccacagatgagggcatcttcatcagcaaggtgagccccaccggggctgctggaagagatggccgcctgcgggtgggcctgcggctgctggaggtgaaccagcagagcctgctgggcctgacccacggggaggccgtgcagctgctgcggtctgtgggggacaccctgactgtgctggtgtgtgatggctttgaggccagcacagatgctgccctggaggtgtcccctggggtgattgccaacccctttgctgctggcatcggccacaggaacagcctggagagcatcagcagcattgaccgggagctgagccctgagggccctgggaaggagaaggagctgcccggccagaccctgcactggggccctgaggccacagaggccgccggccggggcctgcagcccctgaagctggactaccgggccctggccgctgtgcccagcgctggctctgtgcagagggtgcccagcggggccgccggcggcaagatggccgagagcccctgcagccccagcggccagcagccccccagcccccccagcccagatgagctgcctgccaacgtgaagcaggcctaccgggcctttgctgctgtgcccaccagccaccccccagaagatgccccagcccagccccccaccccaggccctgctgccagccctgagcagctgtccttccgggagcggcagaagtactttgagctggaggtgcgggtgccccaggccgagggcccccccaagagggtgtccctggtgggcgcagatgacctgaggaagatgcaggaggaggaggccaggaagctgcagcagaagagggcccagatgctgcgggaggccgctgaggccggggctgaggcccggctggccctggatggagagaccctgggggaggaggagcaggaggatgagcagcccccctgggccagccccagccccaccagccggcagagccctgccagccccccacccctgggcggcggggcccctgtgaggacagccaaggccgagaggaggcaccaggagcggctgcgggtgcagagccctgagcccccagcccctgagcgggccctgagccctgctgagctgcgggccctggaggccgagaagagggccctgtggagggctgccaggatgaagagcctggagcaggatgccctgcgggcccagatggtgctgagccgcagccaggagggccggggcacccggggccccctggagcggctggccgaggcccccagccctgcccccacccccagccccacccctgtggaggacctgggcccccagaccagcaccagccctggccgcctgagcccagactttgctgaggagctgcggagcctggagcccagccccagccctggcccccaggaggaggatggagaggtggccctggtgctgctgggccggcccagccctggagctgtgggcccagaagatgtggccctgtgcagcagcagaagacctgtgcggcccggccggcggggcctgggccctgtgcccagctag

SEQ ID NO: 186109 - DNA, 4650 bp, Artificial Sequence
  derived and/or modified sequence
atgcagctggtggagctggatgtgtccagaaatgacatccctgagatccctgagagcatcaagttctgcaaggccctggagattgctgacttcagcggcaaccccctgagccggctgcctgatggcttcacccagctgcggagcctggcccacctggccctgaatgatgtgtccctgcaggccctgcctggagatgtgggcaacctggccaacctggtgaccctggagctgcgggagaacctgctgaagagcctgcctgccagcctgtccttcctggtgaagctggagcagctggacctgggcggcaatgacctggaggtgctgcctgacaccctgggcgccctgcccaacctgcgggagctgtggctggacaggaaccagctgagcgccctgcccccagagctgggcaacctgcggcggctggtgtgcctggatgtgtctgagaaccggctggaggagctgcctgctgagctgggcggcctggtgctgctgacagacctgctgctgagccagaacctgctgcggcggctgcctgatggcatcggccagctgaagcagctgagcatcctgaaggtggaccagaaccggctgtgtgaggtgacagaggccatcggggactgtgagaacctgtctgagctgatcctgacagagaacctgctgatggccctgcccaggagcctgggcaagctgaccaagctgaccaacctgaatgtggacaggaaccacctggaggccctgcccccagagatcggcggctgtgtggccctgtctgtgctgagcctgcgggacaaccggctggccgtgctgcccccagagctggcccacaccacagagctgcacgtgctggatgtggccggcaaccggctgcagagcctgccctttgccctgacccacctgaacctgaaggccctgtggctggccgagaaccaggcccagcccatgctgcgcttccagacagaagatgatgccaggactggagagaaggtgctgacctgctacctgctgccccagcagcccccacccagcctggaggatgctggccagcagggcagcctgtctgagacctggagcgatgccccacccagccgggtgtctgtcatccagttcctggaggcccccatcggagatgaagatgctgaggaggccgctgctgagaagaggggcctgcagaggcgggccaccccccaccccagcgagctgaaggtgatgaagaggagcattgagggccgccgctctgaggcctgcccctgccagccagattctggcagccccctgcctgctgaggaggagaagaggctgtctgctgagagcggcctgtctgaggacagccggcccagcgccagcacagtgtctgaggccgagcctgagggccccagcgctgaggcccagggcggcagccagcaggaggccaccacagctggaggagaagaagatgctgaggaggactaccaggagcccaccgtgcactttgctgaagatgccctgctgcctggagatgaccgggagattgaggagggccagcctgaggccccctggaccctgcccggcggccggcagaggctcatcaggaaggacaccccccactacaagaagcacttcaagatcagcaagctgccccagcctgaggccgtggtggccctgctgcagggcatgcagccagatggagagggccctgtggcccctgggggctggcacaacggcccccacgccccctgggccccccgggcccagaaggaggaggaggaggaggaggagggcagcccccaggaggaggaggtggaggaggaggaggagaacagagctgaggaggaggaggccagcacagaggaggaggacaaggagggcgctgtggtgtctgcccccagcgtgaagggcgtgtcctttgaccaggccaacaacctgctgattgagcccgccagaattgaggaggaggagctgaccctgaccatcctgcggcagacaggaggcctgggcatcagcattgctgggggcaagggcagcaccccctacaagggagatgatgagggcatcttcatcagccgggtgtctgaggagggccctgctgcccgggccggcgtgcgggtgggggacaagctgctggaggtgaatggagtggccctgcagggcgctgagcaccatgaagctgtggaggccctgcggggggccggcacagctgtgcagatgagggtgtggagggagaggatggtggagccagaaaatgctgtgaccatcacccccctgcggccagaagatgactacagcccccgggagcggcggggcggcggcctgcggctgcccctgctgcccccagagagccctggccccctgcggcagagacatgtggcctgcctggcccggtctgagcggggcctgggcttcagcattgctgggggcaagggcagcaccccctacagagctggagatgctggcatctttgtgtccagaattgctgagggcggggccgcccacagagctggcaccctgcaggtgggggacagagtgctgagcatcaacggggtggatgtgacagaggcccggcatgaccatgctgtgtccctgctgacagctgccagccccaccatcgccctgctgctggagcgggaggccggcggccccctgccccccagccccctgccccacagcagccccccaacagctgctgtggccaccaccagcatcaccacagccaccccaggagtgcccggcctgcccagcctggcccccagcctgctggccgccgccctggagggcccctaccctgtggaggagatccggctgcccagggctgggggccccctgggcctgagcatcgtgggcggcagtgaccacagcagccaccccttcggcgtgcaggagcccggggtcttcatcagcaaggtgctgccccggggcctggccgcccggagcggcctgcgggtgggggaccgcatcctggccgtgaatggccaggatgtgagagatgccacccaccaggaggccgtgtctgccctgctgcggccctgcctggagctgagcctgctggtgagaagagatcctgcccctcctggcctgcgggagctgtgcatccagaaggcccctggagagcggctgggcatcagcatccggggcggggcccggggccacgccggcaacccccgggaccccacagatgagggcatcttcatcagcaaggtgagccccactggagctgctggaagagatggccgcctgcgggtgggcctgcggctgctggaggtgaaccagcagagcctgctgggcctgacccatggagaggccgtgcagctgctgcggtctgtgggggacaccctgactgtgctggtgtgtgatggctttgaggccagcacagatgctgccctggaggtgtccccaggagtcatcgccaacccctttgctgctggcatcggccacaggaacagcctggagagcatcagcagcattgaccgggagctgagccctgagggccctgggaaggagaaggagctgcccggccagaccctgcactggggccctgaggccacagaagctgctggccggggcctgcagcccctgaagctggactaccgggccctggccgctgtgcccagcgctggctctgtgcagagggtgcccagcggggctgctgggggcaagatggccgagagcccctgcagccccagcggccagcagccccccagcccccccagcccagatgagctgcctgccaacgtgaagcaggcctaccgggcctttgctgctgtgcccaccagccaccccccagaagatgccccagcccagccccccaccccaggccctgctgccagccctgagcagctgtccttccgggagcggcagaagtactttgagctggaggtgcgggtgccccaggccgagggcccccccaagagggtgtccctggtgggcgcagatgacctgaggaagatgcaggaggaggaggccaggaagctgcagcagaagagggcccagatgctgcgggaggccgctgaggccggggctgaggcccggctggccctggatggagagaccctgggggaggaggagcaggaggatgagcagcccccctgggccagccccagccccaccagccggcagagccctgccagccccccacccctgggcggcggggcccctgtgaggacagccaaggccgagcggcggcaccaggagcggctgcgggtgcagagccctgagcccccagcccctgagcgggccctgagccctgctgagctgcgggccctggaggccgagaagagggccctgtggagggctgccaggatgaagagcctggagcaggatgccctgcgggcccagatggtgctgagccgcagccaggagggccggggcacccggggccccctggagcggctggccgaggcccccagccctgcccccacccccagccccacccctgtggaggacctgggcccccagaccagcaccagccctggccgcctgagcccagactttgctgaggagctgcggagcctggagcccagccccagccctggcccccaggaggaggatggagaggtggccctggtgctgctgggccggcccagccctggagctgtgggcccagaagatgtggccctgtgcagcagccggcggcctgtgcggcctggaagaagaggcctgggccctgtgcccagctag

SEQ ID NO: 186110 - DNA, 2268 bp, Artificial Sequence
  derived and/or modified sequence
atgcagccagatggagagggccctgtggcccctgggggctggcacaacggcccccacgccccctgggccccccgggcccagaaggaggaggaggaggaggaggagggcagcccccaggaggaggaggtggaggaggaggaggagaacagagctgaggaggaggaggccagcacagaggaggaggacaaggagggcgctgtggtgtctgcccccagcgtgaagggcgtgtcctttgaccaggccaacaacctgctgattgagcccgccagaattgaggaggaggagctgaccctgaccatcctgcggcagacaggaggcctgggcatcagcattgctgggggcaagggcagcaccccctacaagggagatgatgagggcatcttcatcagccgggtgtctgaggagggccctgctgcccgggccggcgtgcgggtgggggacaagctgctggaggtgaatggagtggccctgcagggcgctgagcaccatgaagctgtggaggccctgcggggggccggcacagctgtgcagatgagggtgtggagggagaggatggtggagccagaaaatgctgtgaccatcacccccctgcggccagaagatgactacagcccccgggagcggcggggcggcggcctgcggctgcccctgctgcccccagagagccctggccccctgcggcagagacatgtggcctgcctggcccggtctgagcggggcctgggcttcagcattgctgggggcaagggcagcaccccctacagagctggagatgctggcatctttgtgtccagaattgctgagggcggggccgcccacagagctggcaccctgcaggtgggggacagagtgctgagcatcaacggggtggatgtgacagaggcccggcatgaccatgctgtgtccctgctgacagctgccagccccaccatcgccctgctgctggagcgggaggccggcggccccctgccccccagccccctgccccacagcagccccccaacagctgctgtggccaccaccagcatcaccacagccaccccaggagtgcccggcctgcccagcctggcccccagcctgctggccgccgccctggagggcccctaccctgtggaggagatccggctgcccagggctgggggccccctgggcctgagcatcgtgggcggcagtgaccacagcagccaccccttcggcgtgcaggagcccggggtcttcatcagcaaggtgctgccccggggcctggccgcccggagcggcctgcgggtgggggaccgcatcctggccgtgaatggccaggatgtgagagatgccacccaccaggaggccgtgtctgccctgctgcggccctgcctggagctgagcctgctggtgagaagagatcctgcccctcctggcctgcgggagctgtgcatccagaaggcccctggagagcggctgggcatcagcatccggggcggggcccggggccacgccggcaacccccgggaccccacagatgagggcatcttcatcagcaaggtgagccccactggagctgctggaagagatggccgcctgcgggtgggcctgcggctgctggaggtgaaccagcagagcctgctgggcctgacccatggagaggccgtgcagctgctgcggtctgtgggggacaccctgactgtgctggtgtgtgatggctttgaggccagcacagatgctgccctggaggtgtccccaggagtcatcgccaacccctttgctgctggcatcggccacaggaacagcctggagagcatcagcagcattgaccgggagctgagccctgagggccctgggaaggagaaggagctgcccggccagaccctgcactggggccctgaggccacagaagctgctggccggggcctgcagcccctgaagctggactaccgggccctggccgctgtgcccagcgctggctctgtgcagagggtgcccagcggggctgctgggggcaagatggccgagagcccctgcagccccagcggccagcagccccccagcccccccagcccagatgagctgcctgccaacgtgaagcaggcctaccgggcctttgctgctgtgcccaccagccaccccccagaagatgccccagcccagccccccaccccaggccctgctgccagccctgagcagctgtccttccgggagcggcagaagtactttgagctggaggtgcgggtgccccaggccgagggccccctgcggcctggaagaagaggcctgggccctgtgcccagctag

SEQ ID NO: 186111 - DNA, 4893 bp, Artificial Sequence
  derived and/or modified sequence
atgctgaagtgcatccccctgtggcggtgcaaccggcacgtggagtcagttgacaagaggcactgttccctgcaagccgtcccagaggagatctaccgctacagcaggtctctggaggaactgctactggacgccaatcaattaagagagcttccaaagcccttttttcggcttctgaatctgcgaaaactgggattgtccgataacgaaattcaaaggctccccccggaagtcgccaactttatgcagcttgtagaattggacgtgagcaggaacgatatccccgagattccagagtcaattaaattctgcaaggccctcgaaattgccgatttcagcggtaacccattgtctagattgccagacggttttactcagctgcgctccctggcccaccttgccctcaatgatgtgagcctccaagcattgcctggtgacgtcggaaatctggctaatctagtgacgctcgagctgcgagagaacctcctcaagagcttgccagcaagcctgagcttcctagtcaagctagagcaactcgatcttggaggaaatgatctggaagtgctccctgatactcttggcgctttacccaatctccgggaactctggctggataggaaccagctgagtgccttgccgccagagctgggaaatctgaggcggttggtatgcctagacgttagtgagaatagactagaggagctgcccgccgaactgggggggctagtgctgctgactgatctgcttctgagccagaatctgctccggagactgccggacgggataggccaattaaaacagctgtctatcctgaaggtggaccagaacagactttgcgaagtgaccgaagctattggcgactgtgagaacctctccgagctgattctgaccgagaaccttcttatggcattacccaggagcttgggaaaactaaccaagctcacaaacctgaatgtggaccgtaatcacttagaggcccttccacccgaaataggcgggtgcgtggcattatccgttcttagccttcgtgacaatagattggcggtcctgccccctgagttagcgcatactactgagctgcatgtgctggatgttgccgggaataggctccaaagcctcccttttgccttgacccacctaaatctgaaggccttgtggctggccgagaaccaggcccaacctatgctcaggttccaaacagaggacgacgctcgtacaggcgaaaaggttctcacctgttaccttttgccccaacagccccctccttctctagaagatgccggacagcagggcagcctttcagagacttggtctgacgctcctcctagtcgggtttcagtcatccaattcctggaggcgccaattggtgacgaggacgcagaagaggcagctgccgagaagagaggtcttcagagaagagcgactccgcacccttccgaattgaaggttatgaagaggagtattgaggggaggagatctgaggcatgcccgtgccagccggacagcggatctccattacccgccgaggaggagaagcggctttcagcagagtcaggattgtctgaggactctcggccttcggcctctactgtgagcgaagctgaaccggagggtcctagcgctgaggcccagggtgggagtcagcaggaggctaccaccgcgggaggggaggaggacgctgaggaagactaccaggagcctactgttcattttgcagaggatgcactgctgccgggggacgacagggagattgaagagggccagcctgaagctccttggaccctgcccggtggacgccagcggttgatacgaaaagataccccgcattacaagaaacactttaagatcagcaagttgccccagcccgaggccgtggtggcactactccaggggatgcagccagatggagagggccccgttgccccgggcggctggcacaacggaccacacgctccgtgggcacccagggctcagaaggaggaggaggaggaagaggaggggtccccccaggaggaagaggtggaagaagaggaggagaacagggccgaggaggaggaagcatcaactgaggaggaggacaaggagggggctgtcgtgtccgctccaagtgtgaaaggagttagcttcgaccaggctaacaaccttctgattgagccggcccgcatagaggaggaggaactaactctgactatcttaagacagaccggtgggctggggatctccatcgccggaggcaaagggagtaccccctacaagggagatgatgaagggattttcatttcaagagtgtcagaagagggccctgccgctcgcgctggggtacgggtgggggataagttacttgaagtgaacggcgtcgctctgcagggcgccgaacatcacgaggccgtcgaggctctgagaggcgccgggactgccgtccaaatgagggtgtggcgggagaggatggtggagcctgaaaacgcagtcaccattacgccacttcggcctgaggacgattactcccctcgcgagaggagggggggcggcctgagactgccgcttttgccacctgaatccccaggcccactgcggcaaaggcacgttgcctgtctggcaaggagtgaaagggggctcggctttagcattgcagggggaaaaggctctacgccttacagagcgggtgatgccggcatcttcgtctcccggatcgccgaagggggcgccgcacatagggcaggtaccctgcaggtgggcgacagagtgctttctattaacggagtagatgtgaccgaggccaggcatgaccatgccgtttccttgttgacagctgcatcacccacgatcgccctgctcctggagcgagaggctggcggacctctgcccccaagcccacttcctcactcttcaccaccaaccgcggcagtggccactacgagtattactaccgccacgcccggcgtgcctggcttgccttcactggcaccatctctcctcgcggccgccctggaaggcccttaccccgtcgaagagatccgccttccaagagccggaggtcccttgggtctgtccattgtgggcggctccgaccactcgtctcacccattcggtgttcaggagcccggtgttttcatttccaaagtactgcccaggggtcttgccgctcggagcggactccgggtgggagaccgcattttggccgtgaatggccaagatgtgagggacgccactcatcaggaggccgtgtccgctttgctccggccctgcctggagctgtcactgctcgtgaggagagatcccgcccccccaggactgagggagttgtgtatacagaaagccccaggagaacggcttggtatttctataagaggcggcgcacgcggccacgccggaaatccgagagatcctaccgatgagggcatttttatctcgaaggtgtcacccaccggagctgctggacgcgatggtaggttgagagttggcctacggctgctggaagtcaaccagcagagtttgttaggtctgacccacggcgaagccgttcagctgctcaggtcagtaggagacacactgacagtgctggtctgcgatggctttgaagcctctaccgatgcagccctcgaagtgagccccggcgtgatcgctaatccatttgccgctgggatcgggcaccggaacagccttgagtccatatccagtatcgatagggagctgagcccggaaggccccggcaaagaaaaagagctgcccgggcagacccttcattggggcccagaggctacagaggccgctggacgaggtcttcagcccctcaagctggattatagagctctggctgcggttccatctgccggatctgtgcagcgggtaccgagcggtgcggccggtgggaagatggcagagagcccatgctctccatctggccagcaacccccttcgcctcccagccccgatgaacttcccgctaatgtaaaacaggcctaccgtgcctttgccgcagtgcccacatctcacccccctgaagatgccccagctcagccccccacacccgggcctgctgccagcccagaacagctatccttccgagagaggcagaaatacttcgagctcgaggtgcgtgtccctcaggcagaggggccacctaaacgagtgtctctcgttggtgccgatgacctgcgcaaaatgcaggaggaggaggcccggaagctccagcaaaaacgagctcagatgctgcgggaagcagccgaggcgggggccgaagcccgtctggctctcgacggggagacattgggcgaggaggaacaggaagatgagcagcccccttgggcatctccttctccgacgtcccgccagagccctgcgtctcctcccccattgggaggtggagccccagtcagaaccgctaaagcggaacggaggcatcaggagcgtctgagagtacagtcacccgagccgccggcaccagaaagagccctctcacctgccgaacttagggctctagaagccgagaaacgagcattgtggagagcagccaggatgaaatcccttgagcaagatgccctgagggcacaaatggttctgtctcggagccaggaaggccgcggaacgcgcgggcccctggaaaggctggctgaagcccccagcccagctcccacaccaagtccaactcctgtagaagacctggggcctcaaacatcaacaagtcctggcagacttagccctgactttgctgaagaactgagatccctggagccatcgccttcacccggccctcaggaagaggacggtgaggttgccctcgtcctcctcggaagaccctccccgggcgccgtggggcctgaagacgtggcgttgtgttcttctcgtcgacccgtgagacccggacggcgggggctgggccccgtcccaagctag

SEQ ID NO: 186112 - DNA, 4650 bp, Artificial Sequence
  derived and/or modified sequence
atgcagctggtggagctggacgtgagccggaacgacatccccgagattcccgaatccatcaaattctgcaaagcactcgagatcgcagatttcagtggcaatcccctgagccggctgcccgatggatttacacagctgaggtctctcgctcatctggccttaaatgacgtgagtctgcaagctctgccaggtgacgtgggaaatttggccaacctggtgactctggagttgagggaaaacctcctaaagagcttgcctgcatctctaagtttccttgtcaagctcgagcaattggacctgggaggaaatgacctggaagtgctcccagacaccctgggcgcgctccccaatcttagggaattgtggcttgaccgtaaccaactaagcgccctaccgcctgaactaggcaatcttagaagactagtgtgcctcgacgtgtccgagaaccgacttgaggagcttcccgcggaacttggtggactggtgttactgaccgatttactcctgtctcaaaatctgctgagacggctccctgacggcatcggacagctgaaacagctgagtattctcaaggtggaccaaaaccggctgtgtgaggtcacggaggcaatcggcgattgtgagaacttgtccgagctgatcttgacggagaatctgctaatggctctgccccggtctctgggtaagttgacaaagctaaccaacttgaatgttgacaggaatcatctggaagctctccctcccgaaatcggaggatgcgtggcgctatccgtgctgtctctgagggacaaccggttagccgtcctgccccctgagcttgcgcatacgacagagttacatgtgctcgatgtagccggtaaccgcctacaatctttgccctttgccctaacccacttgaaccttaaggctctgtggctcgccgagaatcaggcacagcctatgctccggtttcagactgaagatgatgctcggaccggggagaaggttctgacctgctacctcctgccacagcagcctcctccaagtctcgaagacgcaggtcaacagggcagcttgagtgaaacttggagtgacgctccccctagtcgggtgtccgtgatacaatttctcgaggcaccaattggggacgaagacgcggaagaagctgccgccgagaaaaggggcctccagagacgagccaccccgcacccaagcgagctcaaggtaatgaagcgcagtattgaaggcaggcggtctgaggcttgtccctgccagcctgattcaggatcacctctgcccgcagaggaggagaagcggctatcggcggagagtggcttgtccgaggactctagaccatctgcctccaccgtatctgaggccgagcccgagggcccatctgcggaggcacaggggggtagccagcaagaagccaccaccgccgggggggaggaggacgcagaggaggattaccaggagcccacagtgcactttgcagaggatgctctgctcccaggggacgatagagagattgaggaggggcaacccgaggccccttggactttgccaggcggtaggcagagattgatcaggaaggacactcctcattacaagaaacatttcaaaatttcaaagctaccccagccagaggctgttgtggctttactacaggggatgcagcccgatggtgagggacctgtcgcgcccggtggctggcacaacggcccccacgcgccctgggccccccgcgcacagaaggaggaagaagaggaggaagaagggtccccacaggaagaagaggtggaggaagaggaagagaatagggcagaagaggaggaagcctctacggaagaggaagacaaggagggcgccgtggtgtcagccccatcagtaaaaggggtaagcttcgaccaggccaacaaccttctgatcgagccagctagaatcgaagaggaagagcttactttaacaatactgcgccaaacgggtggcctaggaatctccattgcggggggcaagggcagcactccctataaaggcgatgatgaggggattttcatctcaagggttagcgaggagggcccggcagcgcgggccggcgtaagggtaggagacaagttacttgaagtgaatggagtggcactgcagggagccgagcaccacgaggctgtggaagctctgcgaggcgctggcaccgccgtacagatgcgtgtctggagagaaagaatggtggagcccgagaacgccgttactataacgcccttgcgccctgaggatgactattcacctagagaacggcgaggtggtggactgaggctgcctctgctgccacccgagtcccccggaccactgagacaacggcacgtcgcatgcctagcccgttctgagaggggactcggctttagcattgctggaggcaaaggcagtactccgtatagggcaggcgatgcaggcattttcgtatctagaatagcagaaggtggcgccgctcacagagcagggacacttcaggtcggtgatcgggtgctctctatcaacggcgttgacgtgacagaggcacggcatgatcacgccgtatccttgctgactgcagccagtccaaccatcgcgctgttgctggaaagggaggctggcggccccctccctccatctcccctgccgcatagttctccccctaccgctgctgtggccactacgagtattactaccgccacacctggggtgccggggctgccaagcctggcacctagcctactggccgcagcactggaggggccttaccctgtggaggaaattagactgccgcgggctgggggaccccttggcctgtccatcgtggggggttcagaccactcctcgcacccattcggagttcaggaaccaggagttttcatatctaaggtgttacctaggggactggccgctcggagtggactacgagtgggcgatcgaatcctggctgtcaatggtcaggatgtccgggacgctacacaccaggaggctgtgagtgctttactgaggccgtgcctggaactgagcctactggtccgacgtgaccccgccccacctggtttacgcgagttatgtattcagaaagcccctggcgagagactgggcatatcgattcgcggtggagcccgcgggcatgccggtaaccccagggacccaaccgatgaaggcattttcattagcaaggttagcccaacaggcgccgcagggagggatgggcgcctgcgcgtcggtctccggctgttagaagtgaatcagcagagcttgctgggtctgactcacggcgaggccgtgcagttactaaggagcgtcggcgacaccctgacagtcctggtctgtgatggctttgaggcctcaactgacgcagcactggaggtgagcccgggcgtcattgccaacccattcgctgctggcatcggacaccgcaatagcttagagtctatctcatccattgatagagagctgtcgcccgagggccccggaaaagagaaggaactcccaggccagaccttgcactggggaccagaggcgaccgaggcagccggaagaggtttgcaaccattgaagttggactaccgggccctggcagccgttccttcggccggcagcgtgcagagggttcccagtggggccgccggcggcaagatggccgaatccccatgctctccatccggacagcagcccccaagcccaccctctcccgatgagctgcctgctaatgtgaagcaagcataccgggccttcgcagctgtcccgacgagtcacccacccgaagacgccccagctcagccacccacacctgggcctgccgcttctcccgaacagctaagttttcgcgagaggcagaaatacttcgagttagaagtccgagtgccccaagccgaagggccccctaagagggtaagccttgtgggtgctgatgatctccgcaaaatgcaagaggaggaggctaggaagctgcagcagaagagggcccagatgttaagggaggcggctgaggccggcgctgaggctagacttgctctggatggagagaccttaggagaggaagaacaggaggacgaacagccaccatgggcttctccttctccaacctcgcgccagtctccagcctcaccacccccactcggaggtggggctcctgtgagaactgccaaagcagaaaggcgccaccaagagcggctcagggtgcagtcccccgaaccccctgcacctgagcgcgctctatccccagcagaacttagagcattagaggccgagaagcgggccctatggcgggcagctagaatgaagagcctggagcaagacgctttgagagctcaaatggttttatcccgttctcaagaagggcggggcacccgcggtcccctggaacggctggcagaggcacctagtccagctcctacaccgagtccaactccagtcgaggacctcgggccacaaacttccacctcgccaggtcgcctttccccagattttgcagaagagctgcgctccctcgaaccatccccctcgccaggacctcaggaagaagatggggaggtggctctggtactgctgggtcggccttcaccaggtgcagtgggcccagaagatgtggcgttatgttcttcccgccggccagtgcgtccgggccgcagagggctgggccccgtgccgtcatag

SEQ ID NO: 186113 - DNA, 2268 bp, Artificial Sequence
  derived and/or modified sequence
atgcagcccgacggcgagggccccgtggcccccggcggctggcacaacgggcctcacgccccatgggcgccccgagcccagaaagaagaggaagaagaagaggaagggagcccacaggaagaggaggtggaggaggaggaagagaatagggccgaggaggaggaagccagcacagaagaagaagacaaagagggggccgtggtctccgccccctcagtgaagggcgtttcttttgaccaagctaataacctgctgattgagcctgctcggattgaagaggaagagctgactctcaccatcctgcggcagaccggaggactggggatttccatcgctggaggaaaaggttctacaccatacaagggcgacgatgaaggaatcttcataagtcgtgtgtcagaagagggtcccgccgctcgcgcgggggtgagggtgggggataagcttttagaggtgaacggggttgctttgcagggtgcggagcaccatgaggcggtcgaagctctaagaggagccgggactgctgtccagatgcgggtttggcgagaaagaatggtagagccagagaacgccgtgaccattacccccctgaggccagaggacgattatagtccgagggagcgaaggggaggcggtctcagattgcctctgctgcctccagagagccctgggccacttcgacagcggcacgtggcatgcttagccaggtccgagaggggcctcgggttttcaattgctgggggaaagggatcaaccccttaccgcgcaggtgacgcggggatattcgtctcacggattgccgaggggggcgccgctcatcgcgctggcaccctgcaggtgggagaccgcgtgctgagtattaatggtgtggacgttacagaggccaggcatgaccacgccgtttccctgttaaccgctgcatcccctacaatcgctttactcctggagcgggaggctgggggtcccttacctccaagtccccttccccacagctctccccctaccgcagcagtagccactacttcaatcacaaccgctacgccaggtgtgccagggctaccctccctggccccatcattactagcagccgccttggaggggccctatcctgtggaggaaatcagactccctcgcgcgggcggccctttgggcctgtctattgtcggcgggagtgatcactcttcccaccctttcggggtgcaggagcctggcgtgtttatctctaaagttctccccagaggtcttgccgcccgtagcggactccgggtaggcgatcggattctggccgtaaacggacaagatgtgagggacgcaacacaccaagaggccgtgagtgccctgctgcgcccctgtttggagctcagcctgcttgtgcgtcgggatcccgcccccccagggctgagggaattatgtatccagaaagcacccggtgaacggctgggtatcagcataagaggcggggcccgcggacacgccgggaatcctagggaccccactgatgaagggatcttcatttcaaaagtgtctcctactggagccgctggccgcgacggacgcttacgggtagggcttcgattattggaggtgaatcagcaaagcctacttggcctcacacacggtgaagccgtccaactgctgagatcagtcggcgacaccctgaccgtgcttgtgtgcgatggtttcgaagcctcaacagatgcagcactggaagtgagcccaggcgtcattgctaacccttttgcagctggcattggacaccgaaattccctggaatctatctcctctattgatcgagagctgtctcctgaaggcccaggcaaggagaaagagttaccggggcagaccctgcactgggggcctgaagcaacagaagcagctggcagaggactacagcctctgaagttagattaccgagcactggcggcagtgccaagcgctggcagcgtgcaaagggtgcccagtggggcagccggaggcaagatggcagaaagtccttgcagcccttctggtcagcaaccccccagtccacccagccccgatgagttgcctgccaacgttaaacaggcgtaccgtgcatttgctgccgtccctaccagccaccctcccgaggatgcgcctgcgcagcctcctaccccagggcctgccgccagccctgagcaactatctttcagagaacgacaaaaatacttcgaattggaagttagggtcccccaggcagaagggcctctgcggccagggcgcaggggcctgggccccgtgcccagttag

SEQ ID NO: 186114 - DNA, 4893 bp, Artificial Sequence
  derived and/or modified sequence
atgctgaagtgcatcccactgtggaggtgcaacagacatgtggagagtgtcgacaaaagacattgctccctgcaggctgttcccgaggaaatttaccgatattcacgctcactcgaagagctgctacttgatgctaaccagctcagggaactgccaaagccattcttcaggctgttgaatctgaggaagcttggacttagtgacaatgagatccagcgactgcccccagaggtcgccaacttcatgcagctcgttgagctagatgtgagtcgcaacgacattcctgaaataccagaatcaataaaattctgcaaagccctggaaatcgccgatttcagcgggaaccctctgtctaggttgcccgatggctttactcaactgcggtccctcgcccacctggcattgaatgacgtgagtctacaggctcttccaggagacgtcggcaacctggccaatcttgtgaccttggagctgagggaaaacttgcttaaatcccttcctgcctctctctctttcctcgttaagctggaacagctggatctcggcggtaacgaccttgaggttctgcctgacacccttggtgcgctgccaaacctaagagaactgtggctggaccggaaccagttgagtgccttgccacccgaactggggaacctacgccgactggtgtgtttagatgtgagtgaaaatcgtctggaggaattgcccgcagaactgggcggacttgttctgctgacggacttgcttttgagccagaacctcctccgtcgtctccctgatgggataggccaattgaaacagctgagtatactgaaggtggatcagaacagactatgtgaagtgaccgaagccatcggagattgtgagaatctgtctgaactgatactcaccgaaaatctactcatggccctacctcgtagccttggtaagctgactaagttgacgaaccttaacgtggatcgaaaccatctggaagcactcccaccagagataggaggatgtgttgccctgagcgttctgagccttagagataatcggctggccgtccttccacccgagctggctcatactacggagctgcatgttcttgacgttgctggtaaccgcttgcagtccctgccttttgcgctgacccacctgaacctgaaagccctatggctggctgaaaatcaggctcaacctatgcttcggtttcagactgaagatgatgcacggactggggaaaaagtactcacctgctatctgcttccccagcagccacccccaagcctggaggacgccggacaacagggctccctcagtgagacgtggagtgatgccccaccctcaagagtctctgtcatccagttcttggaagccccaattggagacgaggatgccgaggaagcggcagccgagaagcgcggacttcagaggcgcgctacgccacacccttcagaacttaaagtcatgaagcggagtattgagggaagaaggtcagaagcttgcccatgtcagcccgactcaggctctcccctcccggcagaagaagagaaacgtctgtccgcagagagtgggctgagcgaagattcccggccttctgcctccactgtctctgaggccgagcccgagggcccatctgccgaagcgcagggaggttcgcagcaagaagctacgacagccggtggggaggaagatgctgaagaagactaccaggagcccacagtgcacttcgccgaggatgccttgctgccaggggacgacagagagattgaggaaggacagcctgaggccccatggacactaccagggggacgccagcgccttatacggaaggatactccacattataagaaacatttcaagatcagcaagcttccccagcctgaagcagtggtggctctgctgcaggggatgcaacccgacggcgaaggccctgtagctccagggggttggcataatggccctcacgccccatgggccccaagggcccagaaagaggaggaggaggaagaagaaggctccccccaggaggaggaagtggaggaagaggaagagaaccgcgctgaggaggaggaggcctctaccgaggaagaggataaggaaggcgctgtcgtctccgctcctagtgtgaagggggtgagctttgaccaggcaaataacctcttgatcgagcccgctagaatagaagaagaggaactcactctgaccattctgcggcagacaggaggattggggatatctatcgctggtggaaaaggatccaccccatataagggggacgatgaggggatctttatctctagggtcagcgaagagggcccagccgctcgcgcaggcgtgcgggtgggagacaagctgctggaggtcaacggggtggccctacagggagccgagcaccacgaagctgtcgaagctctgcgaggcgcaggaactgccgtgcagatgagagtgtggcgcgaacgtatggtggaacctgaaaacgcggtcacaatcacccccctccggccagaggacgattattctccgagggagcgcagggggggaggcctgcggctgccgctgctgcctcctgaatctccgggacccctcagacagaggcacgtagcatgcctcgcgaggtcagaacggggtctgggcttttcgatcgcaggtgggaagggtagcacaccgtacagagccggagacgccggaatttttgtcagtcggattgctgaaggtggtgcagcacatagagcgggaacacttcaagttggcgatagagtactgagcattaatggcgtcgacgtaacggaggctcggcacgaccacgctgtctctctcttaacagccgcatctcccacaattgcccttctccttgagcgtgaagcaggcggacccttgcccccttcaccactcccccacagctcacctcccactgctgctgtggcaacaacctcaatcactacagcaacacccggtgtccccggacttccttctctggccccaagtctccttgcggctgcattagaggggccataccccgtggaggaaataaggctgcccagagccggaggccctttgggcctgtcaatcgttggcggaagcgaccactcctctcatcctttcggcgtacaagagcctggggttttcatctctaaagttttacctcggggactggccgcacggtcgggccttcgcgtaggtgaccgcattcttgctgtgaacggccaggatgtccgtgacgccacccatcaggaggccgtctctgctctgctgaggccttgcttagagctctctctcttggtgaggagagatcccgctcccccaggcttgcgcgaactgtgtattcagaaagccccaggggagaggttgggaatcagcattaggggaggcgcaagaggccatgctggcaatcctcgggatcccactgatgagggcatctttatttcgaaagtgtcacccactggggctgcagggagagacggacgattgagggtcgggcttaggctcttggaggtgaaccagcagtccttactgggcctcacccacggggaagccgtccagctgttacgctccgtaggagacaccctcacagtcttagtgtgcgacgggtttgaggcgtctactgacgcagccctggaagtgtcccccggagtgattgccaacccattcgccgctggtatcggacacaggaacagcctcgaaagtatctctagcatcgatagggagttatctcccgagggtccaggcaaagaaaaagagctgccaggacagacactccactggggaccagaggcaacagaggctgctggacgtgggcttcagccgctgaaacttgactacagagctctagccgctgtaccttccgcgggaagtgtccagagagtgcctagtggcgcagctggcggaaagatggccgagtccccatgcagtcctagcgggcagcagcctcccagcccaccctcgccggacgagctccccgctaatgtcaagcaagcatatcgcgcatttgctgccgttcccacctctcacccacctgaagacgcccctgcacagcctcccacaccaggcccagcggcttctcccgaacaactgagctttagggaacgacagaagtactttgaactggaagtgcgtgtgccacaggcagagggaccgcctaaacgagtgtctcttgttggagctgacgacctgaggaagatgcaggaagaggaagctagaaagctgcagcaaaagagggcacagatgctaagggaagccgctgaggccggagccgaagcccgtcttgcccttgatggggagaccctaggtgaagaggagcaagaggacgaacagcctccatgggcgtccccttcccctacaagcaggcagtcacctgcttcacccccacccctggggggtggtgcgcctgttcgcaccgcgaaagccgaacgtcgccaccaagaaaggcttagagtgcagtcacctgagccccctgcccctgaaagggcattaagccctgccgagctgagagctctggaagccgaaaaacgggcactctggcgagcagctagaatgaagagcttggagcaggatgccctccgggctcagatggtgctgtcccggtctcaggagggacgaggcactcgtgggccactggaaagacttgccgaagcgccatcccctgccccaactcccagccctacaccagtggaggatctggggcctcagaccagtacatctcccggacgcctctccccggattttgcagaggagctccgatccctggaaccatcaccatcaccaggcccacaggaagaagatggggaagtggccctggtgctacttggcagaccttcacccggagccgtcggccctgaggatgtcgccctgtgctcctccagacggcctgttaggcctggcagacggggtcttgggcctgtgccgagctag

SEQ ID NO: 186115 - DNA, 4650 bp, Artificial Sequence
  derived and/or modified sequence
atgcagctcgtggaattagacgtcagtcggaacgacattcccgaaatccccgagtccatcaaattttgtaaagcactggaaatcgctgactttagtggcaatcctctgtccagactgcctgatggtttcacccagcttaggagcttagctcacttggctctcaatgacgtttctctgcaggccctccctggagatgtgggaaatctggccaatctggtgacactggagctgcgcgagaatctgctcaaaagcctgccagcttctttatcttttctggttaaactggagcagctggatctcggtggaaatgacttggaggtcctgcctgataccctgggagccctgcctaacttgcgagaactgtggttggatcgtaatcaactaagcgccctgccacctgaactgggcaatctgcgcaggttagtgtgcctggacgtgtcagagaataggctcgaggagctgcccgcagagttgggcggtctggtcctcttgacggatctactgttgtctcagaacctattaaggcgtctgccggatgggatcggacagctcaaacagttatctattcttaaggtagatcagaacaggctttgcgaggtgaccgaagccattggcgattgtgaaaacctctccgagctcattcttactgagaatctgctgatggctctgccccgatctctgggcaagttaactaaacttaccaacctcaatgtcgatcgaaaccaccttgaggccctgccccctgagatcgggggttgtgtggccctgtccgtcctaagtctccgagacaaccgtctggccgttctgcctccagagttggcacacacgactgagttgcatgtgctggacgtggccggaaatagactccaatcgttgccgttcgcgttgacccacctgaatcttaaagcactgtggctggccgagaaccaggctcaaccaatgttaagatttcaaacagaagatgacgccagaacaggcgaaaaagtgctcacctgctatttattgccgcagcagcccccaccctccttggaggatgctgggcagcagggctcactgtctgagacatggagcgacgccccaccatccagagtgagcgtcatccagttcctcgaagctcctatcggtgacgaagacgctgaggaggccgcagcggagaaacgaggcctgcagaggagagctaccccccatccaagcgagcttaaagtgatgaaaagatcaattgagggcagaaggtcagaggcctgtccctgccagcccgattctgggagcccactgcccgcagaggaggaaaaacgactgtccgccgaaagtggcctctccgaggattcgcgtccgagcgcaagtactgtctctgaagcggagcctgaagggccatccgcagaggctcagggcggaagtcaacaggaggcaactaccgctggcggagaagaagatgccgaagaagactatcaggaacccacagttcatttcgctgaggacgccctgctgcccggagacgatcgcgagattgaggaagggcagcccgaggcaccctggacgttgcccggtggaaggcaaagactgattaggaaggataccccacactataaaaagcatttcaagataagtaaactccctcagcccgaggctgtggtggctcttctccagggaatgcagcccgacggggaaggccctgtggcacccggagggtggcacaacggtcctcacgccccatgggctcccagagcccagaaagaagaagaggaagaagaagaaggcagccctcaggaagaggaggttgaagaagaggaagaaaatagggcggaggaggaggaggcctcaactgaggaggaggacaaggagggggcagtcgtgtccgcccctagcgtcaagggagtaagctttgaccaggcgaacaacctgttgatagagcccgcaagaatcgaagaggaagagcttactcttacaatcctgaggcagacgggagggcttggaatcagtatcgcgggtggaaaaggtagcacgccatacaagggggatgatgaggggatcttcatatctagagtgagtgaagaagggcctgctgccagagcaggcgtgcgggtcggagataaactgcttgaggtgaatggagttgctcttcagggcgctgagcaccacgaagccgtggaggctctccgaggcgctggcaccgccgtgcagatgcgagtttggagggagaggatggtggagcctgaaaatgcagtgactatcacaccccttagacctgaggacgattactctcctagggaacgtagaggcggtggtctgagactccctctgctgcctcctgaatcacctggaccactacggcagcgccacgtcgcctgtctggcaagaagcgaaagggggctgggtttctctatcgccggaggcaaagggagcactccttaccgggcaggcgacgcaggaatcttcgtgtcgcgtatcgctgaaggcggagcagcccaccgggctggaaccctccaggttggggacagggtcctgtcaataaatggagtggacgtcacagaggcgcgtcacgaccatgccgtgtccctgttgacagctgcatctcccacaattgcccttttactcgagagagaggcgggtgggcctctgccaccctccccacttccccactcctcccctcctaccgccgctgttgcaactaccagcattacgacagcaacgcccggtgtcccaggcctgccaagtcttgccccatccctcctggccgctgctctcgaaggtccttaccctgtcgaggaaattcgtctacctcgcgctggagggccactaggcttgagcatcgtgggaggcagcgatcactcatctcaccctttcggagtacaagaacctggagtatttatttctaaggtgcttcccaggggcctcgcagccaggagtgggctgcgggtgggggatcggatattggcagtgaatggacaggacgtccgcgatgctacgcatcaggaagcagtgtccgccctactaagaccctgtttggagctgtcccttttagtgcgaagagatcctgctcctccaggtctccgggagctgtgcatccagaaagctcctggcgaacgactcgggatctctataagagggggagctaggggccacgcgggtaatcccagggatcctaccgatgagggtattttcatctccaaggtttctcccactggcgcagctgggagggatgggcgactgcgagtggggttgagactcctggaggtgaatcagcaaagtctcctagggctgacacatggagaagcagtccagctgctccggtcggtcggggacaccctaactgtcctggtttgtgacgggtttgaggcttccacagatgccgctctagaagtgtcgcctggggtgatcgcaaatcccttcgcagcgggaatcggccaccgcaattccctagaaagtatttcatctatcgatcgcgagctttctcctgaggggccaggtaaagaaaaggaactaccaggccaaaccttgcactggggaccagaggcaacagaggccgcaggaaggggactgcaaccgctgaaattagactatcgcgcactggctgcagtcccatccgctggttcagtacaacgcgtgccctccggagccgcaggaggcaaaatggctgagtcaccctgttctccatccggtcagcagccaccatccccacccagccctgatgagttgcccgctaatgtgaaacaggcatacagagccttcgccgctgtccctacttctcacccgcctgaagatgccccagcacaaccacccacgcctggcccagccgcaagtccggagcaattgagtttcagagagagacagaagtatttcgaacttgaggtgcgggtgcctcaggctgaaggaccccctaagagagtatctcttgtgggggctgatgacctgagaaagatgcaggaggaggaggcgagaaaactccagcaaaaacgcgctcagatgctccgcgaagctgccgaagccggagctgaagcgaggctggcattggatggtgagacactcggggaagaggaacaagaagatgagcagccaccctgggcctcccccagccccaccagccggcaatctccggcatcgcctccaccgctcgggggaggcgcacccgtccggacagctaaggcagaaaggagacatcaagagaggttacgtgtacaatcccccgagcccccagccccagagcgggctctctctccagccgaattgagggcccttgaggccgagaagcgtgcactgtggcgcgcagctcggatgaagagcctggagcaagacgccctgcgggcacagatggtgctctctcgaagtcaggagggtagaggtacgcgcggtcctctggaaagattggctgaagctccctctccagcccctactccatctccaacgccagtggaggacttgggcccacagaccagcaccagccccggacggctcagcccagactttgccgaggagctcaggagtctggaacctagccccagtcctggtccacaagaggaggacggagaagtagccctcgtgctgttgggtcggccttcaccaggtgccgtgggtcccgaagacgtagcactgtgtagtagtaggcgcccagtacgacccggtaggcgcggactgggacctgtacctagctag

SEQ ID NO: 186116 - DNA, 2268 bp, Artificial Sequence
  derived and/or modified sequence
atgcagcctgacggggaggggcctgtggctcccggagggtggcacaatggacctcacgccccttgggcccctcgagcccagaaggaagaggaggaagaagaagaaggcagcccacaagaagaggaggtggaggaggaagaagagaatagagcggaggaggaagaggcatctacagaggaagaggataaagaaggggctgtcgtgagtgctccatcagtgaagggcgtgtcctttgaccaggccaacaacctgctgatcgagccagcccgaattgaggaggaagaacttacattgaccattcttagacagaccggtggactcggaattagtatcgcaggtgggaaaggctctaccccttataagggggacgacgagggaatctttatttcacgcgttagcgaagaagggccagcggcacgagccggtgtgcgtgtgggggacaagctgttggaagtcaacggcgtagcgctccagggagccgagcatcacgaggccgttgaggcccttcggggagccggaacggctgtccagatgcgggtatggcgggaaagaatggtggaaccagaaaatgctgttacaatcacccccctgcggcctgaggacgattattccccaagagaacgtaggggagggggactcaggctcccactgttgcccccagaatctccaggtcccttaagacagaggcacgtggcttgcctggccaggtcggaacgtggcctcggcttcagtatcgccggtggaaaaggttctactccataccgcgctggcgacgctggaattttcgtaagtcggattgcagagggtggggctgctcacagagcaggcactctgcaggtcggggaccgggttctctcaatcaacggagtagatgtgaccgaggccagacacgaccatgcggtgtcgttgcttacagcagcgagtcccaccattgcgctgctgctggagcgcgaggctgggggacccctgcccccatctccacttccccactctagtcctccaacagccgcagtagcaacaaccagcataactactgctactcctggcgttcccggtctgccctcactggcgccttcactgctggctgccgcactagagggaccatatccagttgaggagatcagactgccaagagctgggggacctctgggcctcagcatcgtgggtggctcagaccacagcagccatccttttggggtgcaagaaccaggcgtgttcatttccaaagtgctacccagaggactcgccgcacgcagcggcttaagagtaggggatagaatccttgcagttaatggccaggatgttcgagacgccacgcaccaggaagctgtatctgcattactacggccatgtctcgagctttcgcttttagtacggagggaccccgcaccgccaggattgcgggagctgtgtatccaaaaagcacctggtgaaagactggggatctctatccgaggtggagctaggggacacgccggaaatccgcgagaccccactgacgagggtatcttcatcagcaaagtaagtccaactggggcagccggtcgcgatgggcgtcttcgggtcggtttacggctactcgaggtgaatcagcagtcactcttaggcctcacacacggcgaggctgtccagttgctgagatctgttggggatactcttactgtactggtgtgcgacggcttcgaggcaagcaccgacgccgcactagaagtgtctcccggagtgatagctaatccgtttgctgctgggattggccatagaaactctctcgagtctatatcctcgatcgatcgagaacttagtcccgaaggccctggcaaagaaaaggagctcccaggccagacgcttcactggggcccagaggctactgaggccgcaggacgtgggctgcagccactgaagctagactatagagccttggccgctgttccctccgccggttcagttcagcgtgttccttcaggggcagcaggtggcaagatggctgaatctccatgtagtccgagcgggcagcaacctccatccccccctagcccagacgagctgcccgctaatgttaagcaggcctaccgggcttttgccgcagtgcccacctctcatcctccagaggacgcccctgcacagccccctacacccggtccagctgcttctcctgagcagctcagtttcagagaaagacagaaatacttcgaattggaagtccgagtgccgcaggccgagggacctctgcgcccaggcaggcggggtctgggccctgtaccgtcgtag

SEQ ID NO: 186117 - DNA, 5143 bp, Artificial Sequence
  derived and/or modified sequence
ccgcaccatgctcaagtgcatcccgctgtggcgctgcaaccggcacgtggagtcggtggacaagcggcactgttcgctgcaggccgtgccggaggagatctaccgctacagccgcagcctggaggagctgctgctcgacgccaaccagctgcgcgagctgcccaagccttttttccggctgctgaacttgcgcaagctgggcctgagcgacaacgagatccagcggttgcctcccgaggtggccaacttcatgcagctggtggagctggacgtgtcccggaacgatatccctgagatcccggagagcatcaagttctgcaaggctctggagatcgcggacttcagcgggaaccccctctccaggctccctgatggcttcactcagctgcgcagcctggctcacctggccctgaatgatgtgtctctgcaggcactgcccggggacgtgggcaacctcgccaacctggtgaccctggagctccgggagaacctgctcaagtccctgccagcgtccctgtcatttctggtcaagctggaacagctggatctgggaggcaacgatctggaagtgctgccagacactctgggggctctgcccaatcttcgggagctgtggcttgaccggaaccagctgtcagcactgcccccggagctcgggaacctgcggcgcctggtgtgcctggacgtgtcggaaaaccggctggaggagctgcctgctgagctcggcgggctggtgctgctcactgacctgctgctgtcccagaacctgctgcggaggctgcccgacggcatcggtcagctgaagcagctatccatcctaaaggtagaccagaatcggctgtgcgaggtgaccgaggccatcggggactgtgagaacctctctgagctgatcctcacggagaacctgctgatggccctgccccgctccctgggaaagctgactaagctgaccaacctcaacgtggaccggaaccacctcgaggcgctgccgcccgagatcgggggctgtgtggcactcagcgtcctctccttgagggacaaccgcctggccgtcctgccaccagagctggcccacacgacagagctgcacgtgctggacgtggcggggaaccgcctgcagagtctgccgttcgcgctcacccacctcaatctcaaggccctgtggctggcagagaaccaggcgcagcccatgctccggttccagacggaggatgatgcccggaccggcgagaaggtgctcacctgctacttgctgccccagcagcccccacccagcctcgaggatgctgggcagcaggggagcctctcggagacctggagcgatgccccgccgagccgcgtcagcgtcatccagttcctggaggcccccataggtgatgaggacgctgaggaagctgcagctgagaagcggggcctacagcgccgggccacacctcaccccagcgagctcaaggtgatgaagaggagcatcgaggggcggcggagcgaggcctgcccttgccagccagactctgggtcgcccttgcctgcagaggaggagaagcggctgagtgccgagtctggcctgagtgaagactctcgcccatctgccagcacagtctctgaggctgagcccgagggcccgtcggctgaggcacagggtgggagccagcaggaagccacgactgctggcggggaggaagacgccgaagaggactaccaggagcccacggtgcatttcgcagaggacgcactgctgcccggggatgacagggagatcgaggaggggcagcctgaggccccctggaccctgccaggcgggaggcagcggctcatccgcaaggacacacctcactacaaaaagcacttcaagatctccaagctgccccagcccgaggccgttgtggctctgctgcagggcatgcagcctgatggggagggccctgtggctcccgggggctggcacaatggcccccacgcaccctgggctcctcgggcccagaaggaggaggaggaggaggaagagggtagtcctcaggaggaggaggtagaggaggaggaggaaaacagggctgaagaggaagaggccagcactgaggaggaggacaaggagggggccgtggtttctgcgccctctgtcaagggagtgtcgtttgaccaggccaataacctgctgatagagcctgctcgcattgaggaggaagagctgaccctcactatcctgcggcagactgggggcctgggcatcagcattgcgggcggcaagggctccacaccctataagggggacgacgagggcatattcatctctcgggtgtccgaggaaggccctgcggcccgggctggagtccgtgtgggtgacaagctcctggaggtgaatggtgtggctctgcagggcgccgagcaccacgaggccgtggaggcgctccggggggccggcactgccgtgcagatgcgagtgtggcgggagcgcatggtggagcctgagaacgcggtcaccatcacgccgctgcggcccgaggatgattacagcccccgagagcggcggggaggggggctgcgcctgcccctgctcccgcctgagagccccgggcccctccgtcagcgccacgtggcctgcctggcacgcagcgagagggggctgggcttcagcattgctggtgggaaaggctccacaccctacagggctggtgatgcgggcatcttcgtctcccgcattgccgagggcggtgctgctcaccgcgcgggcacactgcaggttggcgaccgcgtcctctctattaatggagtggacgtgactgaggccaggcatgaccacgccgtctccctgctgaccgctgcctcccccaccatcgccctgctgttggagcgggaggctgggggccctcttcctcccagccctctgccacattcctcaccccccaccgctgctgttgccaccaccagcataaccactgccacccccggggtgcctgggttgccgagcctggcccccagcctgctggctgccgcgttggaagggccatacccagtggaggagatccgtctgccaagagctgggggccctctggggcttagtattgtcggaggctccgaccattccagccacccgtttggtgtccaggagcctggtgtgttcatctccaaggtgctcccgcggggcctggccgctcgcagcggcctgcgggttggggaccgcatcctggcagtgaacgggcaagacgtgcgggatgccacgcaccaagaagcagtcagtgccctgctccggccctgcctggagctgtcgctgctggtgcggagggacccggcacccccgggcctacgggaactgtgcatccagaaggcacctggggagaggctgggcatcagcatccgcgggggtgccaggggccacgctggcaacccccgcgaccccacagacgagggcatcttcatctccaaggtgagccccacgggggcagccgggcgcgacggtcggctgcgtgtgggtttgcggctgttggaggtgaaccagcagagcctgctgggcctgacgcacggcgaggcggtgcagctgctccgcagtgtgggcgacaccctcaccgtgctggtctgtgacggctttgaggccagcaccgacgcagccctggaggtgtccccaggtgtcattgccaacccctttgcggcaggcatcggccaccggaacagcctggagagcatctcttccatcgaccgggagctgagccctgagggcccaggcaaggagaaggagctgcctggacagaccctgcactgggggcccgaggccacagaagccgcaggtcggggtctgcagcccctgaagctggactaccgcgccctggccgccgtgcccagcgctggcagcgtgcagagggtaccgtctggagcagctggagggaagatggctgaatctccctgctcccctagtggccagcagccgccctccccgccttctccggatgagctgcccgccaatgtgaagcaggcctacagggccttcgcggccgtgcccacttctcacccgcctgaggatgcccctgcccagccccccacgcctgggcctgcagcctccccggagcagctgtccttccgggagcggcagaagtactttgagctggaggtgcgcgtgccccaggccgagggcccccctaagcgcgtgtccctggtgggtgctgacgacctgcggaagatgcaggaggaggaagccagaaaactacagcagaagagagcgcagatgctgcgggaggcggcagaggctggggccgaagcgaggctcgccctggacggggagacgctgggcgaggaggaacaggaggatgagcagccaccctgggccagcccgagccccacctcaaggcagagcccggcgtcccccccacccctgggaggtggcgccccggtgcggacggccaaagctgaacggcgccaccaggagcggctgcgcgtgcagagtccggagccaccggcacccgagcgtgccctgtcccctgccgagctccgggccctggaggccgagaagcgtgcgctgtggagggcagccaggatgaagtcattggaacaggacgctctccgagcacagatggtcctcagcaggtcccaggaaggccggggcacgcgggggcccctggagcgactggccgaggccccttcccctgcgcccaccccgtcgcccacccctgtggaagacctcggcccccagaccagcacctccccgggacgcctgtcaccggactttgctgaggagttgaggtccctggaaccatctcccagccctggcccgcaggaggaggatggagaagtggctctggtgcttctgggcaggccctcacccggcgctgtgggccctgaagatgtggcactgtgcagcagccgccgccccgtaaggcctgggcgccgtggcctgggccctgtgccctcctagaggagcaggcacctcccccagacttggggtgggggccctgccagctccagcaccacccttgccccaagtcttttaacctgggtgttagcattttaaagagaccccacaggagttctggcctgtgactaactaactgccccaccccagccgagacctcggcgagactgtaactagtgatgtttgtacaaccaaagactctattttgtggtttaaggagaataaagttgactacattttacctcc

SEQ ID NO: 186118 - DNA, 5108 bp, Artificial Sequence
  derived and/or modified sequence
gagtgaaacccgtggggattcagggaggtggatggggttagggtggaacttggattcaggtggctgatgagtactagcttcttgggccgctctggaggtgggtccagacctcctctccttttttgctgggtgcagggccttttttccggctgctgaacttgcgcaagctgggcctgagcgacaacgagatccagcggttgcctcccgaggtggccaacttcatgcagctggtggagctggacgtgtcccggaacgatatccctgagatcccggagagcatcaagttctgcaaggctctggagatcgcggacttcagcgggaaccccctctccaggctccctgatggcttcactcagctgcgcagcctggctcacctggccctgaatgatgtgtctctgcaggcactgcccggggacgtgggcaacctcgccaacctggtgaccctggagctccgggagaacctgctcaagtccctgccagcgtccctgtcatttctggtcaagctggaacagctggatctgggaggcaacgatctggaagtgctgccagacactctgggggctctgcccaatcttcgggagctgtggcttgaccggaaccagctgtcagcactgcccccggagctcgggaacctgcggcgcctggtgtgcctggacgtgtcggaaaaccggctggaggagctgcctgctgagctcggcgggctggtgctgctcactgacctgctgctgtcccagaacctgctgcggaggctgcccgacggcatcggtcagctgaagcagctatccatcctaaaggtagaccagaatcggctgtgcgaggtgaccgaggccatcggggactgtgagaacctctctgagctgatcctcacggagaacctgctgatggccctgccccgctccctgggaaagctgactaagctgaccaacctcaacgtggaccggaaccacctcgaggcgctgccgcccgagatcgggggctgtgtggcactcagcgtcctctccttgagggacaaccgcctggccgtcctgccaccagagctggcccacacgacagagctgcacgtgctggacgtggcggggaaccgcctgcagagtctgccgttcgcgctcacccacctcaatctcaaggccctgtggctggcagagaaccaggcgcagcccatgctccggttccagacggaggatgatgcccggaccggcgagaaggtgctcacctgctacttgctgccccagcagcccccacccagcctcgaggatgctgggcagcaggggagcctctcggagacctggagcgatgccccgccgagccgcgtcagcgtcatccagttcctggaggcccccataggtgatgaggacgctgaggaagctgcagctgagaagcggggcctacagcgccgggccacacctcaccccagcgagctcaaggtgatgaagaggagcatcgaggggcggcggagcgaggcctgcccttgccagccagactctgggtcgcccttgcctgcagaggaggagaagcggctgagtgccgagtctggcctgagtgaagactctcgcccatctgccagcacagtctctgaggctgagcccgagggcccgtcggctgaggcacagggtgggagccagcaggaagccacgactgctggcggggaggaagacgccgaagaggactaccaggagcccacggtgcatttcgcagaggacgcactgctgcccggggatgacagggagatcgaggaggggcagcctgaggccccctggaccctgccaggcgggaggcagcggctcatccgcaaggacacacctcactacaaaaagcacttcaagatctccaagctgccccagcccgaggccgttgtggctctgctgcagggcatgcagcctgatggggagggccctgtggctcccgggggctggcacaatggcccccacgcaccctgggctcctcgggcccagaaggaggaggaggaggaggaagagggtagtcctcaggaggaggaggtagaggaggaggaggaaaacagggctgaagaggaagaggccagcactgaggaggaggacaaggagggggccgtggtttctgcgccctctgtcaagggagtgtcgtttgaccaggccaataacctgctgatagagcctgctcgcattgaggaggaagagctgaccctcactatcctgcggcagactgggggcctgggcatcagcattgcgggcggcaagggctccacaccctataagggggacgacgagggcatattcatctctcgggtgtccgaggaaggccctgcggcccgggctggagtccgtgtgggtgacaagctcctggaggtgaatggtgtggctctgcagggcgccgagcaccacgaggccgtggaggcgctccggggggccggcactgccgtgcagatgcgagtgtggcgggagcgcatggtggagcctgagaacgcggtcaccatcacgccgctgcggcccgaggatgattacagcccccgagagcggcggggaggggggctgcgcctgcccctgctcccgcctgagagccccgggcccctccgtcagcgccacgtggcctgcctggcacgcagcgagagggggctgggcttcagcattgctggtgggaaaggctccacaccctacagggctggtgatgcgggcatcttcgtctcccgcattgccgagggcggtgctgctcaccgcgcgggcacactgcaggttggcgaccgcgtcctctctattaatggagtggacgtgactgaggccaggcatgaccacgccgtctccctgctgaccgctgcctcccccaccatcgccctgctgttggagcgggaggctgggggccctcttcctcccagccctctgccacattcctcaccccccaccgctgctgttgccaccaccagcataaccactgccacccccggggtgcctgggttgccgagcctggcccccagcctgctggctgccgcgttggaagggccatacccagtggaggagatccgtctgccaagagctgggggccctctggggcttagtattgtcggaggctccgaccattccagccacccgtttggtgtccaggagcctggtgtgttcatctccaaggtgctcccgcggggcctggccgctcgcagcggcctgcgggttggggaccgcatcctggcagtgaacgggcaagacgtgcgggatgccacgcaccaagaagcagtcagtgccctgctccggccctgcctggagctgtcgctgctggtgcggagggacccggcacccccgggcctacgggaactgtgcatccagaaggcacctggggagaggctgggcatcagcatccgcgggggtgccaggggccacgctggcaacccccgcgaccccacagacgagggcatcttcatctccaaggtgagccccacgggggcagccgggcgcgacggtcggctgcgtgtgggtttgcggctgttggaggtgaaccagcagagcctgctgggcctgacgcacggcgaggcggtgcagctgctccgcagtgtgggcgacaccctcaccgtgctggtctgtgacggctttgaggccagcaccgacgcagccctggaggtgtccccaggtgtcattgccaacccctttgcggcaggcatcggccaccggaacagcctggagagcatctcttccatcgaccgggagctgagccctgagggcccaggcaaggagaaggagctgcctggacagaccctgcactgggggcccgaggccacagaagccgcaggtcggggtctgcagcccctgaagctggactaccgcgccctggccgccgtgcccagcgctggcagcgtgcagagggtaccgtctggagcagctggagggaagatggctgaatctccctgctcccctagtggccagcagccgccctccccgccttctccggatgagctgcccgccaatgtgaagcaggcctacagggccttcgcggccgtgcccacttctcacccgcctgaggatgcccctgcccagccccccacgcctgggcctgcagcctccccggagcagctgtccttccgggagcggcagaagtactttgagctggaggtgcgcgtgccccaggccgagggcccccctaagcgcgtgtccctggtgggtgctgacgacctgcggaagatgcaggaggaggaagccagaaaactacagcagaagagagcgcagatgctgcgggaggcggcagaggctggggccgaagcgaggctcgccctggacggggagacgctgggcgaggaggaacaggaggatgagcagccaccctgggccagcccgagccccacctcaaggcagagcccggcgtcccccccacccctgggaggtggcgccccggtgcggacggccaaagctgaacggcgccaccaggagcggctgcgcgtgcagagtccggagccaccggcacccgagcgtgccctgtcccctgccgagctccgggccctggaggccgagaagcgtgcgctgtggagggcagccaggatgaagtcattggaacaggacgctctccgagcacagatggtcctcagcaggtcccaggaaggccggggcacgcgggggcccctggagcgactggccgaggccccttcccctgcgcccaccccgtcgcccacccctgtggaagacctcggcccccagaccagcacctccccgggacgcctgtcaccggactttgctgaggagttgaggtccctggaaccatctcccagccctggcccgcaggaggaggatggagaagtggctctggtgcttctgggcaggccctcacccggcgctgtgggccctgaagatgtggcactgtgcagcagccgccgccccgtaaggcctgggcgccgtggcctgggccctgtgccctcctagaggagcaggcacctcccccagacttggggtgggggccctgccagctccagcaccacccttgccccaagtcttttaacctgggtgttagcattttaaagagaccccacaggagttctggcctgtgactaactaactgccccaccccagccgagacctcggcgagactgtaactagtgatgtttgtacaaccaaagactctattttgtggtttaaggagaataaagttgactacatttt

SEQ ID NO: 186119 - DNA, 4168 bp, Artificial Sequence
  derived and/or modified sequence
ccgcaccatgctcaagtgcatcccgctgtggcgctgcaaccggcacgtggagtcggtggacaagcggcactgttcgctgcaggccgtgccggaggagatctaccgctacagccgcagcctggaggagctgctgctcgacgccaaccagctgcgcgagctgcccaagccttttttccggctgctgaacttgcgcaagctgggcctgagcgacaacgagatccagcggttgcctcccgaggtggccaacttcatgcagctggtggagctggacgtgtcccggaacgatatccctgagatcccggagagcatcaagttctgcaaggctctggagatcgcggacttcagcgggaaccccctctccaggctccctgatggcttcactcagctgcgcagcctggctcacctggccctgaatgatgtgtctctgcaggcactgcccggggacgtgggcaacctcgccaacctggtgaccctggagctccgggagaacctgctcaagtccctgccagcgtccctgtcatttctggtcaagctggaacagctggatctgggaggcaacgatctggaagtgctgccagacactctgggggctctgcccaatcttcgggagctgtggcttgaccggaaccagctgtcagcactgcccccggagctcgggaacctgcggcgcctggtgtgcctggacgtgtcggaaaaccggctggaggagctgcctgctgagctcggcgggctggtgctgctcactgacctgctgctgtcccagaacctgctgcggaggctgcccgacggcatcggtcagctgaagcagctatccatcctaaaggtagaccagaatcggctgtgcgaggtgaccgaggccatcggggactgtgagaacctctctgagctgatcctcacggagaacctgctgatggccctgccccgctccctgggaaagctgactaagctgaccaacctcaacgtggaccggaaccacctcgaggcgctgccgcccgagatcgggggctgtgtggcactcagcgtcctctccttgagggacaaccgcctggccgtcctgccaccagagctggcccacacgacagagctgcacgtgctggacgtggcggggaaccgcctgcagagtctgccgttcgcgctcacccacctcaatctcaaggccctgtggctggcagagaaccaggcgcagcccatgctccggttccagacggaggatgatgcccggaccggcgagaaggtgctcacctgctacttgctgccccagcagcccccacccagcctcgaggatgctgggcagcaggggagcctctcggagacctggagcgatgccccgccgagccgcgtcagcgtcatccagttcctggaggcccccataggtgatgaggacgctgaggaagctgcagctgagaagcggggcctacagcgccgggccacacctcaccccagcgagctcaaggtgatgaagaggagcatcgaggggcggcggagcgaggcctgcccttgccagccagactctgggtcgcccttgcctgcagaggaggagaagcggctgagtgccgagtctggcctgagtgaagactctcgcccatctgccagcacagtctctgaggctgagcccgagggcccgtcggctgaggcacagggtgggagccagcaggaagccacgactgctggcggggaggaagacgccgaagaggactaccaggagcccacggtgcatttcgcagaggacgcactgctgcccggggatgacagggagatcgaggaggggcagcctgaggccccctggaccctgccaggcgggaggcagcggctcatccgcaaggacacacctcactacaaaaagcacttcaagatctccaagctgccccagcccgaggccgttgtggctctgctgcagggcatgcagcctgatggggagggccctgtggctcccgggggctggcacaatggcccccacgcaccctgggctcctcgggcccagaaggaggaggaggaggaggaagagggtagtcctcaggaggaggaggtagaggaggaggaggaaaacagggctgaagaggaagaggccagcactgaggaggaggacaaggagggggccgtggtttctgcgccctctgtcaagggagtgtcgtttgaccaggccaataacctgctgatagagcctgctcgcattgaggaggaagagctgaccctcactatcctgcggcagactgggggcctgggcatcagcattgcgggcggcaagggctccacaccctataagggggacgacgagggcatattcatctctcgggtgtccgaggaaggccctgcggcccgggctggagtccgtgtgggtgacaagctcctggaggtgaatggtgtggctctgcagggcgccgagcaccacgaggccgtggaggcgctccggggggccggcactgccgtgcagatgcgagtgtggcgggagcgcatggtggagcctgagaacgcggtcaccatcacgccgctgcggcccgaggatgattacagcccccgagagcggcggggaggggggctgcgcctgcccctgctcccgcctgagagccccgggcccctccgtcagcgccacgtggcctgcctggcacgcagcgagagggggctgggcttcagcattgctggtgggaaaggctccacaccctacagggctggtgatgcgggcatcttcgtctcccgcattgccgagggcggtgctgctcaccgcgcgggcacactgcaggttggcgaccgcgtcctctctattaatggagtggacgtgactgaggccaggcatgaccacgccgtctccctgctgaccgctgcctcccccaccatcgccctgctgttggagcgggaggctgggggccctcttcctcccagccctctgccacattcctcaccccccaccgctgctgttgccaccaccagcataaccactgccacccccggggtgcctgggttgccgagcctggcccccagcctgctggctgccgcgttggaagggccatacccagtggaggagatccgtctgccaagagctgggggccctctggggcttagtattgtcggaggctccgaccattccagccacccgtttggtgtccaggagcctggtgtgttcatctccaaggtgctcccgcggggcctggccgctcgcagcggcctgcgggttggggaccgcatcctggcagtgaacgggcaagacgtgcgggatgccacgcaccaagaagcagtcagtgccctgctccggccctgcctggagctgtcgctgctggtgcggagggacccggcacccccgggcctacgggaactgtgcatccagaaggcacctggggagaggctgggcatcagcatccgcgggggtgccaggggccacgctggcaacccccgcgaccccacagacgagggcatcttcatctccaaggtgagccccacgggggcagccgggcgcgacggtcggctgcgtgtgggtttgcggctgttggaggtgaaccagcagagcctgctgggcctgacgcacggcgaggcggtgcagctgctccgcagtgtgggcgacaccctcaccgtgctggtctgtgacggctttgaggccagcaccgacgcagccctggaggtgtccccaggtgtcattgccaacccctttgcggcaggcatcggccaccggaacagcctggagagcatctcttccatcgaccgggagctgagccctgagggcccaggcaaggagaaggagctgcctggacagaccctgcactgggggcccgaggccacagaagccgcaggtcggggtctgcagcccctgaagctggactaccgcgccctggccgccgtgcccagcgctggcagcgtgcagagggtaccgtctggagcagctggagggaagatggctgaatctccctgctcccctagtggccagcagccgccctccccgccttctccggatgagctgcccgccaatgtgaagcaggcctacagggccttcgcggccgtgcccacttctcacccgcctgaggatgcccctgcccagccccccacgcctgggcctgcagcctccccggagcagctgtccttccgggagcggcagaagtactttgagctggaggtgcgcgtgccccaggccgagggccccctaaggcctgggcgccgtggcctgggccctgtgccctcctag

SEQ ID NO: 186120 - DNA, 4893 bp, Artificial Sequence
  derived and/or modified sequence
atgctgaagtgcatccccctgtggagatgcaacagacacgtggagagcgtggacaagagacactgcagcctgcaggccgtgcccgaggagatctacagatacagcagaagcctggaggagctgctgctggacgccaaccagctgagagagctgcccaagcccttcttcagactgctgaacctgagaaagctgggcctgagcgacaacgagatccagagactgccccccgaggtggccaacttcatgcagctggtggagctggacgtgagcagaaacgacatccccgagatccccgagagcatcaagttctgcaaggccctggagatcgccgacttcagcggcaaccccctgagcagactgcccgacggcttcacccagctgagaagcctggcccacctggccctgaacgacgtgagcctgcaggccctgcccggcgacgtgggcaacctggccaacctggtgaccctggagctgagagagaacctgctgaagagcctgcccgccagcctgagcttcctggtgaagctggagcagctggacctgggcggcaacgacctggaggtgctgcccgacaccctgggcgccctgcccaacctgagagagctgtggctggacagaaaccagctgagcgccctgccccccgagctgggcaacctgagaagactggtgtgcctggacgtgagcgagaacagactggaggagctgcccgccgagctgggcggcctggtgctgctgaccgacctgctgctgagccagaacctgctgagaagactgcccgacggcatcggccagctgaagcagctgagcatcctgaaggtggaccagaacagactgtgcgaggtgaccgaggccatcggcgactgcgagaacctgagcgagctgatcctgaccgagaacctgctgatggccctgcccagaagcctgggcaagctgaccaagctgaccaacctgaacgtggacagaaaccacctggaggccctgccccccgagatcggcggctgcgtggccctgagcgtgctgagcctgagagacaacagactggccgtgctgccccccgagctggcccacaccaccgagctgcacgtgctggacgtggccggcaacagactgcagagcctgcccttcgccctgacccacctgaacctgaaggccctgtggctggccgagaaccaggcccagcccatgctgagattccagaccgaggacgacgccagaaccggcgagaaggtgctgacctgctacctgctgccccagcagcccccccccagcctggaggacgccggccagcagggcagcctgagcgagacctggagcgacgccccccccagcagagtgagcgtgatccagttcctggaggcccccatcggcgacgaggacgccgaggaggccgccgccgagaagagaggcctgcagagaagagccaccccccaccccagcgagctgaaggtgatgaagagaagcatcgagggcagaagaagcgaggcctgcccctgccagcccgacagcggcagccccctgcccgccgaggaggagaagagactgagcgccgagagcggcctgagcgaggacagcagacccagcgccagcaccgtgagcgaggccgagcccgagggccccagcgccgaggcccagggcggcagccagcaggaggccaccaccgccggcggcgaggaggacgccgaggaggactaccaggagcccaccgtgcacttcgccgaggacgccctgctgcccggcgacgacagagagatcgaggagggccagcccgaggccccctggaccctgcccggcggcagacagagactgatcagaaaggacaccccccactacaagaagcacttcaagatcagcaagctgccccagcccgaggccgtggtggccctgctgcagggcatgcagcccgacggcgagggccccgtggcccccggcggctggcacaacggcccccacgccccctgggcccccagagcccagaaggaggaggaggaggaggaggagggcagcccccaggaggaggaggtggaggaggaggaggagaacagagccgaggaggaggaggccagcaccgaggaggaggacaaggagggcgccgtggtgagcgcccccagcgtgaagggcgtgagcttcgaccaggccaacaacctgctgatcgagcccgccagaatcgaggaggaggagctgaccctgaccatcctgagacagaccggcggcctgggcatcagcatcgccggcggcaagggcagcaccccctacaagggcgacgacgagggcatcttcatcagcagagtgagcgaggagggccccgccgccagagccggcgtgagagtgggcgacaagctgctggaggtgaacggcgtggccctgcagggcgccgagcaccacgaggccgtggaggccctgagaggcgccggcaccgccgtgcagatgagagtgtggagagagagaatggtggagcccgagaacgccgtgaccatcacccccctgagacccgaggacgactacagccccagagagagaagaggcggcggcctgagactgcccctgctgccccccgagagccccggccccctgagacagagacacgtggcctgcctggccagaagcgagagaggcctgggcttcagcatcgccggcggcaagggcagcaccccctacagagccggcgacgccggcatcttcgtgagcagaatcgccgagggcggcgccgcccacagagccggcaccctgcaggtgggcgacagagtgctgagcatcaacggcgtggacgtgaccgaggccagacacgaccacgccgtgagcctgctgaccgccgccagccccaccatcgccctgctgctggagagagaggccggcggccccctgccccccagccccctgccccacagcagcccccccaccgccgccgtggccaccaccagcatcaccaccgccacccccggcgtgcccggcctgcccagcctggcccccagcctgctggccgccgccctggagggcccctaccccgtggaggagatcagactgcccagagccggcggccccctgggcctgagcatcgtgggcggcagcgaccacagcagccaccccttcggcgtgcaggagcccggcgtgttcatcagcaaggtgctgcccagaggcctggccgccagaagcggcctgagagtgggcgacagaatcctggccgtgaacggccaggacgtgagagacgccacccaccaggaggccgtgagcgccctgctgagaccctgcctggagctgagcctgctggtgagaagagaccccgccccccccggcctgagagagctgtgcatccagaaggcccccggcgagagactgggcatcagcatcagaggcggcgccagaggccacgccggcaaccccagagaccccaccgacgagggcatcttcatcagcaaggtgagccccaccggcgccgccggcagagacggcagactgagagtgggcctgagactgctggaggtgaaccagcagagcctgctgggcctgacccacggcgaggccgtgcagctgctgagaagcgtgggcgacaccctgaccgtgctggtgtgcgacggcttcgaggccagcaccgacgccgccctggaggtgagccccggcgtgatcgccaaccccttcgccgccggcatcggccacagaaacagcctggagagcatcagcagcatcgacagagagctgagccccgagggccccggcaaggagaaggagctgcccggccagaccctgcactggggccccgaggccaccgaggccgccggcagaggcctgcagcccctgaagctggactacagagccctggccgccgtgcccagcgccggcagcgtgcagagagtgcccagcggcgccgccggcggcaagatggccgagagcccctgcagccccagcggccagcagccccccagcccccccagccccgacgagctgcccgccaacgtgaagcaggcctacagagccttcgccgccgtgcccaccagccacccccccgaggacgcccccgcccagccccccacccccggccccgccgccagccccgagcagctgagcttcagagagagacagaagtacttcgagctggaggtgagagtgccccaggccgagggcccccccaagagagtgagcctggtgggcgccgacgacctgagaaagatgcaggaggaggaggccagaaagctgcagcagaagagagcccagatgctgagagaggccgccgaggccggcgccgaggccagactggccctggacggcgagaccctgggcgaggaggagcaggaggacgagcagcccccctgggccagccccagccccaccagcagacagagccccgccagccccccccccctgggcggcggcgcccccgtgagaaccgccaaggccgagagaagacaccaggagagactgagagtgcagagccccgagccccccgcccccgagagagccctgagccccgccgagctgagagccctggaggccgagaagagagccctgtggagagccgccagaatgaagagcctggagcaggacgccctgagagcccagatggtgctgagcagaagccaggagggcagaggcaccagaggccccctggagagactggccgaggcccccagccccgcccccacccccagccccacccccgtggaggacctgggcccccagaccagcaccagccccggcagactgagccccgacttcgccgaggagctgagaagcctggagcccagccccagccccggcccccaggaggaggacggcgaggtggccctggtgctgctgggcagacccagccccggcgccgtgggccccgaggacgtggccctgtgcagcagcagaagacccgtgagacccggcagaagaggcctgggccccgtgcccagctag

SEQ ID NO: 186121 - DNA, 4650 bp, Artificial Sequence
  derived and/or modified sequence
atgcagctggtggagctggacgtgagcagaaacgacatccccgagatccccgagagcatcaagttctgcaaggccctggagatcgccgacttcagcggcaaccccctgagcagactgcccgacggcttcacccagctgagaagcctggcccacctggccctgaacgacgtgagcctgcaggccctgcccggcgacgtgggcaacctggccaacctggtgaccctggagctgagagagaacctgctgaagagcctgcccgccagcctgagcttcctggtgaagctggagcagctggacctgggcggcaacgacctggaggtgctgcccgacaccctgggcgccctgcccaacctgagagagctgtggctggacagaaaccagctgagcgccctgccccccgagctgggcaacctgagaagactggtgtgcctggacgtgagcgagaacagactggaggagctgcccgccgagctgggcggcctggtgctgctgaccgacctgctgctgagccagaacctgctgagaagactgcccgacggcatcggccagctgaagcagctgagcatcctgaaggtggaccagaacagactgtgcgaggtgaccgaggccatcggcgactgcgagaacctgagcgagctgatcctgaccgagaacctgctgatggccctgcccagaagcctgggcaagctgaccaagctgaccaacctgaacgtggacagaaaccacctggaggccctgccccccgagatcggcggctgcgtggccctgagcgtgctgagcctgagagacaacagactggccgtgctgccccccgagctggcccacaccaccgagctgcacgtgctggacgtggccggcaacagactgcagagcctgcccttcgccctgacccacctgaacctgaaggccctgtggctggccgagaaccaggcccagcccatgctgagattccagaccgaggacgacgccagaaccggcgagaaggtgctgacctgctacctgctgccccagcagcccccccccagcctggaggacgccggccagcagggcagcctgagcgagacctggagcgacgccccccccagcagagtgagcgtgatccagttcctggaggcccccatcggcgacgaggacgccgaggaggccgccgccgagaagagaggcctgcagagaagagccaccccccaccccagcgagctgaaggtgatgaagagaagcatcgagggcagaagaagcgaggcctgcccctgccagcccgacagcggcagccccctgcccgccgaggaggagaagagactgagcgccgagagcggcctgagcgaggacagcagacccagcgccagcaccgtgagcgaggccgagcccgagggccccagcgccgaggcccagggcggcagccagcaggaggccaccaccgccggcggcgaggaggacgccgaggaggactaccaggagcccaccgtgcacttcgccgaggacgccctgctgcccggcgacgacagagagatcgaggagggccagcccgaggccccctggaccctgcccggcggcagacagagactgatcagaaaggacaccccccactacaagaagcacttcaagatcagcaagctgccccagcccgaggccgtggtggccctgctgcagggcatgcagcccgacggcgagggccccgtggcccccggcggctggcacaacggcccccacgccccctgggcccccagagcccagaaggaggaggaggaggaggaggagggcagcccccaggaggaggaggtggaggaggaggaggagaacagagccgaggaggaggaggccagcaccgaggaggaggacaaggagggcgccgtggtgagcgcccccagcgtgaagggcgtgagcttcgaccaggccaacaacctgctgatcgagcccgccagaatcgaggaggaggagctgaccctgaccatcctgagacagaccggcggcctgggcatcagcatcgccggcggcaagggcagcaccccctacaagggcgacgacgagggcatcttcatcagcagagtgagcgaggagggccccgccgccagagccggcgtgagagtgggcgacaagctgctggaggtgaacggcgtggccctgcagggcgccgagcaccacgaggccgtggaggccctgagaggcgccggcaccgccgtgcagatgagagtgtggagagagagaatggtggagcccgagaacgccgtgaccatcacccccctgagacccgaggacgactacagccccagagagagaagaggcggcggcctgagactgcccctgctgccccccgagagccccggccccctgagacagagacacgtggcctgcctggccagaagcgagagaggcctgggcttcagcatcgccggcggcaagggcagcaccccctacagagccggcgacgccggcatcttcgtgagcagaatcgccgagggcggcgccgcccacagagccggcaccctgcaggtgggcgacagagtgctgagcatcaacggcgtggacgtgaccgaggccagacacgaccacgccgtgagcctgctgaccgccgccagccccaccatcgccctgctgctggagagagaggccggcggccccctgccccccagccccctgccccacagcagcccccccaccgccgccgtggccaccaccagcatcaccaccgccacccccggcgtgcccggcctgcccagcctggcccccagcctgctggccgccgccctggagggcccctaccccgtggaggagatcagactgcccagagccggcggccccctgggcctgagcatcgtgggcggcagcgaccacagcagccaccccttcggcgtgcaggagcccggcgtgttcatcagcaaggtgctgcccagaggcctggccgccagaagcggcctgagagtgggcgacagaatcctggccgtgaacggccaggacgtgagagacgccacccaccaggaggccgtgagcgccctgctgagaccctgcctggagctgagcctgctggtgagaagagaccccgccccccccggcctgagagagctgtgcatccagaaggcccccggcgagagactgggcatcagcatcagaggcggcgccagaggccacgccggcaaccccagagaccccaccgacgagggcatcttcatcagcaaggtgagccccaccggcgccgccggcagagacggcagactgagagtgggcctgagactgctggaggtgaaccagcagagcctgctgggcctgacccacggcgaggccgtgcagctgctgagaagcgtgggcgacaccctgaccgtgctggtgtgcgacggcttcgaggccagcaccgacgccgccctggaggtgagccccggcgtgatcgccaaccccttcgccgccggcatcggccacagaaacagcctggagagcatcagcagcatcgacagagagctgagccccgagggccccggcaaggagaaggagctgcccggccagaccctgcactggggccccgaggccaccgaggccgccggcagaggcctgcagcccctgaagctggactacagagccctggccgccgtgcccagcgccggcagcgtgcagagagtgcccagcggcgccgccggcggcaagatggccgagagcccctgcagccccagcggccagcagccccccagcccccccagccccgacgagctgcccgccaacgtgaagcaggcctacagagccttcgccgccgtgcccaccagccacccccccgaggacgcccccgcccagccccccacccccggccccgccgccagccccgagcagctgagcttcagagagagacagaagtacttcgagctggaggtgagagtgccccaggccgagggcccccccaagagagtgagcctggtgggcgccgacgacctgagaaagatgcaggaggaggaggccagaaagctgcagcagaagagagcccagatgctgagagaggccgccgaggccggcgccgaggccagactggccctggacggcgagaccctgggcgaggaggagcaggaggacgagcagcccccctgggccagccccagccccaccagcagacagagccccgccagccccccccccctgggcggcggcgcccccgtgagaaccgccaaggccgagagaagacaccaggagagactgagagtgcagagccccgagccccccgcccccgagagagccctgagccccgccgagctgagagccctggaggccgagaagagagccctgtggagagccgccagaatgaagagcctggagcaggacgccctgagagcccagatggtgctgagcagaagccaggagggcagaggcaccagaggccccctggagagactggccgaggcccccagccccgcccccacccccagccccacccccgtggaggacctgggcccccagaccagcaccagccccggcagactgagccccgacttcgccgaggagctgagaagcctggagcccagccccagccccggcccccaggaggaggacggcgaggtggccctggtgctgctgggcagacccagccccggcgccgtgggccccgaggacgtggccctgtgcagcagcagaagacccgtgagacccggcagaagaggcctgggccccgtgcccagctag

SEQ ID NO: 186122 - DNA, 2268 bp, Artificial Sequence
  derived and/or modified sequence
atgcagcccgacggcgagggccccgtggcccccggcggctggcacaacggcccccacgccccctgggcccccagagcccagaaggaggaggaggaggaggaggagggcagcccccaggaggaggaggtggaggaggaggaggagaacagagccgaggaggaggaggccagcaccgaggaggaggacaaggagggcgccgtggtgagcgcccccagcgtgaagggcgtgagcttcgaccaggccaacaacctgctgatcgagcccgccagaatcgaggaggaggagctgaccctgaccatcctgagacagaccggcggcctgggcatcagcatcgccggcggcaagggcagcaccccctacaagggcgacgacgagggcatcttcatcagcagagtgagcgaggagggccccgccgccagagccggcgtgagagtgggcgacaagctgctggaggtgaacggcgtggccctgcagggcgccgagcaccacgaggccgtggaggccctgagaggcgccggcaccgccgtgcagatgagagtgtggagagagagaatggtggagcccgagaacgccgtgaccatcacccccctgagacccgaggacgactacagccccagagagagaagaggcggcggcctgagactgcccctgctgccccccgagagccccggccccctgagacagagacacgtggcctgcctggccagaagcgagagaggcctgggcttcagcatcgccggcggcaagggcagcaccccctacagagccggcgacgccggcatcttcgtgagcagaatcgccgagggcggcgccgcccacagagccggcaccctgcaggtgggcgacagagtgctgagcatcaacggcgtggacgtgaccgaggccagacacgaccacgccgtgagcctgctgaccgccgccagccccaccatcgccctgctgctggagagagaggccggcggccccctgccccccagccccctgccccacagcagcccccccaccgccgccgtggccaccaccagcatcaccaccgccacccccggcgtgcccggcctgcccagcctggcccccagcctgctggccgccgccctggagggcccctaccccgtggaggagatcagactgcccagagccggcggccccctgggcctgagcatcgtgggcggcagcgaccacagcagccaccccttcggcgtgcaggagcccggcgtgttcatcagcaaggtgctgcccagaggcctggccgccagaagcggcctgagagtgggcgacagaatcctggccgtgaacggccaggacgtgagagacgccacccaccaggaggccgtgagcgccctgctgagaccctgcctggagctgagcctgctggtgagaagagaccccgccccccccggcctgagagagctgtgcatccagaaggcccccggcgagagactgggcatcagcatcagaggcggcgccagaggccacgccggcaaccccagagaccccaccgacgagggcatcttcatcagcaaggtgagccccaccggcgccgccggcagagacggcagactgagagtgggcctgagactgctggaggtgaaccagcagagcctgctgggcctgacccacggcgaggccgtgcagctgctgagaagcgtgggcgacaccctgaccgtgctggtgtgcgacggcttcgaggccagcaccgacgccgccctggaggtgagccccggcgtgatcgccaaccccttcgccgccggcatcggccacagaaacagcctggagagcatcagcagcatcgacagagagctgagccccgagggccccggcaaggagaaggagctgcccggccagaccctgcactggggccccgaggccaccgaggccgccggcagaggcctgcagcccctgaagctggactacagagccctggccgccgtgcccagcgccggcagcgtgcagagagtgcccagcggcgccgccggcggcaagatggccgagagcccctgcagccccagcggccagcagccccccagcccccccagccccgacgagctgcccgccaacgtgaagcaggcctacagagccttcgccgccgtgcccaccagccacccccccgaggacgcccccgcccagccccccacccccggccccgccgccagccccgagcagctgagcttcagagagagacagaagtacttcgagctggaggtgagagtgccccaggccgagggccccctgagacccggcagaagaggcctgggccccgtgcccagctag

SEQ ID NO: 186123 - protein, 939 aa, Artificial Sequence
  derived and/or modified sequence
MAAQPPRGIRLSALCPKFLHTNSTSHTWPFSAVAELIDNAYDPDVNAKQIWIDKTVINDHICLTFTDNGNGMTSDKLHKMLSFGFSDKVTMNGHVPVGLYGNGFKSGSMRLGKDAIVFTKNGESMSVGLLSQTYLEVIKAEHVVVPIVAFNKHRQMINLAESKASLAAILEHSLFSTEQKLLAELDAIIGKKGTRIIIWNLRSYKNATEFDFEKDKYDIRIPEDLDEITGKKGYKKQERMDQIAPESDYSLRAYCSILYLKPRMQIILRGQKVKTQLVSKSLAYIERDVYRPKFLSKTVRITFGFNCRNKDHYGIMMYHRNRLIKAYEKVGCQLRANNMGVGVVGIIECNFLKPTHNKQDFDYTNEYRLTITALGEKLNDYWNEMKVKKNTEYPLNLPVEDIQKRPDQTWVQCDACLKWRKLPDGMDQLPEKWYCSNNPDPQFRNCEVPEEPEDEDLVHPTYEKTYKKTNKEKFRIRQPEMIPRINAELLFRPTALSTPSFSSPKESVPRRHLSEGTNSYATRLLNNHQVPPQSEPESNSLKRRLSTRSSILNAKNRRLSSQFENSVYKGDDDDEDVIILEENSTPKPAVDHDIDMKSEQSHVEQGGVQVEFVGDSEPCGQTGSTSTSSSRCDQGNTAATQTEVPSLVVKKEETVEDEIDVRNDAVILPSCVEAEAKIHETQETTDKSADDAGCQLQELRNQLLLVTEEKENYKRQCHMFTDQIKVLQQRILEMNDKYVKKETCHQSTETDAVFLLESINGKSESPDHMVSQYQQALEEIERLKKQCSALQHVKAECSQCSNNESKSEMDEMAVQLDDVFRQLDKCSIERDQYKSEVELLEMEKSQIRSQCEELKTEVEQLKSTNQQTATDVSTSSNIEESVNHMDGESLKLRSLRVNVGQLLAMIVPDLDLQQVNYDVDVVDEILGQVVEQMSEISST

SEQ ID NO: 186124 - DNA, 2820 bp, Artificial Sequence
  derived and/or modified sequence
atggccgcccagccccccagaggcatcagactgagcgccctgtgccccaagttcctgcacaccaacagcaccagccacacctggcccttcagcgccgtggccgagctgatcgacaacgcctacgaccccgacgtgaacgccaagcagatctggatcgacaagaccgtgatcaacgaccacatctgcctgaccttcaccgacaacggcaacggcatgaccagcgacaagctgcacaagatgctgagcttcggcttcagcgacaaggtgaccatgaacggccacgtgcccgtgggcctgtacggcaacggcttcaagagcggcagcatgagactgggcaaggacgccatcgtgttcaccaagaacggcgagagcatgagcgtgggcctgctgagccagacctacctggaggtgatcaaggccgagcacgtggtggtgcccatcgtggccttcaacaagcacagacagatgatcaacctggccgagagcaaggccagcctggccgccatcctggagcacagcctgttcagcaccgagcagaagctgctggccgagctggacgccatcatcggcaagaagggcaccagaatcatcatctggaacctgagaagctacaagaacgccaccgagttcgacttcgagaaggacaagtacgacatcagaatccccgaggacctggacgagatcaccggcaagaagggctacaagaagcaggagagaatggaccagatcgcccccgagagcgactacagcctgagagcctactgcagcatcctgtacctgaagcccagaatgcagatcatcctgagaggccagaaggtgaagacccagctggtgagcaagagcctggcctacatcgagagagacgtgtacagacccaagttcctgagcaagaccgtgagaatcaccttcggcttcaactgcagaaacaaggaccactacggcatcatgatgtaccacagaaacagactgatcaaggcctacgagaaggtgggctgccagctgagagccaacaacatgggcgtgggcgtggtgggcatcatcgagtgcaacttcctgaagcccacccacaacaagcaggacttcgactacaccaacgagtacagactgaccatcaccgccctgggcgagaagctgaacgactactggaacgagatgaaggtgaagaagaacaccgagtaccccctgaacctgcccgtggaggacatccagaagagacccgaccagacctgggtgcagtgcgacgcctgcctgaagtggagaaagctgcccgacggcatggaccagctgcccgagaagtggtactgcagcaacaaccccgacccccagttcagaaactgcgaggtgcccgaggagcccgaggacgaggacctggtgcaccccacctacgagaagacctacaagaagaccaacaaggagaagttcagaatcagacagcccgagatgatccccagaatcaacgccgagctgctgttcagacccaccgccctgagcacccccagcttcagcagccccaaggagagcgtgcccagaagacacctgagcgagggcaccaacagctacgccaccagactgctgaacaaccaccaggtgcccccccagagcgagcccgagagcaacagcctgaagagaagactgagcaccagaagcagcatcctgaacgccaagaacagaagactgagcagccagttcgagaacagcgtgtacaagggcgacgacgacgacgaggacgtgatcatcctggaggagaacagcacccccaagcccgccgtggaccacgacatcgacatgaagagcgagcagagccacgtggagcagggcggcgtgcaggtggagttcgtgggcgacagcgagccctgcggccagaccggcagcaccagcaccagcagcagcagatgcgaccagggcaacaccgccgccacccagaccgaggtgcccagcctggtggtgaagaaggaggagaccgtggaggacgagatcgacgtgagaaacgacgccgtgatcctgcccagctgcgtggaggccgaggccaagatccacgagacccaggagaccaccgacaagagcgccgacgacgccggctgccagctgcaggagctgagaaaccagctgctgctggtgaccgaggagaaggagaactacaagagacagtgccacatgttcaccgaccagatcaaggtgctgcagcagagaatcctggagatgaacgacaagtacgtgaagaaggagacctgccaccagagcaccgagaccgacgccgtgttcctgctggagagcatcaacggcaagagcgagagccccgaccacatggtgagccagtaccagcaggccctggaggagatcgagagactgaagaagcagtgcagcgccctgcagcacgtgaaggccgagtgcagccagtgcagcaacaacgagagcaagagcgagatggacgagatggccgtgcagctggacgacgtgttcagacagctggacaagtgcagcatcgagagagaccagtacaagagcgaggtggagctgctggagatggagaagagccagatcagaagccagtgcgaggagctgaagaccgaggtggagcagctgaagagcaccaaccagcagaccgccaccgacgtgagcaccagcagcaacatcgaggagagcgtgaaccacatggacggcgagagcctgaagctgagaagcctgagagtgaacgtgggccagctgctggccatgatcgtgcccgacctggacctgcagcaggtgaactacgacgtggacgtggtggacgagatcctgggccaggtggtggagcagatgagcgagatcagcagcacctag

SEQ ID NO: 186125 - DNA, 2820 bp, Artificial Sequence
  derived and/or modified sequence
atggcagcgcagccaccgcgtggtatcagattgagtgcactgtgccctaagtttctccacacaaacagcacctcccacacgtggccattttccgctgtcgccgagctgatcgacaacgcatacgaccctgacgtcaatgccaaacagatatggatcgataagacagtgattaacgatcacatctgtttgactttcactgacaacgggaacggaatgacatctgataaattacataagatgctctcctttggattctctgacaaggtcacaatgaatggccacgtgcctgtgggcctgtatggaaatggatttaagtccgggagcatgcgcctgggaaaggacgcaattgtgttcactaagaacggcgagagcatgtcagtgggcctgctcagccagacatacctcgaagtcattaaagcagagcacgttgttgttccgatagtggcttttaataaacaccgacagatgataaatctagcagaatcgaaggcctcgctggcagccatcctggaacatagcctcttctccaccgagcagaagctgctggccgagctagacgccatcataggaaagaagggcacccgcattattatatggaacctcaggtcatacaagaatgccaccgagtttgatttcgaaaaagacaagtatgatatacggatacctgaagacttggacgagatcacaggtaagaagggttataagaaacaggagcggatggaccagatcgcccccgagagcgactatagcttgcgcgcatactgcagtatcctgtacctgaaaccaaggatgcagatcattctgcgtggacaaaaggttaagacacagttggtcagtaagagcctggcctatattgaaagggacgtgtaccgtccgaaattcctgagcaaaacagtacggatcacctttggcttcaactgtagaaataaagaccactatggcattatgatgtaccatagaaatcggctgattaaggcttacgaaaaggtgggctgtcagctcagggctaacaatatgggcgtaggtgtcgtgggaattatcgagtgcaattttctcaagcctacacacaataagcaggactttgactatacaaacgagtatcggctcactatcaccgcattgggggagaagcttaacgactactggaatgagatgaaagtcaaaaaaaacacggagtaccccctaaatctgcctgtagaagacatacagaaaagacctgaccagacatgggtccagtgcgatgcatgcttaaagtggaggaaacttccagacggaatggaccagctgcctgaaaaatggtattgtagtaacaatcctgatccacaattccggaactgcgaagtgccggaggagccggaagatgaggacctggtccaccctacgtatgaaaagacctacaagaaaactaataaggagaagttccgcatccggcagccagagatgatcccacgaataaatgctgagctgctgttcagacccacagccctgtctacaccctctttttcctctccaaaagaaagcgtacctcgaaggcacctgtctgagggcaccaattcatacgccaccaggctgctgaacaatcatcaagtgcccccacagtccgaaccagagagcaattcacttaagcgaaggttgtctactcgaagctccatcctaaatgctaagaacagaagattgagctcccagttcgaaaacagtgtttacaagggggacgatgatgatgaagacgttataatccttgaggagaactccactccaaagcccgccgtggatcatgacatagatatgaagagtgagcaatcacacgtggaacagggcggagtccaagtggagttcgtgggcgactctgaaccatgtggccagacaggcagtacctcaacttccagcagccgctgtgatcaaggcaacaccgcagctacacagacagaggtaccgtctctggtggtcaagaaggaagaaacagtcgaggatgaaatagatgtgagaaacgatgccgtgattttgccatcttgtgtggaagccgaagcaaaaatccacgaaacccaggagacaactgataagtctgccgacgacgcaggatgtcaactacaggagctgcgtaaccagctgctgctcgtcacagaagaaaaagagaattacaaaagacagtgccatatgttcactgatcagataaaggtcctccagcagcgtattctggagatgaacgacaaatacgtgaagaaggagacttgtcatcagagcaccgagactgacgccgtgttcctgctcgagagtattaatggcaaaagcgagagcccagaccatatggtgagccaatatcagcaggccctggaagagatcgagagacttaagaaacagtgctctgctctgcagcacgtgaaagccgaatgctcgcagtgttccaataacgaatctaaatcggagatggacgagatggctgtacagcttgatgatgtgttcaggcaactggacaaatgtagtatcgaaagagatcagtataaatctgaggtcgaactcctcgagatggagaaaagccagatacggtctcaatgcgaggagttgaaaaccgaggttgagcagctgaaatcaactaaccagcagacagctacagatgtatccacctcctccaatatagaagagagtgtcaaccacatggacggtgagagcttgaagcttagatccctgagagttaatgttggacagctgctggctatgatcgttcctgacttggacctgcagcaggtgaactatgatgtggatgtagtggacgaaattttgggccaggttgtggagcagatgtccgagatatctagtacctag

SEQ ID NO: 186126 - DNA, 2820 bp, Artificial Sequence
  derived and/or modified sequence
atggccgcccagcccccccggggcatccggctgagcgccctgtgccccaagttcctgcacaccaacagcaccagccacacctggcccttctctgctgtggccgagctgattgacaatgcctatgaccctgatgtgaatgccaagcagatctggattgacaagacagtcatcaatgaccacatctgcctgaccttcacagacaatggaaatggcatgaccagtgacaagctgcacaagatgctgagctttggcttcagtgacaaggtgaccatgaatggccacgtgcctgtgggcctgtatggaaatggcttcaagagcggctccatgaggctgggcaaggatgccatcgtgttcaccaagaatggagagagcatgtctgtgggcctgctgagccagacctacctggaggtgatcaaggccgagcacgtggtggtgcccatcgtggccttcaacaagcaccggcagatgatcaacctggccgagagcaaggccagcctggccgccatcctggagcacagcctcttcagcacagagcagaagctgctggccgagctggatgccatcatcggcaagaagggcacccgcatcatcatctggaacctgcggagctacaagaatgccacagaatttgattttgagaaggacaagtatgacatccgcatccctgaggacctggatgagatcaccgggaagaagggctacaagaagcaggagaggatggaccagatcgcccctgagagtgactacagcctgcgggcctactgcagcatcctgtacctgaagcccaggatgcagatcatcctgcggggccagaaggtgaagacccagctggtgtccaagagcctggcctacatcgagagagatgtgtaccggcccaagttcctgagcaagacagtgcgcatcaccttcggcttcaactgcaggaacaaggaccactacggcatcatgatgtaccacaggaacagactcatcaaggcctatgagaaggtgggctgccagctgcgggccaacaacatgggcgtgggcgtggtgggcatcatcgagtgcaacttcctgaagcccacccacaacaagcaggactttgactacaccaatgagtaccgcctgaccatcacagccctgggggagaagctgaatgactactggaatgagatgaaggtgaagaagaacacagagtaccccctgaacctgcctgtggaggacatccagaagaggccagaccagacctgggtgcagtgtgatgcctgcctgaagtggaggaagctgcctgatggcatggaccagctgcctgagaagtggtactgcagcaacaacccagacccccagttcaggaactgtgaggtgcctgaggagccagaagatgaggacctggtgcaccccacctatgagaagacctacaagaagaccaacaaggagaagttccgcatccggcagcctgagatgatcccccgcatcaatgctgagctgctcttccggcccacagccctgagcacccccagcttcagcagccccaaggagagcgtgccccggcggcacctgtctgagggcaccaacagctatgccacccggctgctgaacaaccaccaggtgcccccccagagcgagcctgagagcaacagcctgaagaggcggctgagcaccaggagcagcatcctgaatgccaagaacagaaggctgagcagccagtttgagaacagcgtgtacaagggagatgatgatgatgaagatgtgatcatcctggaggagaacagcacccccaagccagctgtggaccatgacatcgacatgaagtctgagcagagccacgtggagcagggcggcgtgcaggtggagtttgtgggggacagcgagccctgtggccagacaggcagcaccagcaccagcagcagccgctgtgaccagggcaacacagctgccacccagacagaggtgcccagcctggtggtgaagaaggaggagaccgtggaggatgaaattgatgtgagaaatgatgctgtgatcctgcccagctgtgtggaggccgaggccaagatccacgagacccaggagaccacagacaagtctgcagatgatgctggctgccagctgcaggagctgaggaaccagctgctgctggtgacagaggagaaggagaactacaagaggcagtgccacatgttcacagaccagatcaaggtgctgcagcagaggatcctggagatgaatgacaagtatgtgaagaaggagacctgccaccagagcacagaaacagatgctgtgttcctgctggagagcatcaacgggaagtctgagagcccagaccacatggtgtcccagtaccagcaggccctggaggagattgaaaggctgaagaagcagtgcagcgccctgcagcacgtgaaggccgagtgcagccagtgcagcaacaatgaaagcaagtctgagatggatgagatggctgtgcagctggatgatgtgttccggcagctggacaagtgcagcattgaaagagaccagtacaagtctgaggtggagctgctggagatggagaagagccagatccgcagccagtgtgaggagctgaagacagaggtggagcagctgaagagcaccaaccagcagacagccacagatgtgtccaccagcagcaacatcgaggagagcgtgaaccacatggatggagagagcctgaagctgcggagcctgcgggtgaatgtgggccagctgctggccatgattgtgcctgacctggacctgcagcaggtgaactatgatgtggatgtggtggatgagatcctgggccaggtggtggagcagatgtctgagatcagcagcacctag

SEQ ID NO: 186127 - DNA, 2820 bp, Artificial Sequence
  derived and/or modified sequence
atggccgcccagcccccccggggcatccggctgagcgccctgtgccccaagtttctgcacacaaattccacgtcacatacttggcccttcagtgccgtggccgaattgattgataatgcctatgaccctgacgtcaacgctaagcaaatctggattgacaagacagtcatcaacgatcacatctgcctgacttttactgacaatggcaatggaatgaccagtgacaagcttcataaaatgctgagttttggattcagtgacaaagtaaccatgaacggccacgtaccagtcggtctctatggaaatgggttcaaatcaggctccatgcgcctgggtaaggacgcgatagtgttcacaaagaatggtgaatctatgagcgtgggactgctgagccagacatacttggaggtcataaaagccgagcacgtggtggtccccatcgtagccttcaacaaacatcgccagatgatcaatttggctgagagcaaggcatccttagcggctatcctggaacatagccttttctccactgaacagaagttactggctgaactggatgccatcattgggaagaaggggactagaatcattatttggaatctgagatcatataagaacgcaaccgagttcgatttcgagaaagataagtatgacattagaatccccgaagatctggatgaaatcacgggtaaaaagggctataaaaaacaagagagaatggaccagatagccccggagagcgactacagtctgcgagcctactgcagcattctgtacctgaaacccagaatgcagatcatcctgcggggccaaaaagttaaaacccagttagtttccaaatctctggcctacatcgagcgggacgtctaccgtcccaagttcctgagcaagactgttaggatcacctttggcttcaattgtcgaaacaaagaccactatggcataatgatgtaccacagaaacagattaataaaggcctatgagaaagtgggctgtcagctgcgtgcgaataatatgggagtcggagtcgtgggaatcatcgaatgcaattttctcaagccaacacacaacaagcaggatttcgattacaccaacgaataccggcttacaataaccgcacttggggagaagctgaatgattactggaatgaaatgaaggtaaagaaaaatacagagtatccattgaacttgccagtagaagacattcagaagaggcctgaccagacttgggtccaatgcgacgcctgtctaaaatggaggaagctgcctgatggcatggaccagcttccggagaagtggtattgtagcaataaccccgatccccaatttaggaactgcgaggtgcctgaggagcctgaggacgaggatctcgttcaccccacctacgagaagacctacaaaaagacaaataaggagaagtttaggatcaggcagccggagatgatccctcgaatcaatgctgaactcttgttcaggcctactgccttgtcaacaccttcgtttagctctcctaaagaatctgtgcccaggcgccatctgtctgagggcacgaacagctacgcgacccggctgttaaacaatcatcaggtacccccacagtcagagccggagtcaaatagtctgaaacgcagactttctactcggtcgtcaatactgaacgcaaagaatcgtcgcctgtcatctcaattcgagaatagtgtttataagggcgatgacgacgatgaggacgtcatcatactggaggaaaacagcacacctaaaccagcagtggaccatgatattgatatgaagtctgaacagtcacacgtcgagcagggaggggtacaggttgagtttgtcggggattctgaaccatgtgggcagacagggtctactagtacatcctcctcaagatgcgaccagggaaacacggccgcaacacaaactgaggtccctagtctcgttgttaaaaaggaggaaaccgtagaggacgagattgatgtcaggaacgacgccgtgattctgcccagctgtgtggaagccgaagcaaagattcatgagacgcaggagacaactgacaagagcgcggatgacgccggctgtcagctgcaggaattgcgtaatcagctcttactcgttacggaagagaaggagaattataaacgccagtgccacatgtttactgatcaaatcaaggtactccagcagaggatactcgaaatgaatgataagtacgtgaagaaagagacgtgtcatcaaagcaccgaaacagatgctgtgtttctgctcgagtccataaatgggaagtcggagtctccagatcacatggtctcccagtatcagcaagcactggaagaaattgagcgattgaagaaacagtgctccgccttgcagcatgtcaaggcggagtgcagccagtgtagcaataatgagtctaaatcagaaatggacgaaatggctgtgcagctggatgacgtgtttaggcagctggataagtgctccattgaaagggatcagtataagtcagaagtagagctgctggaaatggaaaagtcccaaatcaggagccagtgtgaagaactgaaaacagaagtggagcagctcaaaagcactaatcaacaaacagctacggatgtgagtacttcatccaacatagaagagtcagtgaaccacatggatggcgaaagccttaaacttcggagcctccgtgtgaatgtggggcagctgttggctatgatcgtgccggacctcgatctgcaacaggtgaactatgacgtcgacgtggtcgatgaaattcttggacaagtggttgagcagatgagtgagatttcaagcacctag

SEQ ID NO: 186128 - DNA, 4246 bp, Artificial Sequence
  derived and/or modified sequence
agggctccacagtcgttccgccacctcccagtcgggttgcggcggaggccgttcctggctttgtagctcgctcaagatggcggcgcagccaccccgcgggatacgcctcagcgcgctttgcccgaagtttttacatacaaattctactagtcacacctggccattcagtgcagttgctgaattaatagataatgcttatgatcctgatgtgaacgctaaacaaatatggattgacaaaacagtgataaatgaccatatatgcttgacattcaccgacaatgggaatggtatgacttctgataaattacataaaatgctaagctttggcttcagtgacaaagtcaccatgaatggtcatgtcccagttggattatatgggaatggcttcaagtcgggttctatgcgtctgggtaaagacgcaatcgtttttaccaaaaatggagaaagcatgagcgtgggccttttgtctcagacctacttggaagtcataaaagcggagcatgttgttgttccaatagtggcattcaacaagcaccgacagatgattaatttagcagaatcaaaagccagccttgctgcaattctggaacattctctgttttccacggaacagaagttactggcagaacttgatgctattataggcaagaaggggacgaggatcatcatttggaatcttagaagctacaaaaatgcaacagagttcgattttgaaaaggataaatatgatatcagaattcccgaggatttagatgagataacagggaagaaggggtacaagaagcaggaaaggatggaccagattgcccctgagagtgactattccctgagggcttattgcagtatattatatctaaagccaagaatgcagatcatcctacgtggacagaaagtgaagacacagctggtttcgaagagtcttgcctacatcgaacgtgatgtttatcgaccaaaatttttatctaaaacagtgagaattacctttggattcaactgcagaaataaagatcattatgggataatgatgtatcacagaaatagactcatcaaagcttatgaaaaagttggatgtcagttaagggcaaacaacatgggtgttggagtggttggaattatagagtgtaatttccttaagccaactcataataaacaagatttcgactatactaatgagtacagacttacaataacagcactaggagaaaagctgaatgattactggaatgaaatgaaagtgaagaaaaatacagaatatcctctaaatttgccagttgaagatatacagaagcgtcctgatcagacatgggttcagtgtgatgcctgtctaaagtggcggaaattacctgatgggatggatcaacttcctgaaaaatggtattgctccaataaccctgacccacagttcagaaattgtgaggttccagaagaacctgaagatgaggatttggtacatcccacttatgaaaaaacctacaaaaagaccaacaaggaaaaattcaggatcagacaaccggaaatgatccctcggattaatgctgaactgttgtttcggccaactgctctttcaactccaagcttttcttctcctaaggaaagtgttccaagaagacatctttcagaaggaacaaattcttatgcgacaagacttctaaataatcatcaagttccacctcagtctgaacctgagagcaacagcttgaaacggagactttctactcgttcctcaattttgaatgcaaagaatcggagattgagtagtcagtttgaaaattcagtttataaaggtgatgatgatgatgaagatgtcatcatcttagaagaaaacagtacccccaaacctgcagtagatcatgatattgacatgaaatcagaacagagtcacgttgagcaaggtggtgttcaggttgagtttgtgggtgacagtgaaccttgtggccagactggttcaacaagcacctcatcatcccgatgcgaccagggaaatactgcagctacccagactgaagtaccaagtttagttgttaaaaaagaagaaactgttgaagacgagatagacgtaagaaatgatgcagtgattctgccctcctgtgtagaagctgaagcaaagatacatgaaacccaggaaaccaccgataaatctgcagatgatgcaggctgccaattacaagaactgagaaaccagctactccttgtcactgaggaaaaagagaattataaaagacagtgtcatatgtttactgatcaaatcaaagtgttacaacagaggatactagaaatgaatgacaagtatgttaagaaagaaacttgccatcagtccactgaaaccgatgctgtatttttacttgaaagtattaatggcaaatctgaaagtccagaccatatggtatctcagtatcagcaagctttggaagaaatagaaaggctgaaaaaacaatgtagtgctttgcaacatgtaaaggctgaatgcagccagtgttccaataatgagagtaaaagtgaaatggatgagatggctgtgcagcttgacgatgtgtttagacaactggacaaatgcagtattgagagggaccagtataaaagtgaggttgaattgctggaaatggaaaagtcacaaatccgttcacagtgtgaagaactcaaaactgaagtagaacagttaaaatctacaaatcaacagacggcaacagatgtttcaacatcaagtaacattgaggagtctgtaaatcatatggatggagaaagcctcaaactccgatctcttcgagttaacgtaggacaactgctggctatgattgtgcctgatcttgatcttcagcaagtgaattacgatgttgatgtagttgatgagattttaggacaagttgttgaacaaatgagtgaaatcagtagtacttaaagtatatgttatgtaagataaaatatttgctcaattcttttggttgtacagctttcaaaatataattaattttgttttatagatatgataggcaacagactgaaaaccataatctttactgtattctatgcattcaaatgtggtcacaaatattgtggacacattatcttatgttttgaaatacctgtgaattgttggcattgagcagctgaagctaactcatgactctgttttgaatgtaaatatttgtaattaagcctgcacatatttttttattgccctagagtactcaagtgtttttcaccaagagcttttcaggttgcccctaagctttgtgcaattttttctggttccccaaagtgtatttttctctaagtcgagggctatgccataatacaaatggaaatgttacctttgattttcttataaaggagtttaaataggatttttaaataatgtagtaacactcctgatacaactctggttataagtgaattgagcattaatgtttcttttgtataaattcctgtcctgaaatattttattcatgaaaataaggtaagcaaaaaccaactccattttgccaggattttgttgtgctgagattgccaatcacggttaaacacaaagtgtttttatagaatgaagaaacagtctttaacagaaaaaaggtattgaaatattaaatggccaccaagtttactttgaagcccatttttggctgtttagtcagcatgaagtgggcatgataattttttaatatttctttttgtgaaatttcctgtacagccttttgtaggattactacaggttaatgtgagttgaggaagacagtctttctcaaacaatactacataccttttattatattacaaacctaagtgttttatatcctagagtcaaggaacaaatttccttaggattatagtattacatgccataaaatactatgctttattggtcccatgttttgtgcaattttaaagagatggctttctattaagtataaactatgtatatataagaaccatattttccacaactaaaatgtgcattattttttccaaagttttatcattgctatttatttttacctttgtttttgaacattcaatccgttcattttgtatgtatgcttaatacgtgtcggtcatatacagtattgaatttttactgtatagtaattctggaaagagcaaataaatgaagattgtttttatttgcctgataaagtaattgaaagtgtatttttggtatgaagctggttttctgtcacaattgtaatttcccaaattttaaaatatcttataataaaataaaaatatatgatggctaactgttcaaatgcta

SEQ ID NO: 186129 - DNA, 2820 bp, Artificial Sequence
  derived and/or modified sequence
atggctgcccagccacccagaggtattaggctatctgctctgtgtccaaagtttttgcatactaactctacgagtcacacctggccattctctgctgtcgccgagctgattgacaacgcctatgacccggatgtgaatgccaagcaaatttggatcgacaaaaccgttattaacgatcatatctgcctcacatttaccgataatggtaacggaatgactagcgataaactacacaagatgctgagtttcggtttctctgataaagtaaccatgaatggtcacgtgccagttggactgtatgggaatggttttaaatccggatctatgcggctaggcaaggatgccatcgtctttacgaagaatggggagtcaatgagtgttggtttactctcccaaacttatttagaggtgattaaggcagaacacgtggtggtgcctatcgtggcattcaacaaacatagacaaatgataaatcttgctgagtccaaagcatcactcgccgcaattttagagcattccctgttttctacagagcaaaaattgcttgcggaattggatgctattataggaaagaaaggtacacgtattattatctggaacctgagatcctacaagaatgccactgagtttgactttgaaaaagataaatatgacatacgaatcccagaggacttagacgagataaccggcaagaagggatataaaaagcaagagcggatggatcagatcgccccagagagcgactacagtctgagagcctactgttcaattctgtacctcaaacctcgcatgcaaattatcctccgcggacagaaggtcaagacacagctggtgagcaaatcactggcctatatcgagagagacgtgtacagaccaaagtttttgtccaagaccgttaggattacattcggcttcaactgcaggaataaagaccattacgggattatgatgtatcacagaaaccggttgataaaggcatatgagaaggtgggctgccagctacgggctaataacatgggagttggagttgtcggaataatcgagtgcaacttcttaaagcccactcataataagcaggacttcgattacaccaatgagtacagactaacaatcacggccctgggagaaaagctgaacgactactggaatgagatgaaagttaagaagaataccgagtatcctctgaatctgcctgtggaagacatccagaaacgccctgatcagacctgggttcagtgcgatgcatgtctaaagtggcgcaagctgcctgacggaatggaccagctgccagagaaatggtattgtagtaacaacccagacccacaattccggaactgcgaggtccccgaagagcctgaggacgaagacttggttcatcctacctacgaaaaaacctacaagaaaacaaacaaagagaagtttcgaataaggcagcctgaaatgatacccaggattaatgcggagctgctctttagacccaccgccctttctaccccttcattttctagcccaaaagagagcgttcccagacgccacctgagcgaagggaccaattcttatgcgactcgactcctgaacaaccaccaggtgcctccacagtccgaacccgaaagcaacagcctgaagcgccgactctctacccgcagttccatactaaatgccaaaaacaggagactctctagccaatttgaaaattccgtttacaagggtgatgacgatgacgaggatgtcatcatacttgaggaaaatagtaccccaaagcctgcagttgatcacgacattgacatgaagtcagaacagagccacgtggagcagggtggtgtgcaggtggaattcgtgggcgactcggaaccctgtggccaaacaggcagtacttcaacgagcagcagccggtgcgaccagggcaacaccgcagctacacagacagaggtgccatccctagttgtgaagaaagaagaaaccgtggaagacgagattgatgtaaggaatgacgccgtgattctgccatcttgtgtggaggctgaggctaaaattcacgagacccaagaaactactgacaaatctgccgacgacgcaggatgccagctccaagaattgagaaaccagctgcttcttgttaccgaagagaaagaaaattataagagacagtgtcatatgtttaccgatcaaattaaggttctccaacagcgaattttggagatgaatgacaagtacgtgaagaaggagacatgtcaccagagtacggagactgatgcagtgttccttctggagtctatcaatgggaagtcagagagcccagatcacatggtgtctcaataccagcaggcgctggaagagattgaaagattaaagaaacagtgtagcgcactccagcatgtgaaggctgagtgctcccagtgcagcaacaacgaatccaaatctgagatggacgaaatggcagtgcagcttgacgacgtgtttaggcagttagataagtgctccatcgagcgggaccagtacaaaagtgaagtcgaacttctggaaatggagaagagtcaaatacgttctcagtgcgaagaactcaagacagaagttgagcagctgaagtcaacgaaccagcaaacagccactgacgttagtacttcctccaatatcgaggaatcagtgaaccatatggacggcgaatctttgaagttgaggtccctgcgtgtaaacgtgggtcagctgttagccatgatcgtccccgacctggacctgcagcaagtgaattacgacgtggatgtagttgatgaaatcttgggacaggtcgtagagcaaatgagtgaaatttcctccacctag

SEQ ID NO: 186130 - protein, 492 aa, Artificial Sequence
  derived and/or modified sequence
MKLLLLHPAFQSCLLLTLLGLWRTTPEAHASSLGAPAISAASFLQDLIHRYGEGDSLTLQQLKALLNHLDVGVGRGNVTQHVQGHRNLSTCFSSGDLFTAHNFSEQSRIGSSELQEFCPTILQQLDSRACTSENQENEENEQTEEGRPSAVEVWGFGFLSVSLINLASLLGVLVLPCTEKAFFSRVLTYFIALSIGTLLSNALFQLIPEAFGFNPLEDYYVSKSAVVFGGFYLFFFTEKILKILLKQKNEHHHGHSHYASESLPSKKDQEEGVMEKLQNGDLDHMIPQHCSSELDGKAPMVDEKVIVGSLSVQDLQASQSACYWLKGVRYSDIGTLAWMITLSDGLHNFIDGLAIGASFTVSVFQGISTSVAILCEEFPHELGDFVILLNAGMSIQQALFFNFLSACCCYLGLAFGILAGSHFSANWIFALAGGMFLYISLADMFPEMNEVCQEDERKGSILIPFIIQNLGLLTGFTIMVVLTMYSGQIQIG

SEQ ID NO: 186131 - DNA, 1479 bp, Artificial Sequence
  derived and/or modified sequence
atgaagctgctgctgctgcaccccgccttccagagctgcctgctgctgaccctgctgggcctgtggagaaccacccccgaggcccacgccagcagcctgggcgcccccgccatcagcgccgccagcttcctgcaggacctgatccacagatacggcgagggcgacagcctgaccctgcagcagctgaaggccctgctgaaccacctggacgtgggcgtgggcagaggcaacgtgacccagcacgtgcagggccacagaaacctgagcacctgcttcagcagcggcgacctgttcaccgcccacaacttcagcgagcagagcagaatcggcagcagcgagctgcaggagttctgccccaccatcctgcagcagctggacagcagagcctgcaccagcgagaaccaggagaacgaggagaacgagcagaccgaggagggcagacccagcgccgtggaggtgtggggcttcggcttcctgagcgtgagcctgatcaacctggccagcctgctgggcgtgctggtgctgccctgcaccgagaaggccttcttcagcagagtgctgacctacttcatcgccctgagcatcggcaccctgctgagcaacgccctgttccagctgatccccgaggccttcggcttcaaccccctggaggactactacgtgagcaagagcgccgtggtgttcggcggcttctacctgttcttcttcaccgagaagatcctgaagatcctgctgaagcagaagaacgagcaccaccacggccacagccactacgccagcgagagcctgcccagcaagaaggaccaggaggagggcgtgatggagaagctgcagaacggcgacctggaccacatgatcccccagcactgcagcagcgagctggacggcaaggcccccatggtggacgagaaggtgatcgtgggcagcctgagcgtgcaggacctgcaggccagccagagcgcctgctactggctgaagggcgtgagatacagcgacatcggcaccctggcctggatgatcaccctgagcgacggcctgcacaacttcatcgacggcctggccatcggcgccagcttcaccgtgagcgtgttccagggcatcagcaccagcgtggccatcctgtgcgaggagttcccccacgagctgggcgacttcgtgatcctgctgaacgccggcatgagcatccagcaggccctgttcttcaacttcctgagcgcctgctgctgctacctgggcctggccttcggcatcctggccggcagccacttcagcgccaactggatcttcgccctggccggcggcatgttcctgtacatcagcctggccgacatgttccccgagatgaacgaggtgtgccaggaggacgagagaaagggcagcatcctgatccccttcatcatccagaacctgggcctgctgaccggcttcaccatcatggtggtgctgaccatgtacagcggccagatccagatcggctag

SEQ ID NO: 186132 - DNA, 1479 bp, Artificial Sequence
  derived and/or modified sequence
atgaaacttctgcttttgcatccagccttccagagttgtcttctcttgaccctgctggggctttggaggactacccctgaagcacatgcgtcatctcttggcgcaccggccatctctgcagcatccttcctgcaggatctaatccaccggtacggcgagggagacagcctgacactccaacagctaaaggctctgctgaaccacttagacgttggtgtgggtcgtggtaacgttacgcaacatgtgcagggacatagaaatctgtctacttgtttctcctctggggatttgttcactgcacacaacttctctgaacagagtcggatcggcagctctgagctgcaggaattctgtccaacgatcctgcagcagctcgacagtagagcatgcactagcgagaaccaagaaaatgaagaaaacgagcagacagaagagggccgcccaagcgccgtggaggtgtggggctttggattcctgagtgttagtttgatcaatcttgcttccttgcttggcgtgctcgtcctcccctgtactgagaaagcttttttttctcgcgtgctcacttactttatagcactatctatcggtacactcttatctaacgccctgttccagctgattccagaggcatttggattcaaccctctggaggattattatgtctctaagtccgctgtggtattcggagggttctatttgttttttttcactgagaaaattcttaaaattctcctgaagcaaaagaacgagcatcatcacggccatagccactacgccagtgagtccttaccaagtaaaaaagaccaggaggaaggggtgatggagaaacttcaaaatggagatctggaccatatgatcccccagcattgttcctctgaactggacgggaaggcacccatggttgacgagaaggtcatcgtgggctcactgtctgtgcaagacttacaggctagtcagagtgcgtgttactggctgaagggcgtgcgctactccgacatcggaaccctcgcatggatgatcacactgagcgacggattgcataattttatcgatggactggcgataggagccagtttcaccgtgagtgtgtttcaaggtatctctactagcgtggctattctttgcgaagaattccctcacgagctcggcgactttgtcattctgttgaatgccgggatgtcaattcagcaggctctttttttcaatttcttgagtgcatgttgttgttatctgggcttggcgttcggcattctggccgggagtcacttttctgcaaattggatctttgctttagccggtggcatgtttttatatatttctctggccgacatgttcccagagatgaacgaggtttgtcaggaggatgaaagaaaagggtcaatcctgattcctttcatcatccaaaacctgggtctcctgactgggttcacgattatggtcgtactgactatgtattccggccagatacaaataggctag

SEQ ID NO: 186133 - DNA, 1479 bp, Artificial Sequence
  derived and/or modified sequence
atgaagctgctgctgctgcacccagccttccagagctgcctgctgctgaccctgctgggcctgtggaggaccaccccagaggcccacgccagcagcctgggcgccccagccatctctgctgccagcttcctgcaggacctgatccacagatatggagagggggacagcctgaccctgcagcagctgaaggccctgctgaaccacctggatgtgggcgtgggcagaggaaatgtgacccagcacgtgcagggccacaggaacctgagcacctgcttcagcagcggggacctcttcaccgcccacaacttcagcgagcagagcagaattggcagcagcgagctgcaggagttctgccccaccatcctgcagcagctggacagccgggcctgcaccagcgagaaccaggagaatgaagaaaatgagcagacagaggagggccggcccagcgctgtggaggtgtggggcttcggcttcctgtctgtgtccctcatcaacctggccagcctgctgggcgtgctggtgctgccctgcacagagaaggccttcttcagccgggtgctgacctacttcatcgccctgagcatcggcaccctgctgagcaatgccctcttccagctgatccctgaggccttcggcttcaaccccctggaggactactacgtgtccaagtctgctgtggtgtttggaggcttctacctgttcttcttcacagagaagatcctgaagatcctgctgaagcagaagaatgagcaccaccacggccacagccactacgccagcgagagcctgcccagcaagaaggaccaggaggagggcgtgatggagaagctgcagaatggagacctggaccacatgatcccccagcactgcagcagcgagctggatggcaaggcccccatggtggatgagaaggtgattgtgggcagcctgtctgtgcaggacctgcaggccagccagagcgcctgctactggctgaagggcgtgcgctacagcgacatcggcaccctggcctggatgatcaccctgagtgatggcctgcacaacttcattgatggcctggccatcggggccagcttcaccgtgtctgtgttccagggcatcagcacctctgtggccatcctgtgtgaggagttcccccatgagctgggggactttgtgatcctgctgaatgccggcatgagcatccagcaggccctcttcttcaacttcctgagcgcctgctgctgctacctgggcctggccttcggcatcctggccggcagccacttcagcgccaactggatctttgccctggccggcggcatgttcctgtacatcagcctggccgacatgtttcctgagatgaatgaggtgtgccaggaggatgagaggaagggcagcatcctgatccccttcatcatccagaacctgggcctgctgaccggcttcaccatcatggtggtgctgaccatgtacagcggccagatccagattggatag

SEQ ID NO: 186134 - DNA, 1479 bp, Artificial Sequence
  derived and/or modified sequence
atgaagctgctgctgctgcaccccgccttccagagctgcctgctgctgaccctcctggggctctggagaaccacacccgaagcacacgcttcctccctgggggctcccgctatctcagctgcaagtttcctccaggatctaattcaccgatacggagagggagacagtttgaccctccagcagctgaaagctctgctgaatcatctggacgtgggggtgggccggggaaatgtcacccagcatgtgcaaggccataggaatctcagcacgtgcttcagttcgggcgatttgtttactgcccataattttagcgaacagagtagaataggctcttcagaactgcaggagttttgtcctacaatccttcaacagctggattcccgggcttgcaccagcgaaaaccaagagaacgaagaaaacgagcagaccgaagaggggaggccctccgcagtcgaggtctggggattcggtttcctgagcgtttccctaatcaatctcgcgagcctgttaggggtcttagtgttgccatgcactgagaaggcgtttttttcccgagttcttacttactttatagccctgtccatcgggacgcttctgagcaatgctttgtttcagctgatcccagaggccttcggctttaatccactggaagactactacgtcagcaagagcgccgtagtgtttggcggcttttatctcttcttctttactgagaagatcctgaaaatactacttaaacagaagaatgaacaccatcacggacattctcattacgccagcgagtccctgccttctaagaaggatcaggaagagggtgttatggaaaagcttcagaatggcgatctcgaccacatgattccccagcactgctccagcgagctggatgggaaagccccaatggtggacgaaaaagtcattgtcgggtcactgagcgttcaggacctccaggccagtcaatccgcctgctactggctgaaaggcgtcaggtactcggacattgggactttagcgtggatgatcaccctgtccgatggattgcataactttatcgatggactggcaattggagcttcctttacagtctccgtattccaggggattagtacaagcgtagcaatactgtgcgaggagttcccacacgagctcggcgactttgtcatattactgaatgccggtatgagcatccaacaggcactgtttttcaactttctgagtgcctgttgctgctatctgggcctggcctttggtatcctggctggaagccatttctcagcaaattggatcttcgccctggcgggaggaatgttcctctatatctccctggcagatatgttccctgagatgaacgaggtgtgtcaggaggatgagagaaaaggaagcatcctgatcccatttattatccagaacctaggccttctgactgggtttacgatcatggtcgtcttaacaatgtactcagggcagatccagatagggtag

SEQ ID NO: 186135 - DNA, 1479 bp, Artificial Sequence
  derived and/or modified sequence
atgaagctcctgctgctgcacccggcatttcagtcctgcctgctactgacattgctcgggttgtggcggacaacacccgaagctcatgcctccagtctgggggcaccagcgatcagtgccgcaagtttcctgcaggacttgatccaccggtacggcgagggggattctctgacactacagcagctaaaagctctgcttaatcacttggatgtgggcgtggggcgaggaaacgtcacccagcacgtacagggacaccgtaatctgagtacctgcttttcttctggggacttgttcactgcccataacttctctgagcaatctcgcatcggaagtagtgagctgcaggagttctgccccaccatcctgcagcagctggattcgagagcctgtacttccgagaaccaggagaacgaggagaacgagcagacagaagaagggcgaccttccgccgtggaggtgtgggggttcggctttttgtcagtgtctctgattaacctcgcctctttactgggcgtgctcgtcctgccgtgtaccgagaaggctttcttctctcgggtcctcacttactttatcgcgttatcgatcggtacactcctctcgaacgccctgttccagctcatccccgaggccttcgggtttaaccccctcgaggactattatgtgtccaagtcggccgtggtgttcgggggattctatctctttttcttcactgagaaaatcctgaagatactcctaaaacagaagaacgaacatcaccatggccattctcactacgcctctgaatctctgccttccaagaaggatcaggaggagggagtcatggaaaagctgcaaaatggtgatctggaccatatgattccacagcattgttcaagtgagctcgatggtaaggcacctatggtagacgagaaggtcatagtcggttctttgtccgtccaagacctccaggcttcccaatctgcttgctattggctgaagggggttcgatacagtgacattgggactctggcctggatgatcacactaagtgatggtctacacaactttattgacgggctggcaattggagcgtcttttaccgtgtcagtgttccagggaattagcacctcagtcgcaatcctgtgcgaggagttccctcatgagttaggcgactttgtcatcctgctgaacgcagggatgtccattcagcaggctctgttctttaactttcttagtgcatgttgctgctatctggggctcgcgtttggtatcctggcgggatctcactttagtgcgaattggatcttcgccctggccggtggcatgttcttgtacattagcctcgccgacatgtttcccgagatgaacgaggtgtgccaggaggacgagcggaagggctccatccttatcccattcatcattcagaatttgggtctcttgactggttttacaatcatggtagtgctcaccatgtattctggccagatacagatcgggtag

SEQ ID NO: 186136 - DNA, 4641 bp, Artificial Sequence
  derived and/or modified sequence
atatagccgggcatgcgcgcggtgccggggcccggacgcagtgaggggggtcggcgcgcgtgtctacgcggacgcaccggctaagctgcttctgccgccgccggccgcctgggaccttgcggtgaggctgcgcggggccgaggccgcctccgagcgccaggtttattcagtcaccatgaagctgctgctgctgcacccggccttccagagctgcctcctgctgaccctgcttggcttatggagaaccacccctgaggctcacgcttcatccctgggtgcaccagctatcagcgctgcctccttcctgcaggatctaatacatcggtatggcgagggtgacagcctcactctgcagcagctgaaggccctactcaaccacctggatgtgggagtgggccggggtaatgtcacccagcacgtgcaaggacacaggaacctctccacgtgctttagttctggagacctcttcactgcccacaatttcagcgagcagtcgcggattgggagcagcgagctccaggagttctgccccaccatcctccagcagctggattcccgggcctgcacctcggagaaccaggaaaacgaggagaatgagcagacggaggaggggcggccaagcgctgttgaagtgtggggctttggttttctcagtgtctcactgattaacctggcctctctcctgggagtcctcgtcctgccctgcacagagaaagcgtttttcagccgtgtgctcacttacttcatcgccctgtccattggaacgctgctgtctaacgcgctattccagctcatcccagaggcatttggtttcaaccctctggaagattattatgtctccaagtctgcagtggtgtttgggggcttttatcttttctttttcacagagaagatcttgaagattcttcttaagcagaaaaatgagcatcatcatggacacagccattatgcctctgagtcgcttccctccaagaaggaccaggaggagggggtgatggagaagctgcagaacggggacctggaccacatgattcctcagcactgcagcagtgagctggacggcaaggcgcccatggtggacgagaaggtcattgtgggctcgctctctgtgcaggacctgcaggcttcccagagtgcttgctactggctgaaaggtgtccgctactctgatatcggcactctggcctggatgatcactctgagcgacggcctccataatttcatcgatggcctggccatcggtgcttccttcactgtgtcagttttccaaggcatcagcacctcggtggccatcctctgtgaggagttcccacatgagctaggagactttgtcatcctgctcaacgctgggatgagcatccaacaagctctcttcttcaacttcctttctgcctgctgctgctacctgggtctggcctttggcatcctggccggcagccacttctctgccaactggatttttgcgctagctggaggaatgttcttgtatatttctctggctgatatgttccctgagatgaatgaggtctgtcaagaggatgaaaggaagggcagcatcttgattccatttatcatccagaacctgggcctcctgactggattcaccatcatggtggtcctcaccatgtattcaggacagatccagattgggtagggctctgccaagagcctgtgggactggaagtcgggccctgggctgcccgatcgccagcccgaggacttaccatccacaatgcaccacggaagaggccgttctatgaaaaactgacacagactgtattcctgcattcaaatgtcagccgtttgtaaaatgctgtatcctaggaataagctgccctggtaaccagtctctagctagtgcctcttgccctctcctcacctccttttctctcagtgactctggaacctgaatgcagcttacaagacaagcctgacttttttctctgattaccttggcctcctcttggaaccagtgctgaaaggttttgaatcctttacccaacaatgcaaaaatagagccaatggttataacttggctagaaatatcaagagttgaatccatagtgtggggcccatgactctagctgggcaccttggacctccagctggccaatagaagagacaggagacaggaagccttcccattttttcaaagtctgtttaattgcctattacttctctcaaagagaacctgaagtcagaacacatgagcagggtgagaggtgaggcaaggttcatcctgaatgggagaggaagtcgaaccactgctgtgtgtcttgtcaggatgctcacttgttcctactgagatgctggatattgattttgtaacagcacctggtgtttcacggctgtccgagtgagctaacgtggcggtgtggctgcctggacctcctctttcaggttaacgctgacagaatggaggctcaggctgtctgcaagaaaacagttggtttggctgtgattttgacctcctcttccccactgccatcttctaagagactttgtagctgcctcctagaagcacattctgagcacatttgagacctctgtgttagaggggagactgcacaaactatcctcccccaggttgagacgtctgcagagtggcaagctgacttgtagaaatggggtgccatttatgctctacttagacaagggtaatcagaaatggaatcagtgcaggcaaaatttaggatttgccgcttccataaatcaaagcatgactaatagggggtctctgaaatgtaagggcacaaacttcacttagggcatcgcagatgtttgcagaatggttggcctaatgattatgctacagatgggttttaaatgacccgtctaggttactgcttccttgcaaaaaaagtcgaatcctgcattgaattgaatatgaatttctctaactctctccagaaaatggatggagataacttgtctttaaaactgtaggccagccttagccactgtggagcccttgcctccgagctctggcttcaaggggagctcttctccaggttcactaggtgaattgatttattattatcatattgataatgtgagattctttagccactttggggagcctgtctctccagaagcctttcttagtggtgcccacagttggagcccaggggccatgtttgcaaactgattcatgtgcatggctgacaggagtactggttcactaccaatgcctgagcttttctcttacatagaaaaactgtccgctctcagtaatcacaagcagcatccgttttgttttctcttcttgggagacatctgtcaaaccaggaatattcttgaaaagaacgtgagcaggaaaaactgctggtgatactttttttaagttttgtttttatcttgcctgttggcttcaatacatttgagaatacgctgaagagggaaaatttcagtgatggagattctagattaaatatcaggactgatttcctggtgggattatggtccagttttaccaaagaaccaattccttgaatgttggaatctaactttttatattgtcattattattgttgtttttaaacggttctttgtcttttctgttttatttttctcaagctgctttcaggagctagcagaaaataactcaaagttgaagactctggaagattttgctttaacctaactcgcattgatgtattaaatttataattttagcattcccaatagatcctatcattccttaaacataataccctttgtcttggagtagaatactaagttagagttagtggatttctagtttaggagaggagctcaaaactataatctttaacaaattgaaaaatgaaatagggtgttttccctttttgtgcacacctatattaccttaagaaatttccttccatagacagctgcctcaaagggaaatcctctttaaaccgtagttggcgcagaggtcagtcctagtcggagcttaggaggggcggagacgctcacatcgtctgacttgagtcgccactgattgtggcaacagctttgcctcatgagtcaaaaattggcaatttcttttgatttttagttgttgaatttgctgtttcaagcatttgtacatattagaagtctaaggagtagcaagtcagtgggaggactttttcacccctggcattagcagcttcgacctcattttccagatgcaccagctcctattaataagttagcaaggaaagtgtatgtcacgtgcaggaacagtgaggcagggacaggggttctgctccttctcacttcaccaccggcacacagcttgcccctgtctttgcccccaaaggtattttgtgtctagtgtcaaattggagctattcttcactggtccttaaccttgggttttaaaaagaaggcttctctgtttgggtagcgtaagagctgagtatagtaagtcctcttccaaagagatggcaatatgctgggcatctactttaaaacaaagttgtctgatttttgcaagagaggttaggattttattgttcttatttccctttacagttctgcagttccatcacagtatttttttaaataactcaggtgtatgagaagaaattagaaaagaaaattaacttatgtggactgtaaatgttttatttgtaagattctataaataaagctatattctgtaattgttgagaa

SEQ ID NO: 186137 - protein, 1042 aa, Artificial Sequence
  derived and/or modified sequence
MADAFGDELFSVFEGDSTTAAGTKKDKEKDKGKWKGPPGSADKAGKRFDGKLQSESTNNGKNKRDVDFEGTDEPIFGKKPRIEESITEDLSLADLMPRVKVQSVETVEGCTHEVALPAEEDYLPLKPRVGKAAKEYPFILDAFQREAIQCVDNNQSVLVSAHTSAGKTVCAEYAIALALREKQRVIFTSPIKALSNQKYREMYEEFQDVGLMTGDVTINPTASCLVMTTEILRSMLYRGSEVMREVAWVIFDEIHYMRDSERGVVWEETIILLPDNVHYVFLSATIPNARQFAEWICHLHKQPCHVIYTDYRPTPLQHYIFPAGGDGLHLVVDENGDFREDNFNTAMQVLRDAGDLAKGDQKGRKGGTKGPSNVFKIVKMIMERNFQPVIIFSFSKKDCEAYALQMTKLDFNTDEEKKMVEEVFSNAIDCLSDEDKKLPQVEHVLPLLKRGIGIHHGGLLPILKETIEILFSEGLIKALFATETFAMGINMPARTVLFTNARKFDGKDFRWISSGEYIQMSGRAGRRGMDDRGIVILMVDEKMSPTIGKQLLKGSADPLNSAFHLTYNMVLNLLRVEEINPEYMLEKSFYQFQHYRAIPGVVEKVKNSEEQYNKIVIPNEESVVIYYKIRQQLAKLGKEIEEYIHKPKYCLPFLQPGRLVKVKNEGDDFGWGVVVNFSKKSNVKPNSGELDPLYVVEVLLRCSKESLKNSATEAAKPAKPDEKGEMQVVPVLVHLLSAISSVRLYIPKDLRPVDNRQSVLKSIQEVQKRFPDGIPLLDPIDDMGIQDQGLKKVIQKVEAFEHRMYSHPLHNDPNLETVYTLCEKKAQIAIDIKSAKRELKKARTVLQMDELKCRKRVLRRLGFATSSDVIEMKGRVACEISSADELLLTEMMFNGLFNDLSAEQATALLSCFVFQENSSEMPKLTEQLAGPLRQMQECAKRIAKVSAEAKLEIDEETYLSSFKPHLMDVVYTWATGATFAHICKMTDVFEGSIIRCMRRLEELLRQMCQAAKAIGNTELENKFAEGITKIKRDIVFAASLYL

SEQ ID NO: 186138 - protein, 941 aa, Artificial Sequence
  derived and/or modified sequence
MEGASRVCRQGRVALPAEEDYLPLKPRVGKAAKEYPFILDAFQREAIQCVDNNQSVLVSAHTSAGKTVCAEYAIALALREKQRVIFTSPIKALSNQKYREMYEEFQDVGLMTGDVTINPTASCLVMTTEILRSMLYRGSEVMREVAWVIFDEIHYMRDSERGVVWEETIILLPDNVHYVFLSATIPNARQFAEWICHLHKQPCHVIYTDYRPTPLQHYIFPAGGDGLHLVVDENGDFREDNFNTAMQVLRDAGDLAKGDQKGRKGGTKGPSNVFKIVKMIMERNFQPVIIFSFSKKDCEAYALQMTKLDFNTDEEKKMVEEVFSNAIDCLSDEDKKLPQVEHVLPLLKRGIGIHHGGLLPILKETIEILFSEGLIKALFATETFAMGINMPARTVLFTNARKFDGKDFRWISSGEYIQMSGRAGRRGMDDRGIVILMVDEKMSPTIGKQLLKGSADPLNSAFHLTYNMVLNLLRVEEINPEYMLEKSFYQFQHYRAIPGVVEKVKNSEEQYNKIVIPNEESVVIYYKIRQQLAKLGKEIEEYIHKPKYCLPFLQPGRLVKVKNEGDDFGWGVVVNFSKKSNVKPNSGELDPLYVVEVLLRCSKESLKNSATEAAKPAKPDEKGEMQVVPVLVHLLSAISSVRLYIPKDLRPVDNRQSVLKSIQEVQKRFPDGIPLLDPIDDMGIQDQGLKKVIQKVEAFEHRMYSHPLHNDPNLETVYTLCEKKAQIAIDIKSAKRELKKARTVLQMDELKCRKRVLRRLGFATSSDVIEMKGRVACEISSADELLLTEMMFNGLFNDLSAEQATALLSCFVFQENSSEMPKLTEQLAGPLRQMQECAKRIAKVSAEAKLEIDEETYLSSFKPHLMDVVYTWATGATFAHICKMTDVFEGSIIRCMRRLEELLRQMCQAAKAIGNTELENKFAEGITKIKRDIVFAASLYL

SEQ ID NO: 186139 - DNA, 2826 bp, Artificial Sequence
  derived and/or modified sequence
atggaaggagcaagtcgggtctgccgacaggggagggtagcacttcctgccgaagaggactacctgcctcttaaaccccgagtgggcaaggctgcaaaagagtatcccttcattttggacgcttttcagcgagaagccatccagtgtgtggataacaaccagtctgtgctggtcagtgctcacacttcagcagggaagaccgtctgtgcggagtatgctattgccctcgctctgcgggagaaacaaagggttatcttcacctcacccataaaagccctctccaatcagaagtatagggagatgtacgaagaatttcaagacgtgggcttgatgaccggggatgtaaccattaaccctaccgccagctgtctggtgatgaccacagaaatcctgcgatccatgctctatcgcgggtcagaggtcatgagagaggtggcatgggtaattttcgatgagatccattatatgagggactccgagcggggggtagtgtgggaagagaccataatcctattgccagataacgtgcattatgtctttttgtcggctaccattccaaatgccaggcagttcgccgagtggatatgtcacctccacaagcagccctgtcatgtcatctacactgattatcggcctacccccctgcaacactatatctttccggccggaggggacggcctgcacctcgtggtagacgaaaatggcgactttcgcgaggataactttaataccgccatgcaggtcctccgcgatgctggggatctggctaagggcgaccagaagggaaggaaggggggaactaagggcccaagcaacgtcttcaagatcgtgaaaatgataatggaaaggaactttcagccagtaatcatctttagcttttcgaaaaaggattgcgaggcctatgctctacagatgacaaagctggattttaacacggacgaagagaagaagatggtcgaggaggttttttccaacgccatcgactgtctgtccgacgaagataagaaacttccacaagtggagcacgtgctccccttactgaagcgaggaatcggcatccaccatgggggtcttctgccaatactcaaggagactattgagattttattctccgaaggactcataaaggcccttttcgcaactgagacattcgcaatgggcattaacatgcctgcccggactgtactgtttaccaatgcacggaagttcgatggtaaggactttagatggatttcctctggcgagtacattcagatgtctgggagggccggacgcagaggtatggacgacaggggaattgtcatcctaatggtcgatgagaagatgtcaccaaccatcggaaagcagcttctgaagggaagtgccgatcctcttaattcagcctttcatctgacttataacatggtgctgaatctgctaagggtagaagagatcaatccggagtatatgttggaaaagagcttctatcagttccaacactacagggcaattcccggtgtagtcgaaaaagttaagaatagcgaagaacagtataataagatagtgattcccaatgaagaatcagtagtcatttactataaaattagacaacagctcgccaagctgggtaaagaaattgaggagtatattcacaaacccaaatattgcctgccttttctgcagcctggtcggctggtgaaagtcaagaacgagggggacgattttggctggggggtggtagttaacttttctaaaaagagcaacgtgaaaccgaatagtggcgagctcgaccccctctacgtagtcgaggtgctcttgcggtgtagtaaagagtctcttaaaaattctgccacagaagccgccaagcccgccaaacccgatgagaaaggggagatgcaagtagtacccgttttagtccacttgctgtctgcaataagttctgtgaggctttacatacccaaagacttgaggcctgttgacaaccggcagtctgtgcttaaatctattcaggaagttcagaaacgttttccagacggcatcccactgctcgaccccattgacgatatgggcatccaggatcaaggcctgaaaaaagtgatccagaaggtcgaagcgttcgaacatcggatgtactcacatccattgcataacgatcccaatctggaaaccgtctacacgctatgcgagaaaaaggctcagatcgctatcgatatcaagtcagcaaaacgcgaactgaaaaaggcgcgcacagttctacaaatggacgagctcaagtgcaggaagcgcgtgttaaggcgcctaggctttgcgaccagttctgatgtgatcgagatgaagggccgcgtcgcctgcgaaatttcatctgccgacgaattgctcctcacagaaatgatgtttaacggattatttaacgacctgtctgccgagcaggccaccgcactcctctcttgctttgtgtttcaggaaaattccagcgagatgcctaagctaaccgagcagctagccggcccattgcggcagatgcaggaatgcgccaaacgcatagccaaagtgtccgcggaagcaaaattagaaatcgatgaggagacctacctatccagcttcaaaccacacctgatggacgttgtttacacctgggccactggcgcgacattcgcccacatctgcaagatgaccgacgtcttcgagggcagtataatccggtgtatgcgccggctcgaagagctactgcggcagatgtgtcaggctgctaaagctataggtaatactgaacttgaaaataaattcgcagaaggaattacgaaaattaaaagggacatagtcttcgccgctagtttgtatctgtag

SEQ ID NO: 186140 - DNA, 2826 bp, Artificial Sequence
  derived and/or modified sequence
atggagggcgccagccgggtgtgccggcagggccgggtggccctgcctgctgaggaggactacctgcccctgaagccccgggtgggcaaggccgccaaggagtaccccttcatcctggatgccttccagcgggaggccatccagtgtgtggacaacaaccagagcgtgctggtgtctgcccacaccagcgctgggaagacagtgtgtgccgagtatgccatcgccctggccctgcgggagaagcagagggtcatcttcaccagccccatcaaggccctgagcaaccagaagtaccgggagatgtatgaggagttccaggatgtgggcctgatgactggagatgtgaccatcaaccccacagccagctgcctggtgatgaccacagagatcctgcgctccatgctgtaccggggcagcgaggtgatgagggaggtggcctgggtgatctttgatgagatccactacatgagggacagcgagcggggcgtggtgtgggaggagaccatcatcctgctgcctgacaacgtgcactacgtgttcctgagcgccaccatccccaatgcccggcagtttgctgagtggatctgccacctgcacaagcagccctgccacgtgatctacacagactaccggcccacccccctgcagcactacatcttccctgctggaggagatggcctgcacctggtggtggatgaaaatggagacttccgggaggacaacttcaacacagccatgcaggtgctgagagatgctggggacctggccaagggggaccagaagggcaggaagggcggcaccaagggccccagcaatgtgttcaagatcgtgaagatgatcatggagaggaacttccagcctgtgatcatcttctccttcagcaagaaggactgtgaggcctatgccctgcagatgaccaagctggacttcaacacagatgaggagaagaagatggtggaggaggtgttcagcaatgccatcgactgcctgagtgatgaggacaagaagctgccccaggtggagcacgtgctgcccctgctgaagaggggcatcggcatccaccacggcggcctgctgcccatcctgaaggagaccatcgagatcctcttcagcgagggcctcatcaaggccctgtttgccacagagacctttgccatgggcatcaacatgcctgccaggacagtgctcttcaccaatgccaggaagtttgatggcaaggacttccgctggatcagcagtggagagtacatccagatgagcggccgggccggcagaagaggcatggatgaccggggcatcgtcatcctgatggtggatgagaagatgagccccaccatcggcaagcagctgctgaagggcagcgctgaccccctgaacagcgccttccacctgacctacaacatggtgctgaacctgctgcgggtggaggagatcaaccctgagtacatgctggagaagagcttctaccagttccagcactaccgggccatccctggggtggtggagaaggtgaagaacagcgaggagcagtacaacaagatcgtcatccccaatgaggagagcgtggtgatctactacaagatccggcagcagctggccaagctgggcaaggagattgaggagtacatccacaagcccaagtactgcctgcccttcctgcagcccggccgcctggtgaaggtgaagaatgaaggagatgactttggctggggcgtggtggtgaacttcagcaagaagagcaatgtgaagcccaacagcggggagctggaccccctgtatgtggtggaggtgctgctgcgctgcagcaaggagagcctgaagaacagcgccacagaagctgccaagccagccaagccagatgagaagggggagatgcaggtggtgcctgtgctggtgcacctgctgagcgccatcagctctgtgcggctgtacatccccaaggacctgcggcctgtggacaaccggcagagcgtgctgaagagcatccaggaggtgcagaagcgcttcccagatggcatccccctgctggaccccattgatgacatgggcatccaggaccagggcctgaagaaggtgatccagaaggtggaggcctttgagcacaggatgtacagccaccccctgcacaatgaccccaacctggagaccgtgtacaccctgtgtgagaagaaggcccagatcgccatcgacatcaagagcgccaagcgggagctgaagaaggccaggacagtgctgcagatggatgagctgaagtgcaggaagagggtgctgcggcggctgggctttgccaccagcagtgatgtgattgagatgaagggccgggtggcctgtgagatcagcagcgcagatgagctgctgctgacagagatgatgtttaatggcctcttcaatgacctgtctgctgagcaggccacagccctgctgagctgctttgtgttccaggagaacagcagcgagatgcccaagctgacagagcagctggccggccccctgcggcagatgcaggagtgtgccaagagaattgccaaggtgtctgctgaggccaagctggagattgatgaggagacctacctgagcagcttcaagccccacctgatggatgtggtgtacacctgggccaccggggccacctttgcccacatctgcaagatgacagatgtgtttgagggcagcatcatccgctgcatgaggcggctggaggagctgctgcggcagatgtgccaggccgccaaggccatcggcaacacagagctggagaacaagtttgctgagggcatcaccaagatcaagagggacatcgtgtttgctgccagcctgtacctgtag

SEQ ID NO: 186141 - DNA, 2826 bp, Artificial Sequence
  derived and/or modified sequence
atggagggcgccagccgggtgtgccggcagggccgggtggccctgccggcagaagaggattatttgccactcaaaccgcgcgtgggcaaggctgccaaggagtatcctttcatcctcgatgcctttcaaagggaagcaatccagtgcgtggataacaatcagtcagtgcttgtctcagcgcacacaagtgcgggcaagacagtgtgcgccgaatatgctatagccctggccctccgcgaaaagcagcgtgttatctttactagccccatcaaagcactgtccaaccagaagtaccgcgaaatgtacgaggaattccaggacgtgggtttgatgacgggcgatgtcaccatcaaccccacggccagttgtctggtcatgacaaccgagatattgcgcagtatgctttatcgcggaagtgaggttatgcgggaggtggcatgggtcatctttgacgagattcactacatgcgggactccgaacggggggtggtgtgggaggaaacgatcatccttctgccggacaacgttcattatgtctttctgtcagccaccattcctaacgccaggcaatttgccgagtggatttgtcatctgcacaaacagccttgccacgttatctatacggactatcgcccaacaccacttcaacattacatctttccagctggtggagatggactgcatctcgtggtagacgagaatggtgatttccgggaggacaactttaatacggctatgcaagtccttcgtgacgctggagatcttgcaaaaggtgaccaaaaaggtcggaaagggggcacaaaagggcccagtaacgtttttaaaattgtgaaaatgattatggaacggaactttcagcccgtgataatcttcagcttttcgaagaaggactgtgaagcctatgctctgcaaatgactaagctggatttcaacacagacgaagagaagaaaatggtcgaagaggtcttttctaacgccatagattgcctttcagacgaagacaaaaagctgccccaggtggagcacgtgctgccactcttgaagcggggcattggcatccaccacgggggccttctgccaatactcaaggaaaccatcgaaatcttgttctcagaagggctgatcaaagccctctttgccacagagaccttcgcgatggggattaacatgcccgcccggacagtactctttacaaatgcccggaaattcgacgggaaagattttcgctggatatcttcgggggagtacatccagatgagtggccgagctggcagacgggggatggatgaccggggcatcgttatacttatggtagatgagaagatgtctccaaccatcgggaagcaattgctgaagggatcagcagacccactgaactcggccttccatctgacctacaacatggtgctgaaccttctgcgagttgaggagatcaacccagagtatatgctggagaagtctttctaccagttccagcactaccgagctatccctggcgtggtcgagaaggtcaagaactcggaagagcagtacaataagatcgtgatacccaatgaggaatccgtggtgatttactataagattcggcagcagcttgccaagttgggaaaggaaattgaagaatatatccacaagccaaagtactgtttgccgttccttcaacctggaagactggtcaaggttaaaaacgaaggggatgattttggctggggcgtagtagttaattttagcaagaaaagtaatgttaagcccaactcaggcgaactggatcctctatacgtggtggaagtgcttctgaggtgttccaaagagtctctcaagaactcagctaccgaagccgccaagccggctaaacccgacgagaagggagaaatgcaggtcgtgcccgtgctcgtgcacttgcttagtgctatctcgagcgttcgcctgtatattcccaaggacctgcgccctgtggacaacagacagtcggtgctcaaatcaatccaagaggtccaaaaacgctttccagatggaattcctctccttgatcctattgatgacatgggcatacaggatcagggactcaagaaggttattcaaaaagtagaggcctttgaacatcgcatgtacagtcatccactgcacaatgatcccaatctggaaaccgtctacacactgtgtgaaaaaaaagcccaaatagccattgatattaaatctgcaaaaagagaactaaagaaagcgcgaactgttttgcagatggatgagctcaagtgtagaaaaagggtcttacggcgcctgggattcgcgacaagcagcgatgtcatcgagatgaagggaagagtcgcttgcgagatcagtagtgctgatgagctgcttttgactgaaatgatgtttaacgggctgttcaacgatttgagtgcagaacaggccaccgcccttttgtcgtgcttcgtgttccaggagaacagttccgagatgccaaaattgaccgagcaattggcaggccctctgagacagatgcaggaatgtgcgaaacgaatcgcaaaggtgagcgcagaggccaaactggagattgatgaagagacgtacctgagctctttcaaaccgcacttgatggacgttgtgtacacgtgggccactggcgctacctttgcccatatctgtaaaatgacggatgtttttgagggctcaatcatcaggtgcatgcgaaggctggaagagctacttaggcagatgtgccaggcagcaaaagccataggaaatactgagttggagaataaattcgcggaaggaattaccaaaatcaagcgggatatagtattcgccgcttccttatacttgtag

SEQ ID NO: 186142 - DNA, 4192 bp, Artificial Sequence
  derived and/or modified sequence
gctgcctgccacacgccaggcgccacgcgccgccctcgctctttatccactgagcagcttatccactttaggtcggaaaggaaaggaaagaaaagcaggaaaaaaaaaaaaagtcaggggaacatttttgtcggctgcgcgactcgactacttttgtctcctgcgggccactgttgagccttcacgagacgtcactgtcttcggtcgcggggcatcgtgggtaggagggagatttgctctcactgctcccaaaaatggcggacgcattcggagatgagctgttcagcgtgttcgagggcgactcgaccactgcggcgggaaccaaaaaagacaaggaaaaggacaaggggaaatggaaggggcctccagggtctgcagacaaggcagggaaacgttttgatggtaaattacaatcagaatcaactaataatggaaaaaataagagagatgtagatttcgaaggtacagatgaacccatttttggaaagaagcccaggatagaagagtcaataactgaagacttaagtttggcagacctgatgcccagagtcaaggtacaatcagttgaaactgttgaagggtgtacacatgaggttgcacttcctgcagaagaggattatttaccacttaaaccacgagttggaaaagctgctaaggaatacccgttcattcttgatgcttttcaaagagaggccattcagtgtgttgacaataatcagtctgttctagtatctgcacatacctcagcgggaaaaacagtatgcgccgagtatgccattgcattggccttaagggaaaagcagcgtgtaatatttaccagcccaattaaggctctgagtaaccaaaaataccgtgaaatgtatgaagaatttcaagatgttggtttgatgactggtgatgttactattaatcctacggcatcttgtcttgttatgaccacagagattttgagaagtatgctttacagaggttccgaagttatgagagaagttgcttgggttatatttgatgaaattcattatatgagagattcagaacgtggtgtagtatgggaagaaactattattttgcttcctgataacgtccactatgtctttctttcggctactattccaaatgcccgacagtttgctgaatggatttgccatttacataaacagccttgtcatgttatttacacagattatcggcccactccattgcaacactacatttttccagcagggggagatggcctgcatcttgtggttgatgaaaatggtgacttcagagaagataattttaatactgcaatgcaagtgcttcgagatgcaggtgatttggccaaaggagaccagaaagggcggaaaggaggaacaaaaggaccatcaaatgttttcaaaattgtgaagatgattatggaaagaaatttccaacctgtgattattttcagttttagtaagaaagattgtgaagcctatgcacttcaaatgaccaaattagatttcaacacagatgaagaaaagaagatggttgaagaagtattcagtaatgcaattgattgcttatccgatgaagataaaaaactccctcaggtagaacatgtacttcctcttttgaagaggggaattggtattcaccatggtggtttacttcctattttgaaagaaactatagaaattctcttttctgaaggattgataaaggccttatttgccacggagacctttgctatgggaattaacatgccagctagaactgttttatttacaaatgcccgcaaatttgatgggaaggatttccgatggatttcttctggtgaatacattcagatgtctggtcgtgctggaaggagaggaatggatgatagaggaattgtaattcttatggtagatgaaaagatgagcccaacaattggaaaacaattacttaagggctccgctgatcctctaaatagtgctttccatttgacctacaacatggttttgaacttactacgtgtagaagaaattaatcctgagtacatgttggaaaaatccttctaccagtttcagcattatagagcaattccaggagtagtagagaaggtaaagaattcagaagaacagtataataaaatagtaattcccaatgaagaaagtgtggttatctattataagattagacagcagcttgccaaattgggtaaagaaattgaagaatatattcacaaaccaaaatactgcttaccttttctacaaccaggtcgtttggtaaaggtaaagaatgaaggagatgactttggctggggagtagtggtgaatttctcaaaaaagtcaaatgttaagcctaactctggtgaactggatcctttgtatgtagtagaagtacttctgcgctgtagcaaagagagcttgaaaaattcagctacagaagctgcaaaaccagctaaacctgatgagaaaggagagatgcaggttgtcccagttttggtgcatctcctgtctgctatcagcagtgttaggctttacattcctaaagaccttcggccggtggacaatagacagagtgttttaaaatcaatacaggaagttcagaaacgttttcctgacggcatccccttattagaccctattgatgatatgggcattcaagatcaagggctgaaaaaagtcattcagaaagtagaagcttttgagcatcgaatgtattctcatccacttcacaatgatccaaatttggaaactgtgtatacgctttgtgaaaaaaaagcacagattgcaatagatattaaatctgcaaagcgagaactgaagaaagcaagaacagtcctacaaatggatgaactcaaatgtcgcaaacgtgttttaagaaggttgggatttgctacttcttctgatgtaatagagatgaaaggacgagtggcttgtgagataagcagtgctgatgagctccttctaactgagatgatgtttaatggccttttcaatgacctttctgcagaacaggcaacagcattattaagctgctttgtgtttcaagagaattctagtgagatgcccaaattaacagaacaattagcaggaccacttcgtcaaatgcaggaatgtgctaaaagaattgcaaaagtttcagcagaagccaaattggaaattgatgaggaaacttatctaagctcatttaaacctcacttaatggatgtagtatatacctgggcaactggagctacatttgcccatatctgcaaaatgacagatgtctttgaaggcagcataattcgttgtatgaggcgcctggaagaattgcttcgacaaatgtgtcaagcagcaaaagccattggaaacactgagctggaaaataaatttgcagaaggaatcaccaaaatcaagagagatattgtgtttgctgccagcctctacttgtagagtcagctaaaggaatgtgagattttaaattattgaccacctgtttgattacagttgactacaaatgcctgcaagtgtggatttggttctcccatacattttaatatgtattatatttaaatcaaacatcattcatagaaagcatattacatacatgtttatacataagcattacatttttttaataaaaatgtatacaggtggggcactgttttggtggaaggcttggagtttttttaatgagtttagagctattagataaccactgagttaaaggtaactatgtacacacaaagtgtgcatccaagaggcatagcagcagcagaagtctttaaaggcttgtacaccaggaagaaagatgcatcctcttgccttgtggcaatcattttcctttagaaaacaggccagcttcacctgggcaccctgctgcctttcaaggctggtgattgctcggatagtgattcccagttgttggtgtttcatgcagagttgtatgagagtcctcctcttttctttctttaaaagaagttctttctttgaagaaatccgatacatatacagcctacagtgcaaaatatttaatggtataatttagatcaagttaaaaactacatacaaagttgtgatcaacagcatcctaagataaatataaacaaaaggatatactttgaggtgtacagattaagcatataaaaaattagagactaactgggattttttaaagattattccaaattaagagttgctttgttatgccttcagcaaatagcttcattttgccaatactgaataaaagagttatttctaca

SEQ ID NO: 186143 - DNA, 3271 bp, Artificial Sequence
  derived and/or modified sequence
actgctcccaaaaatggcggacgcattcggagatgagctgttcagcgtgttcgagggcgactcgaccactgcggcgggaaccaaaaaagacaaggaaaaggacaaggggaaatggaaggggcctccagggtctgcagacaaggcagggttgcacttcctgcagaagaggattatttaccacttaaaccacgagttggaaaagctgctaaggaatacccgttcattcttgatgcttttcaaagagaggccattcagtgtgttgacaataatcagtctgttctagtatctgcacatacctcagcgggaaaaacagtatgcgccgagtatgccattgcattggccttaagggaaaagcagcgtgtaatatttaccagcccaattaaggctctgagtaaccaaaaataccgtgaaatgtatgaagaatttcaagatgttggtttgatgactggtgatgttactattaatcctacggcatcttgtcttgttatgaccacagagattttgagaagtatgctttacagaggttccgaagttatgagagaagttgcttgggttatatttgatgaaattcattatatgagagattcagaacgtggtgtagtatgggaagaaactattattttgcttcctgataacgtccactatgtctttctttcggctactattccaaatgcccgacagtttgctgaatggatttgccatttacataaacagccttgtcatgttatttacacagattatcggcccactccattgcaacactacatttttccagcagggggagatggcctgcatcttgtggttgatgaaaatggtgacttcagagaagataattttaatactgcaatgcaagtgcttcgagatgcaggtgatttggccaaaggagaccagaaagggcggaaaggaggaacaaaaggaccatcaaatgttttcaaaattgtgaagatgattatggaaagaaatttccaacctgtgattattttcagttttagtaagaaagattgtgaagcctatgcacttcaaatgaccaaattagatttcaacacagatgaagaaaagaagatggttgaagaagtattcagtaatgcaattgattgcttatccgatgaagataaaaaactccctcaggtagaacatgtacttcctcttttgaagaggggaattggtattcaccatggtggtttacttcctattttgaaagaaactatagaaattctcttttctgaaggattgataaaggccttatttgccacggagacctttgctatgggaattaacatgccagctagaactgttttatttacaaatgcccgcaaatttgatgggaaggatttccgatggatttcttctggtgaatacattcagatgtctggtcgtgctggaaggagaggaatggatgatagaggaattgtaattcttatggtagatgaaaagatgagcccaacaattggaaaacaattacttaagggctccgctgatcctctaaatagtgctttccatttgacctacaacatggttttgaacttactacgtgtagaagaaattaatcctgagtacatgttggaaaaatccttctaccagtttcagcattatagagcaattccaggagtagtagagaaggtaaagaattcagaagaacagtataataaaatagtaattcccaatgaagaaagtgtggttatctattataagattagacagcagcttgccaaattgggtaaagaaattgaagaatatattcacaaaccaaaatactgcttaccttttctacaaccaggtcgtttggtaaaggtaaagaatgaaggagatgactttggctggggagtagtggtgaatttctcaaaaaagtcaaatgttaagcctaactctggtgaactggatcctttgtatgtagtagaagtacttctgcgctgtagcaaagagagcttgaaaaattcagctacagaagctgcaaaaccagctaaacctgatgagaaaggagagatgcaggttgtcccagttttggtgcatctcctgtctgctatcagcagtgttaggctttacattcctaaagaccttcggccggtggacaatagacagagtgttttaaaatcaatacaggaagttcagaaacgttttcctgacggcatccccttattagaccctattgatgatatgggcattcaagatcaagggctgaaaaaagtcattcagaaagtagaagcttttgagcatcgaatgtattctcatccacttcacaatgatccaaatttggaaactgtgtatacgctttgtgaaaaaaaagcacagattgcaatagatattaaatctgcaaagcgagaactgaagaaagcaagaacagtcctacaaatggatgaactcaaatgtcgcaaacgtgttttaagaaggttgggatttgctacttcttctgatgtaatagagatgaaaggacgagtggcttgtgagataagcagtgctgatgagctccttctaactgagatgatgtttaatggccttttcaatgacctttctgcagaacaggcaacagcattattaagctgctttgtgtttcaagagaattctagtgagatgcccaaattaacagaacaattagcaggaccacttcgtcaaatgcaggaatgtgctaaaagaattgcaaaagtttcagcagaagccaaattggaaattgatgaggaaacttatctaagctcatttaaacctcacttaatggatgtagtatatacctgggcaactggagctacatttgcccatatctgcaaaatgacagatgtctttgaaggcagcataattcgttgtatgaggcgcctggaagaattgcttcgacaaatgtgtcaagcagcaaaagccattggaaacactgagctggaaaataaatttgcagaaggaatcaccaaaatcaagagagatattgtgtttgctgccagcctctacttgtagagtcagctaaaggaatgtgagattttaaattattgaccacctgtttgattacagttgactacaaatgcctgcaagtgtggatttggttctcccatacattttaatatgtattatatttaaatcaaacatcattcatagaaagcatattacatacatgtttatacataagcattacatttttttaataaaaatgtatacaggtggggcactgttttggtggaaggcttggagtttttttaatgagtttagagctattagataaccactgagttaaaggtaactatgtacacacaaagtgtgcatccaagaggcatagcagcagcagaagtcttta

SEQ ID NO: 186144 - DNA, 2826 bp, Artificial Sequence
  derived and/or modified sequence
atggagggtgcatccagggtgtgcagacaaggcagagtcgctctgccagctgaggaggactacctcccgctgaagccaagagtcggaaaagcggctaaagagtatccgttcattctggatgcttttcagcgagaggccatccaatgtgtggataacaaccagagcgtcctcgtgtcagcccacactagcgctggtaagactgtttgcgcagagtatgccattgccctcgctctgcgcgaaaagcagcgggtgatctttacttccccgattaaggcactcagcaatcaaaagtaccgggaaatgtatgaggaatttcaggacgtcggccttatgaccggtgacgtgaccataaacccaacagctagctgtctggtgatgactactgagattctacggagtatgctatacagaggcagcgaagtaatgagggaagtagcatgggtaatctttgacgaaattcattacatgagggacagcgaacgaggtgtggtctgggaggagacaattatactgctccccgataatgtgcattatgtgttcctgagcgcaacaatccctaatgccaggcaattcgccgagtggatatgccacctccataaacagccatgccacgtgatttatacagattacagaccaacaccattgcagcattacatctttccagccggaggcgatggtcttcacctcgtagtagatgagaacggggattttagagaagacaactttaataccgcaatgcaggtgctgagagatgcgggtgacctggccaaaggcgaccagaaaggcagaaagggcggaaccaaaggcccttccaatgtgtttaagatcgtcaaaatgatcatggagagaaacttccagcccgtcattatcttttctttcagcaagaaagactgtgaagcctatgctttgcagatgacaaagcttgactttaacaccgacgaggagaaaaaaatggtggaggaagtcttctccaacgccatcgactgtctaagcgacgaagataaaaaattaccccaggtggagcatgtgctgcctctgttgaagaggggaataggcatccaccacggcggtctgctgcctatcctaaaggagactattgagattctgttctctgaaggactgatcaaggccttgtttgccactgagactttcgccatgggcattaacatgccggctcggactgttctcttcactaacgcacgaaaatttgatggtaaggactttaggtggatttccagcggcgagtacattcagatgtccgggagagccggtaggaggggcatggacgataggggcatcgtgatcctcatggtagatgaaaagatgtccccgacaatcgggaagcagctcctgaaggggtccgcagatccactcaattctgcttttcacctaacatacaatatggtcctgaacctcctacgggtggaggaaattaatcctgagtacatgctggagaagtccttctaccagtttcagcattatcgggctatccccggagtcgtcgaaaaggtcaaaaattctgaggaacagtacaacaagattgtcatccctaacgaagaaagcgtggtgatctattataagattagacagcagctagcgaaactgggaaaggaaatagaggaatacatccacaaacctaaatactgtctgccttttttacaacctggacgcctggtcaaagttaaaaacgagggcgacgacttcggatggggagtggtggtgaacttcagtaagaaaagcaacgtcaagccgaattccggcgagcttgaccctctgtatgttgtggaggtgctgcttcgatgttcaaaggagtcacttaagaattcagcaacagaagccgcaaaacccgctaagccagacgagaagggcgaaatgcaggtagtgcccgtactggtacacctgttgagtgctattagctccgtgcggctttatatcccaaaagatctcagaccagtggataaccggcagtctgtgctcaaatccatccaggaagtacagaaacggttccccgacggaattcctttactggaccccatagacgacatggggatccaagatcaggggcttaagaaggtgatccagaaagtagaagcttttgagcataggatgtactcccacccactgcacaatgaccccaacctggaaacggtctatacactatgcgagaaaaaagcacagattgccatcgatatcaaatctgcgaagcgagaactaaagaaggccagaaccgttcttcagatggacgagctcaagtgcaggaagagggtcctgcgcaggctcggcttcgccacctcatccgacgtgatagagatgaagggcagagttgcatgcgagatcagcagcgctgacgagctcctcctgaccgagatgatgttcaacggcctgttcaacgatctctccgccgagcaggccacggctttgttgtcttgcttcgtttttcaggagaacagttcagagatgccaaagttaaccgagcagctggccggacccctgcggcaaatgcaggagtgcgcaaagaggattgctaaggtaagcgctgaagctaaactcgagatcgacgaggagacttacctgtcatcgttcaagccacatttaatggatgtcgtgtatacatgggcaaccggggctaccttcgctcatatctgtaaaatgacagacgttttcgaaggtagtattattaggtgtatgcgccgtttagaggaactgcttaggcagatgtgtcaggcagctaaagcaatcgggaataccgagctcgagaacaagtttgccgaaggaattacgaaaattaaacgagatatcgtgtttgcagccagcctttacctgtag

SEQ ID NO: 186145 - DNA, 2826 bp, Artificial Sequence
  derived and/or modified sequence
atggagggcgccagcagagtgtgcagacagggcagagtggccctgcccgccgaggaggactacctgcccctgaagcccagagtgggcaaggccgccaaggagtaccccttcatcctggacgccttccagagagaggccatccagtgcgtggacaacaaccagagcgtgctggtgagcgcccacaccagcgccggcaagaccgtgtgcgccgagtacgccatcgccctggccctgagagagaagcagagagtgatcttcaccagccccatcaaggccctgagcaaccagaagtacagagagatgtacgaggagttccaggacgtgggcctgatgaccggcgacgtgaccatcaaccccaccgccagctgcctggtgatgaccaccgagatcctgagaagcatgctgtacagaggcagcgaggtgatgagagaggtggcctgggtgatcttcgacgagatccactacatgagagacagcgagagaggcgtggtgtgggaggagaccatcatcctgctgcccgacaacgtgcactacgtgttcctgagcgccaccatccccaacgccagacagttcgccgagtggatctgccacctgcacaagcagccctgccacgtgatctacaccgactacagacccacccccctgcagcactacatcttccccgccggcggcgacggcctgcacctggtggtggacgagaacggcgacttcagagaggacaacttcaacaccgccatgcaggtgctgagagacgccggcgacctggccaagggcgaccagaagggcagaaagggcggcaccaagggccccagcaacgtgttcaagatcgtgaagatgatcatggagagaaacttccagcccgtgatcatcttcagcttcagcaagaaggactgcgaggcctacgccctgcagatgaccaagctggacttcaacaccgacgaggagaagaagatggtggaggaggtgttcagcaacgccatcgactgcctgagcgacgaggacaagaagctgccccaggtggagcacgtgctgcccctgctgaagagaggcatcggcatccaccacggcggcctgctgcccatcctgaaggagaccatcgagatcctgttcagcgagggcctgatcaaggccctgttcgccaccgagaccttcgccatgggcatcaacatgcccgccagaaccgtgctgttcaccaacgccagaaagttcgacggcaaggacttcagatggatcagcagcggcgagtacatccagatgagcggcagagccggcagaagaggcatggacgacagaggcatcgtgatcctgatggtggacgagaagatgagccccaccatcggcaagcagctgctgaagggcagcgccgaccccctgaacagcgccttccacctgacctacaacatggtgctgaacctgctgagagtggaggagatcaaccccgagtacatgctggagaagagcttctaccagttccagcactacagagccatccccggcgtggtggagaaggtgaagaacagcgaggagcagtacaacaagatcgtgatccccaacgaggagagcgtggtgatctactacaagatcagacagcagctggccaagctgggcaaggagatcgaggagtacatccacaagcccaagtactgcctgcccttcctgcagcccggcagactggtgaaggtgaagaacgagggcgacgacttcggctggggcgtggtggtgaacttcagcaagaagagcaacgtgaagcccaacagcggcgagctggaccccctgtacgtggtggaggtgctgctgagatgcagcaaggagagcctgaagaacagcgccaccgaggccgccaagcccgccaagcccgacgagaagggcgagatgcaggtggtgcccgtgctggtgcacctgctgagcgccatcagcagcgtgagactgtacatccccaaggacctgagacccgtggacaacagacagagcgtgctgaagagcatccaggaggtgcagaagagattccccgacggcatccccctgctggaccccatcgacgacatgggcatccaggaccagggcctgaagaaggtgatccagaaggtggaggccttcgagcacagaatgtacagccaccccctgcacaacgaccccaacctggagaccgtgtacaccctgtgcgagaagaaggcccagatcgccatcgacatcaagagcgccaagagagagctgaagaaggccagaaccgtgctgcagatggacgagctgaagtgcagaaagagagtgctgagaagactgggcttcgccaccagcagcgacgtgatcgagatgaagggcagagtggcctgcgagatcagcagcgccgacgagctgctgctgaccgagatgatgttcaacggcctgttcaacgacctgagcgccgagcaggccaccgccctgctgagctgcttcgtgttccaggagaacagcagcgagatgcccaagctgaccgagcagctggccggccccctgagacagatgcaggagtgcgccaagagaatcgccaaggtgagcgccgaggccaagctggagatcgacgaggagacctacctgagcagcttcaagccccacctgatggacgtggtgtacacctgggccaccggcgccaccttcgcccacatctgcaagatgaccgacgtgttcgagggcagcatcatcagatgcatgagaagactggaggagctgctgagacagatgtgccaggccgccaaggccatcggcaacaccgagctggagaacaagttcgccgagggcatcaccaagatcaagagagacatcgtgttcgccgccagcctgtacctgtag

SEQ ID NO: 186146 - DNA, 3129 bp, Artificial Sequence
  derived and/or modified sequence
atggcagacgcattcggggatgagctgttcagtgtgtttgagggagactccaccaccgcggccggaacgaagaaggacaaggagaaggacaaagggaagtggaaaggacctcctggtagtgccgataaggccggcaaacgattcgatggcaaactgcagagtgagagtaccaataatggaaaaaataagcgcgatgttgatttcgaaggtactgacgagcccatctttgggaagaaacccagaattgaggagtcaatcaccgaggatttgtccctcgctgatctgatgccaagggttaaggtgcagagtgtggagactgttgaaggttgtacacatgaggtggccctgcccgctgaggaagactatcttccacttaaacctcgcgtaggcaaagccgctaaggagtatccctttatcttggacgcattccagagggaagctatccagtgtgtggacaacaaccaatccgtgctcgttagcgcccacacttctgccgggaaaactgtctgcgccgagtacgctattgcactcgccctgcgggaaaagcagcgagtgatcttcaccagtccaattaaagccctgtccaaccagaaatatagggagatgtacgaggaattccaggacgtggggttaatgaccggggacgtgactatcaaccccactgctagttgtctggtcatgacaactgaaatcctgagaagtatgctgtacaggggttctgaagtcatgagagaggtagcgtgggttatcttcgacgagattcactatatgcgtgattctgagcgtggggtggtgtgggaggaaaccatcatcctgttgccagacaacgtacactacgtcttcctgtctgctactattcctaatgccaggcagtttgcagagtggatctgtcatcttcacaagcagccttgccatgtgatttacaccgactatcgtcctacgcccctgcaacactacatctttcctgcgggaggcgacgggcttcaccttgtggtggacgagaacggagacttccgggaagataattttaacactgccatgcaggttctaagagacgcaggcgatcttgccaagggggatcagaaaggacgcaagggcggcaccaagggaccctctaacgtattcaagatcgtgaaaatgataatggagcggaatttccaaccagtgatcatttttagtttctcaaaaaaagactgtgaagcatacgcactacagatgactaaactggatttcaataccgacgaggagaaaaagatggtggaagaggtgtttagtaacgctatagattgtctgtctgatgaggacaaaaaactcccacaggttgagcatgtgctgcctctcctaaagaggggcatcgggatccaccatggcggtctgctgccaatcctgaaagagaccatagagatactcttcagcgagggcctcatcaaagccctattcgcaacagaaacgttcgcgatggggattaacatgcctgctcgcacggtcctgttcaccaacgcccggaaattcgacgggaaagactttaggtggatttctagcggggagtatatccagatgagcggcagggcgggccgccgcgggatggatgatcgcggtattgtgatactcatggtcgacgaaaagatgtcacccaccattggaaagcaactgcttaagggaagtgctgatcctctgaattctgccttccacctgacatataacatggtgctgaatctcttgagagtcgaagaaatcaaccccgagtacatgctggaaaaatccttttaccaattccagcactatagggccatacccggggtggttgagaaagtaaagaatagcgaagagcagtacaataagatagtgattcctaatgaggaatccgttgtcatctactacaagattagacagcagcttgccaagcttggtaaggagatcgaagagtacattcacaagcctaagtactgcctgccttttctccagccagggaggcttgtgaaagtgaaaaatgagggagacgatttcggatggggcgtcgtagtgaatttctctaagaagagcaacgtgaagcctaactcaggggagctcgacccattgtatgtagtagaagttctgctccgttgctcaaaagaatccttaaaaaacagcgctaccgaagccgctaagcccgccaaaccagatgagaagggggaaatgcaggtcgtcccagtgctggtgcatctgctcagcgcaatctctagtgtgcggctgtacatccctaaggatcttcgtcctgtggataacaggcagagcgtcttaaagtccatccaggaggtgcaaaaaagatttcccgatgggatccctttgctggatcccatagatgacatggggattcaggaccagggtctgaagaaagtgattcagaaggtagaagcttttgagcaccgcatgtactcccatccattgcacaatgacccaaacctggagacagtttacactttgtgcgaaaagaaagcccagatcgcaatagacataaagtccgcgaagagggagctcaagaaagcaagaaccgtcctccaaatggacgaacttaagtgccgaaagagagtcctaagacgtctgggcttcgccacctcctcagacgtcattgaaatgaaaggtagagtcgcttgtgagattagttctgctgacgagctgttactcaccgaaatgatgtttaacggcctgttcaatgacttgagcgcagaacaggccactgcactcctcagctgcttcgttttccaggagaacagctcagagatgcccaaattgactgagcaactggcgggcccactcagacagatgcaggaatgtgcaaaacgtatagccaaagtaagcgcggaggcaaagttggaaatcgatgaagaaacctacttgtcctccttcaagccacacctaatggacgtcgtctacacatgggccacaggagcgactttcgcccatatctgcaaaatgacggacgtgtttgagggctccatcataaggtgtatgaggagactggaggagttgcttcgccagatgtgccaggcagccaaggcaatcgggaataccgaactggagaataagtttgccgaaggaatcacaaagattaaaagagacatagtgttcgccgccagcctgtatctctag

SEQ ID NO: 186147 - DNA, 3129 bp, Artificial Sequence
  derived and/or modified sequence
atggctgatgcctttggagatgagctgttctctgtgtttgaaggagacagcaccacagctgctggcaccaagaaggacaaggagaaggacaagggcaagtggaagggccccccaggcagcgctgacaaggccggcaagagatttgatggcaagctgcagagcgagagcaccaacaacgggaagaacaagagagatgtggactttgagggcacagatgagcccatctttgggaagaagccccgcatcgaggagagcatcacagaggacctgagcctggccgacctgatgccccgggtgaaggtgcagagcgtggagaccgtggagggctgcacccatgaggtggccctgcctgctgaggaggactacctgcccctgaagccccgggtgggcaaggccgccaaggagtaccccttcatcctggatgccttccagcgggaggccatccagtgtgtggacaacaaccagagcgtgctggtgtctgcccacaccagcgctgggaagacagtgtgtgccgagtatgccatcgccctggccctgcgggagaagcagagggtcatcttcaccagccccatcaaggccctgagcaaccagaagtaccgggagatgtatgaggagttccaggatgtgggcctgatgactggagatgtgaccatcaaccccacagccagctgcctggtgatgaccacagagatcctgcgctccatgctgtaccggggcagcgaggtgatgagggaggtggcctgggtgatctttgatgagatccactacatgagggacagcgagcggggcgtggtgtgggaggagaccatcatcctgctgcctgacaacgtgcactacgtgttcctgagcgccaccatccccaatgcccggcagtttgctgagtggatctgccacctgcacaagcagccctgccacgtgatctacacagactaccggcccacccccctgcagcactacatcttccctgctggaggagatggcctgcacctggtggtggatgaaaatggagacttccgggaggacaacttcaacacagccatgcaggtgctgagagatgctggggacctggccaagggggaccagaagggcaggaaaggaggcaccaagggccccagcaatgtgttcaagatcgtgaagatgatcatggagaggaacttccagcccgtcatcatcttctccttcagcaagaaggactgtgaggcctatgccctgcagatgaccaagctggacttcaacacagatgaggagaagaagatggtggaggaggtgttcagcaatgccatcgactgcctgagtgatgaggacaagaagctgccccaggtggagcacgtgctgcccctgctgaagaggggcatcggcatccaccacggcggcctgctgcccatcctgaaggagaccatcgagatcctcttcagcgagggcctcatcaaggccctgtttgccacagagacctttgccatgggcatcaacatgcctgccaggacagtgctcttcaccaatgccaggaagtttgatggcaaggacttccgctggatcagcagcggggagtacatccagatgagcggccgggccggccggcggggcatggatgaccggggcatcgtcatcctgatggtggatgagaagatgagccccaccatcggcaagcagctgctgaagggcagcgctgaccccctgaacagcgccttccacctgacctacaacatggtgctgaacctgctgcgggtggaggagatcaaccctgagtacatgctggagaagagcttctaccagttccagcactaccgggccatccctggggtggtggagaaggtgaagaacagcgaggagcagtacaacaagatcgtcatccccaatgaggagagcgtggtgatctactacaagatccggcagcagctggccaagctgggcaaggagattgaggagtacatccacaagcccaagtactgcctgcccttcctgcagcccggccgcctggtgaaggtgaagaatgaaggagatgactttggctggggcgtggtggtgaacttcagcaagaagagcaatgtgaagcccaacagcggggagctggaccccctgtatgtggtggaggtgctgctgcgctgcagcaaggagagcctgaagaacagcgccacagaggccgccaagccagccaagccagatgagaagggggagatgcaggtggtgcctgtgctggtgcacctgctgagcgccatcagctctgtgcggctgtacatccccaaggacctgcggcctgtggacaaccggcagagcgtgctgaagagcatccaggaggtgcagaagcgcttcccagatggcatccccctgctggaccccattgatgacatgggcatccaggaccagggcctgaagaaggtgatccagaaggtggaggcctttgagcacaggatgtacagccaccccctgcacaatgaccccaacctggagaccgtgtacaccctgtgtgagaagaaggcccagatcgccatcgacatcaagagcgccaagcgggagctgaagaaggccaggacagtgctgcagatggatgagctgaagtgcaggaagagggtgctgcggcggctgggctttgccaccagcagtgatgtgattgagatgaagggccgggtggcctgtgagatcagcagcgcagatgagctgctgctgacagagatgatgttcaacggcctcttcaatgacctgtctgctgagcaggccacagccctgctgagctgctttgtgttccaggagaacagcagcgagatgcccaagctgacagagcagctggccggccccctgcggcagatgcaggagtgtgccaagagaattgccaaggtgtctgctgaggccaagctggagattgatgaggagacctacctgagcagcttcaagccccacctgatggatgtggtgtacacctgggccactggagccacctttgcccacatctgcaagatgacagatgtgtttgagggcagcatcatccgctgcatgaggcggctggaggagctgctgcggcagatgtgccaggccgccaaggccatcggcaacacagagctggagaacaagtttgctgagggcatcaccaagatcaagagggacatcgtgtttgctgccagcctgtacctgtag

SEQ ID NO: 186148 - DNA, 3129 bp, Artificial Sequence
  derived and/or modified sequence
atggccgacgccttcggcgacgagctgttcagcgtgttcgagggcgacagtacaaccgccgcgggcactaaaaaggacaaggagaaggacaaaggcaagtggaagggtcctcccggtagcgcagataaggccggaaagcgctttgatggaaagctgcagagcgaatccaccaataacggcaagaataaacgcgacgtggatttcgaggggacggatgagccaattttcggtaagaaacctagaatcgaggagtcaatcaccgaagacctgagtctcgccgacttgatgcctcgggtgaaagtacagagcgtagagactgtagagggctgcacacacgaagttgcactgccggccgaagaagactacttgccgcttaagcctagagtggggaaagctgccaaagagtacccattcatcctggacgccttccagagggaagcgattcagtgcgtcgataataaccagtctgtcttggtgagcgcgcacacttcggccggcaagaccgtgtgtgcagagtacgcgatcgcactggcacttagggaaaagcagagggtcattttcacaagcccaataaaggctttgtccaatcagaagtaccgggaaatgtatgaggaatttcaggacgtgggacttatgacaggggacgtcaccattaatccgactgcctcctgtctggtgatgacaactgaaatcttaagaagcatgctctataggggatccgaggtgatgcgggaggtggcgtgggtcatcttcgacgagatccactacatgagagatagcgagcggggcgtggtgtgggaggagaccatcattctcctgccagataacgtccattacgttttcctttcagctacgatacctaacgcgaggcagttcgccgaatggatctgccacctgcacaagcagccttgtcacgttatctatacagactacaggccgactcccttacaacactacattttccccgccggaggagacggattgcatctagtcgttgacgagaacggcgattttagagaggataactttaacacagccatgcaggtgctgagagatgcaggggatttggccaaaggggatcaaaaggggcggaaaggtggcacaaaggggccgtctaacgtgttcaagatcgtcaaaatgatcatggagaggaacttccagcctgtgatcatcttcagtttttctaaaaaagactgcgaggcctacgctctgcaaatgaccaagcttgattttaatacagatgaagaaaaaaagatggtcgaggaggtttttagcaacgccattgactgtcttagcgatgaagataagaaactgccgcaagtggaacacgtcctcccacttctcaaacgagggatcggcatccatcacggaggtctgttgcccatccttaaggaaacaattgaaatcttatttagcgagggactcatcaaagcattattcgccactgagacatttgccatgggaatcaacatgcccgcacgaacagtattgtttaccaacgctcgaaaattcgatggaaaggattttaggtggattagcagcggcgagtatattcagatgtccggccgggcaggacgcaggggaatggacgacaggggtatcgtgatcttgatggttgacgaaaaaatgtctcctactatcggtaagcagcttcttaaaggaagtgcagatccgctgaacagtgccttccatctcacctacaacatggtgttaaatctccttcgcgtcgaggaaattaatccagagtatatgctggagaaatctttttatcagttccagcactatcgggccatcccaggggtcgtggaaaaggttaaaaatagtgaagaacagtataataagatcgttattccgaacgaagagtctgtggtcatctactacaagatccgtcagcagctggctaaactgggtaaggagatagaagagtacattcacaaaccaaaatattgcttgcccttcttgcagccaggccgtctcgttaaagtgaagaatgaaggagacgactttggctggggtgtagttgtgaacttcagcaaaaagtcaaatgtcaagcccaactctggcgaactcgacccattgtacgttgtcgaagtcctgctgaggtgttcaaaagagtcactcaagaatagtgccaccgaagcggcgaaaccagctaagcctgacgagaagggcgagatgcaagtcgtgccagtcttggtgcacctgctgtctgccatcagcagtgtccggttatacatccccaaagacctgagaccagtggacaacaggcagagcgtgctgaaaagtatccaagaggtgcagaaacgatttccagatggcatcccactactggatccgatcgatgacatggggatacaggaccaaggcctgaagaaagtgattcaaaaggtggaagccttcgagcacaggatgtactcacaccccctccataacgatcccaacctggaaaccgtttacactctgtgcgagaagaaagcgcaaattgccattgacattaagtcagcaaaacgcgagctgaaaaaggccagaaccgtactgcaaatggatgagctgaaatgtaggaaacgcgttctgaggaggttaggattcgcgacaagctccgacgtgatcgaaatgaaagggagagtggcctgtgagattagttcagcagacgaattattgctgacagagatgatgtttaacggactattcaacgatctctcagccgagcaggccacagccttgctcagctgcttcgtattccaagagaactcttctgagatgcccaaactcacagaacaactggctgggccgcttagacagatgcaagagtgtgcaaaacgcattgccaaggtgagcgcagaagccaagctcgaaatcgatgaggagacctacctgagctccttcaaacctcatttaatggacgtcgtgtacacctgggctaccggcgctacatttgctcacatttgtaagatgaccgatgtgtttgaaggtagtatcattagatgtatgaggagactggaggagctgctgaggcagatgtgccaagcagcaaaagctatcggaaacaccgagttggagaacaaatttgctgagggcataaccaagattaaaagggacatcgtctttgcagcctcactgtacctatag

SEQ ID NO: 186149 - DNA, 3129 bp, Artificial Sequence
  derived and/or modified sequence
atggctgacgcattcggggacgaactattctctgtgttcgaaggagacagcactacggctgccggaacaaaaaaggacaaagaaaaggataagggaaaatggaaagggccaccaggcagtgctgacaaggccggaaaacggttcgacggaaaattgcaatctgaaagtaccaataacggaaagaataagcgcgacgtggactttgaaggtactgacgaaccaatattcggtaagaaaccaagaatcgaggaaagtataaccgaggacctttcattggctgacctcatgcccagagttaaggtgcagagcgtcgaaactgtcgaaggatgcacccacgaagtcgcactgccagcagaggaagattacctacctttgaagccaagggtgggaaaggcagccaaagagtaccccttcatactggatgcattccagcgggaagctatccaatgtgtagacaacaatcaaagcgtattggtgtctgcacataccagtgctggtaaaactgtttgcgctgaatacgcaatagccttagcgctcagagaaaagcagagagtcatattcacgagcccaatcaaggctctatcaaatcagaaatatcgggagatgtacgaggaatttcaggacgtcgggcttatgacgggggacgtgacaattaaccccaccgccagttgtcttgtgatgaccacagagattctgcggagcatgttgtatagaggaagtgaggtgatgcgcgaggttgcttgggttatcttcgacgaaatccactatatgcgcgactccgaaagaggcgtggtgtgggaagagacaattattcttttgcctgataatgttcactacgtgttcctctctgccacaattcctaacgcaaggcagttcgccgagtggatatgccaccttcacaaacagccgtgccatgtgatctacacagactacaggccaacccctctacagcattacattttccctgcgggtggcgacggcttgcacctggtggtcgacgaaaatggtgatttcagagaagacaacttcaacacagctatgcaagtgcttagagatgccggagacctcgctaaaggagaccagaaagggagaaaaggcggtacaaaggggccaagtaacgtatttaaaatagtgaagatgatcatggaacggaatttccagccagtgattatcttctcttttagcaagaaggattgtgaggcctacgctctgcagatgactaaactggactttaataccgacgaggagaaaaaaatggtggaagaggtcttctctaatgcaattgactgtctatctgacgaggacaaaaagctgccccaagtagagcacgttcttccactgcttaaaagaggcatcggtattcatcacggagggctcctgcctatcctgaaggaaactattgagattttgttcagcgagggtctcataaaagcactattcgccactgagaccttcgcgatgggaattaacatgcctgccagaaccgttttatttacaaatgcacgaaagtttgacggcaaggatttccgctggatcagtagcggtgagtatattcagatgagcggacgtgcagggcgacgaggcatggacgacaggggaatcgtcatactcatggtggacgagaagatgtcccctaccattgggaagcagctccttaaaggcagtgcagatcccctcaattctgccttccaccttacctacaatatggtactcaatcttctgcgggtagaagaaattaatcctgagtacatgctagaaaagagcttctaccaatttcagcattatagagcaattcctggcgtggtggaaaaggtcaaaaactcagaggaacaatacaataagattgttatcccgaatgaagagagcgtggttatatattacaagattagacaacaactggcaaaattaggcaaagagatcgaagaatatatccacaagcctaagtattgtctgcctttcctccagcccggaagactggtgaaagtgaagaacgagggagacgattttgggtggggagtggtcgtcaatttttcaaaaaagagcaatgtaaagcccaattctggggaactcgacccgttgtacgtggttgaggtcctgctcagatgttctaaggagtcactcaaaaacagtgctacggaggccgcaaagcccgcaaagcctgatgagaagggagagatgcaagtggtcccagttctagtgcaccttttatccgcaatatcgtccgtgcgtctatatatccctaaggatcttagacccgttgataatcggcagagcgtgctgaaatccattcaagaggtgcagaagaggttccctgacggtattcctctgctggatccaatcgacgacatgggcatacaagaccaaggacttaagaaagtaattcaaaaggtggaagccttcgagcataggatgtattcccatcctctccataatgaccccaacttggagaccgtctacaccctctgcgaaaagaaagcccagatagcgatcgacataaaaagtgccaagcgggaactcaagaaagcgaggaccgtcctgcagatggatgagctgaagtgccgtaaacgtgtgttacgcaggctgggcttcgcaaccagtagcgacgttatcgagatgaagggcagggtggcctgcgagataagttctgccgacgaactgttgttaaccgagatgatgttcaatggactctttaatgacctgagcgctgagcaagccacagctctcctctcgtgctttgtcttccaggagaactccagtgaaatgcctaaattgactgaacagctggccggtccactgaggcagatgcaagagtgcgcaaaaaggattgcgaaggtatcagccgaggccaagctagagatagacgaggaaacttatctcagctcgttcaagccacacttgatggatgtagtgtacacgtgggcaaccggcgcaacttttgcccatatctgtaaaatgaccgatgtctttgagggcagcataattagatgtatgagaagacttgaggaactactaaggcagatgtgccaggctgcgaaggctatcggaaacaccgaacttgagaataagtttgcagaaggaattaccaaaatcaaacgcgacattgtctttgccgctagcttatacctctag

SEQ ID NO: 186150 - DNA, 3129 bp, Artificial Sequence
  derived and/or modified sequence
atggccgacgccttcggcgacgagctgttcagcgtgttcgagggcgacagcaccaccgccgccggcaccaagaaggacaaggagaaggacaagggcaagtggaagggcccccccggcagcgccgacaaggccggcaagagattcgacggcaagctgcagagcgagagcaccaacaacggcaagaacaagagagacgtggacttcgagggcaccgacgagcccatcttcggcaagaagcccagaatcgaggagagcatcaccgaggacctgagcctggccgacctgatgcccagagtgaaggtgcagagcgtggagaccgtggagggctgcacccacgaggtggccctgcccgccgaggaggactacctgcccctgaagcccagagtgggcaaggccgccaaggagtaccccttcatcctggacgccttccagagagaggccatccagtgcgtggacaacaaccagagcgtgctggtgagcgcccacaccagcgccggcaagaccgtgtgcgccgagtacgccatcgccctggccctgagagagaagcagagagtgatcttcaccagccccatcaaggccctgagcaaccagaagtacagagagatgtacgaggagttccaggacgtgggcctgatgaccggcgacgtgaccatcaaccccaccgccagctgcctggtgatgaccaccgagatcctgagaagcatgctgtacagaggcagcgaggtgatgagagaggtggcctgggtgatcttcgacgagatccactacatgagagacagcgagagaggcgtggtgtgggaggagaccatcatcctgctgcccgacaacgtgcactacgtgttcctgagcgccaccatccccaacgccagacagttcgccgagtggatctgccacctgcacaagcagccctgccacgtgatctacaccgactacagacccacccccctgcagcactacatcttccccgccggcggcgacggcctgcacctggtggtggacgagaacggcgacttcagagaggacaacttcaacaccgccatgcaggtgctgagagacgccggcgacctggccaagggcgaccagaagggcagaaagggcggcaccaagggccccagcaacgtgttcaagatcgtgaagatgatcatggagagaaacttccagcccgtgatcatcttcagcttcagcaagaaggactgcgaggcctacgccctgcagatgaccaagctggacttcaacaccgacgaggagaagaagatggtggaggaggtgttcagcaacgccatcgactgcctgagcgacgaggacaagaagctgccccaggtggagcacgtgctgcccctgctgaagagaggcatcggcatccaccacggcggcctgctgcccatcctgaaggagaccatcgagatcctgttcagcgagggcctgatcaaggccctgttcgccaccgagaccttcgccatgggcatcaacatgcccgccagaaccgtgctgttcaccaacgccagaaagttcgacggcaaggacttcagatggatcagcagcggcgagtacatccagatgagcggcagagccggcagaagaggcatggacgacagaggcatcgtgatcctgatggtggacgagaagatgagccccaccatcggcaagcagctgctgaagggcagcgccgaccccctgaacagcgccttccacctgacctacaacatggtgctgaacctgctgagagtggaggagatcaaccccgagtacatgctggagaagagcttctaccagttccagcactacagagccatccccggcgtggtggagaaggtgaagaacagcgaggagcagtacaacaagatcgtgatccccaacgaggagagcgtggtgatctactacaagatcagacagcagctggccaagctgggcaaggagatcgaggagtacatccacaagcccaagtactgcctgcccttcctgcagcccggcagactggtgaaggtgaagaacgagggcgacgacttcggctggggcgtggtggtgaacttcagcaagaagagcaacgtgaagcccaacagcggcgagctggaccccctgtacgtggtggaggtgctgctgagatgcagcaaggagagcctgaagaacagcgccaccgaggccgccaagcccgccaagcccgacgagaagggcgagatgcaggtggtgcccgtgctggtgcacctgctgagcgccatcagcagcgtgagactgtacatccccaaggacctgagacccgtggacaacagacagagcgtgctgaagagcatccaggaggtgcagaagagattccccgacggcatccccctgctggaccccatcgacgacatgggcatccaggaccagggcctgaagaaggtgatccagaaggtggaggccttcgagcacagaatgtacagccaccccctgcacaacgaccccaacctggagaccgtgtacaccctgtgcgagaagaaggcccagatcgccatcgacatcaagagcgccaagagagagctgaagaaggccagaaccgtgctgcagatggacgagctgaagtgcagaaagagagtgctgagaagactgggcttcgccaccagcagcgacgtgatcgagatgaagggcagagtggcctgcgagatcagcagcgccgacgagctgctgctgaccgagatgatgttcaacggcctgttcaacgacctgagcgccgagcaggccaccgccctgctgagctgcttcgtgttccaggagaacagcagcgagatgcccaagctgaccgagcagctggccggccccctgagacagatgcaggagtgcgccaagagaatcgccaaggtgagcgccgaggccaagctggagatcgacgaggagacctacctgagcagcttcaagccccacctgatggacgtggtgtacacctgggccaccggcgccaccttcgcccacatctgcaagatgaccgacgtgttcgagggcagcatcatcagatgcatgagaagactggaggagctgctgagacagatgtgccaggccgccaaggccatcggcaacaccgagctggagaacaagttcgccgagggcatcaccaagatcaagagagacatcgtgttcgccgccagcctgtacctgtag

SEQ ID NO: 186151 - protein, 1099 aa, Artificial Sequence
  derived and/or modified sequence
MRMSDTVTVKDETATMKDLEAEVKDTTRVENLIKSENYGKILVEKNEHCIENNIDLQRPLQSFGQTGKRSKSSSKLKLVRSLAVCEESPPPPAPEISQENQEKIQIQLTQSFEKEEKPSKDEAEKEKASDKLPRKMLSRDSSQEYTDSTGIDLHEFLVNTLKNNPRDRMMLLKLEQEILDFIGNNESPRKKFPPMTSYHRMLLHRVAAYFGLDHNVDQSGKSVIVNKTSNTRIPDQKFNEHIKDDKGEDFQKRYILKRDNSSFDKDDNQMRIRLKDDRRSKSIEEREEEYQRARDRIFSQDSLCSQENYIIDKRLQDEDASSTQQRRQIFRVNKDASGRSTNSHQSSTENELKYSEPRPWSSTDSDSSLRNLKPAVTKASSFSGISVLTRGDSSGSSKSIGRLSKTGSESSGSVGSSTGSLSHIQQPLPGTALSQSSHGAPVVYPTVSTHSSLSFDGGLNGQVASPSTSFFLLPLEAAGIPPGSILINPQTGQPFINPDGSPVVYNPPMTQQPVRSQVPGPPQPPLPAPPQQPAANHIFSQDNLGSQFSHMSLARQPSADGSDPHAAMFQSTVVLQSPQQSGYIMTAAPPPHPPPPPPPPPPPPPLPPGQPVPTAGYPASGHPVSQPVLQQQGYIQQPSPQMPACYCAPGHYHSSQPQYRPVPSVHYNSHLNQPLPQPAQQTGYQVIPNQQQNYQGIVGVQQPQSQSLVSGQPNSIGNQIQGVVIPYTSVPTYQVSLPQGSQGIPHQTYQQPVMFPNQSNQGSMPTTGMPVYYSVIPPGQQNNLSSSVGYLQHPGSEQVQFPRTTSPCSSQQLQGHQCTAGPPPPPGGGMVMMQLSVPNNPQSCAHSPPQWKQNKYYCDHQRGQKCVEFSSVDNIVQHSPQLSSPIISPAQSPAPAQLSTLKTVRPSGPPLSIMPQFSRPFVPGQGDSRYPLLGQPLQYNPPAVLHGHIPNQQGQPGSRHGNRGRRQAKKAASTDLGAGETVVGKVLEITELPDGITRMEAEKLFGELFKIGAKIRWLRDPQSQPRRHPLCCGSGDNTANPERSKPSDLASTYTVLATFPSISAAQNALKKQINSVNKFKLRTSKKHYDFHILERASSQ

SEQ ID NO: 186152 - DNA, 3300 bp, Artificial Sequence
  derived and/or modified sequence
atgagaatgagcgacaccgtgaccgtgaaggacgagaccgccaccatgaaggacctggaggccgaggtgaaggacaccaccagagtggagaacctgatcaagagcgagaactacggcaagatcctggtggagaagaacgagcactgcatcgagaacaacatcgacctgcagagacccctgcagagcttcggccagaccggcaagagaagcaagagcagcagcaagctgaagctggtgagaagcctggccgtgtgcgaggagagcccccccccccccgcccccgagatcagccaggagaaccaggagaagatccagatccagctgacccagagcttcgagaaggaggagaagcccagcaaggacgaggccgagaaggagaaggccagcgacaagctgcccagaaagatgctgagcagagacagcagccaggagtacaccgacagcaccggcatcgacctgcacgagttcctggtgaacaccctgaagaacaaccccagagacagaatgatgctgctgaagctggagcaggagatcctggacttcatcggcaacaacgagagccccagaaagaagttcccccccatgaccagctaccacagaatgctgctgcacagagtggccgcctacttcggcctggaccacaacgtggaccagagcggcaagagcgtgatcgtgaacaagaccagcaacaccagaatccccgaccagaagttcaacgagcacatcaaggacgacaagggcgaggacttccagaagagatacatcctgaagagagacaacagcagcttcgacaaggacgacaaccagatgagaatcagactgaaggacgacagaagaagcaagagcatcgaggagagagaggaggagtaccagagagccagagacagaatcttcagccaggacagcctgtgcagccaggagaactacatcatcgacaagagactgcaggacgaggacgccagcagcacccagcagagaagacagatcttcagagtgaacaaggacgccagcggcagaagcaccaacagccaccagagcagcaccgagaacgagctgaagtacagcgagcccagaccctggagcagcaccgacagcgacagcagcctgagaaacctgaagcccgccgtgaccaaggccagcagcttcagcggcatcagcgtgctgaccagaggcgacagcagcggcagcagcaagagcatcggcagactgagcaagaccggcagcgagagcagcggcagcgtgggcagcagcaccggcagcctgagccacatccagcagcccctgcccggcaccgccctgagccagagcagccacggcgcccccgtggtgtaccccaccgtgagcacccacagcagcctgagcttcgacggcggcctgaacggccaggtggccagccccagcaccagcttcttcctgctgcccctggaggccgccggcatcccccccggcagcatcctgatcaacccccagaccggccagcccttcatcaaccccgacggcagccccgtggtgtacaacccccccatgacccagcagcccgtgagaagccaggtgcccggccccccccagccccccctgcccgcccccccccagcagcccgccgccaaccacatcttcagccaggacaacctgggcagccagttcagccacatgagcctggccagacagcccagcgccgacggcagcgacccccacgccgccatgttccagagcaccgtggtgctgcagagcccccagcagagcggctacatcatgaccgccgccccccccccccaccccccccccccccccccccccccccccccccccccccccctgccccccggccagcccgtgcccaccgccggctaccccgccagcggccaccccgtgagccagcccgtgctgcagcagcagggctacatccagcagcccagcccccagatgcccgcctgctactgcgcccccggccactaccacagcagccagccccagtacagacccgtgcccagcgtgcactacaacagccacctgaaccagcccctgccccagcccgcccagcagaccggctaccaggtgatccccaaccagcagcagaactaccagggcatcgtgggcgtgcagcagccccagagccagagcctggtgagcggccagcccaacagcatcggcaaccagatccagggcgtggtgatcccctacaccagcgtgcccacctaccaggtgagcctgccccagggcagccagggcatcccccaccagacctaccagcagcccgtgatgttccccaaccagagcaaccagggcagcatgcccaccaccggcatgcccgtgtactacagcgtgatcccccccggccagcagaacaacctgagcagcagcgtgggctacctgcagcaccccggcagcgagcaggtgcagttccccagaaccaccagcccctgcagcagccagcagctgcagggccaccagtgcaccgccggccccccccccccccccggcggcggcatggtgatgatgcagctgagcgtgcccaacaacccccagagctgcgcccacagccccccccagtggaagcagaacaagtactactgcgaccaccagagaggccagaagtgcgtggagttcagcagcgtggacaacatcgtgcagcacagcccccagctgagcagccccatcatcagccccgcccagagccccgcccccgcccagctgagcaccctgaagaccgtgagacccagcggcccccccctgagcatcatgccccagttcagcagacccttcgtgcccggccagggcgacagcagataccccctgctgggccagcccctgcagtacaacccccccgccgtgctgcacggccacatccccaaccagcagggccagcccggcagcagacacggcaacagaggcagaagacaggccaagaaggccgccagcaccgacctgggcgccggcgagaccgtggtgggcaaggtgctggagatcaccgagctgcccgacggcatcaccagaatggaggccgagaagctgttcggcgagctgttcaagatcggcgccaagatcagatggctgagagacccccagagccagcccagaagacaccccctgtgctgcggcagcggcgacaacaccgccaaccccgagagaagcaagcccagcgacctggccagcacctacaccgtgctggccaccttccccagcatcagcgccgcccagaacgccctgaagaagcagatcaacagcgtgaacaagttcaagctgagaaccagcaagaagcactacgacttccacatcctggagagagccagcagccagtag

SEQ ID NO: 186153 - DNA, 3300 bp, Artificial Sequence
  derived and/or modified sequence
atgcgcatgagcgacaccgtgacagtgaaagacgaaaccgctaccatgaaggacctggaggcagaggtgaaagacaccacacgggtggagaacttaataaagtccgaaaactacggcaagattctcgtggagaagaacgaacactgtattgaaaataacatcgatcttcagcgccctctgcagagctttggacagaccggcaagagatccaaatcttcgagcaagctgaagctggtgcgcagcctggccgtttgtgaggagagtcccccacccccggctcccgaaatcagccaggaaaaccaggagaaaatccagattcagctgacccagtcctttgagaaggaggagaagccctctaaggatgaagcagagaaagagaaggcttcggataagctgccacgcaagatgctgtccagggactcctctcaagaatataccgactccacaggcatagacctgcacgagttcctggtgaataccctcaagaataatcctcgggacagaatgatgctgctgaagctagagcaggagatacttgatttcattggcaataatgagtctccaagaaaaaagttcccacccatgacttcctaccatcgaatgctactgcaccgcgtggctgcttacttcggcctggaccacaatgtcgatcagtccggcaagagcgttattgtgaacaaaacaagtaatacccggatcccggaccagaagttcaacgagcatattaaggatgacaaaggggaagattttcagaaaagatatatacttaaacgggataatagttccttcgataaggatgataaccaaatgagaatccgtcttaaggacgatcgccggtccaaatccattgaagaacgtgaggaagagtaccagagagcgcgggataggatttttagtcaagactctttgtgcagtcaggagaactacattatcgataaaaggctacaggacgaggacgctagctccacccagcagagacgtcaaatctttagagtcaacaaggacgcatccggcaggagcaccaattcccaccagagctctaccgagaatgaactcaaatatagcgagccacgaccgtggtctagcactgactccgactcctctttgaggaatcttaagccagctgttacgaaggccagttctttctcaggcattagtgtcttaactagaggcgactcctcaggctccagcaaaagcattggacgattgagcaagaccggatctgagtcttccggatcggtgggaagttccactgggagtctgtctcacatccagcaaccacttccgggaactgcgctcagccagtcttctcacggggcaccggtggtttaccccacggtgagcactcattcctctcttagcttcgatggagggctcaatggccaggtggcttctccttccacatccttctttctgttgccactggaggccgccggtattcccccaggcagtattttaattaatcctcagacgggccagcccttcataaacccggatgggagtcccgtggtatacaatcctccaatgacccagcaacccgtgcgaagccaagtgcctgggcctccccagccacccctgcccgcacctcctcagcaaccagcggctaaccatatttttagccaggacaatctgggttctcaatttagccatatgtcactcgctagacagccgtcggcggatgggtctgatccacatgcagccatgtttcaaagcactgtggtgctgcaatccccacagcagtcagggtatattatgacggccgcccctccaccgcacccgccaccaccaccaccacctcccccgcctcccccccccctcccacccggacagcccgttcccacagccgggtatcccgccagcggccacccagtttctcagcccgtgctccaacaacagggctatatccagcagccctccccccaaatgcccgcctgttactgcgcccccgggcactaccacagctcacagcctcagtataggcccgtgcctagcgttcactataatagccacctcaaccagcccctgccacaacccgctcagcagaccggttatcaggtcatccccaatcagcagcagaattatcaaggcatagtaggagtacagcagcctcagtcccagagtctagttagcgggcaacctaactcaattggcaatcagatccagggagtcgtcatcccttataccagcgttccaacctaccaggtttctctcccccaggggtcccaaggcatccctcaccagacgtaccagcagcctgtcatgtttcccaatcagagcaatcagggcagcatgccgactacgggcatgcctgtttattacagtgtcatcccacccggacagcagaacaatctctcaagttctgttggctatctgcagcacccagggtctgaacaagtccaatttccccgcactaccagcccttgttcttcccagcagctgcagggccaccaatgtaccgcgggaccacctccccctcccggcggggggatggtgatgatgcagctgagcgtgcccaacaacccacagagttgcgctcactcccccccacagtggaagcagaacaaatactattgcgatcaccagcgcggacagaagtgcgtcgaattttcttctgtcgataacatcgtccagcacagcccccagctcagtagcccaattatcagtcctgcccagtcccctgccccagctcaactgtccacattaaagactgtgcggccaagtgggccccccctgagcattatgcctcagttcagccggcccttcgttcccggtcagggggacagtcggtaccctctccttggccagccccttcagtacaatccaccagccgtcctccacgggcacatccctaatcagcagggccaacccggaagtagacacggtaacaggggacgcagacaagctaaaaaggccgcttcgacggacttaggggccggagagacagtggtgggaaaagttctcgaaattactgagctcccagatggcattactcgcatggaggccgagaagctattcggtgagctgtttaagattggcgcaaagatcaggtggcttagggatccgcagagccagcccagaagacaccctctctgctgtgggtccggagacaatactgcaaaccctgaacgctccaaaccctctgacttggcgagcacctacaccgtcctggcgacctttcctagtattagcgctgcccaaaacgccctgaagaaacagatcaacagcgtgaataaatttaagctgaggacatctaagaaacactatgactttcatatcctggaacgtgctagctctcaatag

SEQ ID NO: 186154 - DNA, 3300 bp, Artificial Sequence
  derived and/or modified sequence
atgaggatgtctgacacagtgacagtgaaggatgaaacagccaccatgaaggacctggaggccgaggtgaaggacaccaccagggtggagaacctgatcaagtctgagaactacggcaagatcctggtggagaagaatgagcactgcatcgagaacaacatcgacctgcagaggcccctgcagagctttggccagacaggcaagaggagcaagagcagcagcaagctgaagctggtgcgcagcctggccgtgtgtgaggagagccccccacctccagcccctgagatcagccaggagaaccaggagaagatccagatccagctgacccagagctttgagaaggaggagaagcccagcaaggatgaagctgagaaggagaaggccagtgacaagctgcccaggaagatgctgagccgggacagcagccaggagtacacagacagcactggaattgacctgcacgagttcctggtgaacaccctgaagaacaacccccgggacaggatgatgctgctgaagctggagcaggagatcctggacttcatcggcaacaatgaaagccccaggaagaagtttcctcccatgaccagctaccacaggatgctgctgcaccgggtggccgcctacttcggcctggaccacaacgtggaccagagcggcaagagcgtcatcgtgaacaagaccagcaacacccgcatcccagaccagaagttcaatgagcacatcaaggatgacaagggggaggacttccagaagcgctacatcctgaagagggacaacagcagctttgacaaggatgacaaccagatgaggatccggctgaaggatgaccggcgcagcaagagcattgaggagcgggaggaggagtaccagagggcccgggaccgcatcttcagccaggacagcctgtgcagccaggagaactacatcatcgacaagaggctgcaggatgaagatgccagcagcacccagcagaggcggcagatcttccgggtgaacaaggatgccagcggccgcagcaccaacagccaccagagcagcacagaaaatgagctgaagtacagcgagccccggccctggagcagcacagacagcgacagcagcctgaggaacctgaagccagctgtgaccaaggccagcagcttcagcggcatctctgtgctgaccaggggggacagcagcggcagcagcaagagcatcggccgcctgagcaagacaggcagcgagagcagcggctctgtgggcagcagcacaggcagcctgagccacatccagcagcccctgcctggaacagccctgagccagagcagccacggggcccctgtggtgtaccccaccgtgtccacccacagcagcctgagctttgatggcggcctgaatggccaggtggccagccccagcaccagcttcttcctgctgcccctggaggccgccggcatccccccaggcagcatcctgatcaacccccagacaggccagcccttcatcaacccagatggcagccctgtggtgtacaacccccccatgacccagcagcctgtgcgcagccaggtgcccggccccccccagccccccctgcctgccccaccccagcagcctgctgccaaccacatcttcagccaggacaacctgggcagccagttcagccacatgagcctggcccggcagcccagcgcagatggcagtgacccccacgccgccatgttccagagcacagtggtgctgcagagcccccagcagagcggctacatcatgacagctgcccccccaccccaccccccacctcctcctcctcctcctcctcctcctccacccctgcccccaggccagcctgtgcccacagctggctacccagccagcggccaccctgtgtcccagcctgtgctgcagcagcagggctacatccagcagcccagcccccagatgcctgcctgctactgtgcccctggccactaccacagcagccagccccagtacagacctgtgcccagcgtgcactacaacagccacctgaaccagcccctgccccagcctgcccagcagacaggctaccaggtgatccccaaccagcagcagaactaccagggcatcgtgggcgtgcagcagccccagagccagagcctggtgtctggccagcccaacagcatcggcaaccagatccagggcgtggtgatcccctacacctctgtgcccacctaccaggtgtccctgccccagggcagccagggcatcccccaccagacctaccagcagcctgtgatgttccccaaccagagcaaccagggctccatgcccaccaccggcatgcctgtgtactacagcgtcatccccccaggccagcagaacaacctgagcagctctgtgggctacctgcagcaccctggcagcgagcaggtgcagttccccaggaccaccagcccctgcagcagccagcagctgcagggccaccagtgcacagctggccccccacctcctcctgggggcggcatggtgatgatgcagctgtctgtgcccaacaacccccagagctgtgcccacagccccccccagtggaagcagaacaagtactactgtgaccaccagaggggccagaagtgtgtggagttcagctctgtggacaacatcgtgcagcacagcccccagctgagcagccccatcatcagccctgcccagagccctgccccagcccagctgagcaccctgaagacagtgcggcccagcggcccccccctgagcatcatgccccagttcagccggccctttgtgcccggccagggcgacagccgctaccccctgctgggccagcccctgcagtacaaccccccagctgtgctgcacggccacatccccaaccagcagggccagcccggcagccgccacggcaacagaggaagacggcaggccaagaaggccgccagcacagacctgggcgctggggagaccgtggtgggcaaggtgctggagatcacagagctgcctgatggcatcaccaggatggaggccgagaagctgtttggagagctgttcaagattggagccaagatccgctggctgcgggacccccagagccagccccggcggcaccccctgtgctgcggcagcggggacaacacagccaaccctgagaggagcaagcccagcgacctggccagcacctacacagtgctggccaccttccccagcatctctgctgcccagaatgccctgaagaagcagatcaacagcgtgaacaagttcaagctgcggaccagcaagaagcactatgacttccacatcctggagcgggccagcagccagtag

SEQ ID NO: 186155 - DNA, 3300 bp, Artificial Sequence
  derived and/or modified sequence
atgcggatgagcgacaccgtgaccgtgaaggacgagaccgccaccatgaaggatctggaggctgaggtaaaggacaccactcgcgttgagaacctgataaagagtgagaactacgggaagatccttgttgaaaagaatgaacattgtattgaaaacaacatcgaccttcagcggcctctgcagtcctttggccagactggaaagaggtcaaagtcatcctcaaaactgaagcttgtgcgatccttggctgtttgtgaggagtcccctccccctcctgcccctgagatctctcaggaaaatcaggagaagatacagattcagttgactcagagcttcgagaaagaggaaaagccttcaaaggacgaggcagagaaggagaaggcctccgataaactgcccaggaagatgctatcacgggattcttcacaggaatacacggactccacaggaatagacctgcacgaattcctggtgaacacgctaaagaataatccccgggaccgaatgatgctgctcaagctcgagcaggagatcctggattttattggtaataacgaatctccacggaagaagttccctcccatgacaagctaccataggatgctgctccacagagtggccgcttatttcggcttggatcacaatgtggatcaatctggaaaaagcgttatcgtgaataaaacaagcaacacacgaatccctgaccaaaagttcaatgaacatattaaagatgacaagggggaagatttccaaaagcgctatatacttaagcgcgataactctagcttcgacaaagatgataatcagatgcggatccgcctgaaggacgaccgacgaagcaaaagtatagaagagagggaggaagagtaccagagggcccgcgaccggatcttcagtcaggactctctttgttcccaggagaattatatcatcgacaagcgcctgcaagatgaagatgcctcaagtacccagcagagacgacagatcttccgagtcaataaagacgcgtcggggaggtcaaccaattctcatcagtcaagtaccgaaaatgagctcaaatattccgaacccaggccctggtcttcaacggacagcgactcatctttgagaaatttgaagccggccgtgacaaaggcctctagcttttcggggatctcagtgttaacaaggggggactcctcggggtccagtaagagcatcggccgcctttcgaagacagggtcagaatctagtggatctgttggcagctctacgggtagcctgtcccacattcagcagccccttccaggaacagcactgagccagagctcccatggtgctccagtcgtttacccaacagtgtctacacatagctccttgtcgttcgacgggggactgaatggacaggtggcttcgccctcaacttcattcttcctcctgcccctggaagcagccgggattccaccaggaagtattcttataaatccgcaaaccgggcagccctttatcaatcccgatggaagtcctgtggtttacaatccgcctatgacccagcagccagtgcggtcacaggtgcccgggccaccacaacctccacttccagcaccgcctcagcagcccgcggccaaccatattttctcgcaagataatctgggttcccagttcagtcacatgtccctggccaggcagccgtctgccgatggaagcgatcctcatgccgcaatgtttcaatcaacggttgtacttcaatcgccgcagcagagcggctacatcatgactgcagctccccctcctcacccccctccacctccacccccacctcctcctccccctcccctcccacccggccagcccgttccgaccgctggctaccctgcgagcggccacccggtttctcagccagtcctccagcaacaagggtacatccagcaaccttcgcctcagatgccagcgtgctattgtgccccagggcactatcactcatctcagcctcagtataggcctgtccctagtgtgcactacaattcacaccttaaccagcccttgccccagccagcccagcagaccggatatcaggtcatacccaaccagcagcagaattatcagggcatcgttggggtccagcagccacagtcacaaagccttgtgtccgggcagcccaactccataggtaaccaaattcagggagtggttataccctatacttccgttcccacctatcaggtgtcccttccacaagggagtcagggcatcccccatcagacgtaccagcaacccgtgatgtttcccaatcagagtaatcagggaagcatgcccacaacggggatgccggtttattactccgtcatccctcccggccaacagaacaacctatcttcaagcgtgggatacctccagcatcccggtagcgaacaggtgcaatttccaaggacaaccagcccctgctccagccaacaactgcaaggccatcagtgtaccgctggaccaccacctccccctggtggcggaatggttatgatgcagctgagtgttccgaacaatccacaatcctgtgctcattcacctccacaatggaaacaaaataagtactactgcgatcaccagaggggccagaaatgtgtcgaattctctagtgtggataatattgtccagcacagcccacaactcagtagccccattatttctcccgcccagtctccagctcctgctcagctgtccactctgaaaaccgtgcggcccagcggcccaccgctgagcatcatgcctcagttttcccggcctttcgtaccaggtcagggtgattcccgctacccccttctgggccagccactgcagtacaacccacccgccgttctacatggccacatcccaaaccaacagggccagcctgggagcagacatgggaatcgcgggcgccgccaagccaagaaggctgccagtacagacctcggagccggagagacagtcgtagggaaggtgctggagatcacggagctgccagacgggatcacacggatggaggctgagaaactgttcggtgagctgtttaaaataggagccaaaatccgttggctaagagacccacaatcccagcctcggcggcaccccctctgctgcgggtctggcgataatactgcgaaccccgagcgaagcaagccaagcgacctggcatccacatataccgttctagccacatttccaagtatttctgcagcacagaatgccctgaagaaacagataaattcagtcaataaattcaaattacggacctccaagaaacattatgatttccacatcctcgagcgtgcatcctcccagtag

SEQ ID NO: 186156 - DNA, 3300 bp, Artificial Sequence
  derived and/or modified sequence
atgaggatgtccgatacagtgacagttaaggacgagactgccacgatgaaggatctcgaggctgaggtcaaggacactacaagggtagaaaatctcatcaaaagcgaaaattacggcaaaatcttggtggaaaaaaatgaacactgcatcgaaaacaacatcgatctgcagcggccactgcaatctttcggtcagacaggcaagaggagtaaatcttcctctaaactgaaactcgttaggagtctcgctgtttgcgaagagagcccccctccccctgcccctgagatttcacaggagaatcaggaaaagatccagattcagttgactcagtccttcgaaaaggaggagaagccgtctaaggacgaagctgaaaaagaaaaggcatccgacaaactcccaaggaagatgttgtctagagacagcagccaggaatacacggacagcaccggcatcgacctgcatgaatttctggtcaacactctcaagaacaaccctagggataggatgatgttgctgaaattggagcaggagatccttgattttatcggtaataacgagagccccagaaagaagttcccacctatgactagctatcacagaatgttgttacatagagtggcggcttactttggcctggatcacaacgtggatcagagcggtaagagcgtgatagtaaataaaacttcaaatactaggatccctgaccagaaattcaatgaacatataaaggatgacaaaggggaggatttccagaagaggtacattctgaagcgcgacaactcatcttttgacaaggacgacaaccagatgcgcattcgcctgaaggacgataggcgaagtaagagcatcgaggaaagagaggaggagtaccagcgcgcacgggaccgtatcttcagccaggattcactgtgcagccaagagaattatataatcgacaagagactgcaagacgaagacgcctccagcacgcagcaaaggaggcaaattttccgggtcaacaaagacgcttccgggagatcaacgaacagtcatcagtcctcgacagagaatgagctcaaatattcagaaccccgtccctggtcctctaccgatagtgatagcagcttgaggaatttaaagccggcagttaccaaagcctcatccttctctggcatttccgtactgacccgcggtgacagtagtgggagctctaaatcaatagggagattgagcaagaccggatctgagagttctggctccgtcggctcatctacaggctctctgtcccacatccaacagcccctgccgggtaccgcactctcacagagtagtcacggggctcccgtagtgtaccccacagtctccactcactcctccctctccttcgacggagggctgaacgggcaagtcgccagccccagtacttcgttcttcctgttgcctcttgaggctgccggaatccctcctgggagcatccttataaaccctcaaactggtcagccatttattaacccggacgggtcaccagttgtgtataaccccccaatgacccagcagcccgttcgcagccaagtgcctgggcctccccaacctcctcttcccgcacccccacagcaacctgctgctaaccatattttcagccaggataatctggggtctcagttcagtcacatgtccttggcgcgacagcccagcgccgacggatctgatcctcacgccgcaatgttccagtcaaccgttgtcctacaaagtccacaacagagcgggtacattatgacagcagcacccccaccccaccccccaccccctccaccaccaccgccacccccaccaccgttgcctcctgggcagcccgtgcccacagccggatatccagcctccggccatcccgtatctcagccagtgttgcagcaacaaggttatattcaacagccgagccctcagatgccagcttgctactgcgctcccggtcactaccactcatcacaaccccaatacagacccgtaccgtctgtccattataattcccatttgaaccaacccctcccacaacctgcccagcagactggctaccaagttattcctaatcagcagcagaattaccaaggaatcgtgggcgtgcaacagcctcagtcccaatcccttgttagcggccagcctaattccatcggaaaccagatacagggtgtggtgatcccctacacatcagtccctacatatcaagtgagcttgcctcagggcagccaagggatcccgcatcagacttatcagcagccagttatgttccctaaccaatcaaatcagggtagtatgccaacaaccgggatgcctgtgtattacagcgtcattccacccggtcagcagaacaacttgtctagctcagtgggatacctccagcacccaggttccgaacaggtgcaatttccacgaacaacgagcccttgctccagccaacagctgcagggccatcaatgtactgctgggcctccccctccacctgggggtggtatggtcatgatgcagttaagcgtgcctaacaatcctcagagctgtgcccactctccgcctcagtggaagcaaaataaatactattgcgaccaccagcgcggacagaaatgtgtcgagttttctagtgtggacaacatcgtacagcattcacctcaactgagcagcccaatcatatcccccgcacagagccctgcccctgcccagctgagtacactcaaaacggtgcggccatctgggcctcctctgtcaattatgccccagttctctcgcccattcgtccctggccagggggactctaggtatccactgttaggacagccacttcagtacaaccctccagctgtgctgcacgggcatatcccaaaccagcagggccagcccggtagcagacacggcaaccgcggacgtcggcaggccaagaaagctgccagcacagatctcggggcaggagagactgtcgtggggaaggtgctggagattacagaactaccagatggcattacacggatggaggccgagaagttgtttggagagcttttcaaaatcggcgcaaagattagatggctccgtgacccacagtcccaaccacgcaggcaccccctgtgctgcggctccggggataacacggcaaatcctgaacgtagcaagcctagcgatcttgcctcaacctatacggtactggcgacattcccatccatttccgcagctcaaaatgcgcttaaaaaacagatcaactctgttaataagttcaaactgaggaccagcaagaaacattatgatttccacatccttgaaagggcttctagccaatag

SEQ ID NO: 186157 - DNA, 4648 bp, Artificial Sequence
  derived and/or modified sequence
cggtgtccgggctggtgatggggttaattccctttcgtaagactcttacttgcacccacccagccccgccgtcgccccgccgcgccgcgctccaaccgcctcctcctcctcagtaacgcgggccacggaaaggtatgatatatttgatccaagacagtccattccagtccgggaatctacagtggtgacaaggacatgggactcctcctgccagattacagatggttcactacagttgacatcctggctgacaactgtgaaaaagaaccttggattattttattttatttttgtgggacaccacaatcccaaatccaaaggacgcatcaggcttcaagctccctgtagaattcgaaaataaccttttctaatgaggatgtctgatactgttactgtaaaagatgaaactgcaacaatgaaggatttggaggcagaagtgaaagatacaaccagagttgaaaatcttatcaaatcagaaaactatgggaagattttggtagagaagaatgaacattgtattgagaacaatatagatttgcagcggccattgcagtcatttggacagacaggaaaaaggtctaagtcaagctcaaagttaaagctagttcggagccttgcagtgtgtgaagaatctccaccaccccctgcaccagagatatcacaggagaaccaggagaaaattcagatccagttaacacaatcatttgagaaagaagagaagccctcaaaagatgaagcagaaaaagaaaaggccagtgataagttgcccagaaaaatgttatcaagagattccagtcaagaatacactgattcaactggcatagatctacatgaatttttagtaaatacattaaaaaacaatcccagggacagaatgatgctgctgaaattggaacaagaaattttagatttcattggtaataatgagtctccacgtaaaaaattccccccaatgacatcttaccataggatgctattacacagagtagccgcttactttggattagaccacaatgttgatcagagtgggaagtctgtcatagtaaacaaaactagcaatacaagaatacctgatcagaaatttaatgaacatattaaggatgataaaggtgaagactttcagaaacgttatatcctcaagagagataactctagctttgacaaagatgataaccagatgagaatacgtttgaaagatgacagaagaagcaaatctatagaagaaagagaagaagagtaccagagagccagagaccgaatattttcccaagattccctgtgttcccaagagaattacattattgacaaaagactccaagacgaggatgccagtagtacccagcagaggcgccagatatttagagttaataaagatgcttcagggagatctacaaatagccatcaaagcagcactgagaatgagttgaagtactcggaaccacgaccctggagcagcacagattcagacagctctcttcgaaacctgaaacctgctgtaaccaaagccagcagcttcagtggaatctcagtcctgacaagaggtgatagttctggaagcagcaaaagcataggcaggctttcaaaaacaggttctgagtcttctggtagtgtagggtcatctacaggctctctttctcacatccagcagcctcttccaggtacagctctcagccagtcttctcatggcgcacctgtcgtctatccaactgtcagcactcatagttctctttcctttgatggtggcctaaatgggcaagtcgcatctcctagcactagcttctttttgcttcccttggaagcggcaggcataccacctggcagtattctgatcaacccacaaacaggtcagcccttcataaacccagatgggagtccagttgtgtataatcctcctatgactcaacaaccagttagatcccaagtgcctggacctccacagccacctctgccagccccacctcaacaaccagcagctaatcacattttctcacaggataacctagggtctcagtttagccacatgagtcttgctcgccagccatctgctgatggttctgaccctcatgccgccatgttccagtccactgtggttcttcagtctccacagcagtctggttatatcatgacagcagcccctccaccacatcctcctccaccgccaccaccaccacctcctcctcctcccctaccacctgggcagccagtccctactgctggatatcctgcctctggtcatcctgtcagccagcctgtgctccagcagcagggatatattcagcagccatcaccacagatgccagcctgttattgcgctccaggccactatcactccagccaacctcagtatcgcccagtcccttctgttcattacaattcacatctaaaccaaccactgccacaacctgcgcagcagacaggttatcaagttatacccaaccagcagcaaaactaccaaggaatagttggagttcagcaaccccagagtcagagcctagtcagtggccaacccaacagcattggaaatcagattcaaggagtggtcatcccctatacttcagtgccaacatatcaggtttcactgcctcaaggttctcaaggaattccccatcagacttatcaacagcctgttatgttccctaatcagtctaatcaaggatctatgcccacaacaggaatgcctgtttactatagtgtcattccacctggtcaacaaaacaatttaagctcttcagtaggttacctgcaacatccaggatcagaacaagtacaatttcctcgaaccacttcaccatgcagttcccagcagcttcaaggccaccaatgtacagctggaccaccaccgccacctggtggggggatggtgatgatgcagctcagtgtaccaaacaatccacaatcttgtgcccactcacccccgcagtggaaacaaaacaaatattactgtgatcaccagagaggacagaagtgtgtagaatttagcagtgtagacaatattgtccagcacagccctcaactcagtagccccattatttcaccagctcagtcgccagcaccagctcagctgtccaccctgaaaactgtacgtccctctggaccaccactttccatcatgccccaattttctagaccttttgtccccgggcaaggagattccaggtatccattacttggccagccactgcagtacaatcctcctgctgttctgcacggacacattccaaaccaacagggtcagcctggcagcaggcatggaaaccgaggaaggagacaagctaaaaaagctgcatccacagaccttggagcaggagaaacagttgttgggaaggtcttggaaattactgaactaccagatggaataactcgcatggaagctgaaaagctttttggggaactctttaaaattggcgccaagatccggtggctccgggacccccagtcccaaccacgtcgtcaccccctctgctgtggcagtggggacaacactgccaaccctgaacgctctaaacccagtgacttggcctccacctacaccgtcttagccacattcccctccatttcagctgcacagaatgcactgaagaaacaaattaactcagttaacaagtttaagctgagaacaagcaagaagcactatgactttcacattttggaaagggcaagttctcagtaacagccacctttggacccttcgcctttatggttcccctgccctctcccatctttgattggcttggtatttggagcttctgttaacattatagagactcctaggatgtgtgttcatggcattatagcttttgaagaaaggccagtgatccagcaaagggggaaaaatatgcatttcaccccacatgactaggaatccacatcagaatgatacagagttagcaggtttttctaaggaaatgccattcaaatgcctcctaacttttatagttattttgttttatatttctaaattcttgtatcagatccaaagctctattgtacagcaaattattcttcaaaatgattataaccagttgcaccctgtatttctttttgcagccagcacaatgtgacccaacttaaaatttgggggaaaaagaatgcaggagtgaaataaccaagtcaaaaccatgtactatctccttgggggttagggatgctaagaagagcccacaaatagaggattactcttcccctgaatctctaaactcagaaacaattaccaaaaaatacataactcttccttgtagggccctttccttattcatttaggtagtgtgaacattaagtataaaataaattatgttcttaatgcctcttaaaccacttacattcaaaggggaacagaaatcattctaagcaggaaaatacttccactttttttttttcaagtatctctctaataactaaatgccacttatttgcattctccttgtggattttttgtcacctaaggaaatgcatttgatgagtgctggaaacttcttaagtgctttacagtttgttttcattgtttgcagcggatcactggacatcaaagattcattgcacttatgaacaaggaaccttcttttcaatttctgtgtaatttgcaaggctgtacaatgtgtgctgatgcaagcctttttcagttcaagagaataaatgtttacaaatatag

SEQ ID NO: 186158 - protein, 160 aa, Artificial Sequence [sequence omitted]

SEQ ID NO: 186159 - DNA, 483 bp, Artificial Sequence
  derived and/or modified sequence
atgctccctttcctttttttctccactctgtttagtagcatcttcaccgaagcccagaagcagtactgggtgtgcaactcaagcgatgcctcaatttcttacacctattgcgataagatgcaataccccatctctattaacgtcaacccctgcattgaactcaaaagaagcaaaggtttgctgcacatcttctacatccctaggagggacctaaagcaattgtacttcaacctttacattaccgtaaatactatgaatttacctaagagaaaggaagttatttgtcgcggtagcgacgatgattacagcttctgtcgagccttgaagggcgagacagtaaatacaacaatctcgttctcgttcaagggtattaagttttctaaagggaagtacaagtgtgtggtcgaagccataagcggttccccagaggagatgctcttttgccttgagttcgttatactacaccagccaaattccaactag

SEQ ID NO: 186160 - DNA, 483 bp, Artificial Sequence
  derived and/or modified sequence
atgttgcccttcctcttcttttccacgctttttagctctatcttcactgaggcacagaaacagtactgggtgtgtaactcatcagatgcttctattagctatacatactgcgataaaatgcaatatcctatttcaattaatgtgaacccctgtatcgaactcaaaaggtccaagggcctattacatatcttttatatccctaggcgggatctgaaacagctttactttaacctatacattaccgtaaacaccatgaatcttccaaaaagaaaggaagttatctgtcggggtagcgacgatgactatagcttctgcagagccttaaagggcgagacagtcaacaccacaatttcattcagcttcaagggcataaagttttcaaagggcaagtacaaatgtgtggtagaggctatctccggcagccctgaagagatgttattttgtttggaattcgtgattctgcaccaacctaactccaactag

SEQ ID NO: 186161 - DNA, 483 bp, Artificial Sequence
  derived and/or modified sequence
atgctcccctttctatttttctccactcttttctcaagtatcttcactgaagcgcaaaagcagtattgggtgtgcaacagctctgatgccagtatttcctatacatattgtgacaaaatgcagtaccccatttcaataaacgtgaatccctgtattgagctgaaaaggtcaaaagggctactccatatattctacatcccacgtagagacctgaaacaactatactttaacctgtacatcaccgttaatacaatgaatctgccaaaacgtaaggaggtgatctgtcgcggctctgatgatgactacagtttctgtagagcactcaaaggagagactgttaatacaacaatctctttcagcttcaagggaattaaattcagtaagggtaaatataagtgcgtcgttgaagccatatccggatctcccgaagagatgcttttctgccttgagtttgtcattttacaccaacccaactccaactag

SEQ ID NO: 186162 - DNA, 607 bp, Artificial Sequence
  derived and/or modified sequence
agttaaatcttttctgcttactgaaaaggaagagtctgatgattagttactgatcctctttgcatttgtaaagctttggagatattgaatcatgttaccatttctgtttttttccaccctgttttcttccatatttactgaagctcagaagcagtattgggtctgcaactcatccgatgcaagtatttcatacacctactgtgataaaatgcaatacccaatttcaattaatgttaacccctgtatagaattgaaaagatccaaaggattattgcacattttctacattccaaggagagatttaaagcaattatatttcaatctctatataactgtcaacaccatgaatcttccaaagcgcaaagaagttatttgccgaggatctgatgacgattactctttttgcagagctctgaagggagagactgtgaatacaacaatatcattctccttcaagggaataaaattttctaagggaaaatacaaatgtgttgttgaagctatttctgggagcccagaagaaatgctcttttgcttggagtttgtcatcctacaccaacctaattcaaattagaataaattgagtatttaaaaaaaaatttaaagg

SEQ ID NO: 186163 - DNA, 483 bp, Artificial Sequence
  derived and/or modified sequence
atgctgcccttcctgttcttcagcaccctgttcagcagcatcttcaccgaggcccagaagcagtactgggtgtgcaacagcagcgacgccagcatcagctacacctactgcgacaagatgcagtaccccatcagcatcaacgtgaacccctgcatcgagctgaagagaagcaagggcctgctgcacatcttctacatccccagaagagacctgaagcagctgtacttcaacctgtacatcaccgtgaacaccatgaacctgcccaagagaaaggaggtgatctgcagaggcagcgacgacgactacagcttctgcagagccctgaagggcgagaccgtgaacaccaccatcagcttcagcttcaagggcatcaagttcagcaagggcaagtacaagtgcgtggtggaggccatcagcggcagccccgaggagatgctgttctgcctggagttcgtgatcctgcaccagcccaacagcaactag

SEQ ID NO: 186164 - DNA, 483 bp, Artificial Sequence
  derived and/or modified sequence
atgttaccctttctcttcttctcaactctcttcagctccattttcacggaagctcagaagcagtattgggtatgcaacagcagtgacgcatcaattagctacacatattgtgacaagatgcaataccctatcagcatcaatgtgaacccctgtattgaactaaaacggtccaagggcctactgcacatattctatatcccgaggagggacctgaaacagttgtatttcaacctgtacattactgttaataccatgaacctcccaaagaggaaagaggtgatatgccgggggtccgatgatgattacagtttctgcagggcccttaagggggaaacagttaatactacaatctcatttagctttaaaggaataaaattctctaaagggaaatacaagtgtgtggtggaagctatctctggttcacccgaggaaatgctcttctgtctcgagttcgtcatcctccaccagcctaacagtaactag

SEQ ID NO: 186165 - DNA, 483 bp, Artificial Sequence
  derived and/or modified sequence
atgctgcccttcctgttcttcagcaccctcttcagcagcatcttcacagaggcccagaagcagtactgggtgtgcaacagcagtgatgccagcatctcctacacctactgtgacaagatgcagtaccccatcagcatcaacgtgaacccctgcatcgagctgaagaggagcaagggcctgctgcacatcttctacatcccccggcgggacctgaagcagctgtacttcaacctgtacatcaccgtgaacaccatgaacctgcccaagaggaaggaggtgatctgccggggcagtgatgatgactacagcttctgccgggccctgaagggggagaccgtgaacaccaccatctccttctccttcaagggcatcaagttcagcaagggcaagtacaagtgtgtggtggaggccatcagcggcagccctgaggagatgctgttctgcctggagtttgtgatcctgcaccagcccaacagcaactag

SEQ ID NO: 186166 - DNA, 483 bp, Artificial Sequence
  derived and/or modified sequence
atgctgcccttcctgttcttcagcaccctgttcagcagcatcttcacggaggcccagaaacagtactgggtgtgtaatagttccgatgcatccatcagctacacctattgcgacaagatgcagtaccctatctccatcaacgtaaatccatgcatcgagttgaagcgcagcaaaggccttctgcacatattttacattccaagacgtgacttgaagcaactctatttcaacctgtatatcacggtaaatacaatgaatcttccaaagaggaaggaggtaatttgtagaggtagtgacgacgactattcattttgccgcgcactaaagggtgaaaccgtgaacactacaatctctttctcattcaagggaatcaagttttcaaaaggaaaatataaatgcgtcgtagaagccattagcgggagcccagaagagatgttgttctgtctcgagtttgtgatactgcaccagccaaatagcaattag

SEQ ID NO: 186167 - RNA, 483 nt, Artificial Sequence
  derived and/or modified sequence
auguugcccuuccucuucuuuuccacgcuuuuuagcucuaucuucacugaggcacagaaacaguacuggguguguaacucaucagaugcuucuauuagcuauacauacugcgauaaaaugcaauauccuauuucaauuaaugugaaccccuguaucgaacucaaaagguccaagggccuauuacauaucuuuuauaucccuaggcgggaucugaaacagcuuuacuuuaaccuauacauuaccguaaacaccaugaaucuuccaaaaagaaaggaaguuaucugucgggguagcgacgaugacuauagcuucugcagagccuuaaagggcgagacagucaacaccacaauuucauucagcuucaagggcauaaaguuuucaaagggcaaguacaaaugugugguagaggcuaucuccggcagcccugaagagauguuauuuuguuuggaauucgugauucugcaccaaccuaacuccaacuag

SEQ ID NO: 186168 - RNA, 483 nt, Artificial Sequence
  derived and/or modified sequence
augcuccccuuucuauuuuucuccacucuuuucucaaguaucuucacugaagcgcaaaagcaguauugggugugcaacagcucugaugccaguauuuccuauacauauugugacaaaaugcaguaccccauuucaauaaacgugaaucccuguauugagcugaaaaggucaaaagggcuacuccauauauucuacaucccacguagagaccugaaacaacuauacuuuaaccuguacaucaccguuaauacaaugaaucugccaaaacguaaggaggugaucugucgcggcucugaugaugacuacaguuucuguagagcacucaaaggagagacuguuaauacaacaaucucuuucagcuucaagggaauuaaauucaguaaggguaaauauaagugcgucguugaagccauauccggaucucccgaagagaugcuuuucugccuugaguuugucauuuuacaccaacccaacuccaacuag

SEQ ID NO: 186169 - protein, 333 aa, Artificial Sequence
  derived and/or modified sequence
MAAGCCGVKKQKLSSSPPSGSGGGGGASSSSHCSGESQCRAGELGLGGAGTRLNGLGGLTGGGSGSGCTLSPPQGCGGGGGGIALSPPPSCGVGTLLSTPAAATSSSPSSSSAASSSSPGSRKMVVSAEMCCFCFDVLYCHLYGYQQPRTPRFTNEPYPLFVTWKIGRDKRLRGCIGTFSAMNLHSGLREYTLTSALKDSRFPPMTRDELPRLFCSVSLLTNFEDVCDYLDWEVGVHGIRIEFINEKGSKRTATYLPEVAKEQGWDHIQTIDSLLRKGGYKAPITNEFRKTIKLTRYRSEKMTLSYAEYLAHRQHHHFQNGIGHPLPPYNHYS

SEQ ID NO: 186170 - protein, 210 aa, Artificial Sequence
  derived and/or modified sequence
MVVSAEMCCFCFDVLYCHLYGYQQPRTPRFTNEPYPLFVTWKIGRDKRLRGCIGTFSAMNLHSGLREYTLTSALKDSRFPPMTRDELPRLFCSVSLLTNFEDVCDYLDWEVGVHGIRIEFINEKGSKRTATYLPEVAKEQGWDHIQTIDSLLRKGGYKAPITNEFRKTIKLTRYRSEKMTLSYAEYLAHRQHHHFQNGIGHPLPPYNHYS

SEQ ID NO: 186171 - DNA, 1002 bp, Artificial Sequence
  derived and/or modified sequence
atggccgccggctgctgtggagtaaagaagcagaaactgagcagttccccaccttcaggttccggcggaggcggcggtgcttctagctccagccattgcagcggagagtcccaatgtcgggcaggcgagctcggactgggcggcgcagggaccaggttgaacggcctcggcgggctgacaggcggcggatccggtagcgggtgcacactgagccctccccagggctgtggcggggggggcggcggtatcgccctgagtcccccgccctcctgcggcgtaggaactctcctgagcacccccgccgcagccaccagttcaagcccatcatcaagctctgcagcctctagtagctcccccggcagcaggaaaatggttgtgtctgccgagatgtgctgtttttgttttgacgtgctctactgccacttatatggctaccagcagcctaggacaccgcgcttcaccaatgagccttatcccctattcgttacgtggaagatcggtcgagataagcggctccggggttgtattgggacattcagtgcaatgaatttacactctgggcttcgcgaatatacactcaccagtgctctcaaagactctcgttttccacccatgactagggacgaacttccacgactgttttgcagtgtcagtctgttgaccaacttcgaggacgtctgcgactacttggattgggaagtgggcgtgcatggtatccggatcgagtttatcaacgagaaaggatcgaaaagaaccgcgacctacctccccgaagttgcaaaggagcagggctgggaccacatccagaccatcgactcactgttgcgcaagggtggctacaaggcccccattaccaatgagtttagaaaaacaataaagttaacccggtatcgaagtgaaaaaatgacgctgagctatgctgagtatctcgcgcaccggcagcaccatcatttccagaatggtatcggccacccgcttcctccatacaaccactactcttag

SEQ ID NO: 186172 - DNA, 1002 bp, Artificial Sequence
  derived and/or modified sequence
atggctgctggctgctgcggcgtgaagaagcagaagctgagcagcagccccccatctggcagcggcggcggcggcggggccagcagcagcagccactgcagcggggagagccagtgcagagctggggagctgggcctgggcggggccggcacccggctgaatggcctgggcggcctgaccggcggcggcagcggcagcggctgcaccctgagccccccccagggctgcggcggcggcggcggcggcatcgccctgagccccccacccagctgtggggtgggcaccctgctgagcaccccagctgctgccaccagcagcagccccagcagcagcagcgctgccagcagcagcagccctggcagcaggaagatggtggtgtctgctgagatgtgctgcttctgctttgatgtgctgtactgccacctgtatggctaccagcagcccaggaccccccgcttcaccaatgagccctaccccctgtttgtgacctggaagattggccgggacaagaggctgcggggctgcatcggcaccttcagcgccatgaacctgcacagcggcctgcgggagtacaccctgaccagcgccctgaaggacagccgcttcccccccatgaccagagatgagctgcccaggctcttctgcagcgtgtccctgctgaccaactttgaagatgtgtgtgactacctggactgggaggtgggcgtgcacggcatcagaattgagttcatcaatgagaagggcagcaagaggacagccacctacctgcctgaggtggccaaggagcagggctgggaccacatccagaccatcgacagcctgctgaggaaaggaggctacaaggcccccatcaccaatgagttcaggaagaccatcaagctgacccgctacagaagtgagaagatgaccctgtcctatgcagagtacctggcccaccggcagcaccaccacttccagaatggcatcggccaccccctgcccccctacaaccactacagctag

SEQ ID NO: 186173 - DNA, 5504 bp, Artificial Sequence
  derived and/or modified sequence
gcgcgcggggcagccgcgtggctaggcagacggggccgggagcggcgcgcgcgcgccccgccagcctctggcgcgcccccggcggcctgagccgcagcgtgctcgcccccgccgccagctcgcctcacttatgggtcggaaacgctgcgtgggggagactgttccaagatggcggcgggttgctgcggggtgaagaagcagaaactgtccagttcgcccccctctggctcgggtggcggtggtggcgcctcctcctcctcccactgcagcggagagagccagtgccgagctggggagctgggactaggaggcgccggtacgcggctcaacgggctgggaggtctaaccggaggaggtagcggcagcggctgtaccctctctcccccccagggctgcggcggcggcggcggggggatcgccctgtcgccacctccgagctgcggagtggggaccctactttctaccccggccgccgccacctcttcctcaccctcctcatcgtccgccgcctcgtcctcatcgccgggctcccggaagatggtggtgtcagcagagatgtgctgcttttgcttcgatgtgctctactgtcacctgtatggataccagcagccccggaccccccgattcaccaacgagccctacccactgtttgtaacatggaagattggtcgagacaaaagattacgtggatgcataggtactttttctgccatgaatttgcattcaggactcagggagtacacacttaccagtgcccttaaagatagccgttttcccccaatgacaagggatgagctgccacggcttttctgctcagtgtctctgctcactaactttgaagatgtctgtgattatttggactgggaggtgggtgtacatggcattagaatagaattcatcaatgaaaaaggatcaaaacgcaccgccacctacctaccggaggttgcaaaggagcaaggatgggaccatatacagaccatagactccttattgaggaaaggaggatacaaagctccgattactaatgaattcaggaaaaccataaaactgaccaggtatcgtagtgaaaagatgaccctgagctatgctgaataccttgctcatcgccagcatcatcatttccaaaatggcattgggcatccccttccgccatacaaccattattcctgacactgagccgcacaaccagtcactgggcctctctgcagacctcttcccaggagaccctacaccttcttggtctagctatctcttttactgtaccattttatgatgatagtttccgttgccatggtgaagcttcgacatcgtcaactaagatcatcatggtaacgggtagaaaaatggcatttgttaagatcctgttttattattttagatcgttgattttttttttgcagcatatataattttgggtttttttttccttataatattatgtagaattttgctttgctgtctcagtcaggtttctgtttttctgtcctccttgcctttcttcccgttttgcttcctgttttccttcttccttcccgttttccttcttccttccctgcctcccttcctttgactgtggatggaagaaagtgtgcagtttttagggattttacttaggttcgtctttagttttcctcagtaagatagttgttttttgatacctgagtttgggattaattcatatcaaattcaggtatttgtatattactcttgatttttgtctgaaattcactttgctatgacagcctagtagttgggtcttcactccttaagtatatgtttttcccatggtgaaaatacatgaactttagttctagtagtgagcattcaaaggtccgtgatagggcttgtcacagagagagagaaatcatttatccctattgtgctggttatcatagaagagactgcctcaccactttatagaaccaatttgcaaactaaaacactgtttggagaaggtacaaactacctttcaaaaaggctacaggaaacattttatgagcagcaaatattaggaagagagcagatacagaatttagtgcctttgagaagaatataattaagtggaattaagaggggttagaaaaaaggcaatttagaaaaatattcttgtaaaactttattgtttctatatgtgaaacagaagattagacaaattccttactcttaagtatttttttaagctgaaaaaaaattattttgagcaaataaccaataagagacatttgtctattttatattaatttaaatttgttagctctaggtttcaataagtcatgattggctagaatccattttagctaccatctaaagatatggtaaagataatttagtaaaacaaaagttcatatttgccatgatttcagatatgtttgtcatggggacaatattagagttttagagatactataaaatagcttgaatttctttctgcactacatacttttgatagaaacacatttactacattgataagatgttatgtcacacctgtgaaaatggagttggcattcagatatgctatagttagagcccagctcatctgcaagtatagtcttcccatgatgcatacaaagataacttactgatgtcgataggaggtccatacatatatccccaggaaaaatgacagattattctggaggaagatgaccttcattttatggttatgtgtgtgtgtctgtgtgtctttggaaaaatatatataattttttcaaataggaagccaacatatcaagtgatgaattaaagtatgctgcagaatatatattctaaaactacaaaaaagtcactgaatatcaaaatgatacagcttatacatatagttactgtgacaagtgacagactgctagttcagaattcaaaaatcctttcctagtttgtgagataatgggctaaattccttctgcctgccactggggcaaagcaaattgctttagtttttgatgagagttcttagaagtttgttggtattccttcatccacagcatccattgttgaaataaccattttcagttgtgatgccttaactaagaagccaattgttagcctgaaatgcaatcttggtagccagtttcaatgaagctagagattagtcagaaaaagttagctgttgggctttagaaagggattttgagtcctgtcatttctacttgggagcattttggagcagattagtctttcagtataaaaacaagtggctacctgatggaaacttttcttacccttatagggaaactgagcacaagctgaatgatattgtctgctgcaaaaaaaaacaaacaaaaaaaaaacaaaacaaaaaacaaaaaaaaggaaaaaaaggtaaataaaacaagcaaactgaagagagacaaaatagaccaatattatcgtgaaatccatcttatccatcatctcatcggttcaacaggctcctcgtcctgggtgagcttatggttagaagtttttttagcaaagatttattacatacatagatgtgtgtgtgtacatatacttacacatacatacatacatatatgtgtgtttatttaacggtgctaatcaatcttgagcaggtcacgtgactggtcatgcggactctaaaatcatatcagattttttaaaatccttgatatatgcagatgttatacagattttcttagcagtgtaataacgttaaactgaagaaataaccatcctgcaggcttcaaaggacgaggtcagcaatatttcccaacatggcttgggggaaaaggatagttttgtctccttttgtattcaagtaatgcaaagtgcatttttgtctctaagtagcttttgactaaaagactttgtagtgtaaagggtgttatacaaactgtaatggtgtgcttcaaacaaatgctagaccctttcacctttgtcgtatatacaaagctgttaattatgtggtatgaattaactttgaacatgttgaaatatgtagcatgtctttaactcagacgaagattctgattgcacaggttgtgttctagccagttgtgatttatttgttcagaaacacaaatgtgaattgcactcttatcatcagaatattgtatgagttcagtgatctttaaacagctcagaagtaatacttgaacttcatttgagtagcacaaagtttacatagccccttttaaatgttaattcgttccatttaagttttccattttcagatgcaactgggtatttttcctcttggaaatagtacgtactttgctttggtatgtagcaaaaggcttccatttctggaagggttttcttgttcttaaacaaggtcagccaggtaccagattctaaaagaacaaattgtcccccacccctcaagtggccttctgactgcacgagaatgtgctactaccctctgtagtctcccctaacacgagaggtcagtgaaattgatggaggaagtgcaaggcttgcttcccctcacccttaaagcttaaagcagttgtaagattttcagtccagcacatacagtcccagtgcccagcacaccggaagtttgtatactggcctcttatcttgtcttcaaatgtgcaggaaatttgaaactgtcatctggaataggttccatctcttatgtgtgttagatcaaaccaaagaagcccccagccatgcccaaatgctgcttcaaaagcctgccttccagtccttacaaaaaccttgcaggattaaatgtgttaacttttttatttttgtacagtttctaagtgatttttgctagtgatgttaaaatgaattaagtttatttgaggggtgtgagcacctcctccatttaaataaactggtgactttccttttattttttaaaagtggaaacccgttgtgtgcctctcgatttaagggtttctgatgacattattcttaagaccagcattgatcctttatatacaaatatatgttttccttgttttttattgctatttcagaagaaaatgaaccttttattttgctctacccagtaactgcgctggtacatagacgcactgagcaaacaaacttttgtaaccacctctgactacttttgtatatcaaagttgattacttttgaaatatttggatctagtttctaagttattttagtgttttatatgttccccaaaattactttgaatctgtcaccagcataatgagttcttggtgatacaatggtgagacttgtaatgagcaaaaagctacctggagtagctcctcttttccttctttcttagtaacctgttttttgattaccgtaagacatcacagattacctgaaaccccttccagtataactaggccctccttccttccacatttaattgcttaatagtttgaagaaactattggaaatgggcattttatatgacatgtatggctttacaatattaaatatgagcaaaaagaaaaaatatgagaaggtttatgtgggtctgtaaggtatggctgtggaaagatattgtagtagttttgacactattgttattacctttaaaatcatttacccaataaaatgttaaaaccga

SEQ ID NO: 186174 - DNA, 3380 bp, Artificial Sequence
  derived and/or modified sequence
ctctttctctgggctaatcgtttagaggacagtcgctcctgccaacctaatcccatgagcctgactaccttgccgggccacaggctcaaagaagcagtgtggctgccagcaccctcacggtaaggggcacggaggcaccaggcagtctggcaggatgagagacatcctgggggtggtctgagtttggatgtgggctgagaagacaaagcagggggctttcgggggacaagattttccaaacatcttattcttaggatcatcacttcctaatctgatgcaactgactcggcaggcattcgggagcctgtaagctccattttcctgttccaaattcttctgcacctcaccatgagtcctcaccttgaccctaatcaacttgggattctcctcaaagtacttagaaaggaaaaggaagacggtgactaccctgacatgatggccacccacccgagctccaggtatgaagcctgctcctctggaattactctagggctgcggcggcggcggcggggggatcgccctgtcgccacctccgagctgcggagtggggaccctactttctaccccggccgccgccacctcttcctcaccctcctcatcgtccgccgcctcgtcctcatcgccgggctcccggaagatggtggtgtcagcagagatgtgctgcttttgcttcgatgtgctctactgtcacctgtatggataccagcagccccggaccccccgattcaccaacgagccctacccactgtttgtaacatggaagattggtcgagacaaaagattacgtggatgcataggtactttttctgccatgaatttgcattcaggactcagggagtacacacttaccagtgcccttaaagatagccgttttcccccaatgacaagggatgagctgccacggcttttctgctcagtgtctctgctcactaactttgaagatgtctgtgattatttggactgggaggtgggtgtacatggcattagaatagaattcatcaatgaaaaaggatcaaaacgcaccgccacctacctaccggaggttgcaaaggagcaaggatgggaccatatacagaccatagactccttattgaggaaaggaggatacaaagctccgattactaatgaattcaggaaaaccataaaactgaccaggtatcgtagtgaaaagatgaccctgagctatgctgaataccttgctcatcgccagcatcatcatttccaaaatggcattgggcatccccttccgccatacaaccattattcctgacactgagccgcacaaccagtcactgggcctctctgcagacctcttcccaggagaccctacaccttcttggtctagctatctcttttactgtaccattttatgatgatagtttccgttgccatggtgaagcttcgacatcgtcaactaagatcatcatggtaacgggtagaaaaatggcatttgttaagatcctgttttattattttagatcgttgattttttttttgcagcatatataattttgggtttttttttccttataatattatgtagaattttgctttgctgtctcagtcaggtttctgtttttctgtcctccttgcctttcttcccgttttgcttcctgttttccttcttccttcccgttttccttcttccttccctgcctcccttcctttgactgtggatggaagaaagtgtgcagtttttagggattttacttaggttcgtctttagttttcctcagtaagatagttgttttttgatacctgagtttgggattaattcatatcaaattcaggtatttgtatattactcttgatttttgtctgaaattcactttgctatgacagcctagtagttgggtcttcactccttaagtatatgtttttcccatggtgaaaatacatgaactttagttctagtagtgagcattcaaaggtccgtgatagggcttgtcacagagagagagaaatcatttatccctattgtgctggttatcatagaagagactgcctcaccactttatagaaccaatttgcaaactaaaacactgtttggagaaggtacaaactacctttcaaaaaggctacaggaaacattttatgagcagcaaatattaggaagagagcagatacagaatttagtgcctttgagaagaatataattaagtggaattaagaggggttagaaaaaaggcaatttagaaaaatattcttgtaaaactttattgtttctatatgtgaaacagaagattagacaaattccttactcttaagtatttttttaagctgaaaaaaaattattttgagcaaataaccaataagagacatttgtctattttatattaatttaaatttgttagctctaggtttcaataagtcatgattggctagaatccattttagctaccatctaaagatatggtaaagataatttagtaaaacaaaagttcatatttgccatgatttcagatatgtttgtcatggggacaatattagagttttagagatactataaaatagcttgaatttctttctgcactacatacttttgatagaaacacatttactacattgataagatgttatgtcacacctgtgaaaatggagttggcattcagatatgctatagttagagcccagctcatctgcaagtatagtcttcccatgatgcatacaaagataacttactgatgtcgataggaggtccatacatatatccccaggaaaaatgacagattattctggaggaagatgaccttcattttatggttatgtgtgtgtgtctgtgtgtctttggaaaaatatatataattttttcaaataggaagccaacatatcaagtgatgaattaaagtatgctgcagaatatatattctaaaactacaaaaaagtcactgaatatcaaaatgatacagcttatacatatagttactgtgacaagtgacagactgctagttcagaattcaaaaatcctttcctagtttgtgagataatgggctaaattccttctgcctgccactggggcaaagcaaattgctttagtttttgatgagagttcttagaagtttgttggtattccttcatccacagcatccattgttgaaataaccattttcagttgtgatgccttaactaagaagccaattgttagcctgaaatgcaatcttggtagccagtttcaatgaagctagagattagtcagaaaaagttagctgttgggctttagaaagggattttgagtcctgtcatttctacttgggagcattttggagcagattagtctttcagtataaaaacaagtggctacctgatggaaacttttcttacccttatagggaaactgagcacaagctgaatgatattgtctgctgcaaaaaaaaacaaac

SEQ ID NO: 186175 - DNA, 1002 bp, Artificial Sequence
  derived and/or modified sequence
atggccgccggctgctgcggcgtgaagaagcagaagctgagcagctcgcctccctcagggagtgggggaggtggcggagccagcagctcctctcactgcagtggagagtctcaatgtagggccggcgagcttggcctggggggggccggaaccagactaaatggtctggggggcctgaccggaggcgggagtgggtctggttgcacactgagtcccccacaaggctgcggtggaggaggtggaggtattgcgctgagcccgcctccgagctgtggcgtgggtactttgctgtccacaccagctgccgccacgagtagttccccaagctcttcaagcgccgcatcttcatcttcacctggttcaaggaagatggtggtaagtgccgaaatgtgttgcttctgcttcgacgttctgtattgtcatctttacggttatcagcagccacggacaccacgttttacgaacgagccttacccacttttcgtcacctggaagattgggcgggacaagaggctacgcgggtgtattggtacctttagtgctatgaatctgcactctggattgcgagagtacactctcacgtcagctttaaaagatagtcgcttcccaccgatgacccgtgatgagctgccccggcttttctgctccgtctctctccttaccaattttgaggatgtatgtgactacctagattgggaggtcggagttcatgggattagaatcgaattcatcaacgagaagggcagcaagcggacagcaacgtatctgcctgaagttgccaaggagcagggctgggatcatatacagaccattgatagtctgttgagaaagggtggatacaaagcacctataacgaacgagttcaggaaaaccatcaaattgactagatatagatcggaaaagatgacgctcagctatgcagagtatctggcccacaggcagcaccatcactttcaaaatggcatcggccaccccttgcccccgtacaatcactatagttag

SEQ ID NO: 186176 - DNA, 1002 bp, Artificial Sequence
  derived and/or modified sequence
atggcggcaggttgctgtggcgttaagaagcagaagctatcgtccagccccccttctggctctggcggtggcggtggcgcatcgtcatctagtcactgctcgggtgagtcccagtgcagggcgggagagcttgggctgggtggggcaggaactcgtctaaacggtttggggggattaacagggggaggatcaggcagtggatgcacgttaagtccacctcaaggctgcgggggagggggtgggggtattgcactgagcccaccgcctagctgcggggtcgggactctgctgtcaacacctgctgccgcaacgagctcctctccttcctcctcaagtgccgctagcagttctagcccgggtagtaggaaaatggtggtaagcgctgagatgtgctgcttttgcttcgatgtgttgtactgccacctatacggctaccagcaacctagaacaccacgatttacgaacgaaccatacccactgtttgtgacttggaaaattggcagggacaagagactgagaggctgtataggtaccttttcagctatgaatttacacagcggattaagagagtatacattaacatccgctttgaaagactcaagattcccaccaatgactcgggacgagctgcctagactgttttgtagcgtgtcattgctgaccaatttcgaagatgtgtgcgactatctggattgggaggtgggcgtgcacgggattaggatagagttcatcaacgagaagggcagcaagaggacagccacttatctcccggaggtcgcaaaggagcagggatgggaccacatccagacgattgactcgttactgcggaagggaggatacaaagctcctattacaaatgagttcaggaagacgatcaaactgaccagatataggtctgaaaagatgacccttagctatgcagaatacctggcacaccgccaacatcaccatttccagaatggaatcggacacccccttccaccctataatcattattcatag

SEQ ID NO: 186177 - DNA, 1002 bp, Artificial Sequence
  derived and/or modified sequence
atggccgccggctgctgcggcgtgaagaagcagaagctgagcagcagcccccccagcggcagcggcggcggcggcggcgccagcagcagcagccactgcagcggcgagagccagtgcagagccggcgagctgggcctgggcggcgccggcaccagactgaacggcctgggcggcctgaccggcggcggcagcggcagcggctgcaccctgagccccccccagggctgcggcggcggcggcggcggcatcgccctgagccccccccccagctgcggcgtgggcaccctgctgagcacccccgccgccgccaccagcagcagccccagcagcagcagcgccgccagcagcagcagccccggcagcagaaagatggtggtgagcgccgagatgtgctgcttctgcttcgacgtgctgtactgccacctgtacggctaccagcagcccagaacccccagattcaccaacgagccctaccccctgttcgtgacctggaagatcggcagagacaagagactgagaggctgcatcggcaccttcagcgccatgaacctgcacagcggcctgagagagtacaccctgaccagcgccctgaaggacagcagattcccccccatgaccagagacgagctgcccagactgttctgcagcgtgagcctgctgaccaacttcgaggacgtgtgcgactacctggactgggaggtgggcgtgcacggcatcagaatcgagttcatcaacgagaagggcagcaagagaaccgccacctacctgcccgaggtggccaaggagcagggctgggaccacatccagaccatcgacagcctgctgagaaagggcggctacaaggcccccatcaccaacgagttcagaaagaccatcaagctgaccagatacagaagcgagaagatgaccctgagctacgccgagtacctggcccacagacagcaccaccacttccagaacggcatcggccaccccctgcccccctacaaccactacagctag

SEQ ID NO: 186178 - protein, 426 aa, Artificial Sequence
  derived and/or modified sequence
MAIAQLATEYVFSDFLLKEPTEPKFKGLRLELAVDKMVTCIAVGLPLLLISLAFAQEISIGTQISCFSPSSFSWRQAAFVDSYCWAAVQQKNSLQSESGNLPLWLHKFFPYILLLFAILLYLPPLFWRFAAAPHICSDLKFIMEELDKVYNRAIKAAKSARDLDMRDGACSVPGVTENLGQSLWEVSESHFKYPIVEQYLKTKKNSNNLIIKYISCRLLTLIIILLACIYLGYYFSLSSLSDEFVCSIKSGILRNDSTVPDQFQCKLIAVGIFQLLSVINLVVYVLLAPVVVYTLFVPFRQKTDVLKVYEILPTFDVLHFKSEGYNDLSLYNLFLEENISEVKSYKCLKVLENIKSSGQGIDPMLLLTNLGMIKMDVVDGKTPMSAEMREEQGNQTAELQGMNIDSETKANNGEKNARQRLLDSSC

SEQ ID NO: 186179 - protein, 422 aa, Artificial Sequence
  derived and/or modified sequence
MAIAQLATEYVFSDFLLKEPTEPKFKGLRLELAVDKMVTCIAVGLPLLLISLAFAQEISIGTQISCFSPSSFSWRQAAFVDSYCWAAVQQKNSLQSESGNLPLWLHKFFPYILLLFAILLYLPPLFWRFAAAPHICSDLKFIMEELDKVYNRAIKAAKSARDLDMRDGACSVPGVTENLGQSLWEVSESHFKYPIVEQYLKTKKNSNNLIIKYISCRLLTLIIILLACIYLGYYFSLSSLSDEFVCSIKSGILRNDSTVPDQFQCKLIAVGIFQLLSVINLVVYVLLAPVVVYTLFVPFRQKTDVLKVYEILPTFDVLHFKSEGYNDLSLYNLFLEENISEVKSYKCLKVLENIKSSGQGIDPMLLLTNLGMIKMDVVDGKTPMSAEMREEQGNQTAELQDSETKANNGEKNARQRLLDSSC

SEQ ID NO: 186180 - DNA, 1269 bp, Artificial Sequence
  derived and/or modified sequence
atggccatcgcccagctggccaccgagtacgtgttcagcgacttcctgctgaaggagcccaccgagcccaagttcaagggcctgagactggagctggccgtggacaagatggtgacctgcatcgccgtgggcctgcccctgctgctgatcagcctggccttcgcccaggagatcagcatcggcacccagatcagctgcttcagccccagcagcttcagctggagacaggccgccttcgtggacagctactgctgggccgccgtgcagcagaagaacagcctgcagagcgagagcggcaacctgcccctgtggctgcacaagttcttcccctacatcctgctgctgttcgccatcctgctgtacctgccccccctgttctggagattcgccgccgccccccacatctgcagcgacctgaagttcatcatggaggagctggacaaggtgtacaacagagccatcaaggccgccaagagcgccagagacctggacatgagagacggcgcctgcagcgtgcccggcgtgaccgagaacctgggccagagcctgtgggaggtgagcgagagccacttcaagtaccccatcgtggagcagtacctgaagaccaagaagaacagcaacaacctgatcatcaagtacatcagctgcagactgctgaccctgatcatcatcctgctggcctgcatctacctgggctactacttcagcctgagcagcctgagcgacgagttcgtgtgcagcatcaagagcggcatcctgagaaacgacagcaccgtgcccgaccagttccagtgcaagctgatcgccgtgggcatcttccagctgctgagcgtgatcaacctggtggtgtacgtgctgctggcccccgtggtggtgtacaccctgttcgtgcccttcagacagaagaccgacgtgctgaaggtgtacgagatcctgcccaccttcgacgtgctgcacttcaagagcgagggctacaacgacctgagcctgtacaacctgttcctggaggagaacatcagcgaggtgaagagctacaagtgcctgaaggtgctggagaacatcaagagcagcggccagggcatcgaccccatgctgctgctgaccaacctgggcatgatcaagatggacgtggtggacggcaagacccccatgagcgccgagatgagagaggagcagggcaaccagaccgccgagctgcaggacagcgagaccaaggccaacaacggcgagaagaacgccagacagagactgctggacagcagctgctag

SEQ ID NO: 186181 - DNA, 1269 bp, Artificial Sequence
  derived and/or modified sequence
atggccatcgcacagctggccactgagtacgtgttcagtgattttttgttgaaggagcccaccgagcctaaatttaaaggactgcggttagaactggctgtggataagatggttacttgtatagctgttgggctgccactgctgctcatctctctggcattcgcccaggagatctcaatcggaacacagatatcctgcttttcgccgtccagcttctcatggcgtcaggcggcatttgtggactcatattgctgggcggccgtacagcagaaaaattctctgcagagtgagtctggcaatctgcctctttggttacacaagttttttccttacatactgttgctatttgcgatcctgttataccttccaccgcttttttggaggtttgctgccgccccccatatctgctccgaccttaaattcatcatggaggagctggataaggtctacaaccgtgccattaaggcggccaaatccgcacgggaccttgacatgagggatggcgcttgctccgtgcctggagtcactgagaacctcggacagagcttgtgggaagtgagtgaaagccacttcaagtaccctattgtggaacagtacctgaaaacgaaaaaaaatagcaacaatttgattataaaatatatcagctgcaggctcctgaccctcattataatcctactggcctgcatttacctaggatattatttctccctttccagcctgagcgatgagtttgtgtgttcaatcaaatccggcatattaaggaatgactctactgtgccggaccagttccagtgcaaactgatagcagtgggaatctttcaacttctctcagttatcaacctcgtggtttacgttctgcttgctccggtcgtggtttacaccctgttcgttccctttcgccaaaagacggatgtgctcaaagtctatgagattttgccaacgtttgacgtgcttcacttcaagtcggaaggctacaacgatctgagcctatacaatctctttctcgaagaaaatatttctgaagtgaaatcttacaagtgtcttaaggtgctcgagaatattaagagttctggccaggggatcgatcctatgttactcctcaccaatctaggcatgataaagatggatgttgtcgacggcaaaactcctatgtcagctgagatgagagaagagcaaggaaatcagacagcagagctgcaggactcagagactaaggccaacaacggcgaaaagaacgctcgccaaagactcctggatagcagttgttag

SEQ ID NO: 186182 - DNA, 1269 bp, Artificial Sequence
  derived and/or modified sequence
atggccatcgcccagctggccacagaatatgtgttcagtgacttcctgctgaaggagcccacagagcccaagttcaagggcctgcggctggagctggccgtggacaagatggtgacctgcatcgctgtgggcctgcccctgctgctgatcagcctggcctttgcccaggagatcagcatcggcacccagatcagctgcttcagccccagcagcttctcctggaggcaggccgcctttgtggacagctactgctgggccgctgtgcagcagaagaacagcctgcagagcgagagcggcaacctgcccctgtggctgcacaagttcttcccctacatcctgctgctgtttgccatcctgctgtacctgcccccactcttctggaggtttgctgctgccccccacatctgcagcgacctgaagttcatcatggaggagctggacaaggtgtacaacagagccatcaaggccgccaagagcgcccgggacctggacatgagagatggagcctgcagcgtgcctggggtgacagagaacctgggccagagcctgtgggaggtgtctgagagccacttcaagtaccccatcgtggagcagtacctgaagaccaagaagaacagcaacaacctgatcatcaagtacatcagctgccgcctgctgaccctcatcatcatcctgctggcctgcatctacctgggctactacttcagcctgagcagcctgagtgatgaatttgtgtgcagcatcaagagcggcatcctgagaaatgacagcacagtgcctgaccagttccagtgcaagctgattgctgtgggcatcttccagctgctgagcgtcatcaacctggtggtgtatgtgctgctggcccctgtggtggtgtacaccctgtttgtgcccttccggcagaagacagatgtgctgaaggtgtatgagatcctgcccacctttgatgtgctgcacttcaagtctgagggctacaatgacctgagcctgtacaacctcttcctggaggagaacatcagcgaggtgaagagctacaagtgcctgaaggtgctggagaacatcaagagcagcggccagggcatcgaccccatgctgctgctgaccaacctgggcatgatcaagatggatgtggtggatggcaagacccccatgtctgctgagatgagggaggagcagggcaaccagacagctgagctgcaggacagcgagaccaaggccaacaacggggagaagaatgcccggcagaggctgctggacagcagctgctag

SEQ ID NO: 186183 - DNA, 1269 bp, Artificial Sequence
  derived and/or modified sequence
atggccatcgcccagctggccaccgagtacgtgttcagcgacttcctcttgaaagagcctaccgaacctaagtttaaggggctcagattggaattggctgtggataaaatggtgacttgtatcgccgtagggctaccactcctgctgatcagccttgcttttgcccaggagatctccataggaacacagattagctgtttttctcctagctcattcagctggcgtcaggcagcctttgtggactcttattgttgggcagctgtccagcagaagaattctctacagagtgagtcagggaacctgcctttgtggctacataagttcttcccttatatccttctgttatttgcaatcctactatatctgccaccgctgttttggaggttcgcggcagcaccccacatctgcagtgacctgaagtttatcatggaagaactcgataaggtgtacaatcgcgccatcaaagccgcaaaaagtgctcgtgatctggacatgcgcgatggtgcatgctctgtgcccggtgttactgagaacctgggacagtctctatgggaagtgagcgaatctcacttcaagtatcccattgtggagcagtatctaaaaacaaagaaaaacagcaataaccttatcattaaatacataagctgccgcctcctgaccctgatcatcatcctccttgcatgcatctacctggggtactactttagtttgtctagcctctctgatgagttcgtgtgttccataaaatcgggcattctgaggaacgactcaacagttcccgatcagtttcagtgcaaacttatagctgttggaattttccagctgctctccgtgatcaacttggtggtttatgttctccttgcccctgttgtggtgtataccctgttcgtgccttttagacagaaaactgacgtactgaaagtctatgaaatcctgccaacctttgacgtcctgcatttcaagtccgaggggtataacgacctgtctctgtataaccttttcctcgaagaaaacatcagcgaagttaaatcttacaagtgtctcaaagtgctcgaaaatataaagtcaagcggtcagggcatcgatcccatgctgcttttaacaaatctcggcatgattaagatggatgtggtggatggcaagactcctatgagtgccgaaatgcgagaagaacaggggaaccagacagctgaattacaagactctgaaaccaaggctaacaatggtgagaagaatgctagacaaagactgctcgactctagttgttag

SEQ ID NO: 186184 - DNA, 2769 bp, Artificial Sequence
  derived and/or modified sequence
gggcggcgcggaggggcagggccagagggaagcgctttgttccgcgcgtggttcccgcgcctgggggtgcgcgggagaggcgcgaatccgagtgccgcgcgcggcccggggacttgcacgggcgtgcggggtggaaccgcaggaagcggagctctcgggttcccgccccgccccgccccgccggcggcggaggcagcgagcgcgagagcccagcggagtcgctgggagcctgaggcaccgagacacaaaggcaggcgggatgcgggagcaggcaaagggaaagcgaaagccgcgcgcccggccggtgactgggtgaaggcgccgcgcagctttcccgacgccggctgtacccggacctcctggtcgagcctggcgcgccgcagccatggccatcgctcaactggccacggagtacgtgttctcggatttcttgctgaaggagcccacggagcccaagttcaaggggctgcgactggagctggctgtggacaagatggtcacgtgcattgcggtggggctgcccctgctgctcatctcgctggccttcgcgcaggagatctcgattggtacacagataagctgtttctctccaagttctttctcctggcgtcaggctgcctttgtggattcatattgctgggcggctgttcagcagaagaactcactgcagagcgagtctggaaacctcccactgtggctgcataagtttttcccctacatcctgctgctctttgcgatcctcctgtacctgcccccgctgttctggcgtttcgcagctgctcctcatatttgctcagacttgaagtttatcatggaagaacttgacaaagtttacaaccgtgcaattaaggctgcaaagagtgcgcgtgaccttgacatgagagatggagcctgctcagttccaggtgttaccgagaacttagggcaaagtttgtgggaggtatctgaaagccacttcaagtacccaattgtggagcagtacttgaagacaaagaaaaattctaataatttaatcatcaagtacattagctgccgcctgctgacactcatcattatactgttagcgtgtatctacctgggctattacttcagcctctcctcactctcagacgagtttgtgtgcagcatcaaatcagggatcctgagaaacgacagcaccgtgcccgatcagtttcagtgcaaactcattgccgtgggcatcttccagttgctcagtgtcattaaccttgtggtttatgtcctgctggctcccgtggttgtctacacgctgtttgttccattccgacagaagacagatgttctcaaagtgtacgaaatcctccccacttttgatgttctgcatttcaaatctgaagggtacaacgatttgagcctctacaatctcttcttggaggaaaatataagtgaggtcaagtcatacaagtgtcttaaggtactggagaatattaagagcagtggtcaggggatcgacccaatgctactcctgacaaaccttggcatgatcaagatggatgttgttgatggcaaaactcccatgtctgcagagatgagagaggagcaggggaaccagacggcagagctccaaggtatgaacatagacagtgaaactaaagcaaataatggagagaagaatgcccgacagagacttctggattcttcttgctgatgatttttttccttgagctgtaaatctgtgacttctgcgacatgggatttaatttggctaaagcacccctgttggtttcacagctggtttgcaataaatggttcttggtggagatactgagcatgtcttattgagtccctaatggaaatggtgatcaacaaaaggttatggaagaatggtttatgaacttcccataggaagcacctgagagatagtaaactgcagcaagtaactatgtgtaagtcctcatcaaatgaaaagcagaaagacaagaacaattagtcaagagcagtagccctgtcagagcctcggagcaatacctttctgtacccgtggtgagacaagacccagagctactggaaaacaagcactttggaagatttgttttgttttcatggaataataatatgtcagggtataatttaacgtgagtttcttatgtgcccttaaagactgttagacaagaaaagcattcactggctaataatccataggtcgacctatgtcctaagttaggtgtaaggtccgatgccttggcccacactcgagctctctttacattgttagttgtcaaccttggctgatggaaatcccgtaaccactatttgttgcactgtgccttgaagggcagcaggcccaagtgctgctctgactgaaaactgagttaacaagatgaaatctaaaggatattcacagtgacttcaattcaggaagaatgcttccaaaagagcccagtggggaaatctgacatcacagaagacattaattcagtcactttcaaagagtttgtctacaggcggtttctctgttatcaaaggcatttgaaataggattttacttaaacaataatggaacacaggagtatttaaagtgaagaacactttgcctgaatgtgatcagggcacataagtgacattggcatgcttcatatggcgtgcttggagccagaaaaacttagcggtttattttgtttatatttaagcacagctttaaaaaattcattatcgtttattcagtgtccgaattgaggccatttgggaagaaaattctagcactggtggagaattatagaataaagattataaatggttggataagacaaa

SEQ ID NO: 186185 - DNA, 2750 bp, Artificial Sequence
  derived and/or modified sequence
ggcggcgcggaggggcagggccagagggaagcgctttgttccgcgcgtggttcccgcgcctgggggtgcgcgggagaggcgcgaatccgagtgccgcgcgcggcccggggacttgcacgggcgtgcggggtggaaccgcaggaagcggagctctcgggttcccgccccgccccgccccgccggcggcggaggcagcgagcgcgagagcccagcggagtcgctgggagcctgaggcaccgagacacaaaggcaggcgggatgcgggagcaggcaaagggaaagcgaaagccgcgcgcccggccggtgactgggtgaaggcgccgcgcagctttcccgacgccggctgtacccggacctcctggtcgagcctggcgcgccgcagccatggccatcgctcaactggccacggagtacgtgttctcggatttcttgctgaaggagcccacggagcccaagttcaaggggctgcgactggagctggctgtggacaagatggtcacgtgcattgcggtggggctgcccctgctgctcatctcgctggccttcgcgcaggagatctcgattggtacacagataagctgtttctctccaagttctttctcctggcgtcaggctgcctttgtggattcatattgctgggcggctgttcagcagaagaactcactgcagagcgagtctggaaacctcccactgtggctgcataagtttttcccctacatcctgctgctctttgcgatcctcctgtacctgcccccgctgttctggcgtttcgcagctgctcctcatatttgctcagacttgaagtttatcatggaagaacttgacaaagtttacaaccgtgcaattaaggctgcaaagagtgcgcgtgaccttgacatgagagatggagcctgctcagttccaggtgttaccgagaacttagggcaaagtttgtgggaggtatctgaaagccacttcaagtacccaattgtggagcagtacttgaagacaaagaaaaattctaataatttaatcatcaagtacattagctgccgcctgctgacactcatcattatactgttagcgtgtatctacctgggctattacttcagcctctcctcactctcagacgagtttgtgtgcagcatcaaatcagggatcctgagaaacgacagcaccgtgcccgatcagtttcagtgcaaactcattgccgtgggcatcttccagttgctcagtgtcattaaccttgtggtttatgtcctgctggctcccgtggttgtctacacgctgtttgttccattccgacagaagacagatgttctcaaagtgtacgaaatcctccccacttttgatgttctgcatttcaaatctgaagggtacaacgatttgagcctctacaatctcttcttggaggaaaatataagtgaggtcaagtcatacaagtgtcttaaggtactggagaatattaagagcagtggtcaggggatcgacccaatgctactcctgacaaaccttggcatgatcaagatggatgttgttgatggcaaaactcccatgtctgcagagatgagagaggagcaggggaaccagacggcagagctccaagacagtgaaactaaagcaaataatggagagaagaatgcccgacagagacttctggattcttcttgctgatgatttttttccttgagctgtaaatctgtgacttctgcgacatgggatttaatttggctaaagcacccctgttggtttcacagctggtttgcaataaatggttcttggtggagatactgagcatgtcttattgagtccctaatggaaatggtgatcaacaaaaggttatggaagaatggtttatgaacttcccataggaagcacctgagagatagtaaactgcagcaagtaactatgtgtaagtcctcatcaaatgaaaagcagaaagacaagaacaattagtcaagagcagtagccctgtcagagcctcggagcaatacctttctgtacccgtggtgagacaagacccagagctactggaaaacaagcactttggaagatttgttttgttttcatggaataataatatgtcagggtataatttaacgtgagtttcttatgtgcccttaaagactgttagacaagaaaagcattcactggctaataatccataggtcgacctatgtcctaagttaggtgtaaggtccgatgccttggcccacactcgagctctctttacattgttagttgtcaaccttggctgatggaaatcccgtaaccactatttgttgcactgtgccttgaagggcagcaggcccaagtgctgctctgactgaaaactgagttaacaagatgaaatctaaaggatattcacagtgacttcaattcaggaagaatgcttccaaaagagcccagtggggaaatctgacatcacagaagacattaattcagtcactttcaaagagtttgtctacaggcggtttctctgttatcaaaggcatttgaaataggattttacttaaacaataatggaacacaggagtatttaaagtgaagaacactttgcctgaatgtgatcagggcacataagtgacattggcatgcttcatatggcgtgcttggagccagaaaaacttagcggtttattttgtttatatttaagcacagctttaaaaaattcattatcgtttattcagtgtccgaattgaggccatttgggaagaaaattctagcactggtggagaattatagaataaagattataaatggttggataa

SEQ ID NO: 186186 - DNA, 1269 bp, Artificial Sequence
  derived and/or modified sequence
atggctattgcccagctcgcaaccgaatatgtattttctgacttcctcctgaaggagccgaccgaaccaaagtttaaaggtctgaggcttgagctcgctgtggataaaatggttacttgcatcgctgtggggttaccactgcttctgatctccctcgccttcgcccaagagataagtattgggacccaaatcagttgtttcagcccatccagtttctcgtggagacaagcggcttttgtggactcttattgttgggcggctgtacagcaaaagaacagcctccagtccgagagtggaaacttacccctctggctgcataagttcttcccctatatccttctgctgtttgctatcctgctgtaccttcctcctctgttctggcggtttgcagccgctccacacatttgcagtgacctcaagtttattatggaagaactcgacaaggtttataatcgcgctatcaaggccgcaaagtccgccagggatctcgacatgcgggacggagcttgtagcgtacccggtgtgaccgagaatctgggacagagcctctgggaagtgtcagagagccacttcaaataccctatcgtggagcaatatctcaaaacaaagaaaaacagcaataatctgatcatcaagtacatcagctgccgcctacttacactgatcattatcttgctggcgtgtatttacttagggtattacttcagcctaagttccctgtccgacgagttcgtttgcagcatcaaaagcggaattttgcggaatgactccaccgtgccagatcagttccagtgcaaactcatcgcagtgggcatattccaactgctcagcgtgattaacctcgtcgtgtacgtcctgttagctcccgtggtggtatacaccctgtttgtaccattccgccaaaaaactgatgtcttaaaggtgtatgaaattcttcccacgtttgacgttctgcatttcaaaagtgaagggtacaatgatttgagcctgtacaatctctttctggaagaaaatatttccgaggttaagtcttacaagtgccttaaagtgctggagaacattaagagtagcggccaagggatcgaccccatgttgcttctgaccaatctgggaatgatcaagatggatgtggtggacggcaagacccccatgagcgccgaaatgcgggaggaacagggaaaccaaacagctgagctgcaggacagcgagacgaaagcaaataacggcgagaagaatgcccgacaaagactgttggatagtagctgctag

SEQ ID NO: 186187 - DNA, 1281 bp, Artificial Sequence
  derived and/or modified sequence
atggcaattgcacagctggctactgaatatgtgttttcagatttccttttgaaagagcccaccgagcctaagttcaagggcctgcgcctcgagctggccgtggataagatggttacatgtatcgcagtcggcctgccgctgctgctgatttctttagctttcgcccaagaaatatctattggcactcagatctcttgcttttccccatcaagcttctcctggaggcaggccgccttcgtggatagttactgctgggccgccgtccagcagaaaaactccctgcagtcagagtccggaaaccttcccctgtggctgcacaagtttttcccatatattttgctcttattcgctatcctgctgtacctcccgcccctcttctggcgatttgccgccgccccccatatttgcagtgatttgaagtttatcatggaggaactggataaggtctataatcgggcaattaaagccgctaagagtgcccgggacctcgatatgcgcgacggagcgtgcagcgtccccggtgtcaccgaaaaccttggccaaagcctgtgggaggtgtcagaatcgcacttcaagtacccaatagtcgagcagtatctgaaaactaaaaaaaatagcaacaacctgatcatcaagtacatttcctgcaggcttctaacccttataattattttgttggcttgtatatacctgggatactatttcagcctcagttcattgtcagatgagttcgtgtgtagtataaagtctggaatcctgaggaacgattctacggtgccagatcagtttcaatgtaagcttatcgcagtgggcatcttccagctcctgtctgtgattaacctagtggtctacgtactgctagcaccagtcgtggtttatacactcttcgttccatttcggcagaaaaccgatgttttaaaggtgtacgagatccttcccacctttgacgtgctgcactttaaaagcgagggatataatgacctctccctttataatttgtttctggaagaaaatatcagcgaggttaagtcgtataagtgcctcaaggtcctggaaaatataaaatcttccggccaggggattgatcccatgctgctcctgacaaatctcggaatgataaaaatggacgtagttgacgggaagacgccaatgagtgccgaaatgcgggaagagcagggaaatcagaccgccgagctccaaggtatgaatattgactcagaaaccaaggctaataatggcgagaagaatgcccgtcagagattgctcgattcttcatgctag

SEQ ID NO: 186188 - DNA, 1281 bp, Artificial Sequence
  derived and/or modified sequence
atggccatcgcccagctggccacagaatatgtgttcagtgacttcctgctgaaggagcccacagagcccaagttcaagggcctgcggctggagctggccgtggacaagatggtgacctgcatcgctgtgggcctgcccctgctgctgatcagcctggcctttgcccaggagatcagcatcggcacccagatcagctgcttcagccccagcagcttctcctggaggcaggccgcctttgtggacagctactgctgggccgctgtgcagcagaagaacagcctgcagagcgagagcggcaacctgcccctgtggctgcacaagttcttcccctacatcctgctgctgtttgccatcctgctgtacctgcccccactcttctggaggtttgctgctgccccccacatctgcagcgacctgaagttcatcatggaggagctggacaaggtgtacaacagagccatcaaggccgccaagagcgcccgggacctggacatgagagatggagcctgcagcgtgcctggggtgacagagaacctgggccagagcctgtgggaggtgtctgagagccacttcaagtaccccatcgtggagcagtacctgaagaccaagaagaacagcaacaacctgatcatcaagtacatcagctgccgcctgctgaccctcatcatcatcctgctggcctgcatctacctgggctactacttcagcctgagcagcctgagtgatgaatttgtgtgcagcatcaagagcggcatcctgagaaatgacagcacagtgcctgaccagttccagtgcaagctgattgctgtgggcatcttccagctgctgagcgtcatcaacctggtggtgtatgtgctgctggcccctgtggtggtgtacaccctgtttgtgcccttccggcagaagacagatgtgctgaaggtgtatgagatcctgcccacctttgatgtgctgcacttcaagtctgagggctacaatgacctgagcctgtacaacctcttcctggaggagaacatcagcgaggtgaagagctacaagtgcctgaaggtgctggagaacatcaagagcagcggccagggcatcgaccccatgctgctgctgaccaacctgggcatgatcaagatggatgtggtggatggcaagacccccatgtctgctgagatgagggaggagcagggcaaccagacagctgagctgcagggcatgaacatcgacagcgagaccaaggccaacaacggggagaagaatgcccggcagaggctgctggacagcagctgctag

SEQ ID NO: 186189 - DNA, 1281 bp, Artificial Sequence
  derived and/or modified sequence
atggccatcgcccagctggccaccgagtacgtgttcagcgacttcctgctcaaagagccgacagagccgaagttcaagggtctgaggctggagttggccgtggataaaatggtcacctgtatcgcagtcggcttgccattattgttaataagtttggcgtttgcgcaagagatatctatcgggactcagatctcttgtttctcgcccagctccttctcttggaggcaagccgccttcgtcgacagttattgctgggcggcagttcagcagaagaattccctgcaaagtgagtctggcaatcttcccctttggctccataagtttttcccctacatcttgctcctgttcgcaatcctgctatacctcccgcctctcttctggcgcttcgctgctgcaccccatatctgttcggatcttaagttcatcatggaggagctcgacaaagtatataatcgcgctatcaaagcagcaaagagtgccagagatctagatatgagggacggggcttgttccgtgccaggcgttacagagaatctggggcaatcactctgggaggtttccgagagccacttcaaatacccaattgtcgagcaatatctgaaaactaaaaagaacagcaataatcttataattaagtatatctcttgccgcttgctcacgctcatcataattctccttgcttgcatttatttgggctattattttagcttatcatcattgagtgatgagttcgtatgtagtataaagtcagggattctccggaatgactcgacagtgcccgatcagtttcagtgcaaattgattgcagtgggaattttccaactgctcagcgtgattaacctggttgtatatgtgcttcttgcgcccgtggttgtttataccctcttcgtccccttcagacagaagacggacgttctgaaagtttacgagatactacccacattcgatgtcctgcatttcaagagcgaaggatataacgacctgtccttatataacttattcttagaggaaaacattagcgaggtgaagtcctacaaatgtttgaaggtgctggaaaatatcaagtcgagcggtcaggggatagaccctatgctgctcctgacgaacctggggatgattaaaatggatgtcgttgacggaaaaaccccaatgagcgcagagatgcgtgaagaacaaggcaaccagacagctgaactgcaagggatgaacattgactcagagacaaaagccaacaacggtgagaagaacgcaagacagagactcctggatagcagctgctag

SEQ ID NO: 186190 - DNA, 1281 bp, Artificial Sequence
  derived and/or modified sequence
atggcgatcgctcagctggcgacggaatatgtcttcagcgacttcctgctgaaagagccaaccgagcctaagtttaaagggctcaggctggagctggctgtcgacaagatggttacttgtatcgctgtgggcctgcctcttctcttaatttccttggcttttgctcaggaaatctccataggcacacagatcagttgtttctccccatcgtcgttctcctggaggcaagccgctttcgtggatagctattgttgggcagctgtgcagcagaaaaacagcttgcagtcagagtcaggaaatcttcccctgtggctacacaaattctttccatacattctcttactctttgcaattctgctgtacctgccacccctcttttggcggttcgccgctgcacctcacatctgttcagaccttaaattcatcatggaggagctcgacaaggtgtacaacagagctatcaaggctgccaaatcagccagggatctcgacatgcgcgacggcgcatgctcagtgcccggagtgaccgagaatcttggccagtctctgtgggaggtctctgaaagccattttaagtaccccatcgtggagcagtacctcaaaacaaagaagaatagcaacaacttgattatcaagtacatttcctgccgtctgttgacgcttatcataatcctgctggcctgcatttatctgggctactatttttccctgagtagtctcagcgatgaattcgtctgctccatcaagagtgggattctgcgtaatgattctaccgtccctgaccaattccaatgcaaactgatcgccgtgggtatcttccagttgctgagtgtgatcaacctcgtcgtatacgtgctcctggcaccagttgtcgtgtacaccctctttgtgccttttagacagaagacagacgtgcttaaggtgtatgaaatcctgccaactttcgacgttctgcacttcaaatctgaggggtataacgatctgagtctttataacttgtttctggaggagaacatatcagaggtgaagtcttacaaatgtctgaaagtgctagagaatattaaatccagcggccaaggcatcgatcctatgttgttactaacaaaccttggaatgatcaaaatggacgtcgtggacggcaaaacgcctatgagtgcagagatgcgcgaggagcagggcaaccagactgcggagctgcaaggcatgaatatagacagcgagacaaaggccaataacggggagaagaacgcgcgtcagcgactgctcgattcaagctgctag

SEQ ID NO: 186191 - DNA, 1281 bp, Artificial Sequence
  derived and/or modified sequence
atggccatcgcccagctggccaccgagtacgtgttcagcgacttcctgctgaaggagcccaccgagcccaagttcaagggcctgagactggagctggccgtggacaagatggtgacctgcatcgccgtgggcctgcccctgctgctgatcagcctggccttcgcccaggagatcagcatcggcacccagatcagctgcttcagccccagcagcttcagctggagacaggccgccttcgtggacagctactgctgggccgccgtgcagcagaagaacagcctgcagagcgagagcggcaacctgcccctgtggctgcacaagttcttcccctacatcctgctgctgttcgccatcctgctgtacctgccccccctgttctggagattcgccgccgccccccacatctgcagcgacctgaagttcatcatggaggagctggacaaggtgtacaacagagccatcaaggccgccaagagcgccagagacctggacatgagagacggcgcctgcagcgtgcccggcgtgaccgagaacctgggccagagcctgtgggaggtgagcgagagccacttcaagtaccccatcgtggagcagtacctgaagaccaagaagaacagcaacaacctgatcatcaagtacatcagctgcagactgctgaccctgatcatcatcctgctggcctgcatctacctgggctactacttcagcctgagcagcctgagcgacgagttcgtgtgcagcatcaagagcggcatcctgagaaacgacagcaccgtgcccgaccagttccagtgcaagctgatcgccgtgggcatcttccagctgctgagcgtgatcaacctggtggtgtacgtgctgctggcccccgtggtggtgtacaccctgttcgtgcccttcagacagaagaccgacgtgctgaaggtgtacgagatcctgcccaccttcgacgtgctgcacttcaagagcgagggctacaacgacctgagcctgtacaacctgttcctggaggagaacatcagcgaggtgaagagctacaagtgcctgaaggtgctggagaacatcaagagcagcggccagggcatcgaccccatgctgctgctgaccaacctgggcatgatcaagatggacgtggtggacggcaagacccccatgagcgccgagatgagagaggagcagggcaaccagaccgccgagctgcagggcatgaacatcgacagcgagaccaaggccaacaacggcgagaagaacgccagacagagactgctggacagcagctgctag

SEQ ID NO: 186192 - protein, 126 aa, Artificial Sequence
  derived and/or modified sequence
MPFFGNTFSPKKTPPRKSASLSNLHSLDRSTREVELGLEYGSPTMNLAGQSLKFENGQWIAETGVSGGVDRREVQRLRRRNQQLEEENNLLRLKVDILLDMLSESTAESHLMEKELDELRISRKRK

SEQ ID NO: 186193 - protein, 61 aa, Artificial Sequence
  derived and/or modified sequence
MPFFGNTFSPKKTPPRKSASLSNLHSLDRSTREVELGLEYGSPTMNLAGQSLKFENGQWIA

SEQ ID NO: 186194 - protein, 101 aa, Artificial Sequence
  derived and/or modified sequence
MPFFGNTFSPKKTPPRKSASLSNLHSLDRSTREVELGLEYGSPTMNLAGQSLKFENGQWIAETGVSGGVDRREVQRLRRRNQQLEEENNLLRLKVDILLDM

SEQ ID NO: 186195 - DNA, 381 bp, Artificial Sequence
  derived and/or modified sequence
atgcccttcttcggcaacaccttcagccccaagaagaccccccccagaaagagcgccagcctgagcaacctgcacagcctggacagaagcaccagagaggtggagctgggcctggagtacggcagccccaccatgaacctggccggccagagcctgaagttcgagaacggccagtggatcgccgagaccggcgtgagcggcggcgtggacagaagagaggtgcagagactgagaagaagaaaccagcagctggaggaggagaacaacctgctgagactgaaggtggacatcctgctggacatgctgagcgagagcaccgccgagagccacctgatggagaaggagctggacgagctgagaatcagcagaaagagaaagtag

SEQ ID NO: 186196 - DNA, 186 bp, Artificial Sequence
  derived and/or modified sequence
atgcccttcttcggcaacaccttcagccccaagaagaccccccccagaaagagcgccagcctgagcaacctgcacagcctggacagaagcaccagagaggtggagctgggcctggagtacggcagccccaccatgaacctggccggccagagcctgaagttcgagaacggccagtggatcgcctag

SEQ ID NO: 186197 - DNA, 306 bp, Artificial Sequence
  derived and/or modified sequence
atgcccttcttcggcaacaccttcagccccaagaagaccccccccagaaagagcgccagcctgagcaacctgcacagcctggacagaagcaccagagaggtggagctgggcctggagtacggcagccccaccatgaacctggccggccagagcctgaagttcgagaacggccagtggatcgccgagaccggcgtgagcggcggcgtggacagaagagaggtgcagagactgagaagaagaaaccagcagctggaggaggagaacaacctgctgagactgaaggtggacatcctgctggacatgtag

SEQ ID NO: 186198 - DNA, 381 bp, Artificial Sequence
  derived and/or modified sequence
atgccgttcttcggtaatactttcagtcctaaaaagacgccccccagaaagtcagcaagcttgagcaatctacattctttggaccggtcaactcgggaggtcgaattgggcctggagtatggatcgcccaccatgaatctggcgggacagtccctgaaatttgagaacggtcagtggatagccgagacaggtgtctcagggggggtagatcggagagaggtgcagaggctacgccgacgcaatcagcagttggaggaagagaacaacctcctcaggcttaaggttgatattctgttagatatgctgagtgagtcgaccgctgaaagccacctgatggaaaaggaactcgatgagcttaggatcagtagaaagcggaaatag

SEQ ID NO: 186199 - DNA, 186 bp, Artificial Sequence
  derived and/or modified sequence
atgccattcttcgggaatacctttagcccaaaaaaaaccccaccgcgcaagtccgcttcactctccaacctgcactccttggatcgatcaaccagggaagtggagctcgggttggaatatggttctcccaccatgaatctcgctgggcagtcactgaaatttgagaatggccaatggatcgcttag

SEQ ID NO: 186200 - DNA, 306 bp, Artificial Sequence
  derived and/or modified sequence
atgccattcttcgggaataccttctcccctaagaaaacccctccccggaagtcggctagtttatctaatctccactctctggataggagcactagagaggtcgagctgggactggaatacggatctccaactatgaaccttgccggtcagtcccttaagttcgaaaatggccaatggatcgccgagaccggggtatcaggaggtgtggatcgtcgggaagtacagagacttaggagaagaaaccagcagctcgaggaagagaacaatctgctccgtctaaaggtcgacatacttctagatatgtag

SEQ ID NO: 186201 - DNA, 381 bp, Artificial Sequence
  derived and/or modified sequence
atgcccttcttcggcaacaccttcagccccaagaagaccccacccaggaagagcgccagcctgagcaacctgcacagcctggacaggagcacccgggaggtggagctgggcctggagtatggcagccccaccatgaacctggccggccagagcctgaagtttgaaaatggccagtggattgctgagactggagtgtctgggggcgtggacagaagagaggtgcagaggctgcggcggaggaaccagcagctggaggaggagaacaacctgctgcggctgaaggtggacatcctgctggacatgctgtctgagagcacagctgagagccacctgatggagaaggagctggatgagctgcgcatcagcaggaagaggaagtag

SEQ ID NO: 186202 - DNA, 186 bp, Artificial Sequence
  derived and/or modified sequence
atgcccttcttcggcaacaccttcagccccaagaagaccccacccaggaagagcgccagcctgagcaacctgcacagcctggacaggagcacccgggaggtggagctgggcctggagtatggcagccccaccatgaacctggccggccagagcctgaagtttgaaaatggccagtggatcgcctag

SEQ ID NO: 186203 - DNA, 306 bp, Artificial Sequence
  derived and/or modified sequence
atgcccttcttcggcaacaccttcagccccaagaagaccccacccaggaagagcgccagcctgagcaacctgcacagcctggacaggagcacccgggaggtggagctgggcctggagtatggcagccccaccatgaacctggccggccagagcctgaagtttgaaaatggccagtggattgctgagactggagtgtctgggggcgtggacagaagagaggtgcagaggctgcggcggaggaaccagcagctggaggaggagaacaacctgctgcggctgaaggtggacatcctgctggacatgtag

SEQ ID NO: 186204 - DNA, 381 bp, Artificial Sequence
  derived and/or modified sequence
atgcccttcttcggcaacaccttcagccccaagaagacccccccccggaaatccgctagtcttagtaatttacacagccttgaccgatctaccagagaggttgaactggggctcgagtacgggtctccaactatgaaccttgctggccagtccctgaagttcgagaacggtcagtggatcgcggaaaccggggtgagcggaggcgtcgacagacgtgaagtgcagaggttgagacggcggaaccaacaactggaggaggagaataatctcctgcgattgaaggtcgatatcctcttagatatgctctccgagagtaccgccgagagtcacctcatggagaaggaattggatgagctgagaatcagcagaaagcgcaaatag

SEQ ID NO: 186205 - DNA, 186 bp, Artificial Sequence
  derived and/or modified sequence
atgcccttcttcggcaacaccttcagccccaagaagaccccccccaggaagtccgcatctctgtcgaatctccacagcctggaccggtcaacgagggaggtcgaactcgggctggagtacggatccccaaccatgaatttagcaggccagtccctgaagttcgaaaacgggcagtggatcgcttag

SEQ ID NO: 186206 - DNA, 306 bp, Artificial Sequence
  derived and/or modified sequence
atgcccttcttcggcaacaccttcagccccaagaagacccccccccggaagtccgccagtttatccaatctgcacagtcttgacagatctaccagagaggtcgaactcgggctagagtatgggtcacctacaatgaacttggctggacagtccttgaaattcgagaatggtcaatggatcgcagagaccggtgtgtcaggcggtgtcgacaggcgagaggtacaacggctgcgcagacgcaatcagcagttggaggaagagaataatctcctgcggcttaaagtggacatccttctggacatgtag

SEQ ID NO: 186207 - DNA, 381 bp, Artificial Sequence
  derived and/or modified sequence
atgcctttcttcgggaataccttctcaccaaaaaaaacacctccacgaaaatcggcctctttgtctaacttgcattctctggaccggagcacacgggaggtcgagctgggcctggagtatggttcacccactatgaatttggctggccagtcattgaaatttgaaaatgggcagtggatcgctgaaaccggggtctcagggggtgtggataggcgcgaggtgcagcgcctgcggcgtagaaaccagcagctggaagaggagaataacctactccggctgaaagtggacattctcctggacatgctcagcgaaagtaccgctgagtcccatttgatggagaaggaattagacgaactgcgtatcagcagaaagcgtaaatag

SEQ ID NO: 186208 - DNA, 186 bp, Artificial Sequence
  derived and/or modified sequence
atgccctttttcggcaatactttttccccaaagaaaactcccccacgcaaatctgccagcctgtccaacctacattccctggacaggagcaccagagaggttgaactggggttggaatatgggtctcccaccatgaacctggccggtcagtctcttaagtttgagaatggacagtggattgcctag

SEQ ID NO: 186209 - DNA, 306 bp, Artificial Sequence
  derived and/or modified sequence
atgccgttctttggcaacacgttctctccaaaaaagactccacctagaaagtccgcaagtcttagtaatttgcactccctggatcgcagcacaagagaagtggagctcggcctggagtacgggtctccaacgatgaatttggcaggccagtccttgaaattcgaaaatggacagtggatcgccgagaccggagtgagcgggggtgtggatcgacgagaagtccagcggctgaggcgcaggaaccagcagctagaagaggaaaataacctgctgcgcctgaaggttgatatcctcttagacatgtag

SEQ ID NO: 186210 - DNA, 381 bp, Artificial Sequence
  derived and/or modified sequence
atgcctttctttggaaacacattctcgcccaagaagacgccaccacggaaaagcgcgtctctgtctaatcttcattcgttggatagatcaaccagggaggtagaattgggcctcgagtatggcagtcccacaatgaatctggccgggcaatccctcaagttcgagaacggtcagtggatcgctgagaccggggtttccgggggagtagatcggagagaagtgcaacggcttcggcggcgcaatcaacagttggaggaagaaaacaatctgcttcgcctgaaggttgacattctgctcgacatgctgtctgaatccaccgccgagtctcatttaatggaaaaagaactagacgaactaaggatttcccgaaagagaaaatag

SEQ ID NO: 186211 - DNA, 381 bp, Artificial Sequence
  derived and/or modified sequence
atgcccttcttcggcaacaccttcagccccaagaagaccccccccaggaaatccgctagcctgtctaacctgcattcactggataggagtacccgcgaggtagaattagggctggaatacggatcacctaccatgaatctcgcagggcaatccttgaaattcgaaaacggacagtggattgccgagactggcgtgagcgggggcgtcgaccgccgggaagtccagaggttgcgaagaagaaaccagcaactcgaggaagagaataatctgctgcggcttaaggtggacatcttgctggatatgctttccgagagcacggccgagagccacttaatggagaaggagctggacgaacttaggattagcaggaagaggaagtag

SEQ ID NO: 186212 - DNA, 381 bp, Artificial Sequence
  derived and/or modified sequence
atgcctttctttggaaatactttctcgcctaagaagacaccacccagaaaatccgcctctctcagcaacctacattctctggatcgctcaaccagggaggttgagctcgggctggaatatgggtccccaactatgaatttggctggtcagagcctgaaattcgagaacgggcaatggatcgccgagaccggcgtgtccggaggggtcgatcggcgagaggtgcagaggctcagacgcaggaaccagcagctggaggaagagaataaccttctccgcctgaaagtggacatacttctggacatgctttcggagagcactgccgaaagccacctaatggagaaagaactggacgaattacgaatctccagaaagaggaaatag

SEQ ID NO: 186213 - protein, 929 aa, Artificial Sequence
  derived and/or modified sequence
MEGDGVPWGSEPVSGPGPGGGGMIRELCRGFGRYRRYLGRLRQNLRETQKFFRDIKCSHNHTCLSSLTGGGGAERGPAGDVAETGLQAGQLSCISFPPKEEKYLQQIVDCLPCILILGQDCNVKCQLLNLLLGVQVLPTTKLGSEESCKLRRLRFTYGTQTRVSLALPGQYELVHTLVAHQGNWETIPEEDLEVQENNEDAAHVLAELEVTMHHALLQEVDVVVAPCQGLRPTVDVLGDLVNDFLPVITYALHKDELSERDEQELQEIRKYFSFPVFFFKVPKLGSEIIDSSTRRMESERSPLYRQLIDLGYLSSSHWNCGAPGQDTKAQSMLVEQSEKLRHLSTFSHQVLQTRLVDAAKALNLVHCHCLDIFINQAFDMQRDLQITPKRLEYTRKKENELYESLMNIANRKQEEMKDMIVETLNTMKEELLDDATNMEFKDVIVPENGEPVGTREIKCCIRQIQELIISRLNQAVANKLISSVDYLRESFVGTLERCLQSLEKSQDVSVHITSNYLKQILNAAYHVEVTFHSGSSVTRMLWEQIKQIIQRITWVSPPAITLEWKRKVAQEAIESLSASKLAKSICSQFRTRLNSSHEAFAASLRQLEAGHSGRLEKTEDLWLRVRKDHAPRLARLSLESCSLQDVLLHRKPKLGQELGRGQYGVVYLCDNWGGHFPCALKSVVPPDEKHWNDLALEFHYMRSLPKHERLVDLHGSVIDYNYGGGSSIAVLLIMERLHRDLYTGLKAGLTLETRLQIALDVVEGIRFLHSQGLVHRDIKLKNVLLDKQNRAKITDLGFCKPEAMMSGSIVGTPIHMAPELFTGKYDNSVDVYAFGILFWYICSGSVKLPEAFERCASKDHLWNNVRRGARPERLPVFDEECWQLMEACWDGDPLKRPLLGIVQPMLQGIMNRLCKSNSEQPNRGLDDST

SEQ ID NO: 186214 - DNA, 2790 bp, Artificial Sequence
  derived and/or modified sequence
atggaaggtgatggagtgccttggggatcagaaccagtatccggcccagggccaggcgggggaggcatgattcgagagttatgccggggcttcggccggtatcgcaggtatctgggtcgcctgcgccagaatttgcgcgagacacagaaattctttcgcgacatcaagtgtagccataatcacacatgccttagttcattgacgggaggaggcggcgcggagcgaggacctgctggcgatgtggcagaaaccggactacaggcagggcagctcagttgtatctcattcccacccaaggaagagaaatacctccagcaaatcgtggattgcctgccctgcatcctgatcctaggccaggattgcaacgtgaaatgtcagctgttaaatttactcctcggtgttcaggtactccctacaacaaaattgggcagcgaggagagctgcaaacttcgacggctgcggttcacgtacggaacacagaccagagtgagtcttgccctcccaggccagtacgaactggtgcacacactggtggcccatcaaggcaactgggaaaccatccctgaggaggatctggaagtccaggagaacaacgaagatgccgcacatgtcctggcagagttggaagtcactatgcaccacgcactgttacaggaagttgatgtggtagtggccccatgccaaggtctgagaccaaccgtggacgtccttggcgatctggtcaacgacttccttccggttataacctacgccctccataaggacgaactttcagaacgggacgagcaggagctacaggagatccgaaagtatttttcttttcccgtgttctttttcaaagtgcccaagttgggtagcgagatcattgatagcagtaccaggcggatggagtcggagaggtcaccgctctaccgccagctgattgatctggggtatttgagcagttcccactggaactgtggcgctcccggccaagataccaaggctcagagcatgctggttgaacagtccgaaaagctccgacaccttagtaccttcagccaccaagtgctccagacaaggctcgttgacgcagctaaagctctgaatctggtgcactgtcactgtttggacatttttatcaatcaggcctttgacatgcagagggacctgcagattacccccaaacgcctcgagtataccaggaagaaggagaacgagctgtatgaatcactcatgaatattgcaaatcggaaacaggaagaaatgaaggacatgattgtggagaccttgaacacaatgaaggaggagctcctggatgacgccaccaatatggagtttaaagatgtgatagtgcccgagaacggagagcctgtaggaacacgcgagattaagtgctgcataagacagatccaagaattaattatctcccggctcaatcaggccgtggctaacaagctgatctcatcagtcgactacctacgagaatcctttgtcggcactctcgagaggtgcctccagtcgctggagaagtctcaagatgtctctgttcacattacttctaattacctgaagcagatcctgaatgccgcatatcacgtggaggtcacatttcacagtggtagctcagtgaccagaatgttatgggagcagatcaagcagataatccaacgaattacttgggtttccccacctgcaatcacactggagtggaaaaggaaagtagctcaggaagcaattgagagtctctcagcttcgaaattggcaaagtcgatctgtagccagtttcggaccaggctgaactcatcccacgaggctttcgctgcttcactgcgccaattggaggccggccacagcgggaggctggaaaaaacagaggatctttggcttcgggtgcgtaaggaccatgcacctcgtctcgccagactgagcctcgagtcatgtagtctgcaggacgtcctcctgcatcgcaagccaaaattggggcaagagctcggaagggggcaatatggtgtggtctacctctgcgataattggggcggccactttccctgcgcactgaagagtgtggtgcccccagacgaaaaacattggaatgatctcgcactcgagtttcactatatgagatctctgccaaagcatgagagacttgttgacttgcacggctcagtcatcgattataactacgggggtggatcaagcatcgctgtattgctcatcatggagcgtctgcacagagacctgtacaccggtctgaaagctggtctgacattggagacacggttgcagatcgccttggatgtggtggaggggattcgcttcctccactcccaaggtttagttcacagggacatcaaattgaagaacgtgctgttagataagcagaatagggcgaagattaccgatctcgggttttgcaaacctgaggcaatgatgtccggctccattgtgggcacccctatccacatggctcctgagctgtttaccggtaagtatgataacagtgtcgacgtttatgcgtttgggattctgttctggtacatttgctcgggcagcgtcaagctgccagaggcctttgagcggtgcgcaagcaaggaccatttgtggaataatgtccggcggggcgcccgccccgagagactgccggttttcgacgaagagtgttggcagcttatggaggcttgctgggatggagatcccctgaaaaggcccctgctgggcatcgtgcagcccatgctccagggaatcatgaacagactttgtaaatccaattcggaacagccgaaccggggtttggacgatagcacttag

SEQ ID NO: 186215 - DNA, 2790 bp, Artificial Sequence
  derived and/or modified sequence
atggagggagatggagtgccctggggcagcgagcctgtgtctggccctggccctgggggcggcggcatgatccgggagctgtgccggggcttcggccgctaccgccgctacctgggccgcctgcggcagaacctgcgggagacccagaagttcttccgggacatcaagtgcagccacaaccacacctgcctgagcagcctgaccggcggcggcggcgctgagcggggccctgctggagatgtggccgagaccggcctgcaggccggccagctgagctgcatctccttcccccccaaggaggagaagtacctgcagcagatcgtggactgcctgccctgcatcctgatcctgggccaggactgcaatgtgaagtgccagctgctgaacctgctgctgggcgtgcaggtgctgcccaccaccaagctgggcagcgaggagagctgcaagctgcggcggctgcgcttcacctacggcacccagaccagggtgtccctggccctgcccggccagtatgagctggtgcacaccctggtggcccaccagggcaactgggagaccatccctgaggaggacctggaggtgcaggagaacaatgaagatgctgcccacgtgctggccgagctggaggtgaccatgcaccacgccctgctgcaggaggtggatgtggtggtggccccctgccagggcctgcggcccaccgtggatgtgctgggggacctggtgaatgacttcctgcccgtcatcacctacgccctgcacaaggatgagctgtctgaaagagatgagcaggagctgcaggagatcaggaagtacttctccttccctgtgttcttcttcaaggtgcccaagctgggcagcgagatcatcgacagcagcaccaggaggatggagagcgagaggagccccctgtaccggcagctgattgacctgggctacctgagcagcagccactggaactgtggggcccctggccaggacaccaaggcccagagcatgctggtggagcagagcgagaagctgcggcacctgagcaccttcagccaccaggtgctgcagacccggctggtggatgctgccaaggccctgaacctggtgcactgccactgcctggacatcttcatcaaccaggcctttgacatgcagagggacctgcagatcacccccaagaggctggagtacaccaggaagaaggaaaatgagctgtatgagagcctgatgaacatcgccaacaggaagcaggaggagatgaaggacatgattgtggagaccctgaacaccatgaaggaggagctgctggatgatgccaccaacatggagttcaaggatgtgattgtgcctgaaaatggagagcctgtgggcacccgggagatcaagtgctgcatccggcagatccaggagctgatcatcagccggctgaaccaggccgtggccaacaagctgatcagctctgtggactacctgcgggagagctttgtgggcaccctggagcgctgcctgcagagcctggagaagagccaggatgtgtctgtgcacatcaccagcaactacctgaagcagatcctgaatgctgcctaccacgtggaggtgaccttccacagcggcagctctgtgaccaggatgctgtgggagcagatcaagcagatcatccagaggatcacctgggtgtccccaccagccatcaccctggagtggaagaggaaggtggcccaggaggccatcgagagcctgagcgccagcaagctggccaagagcatctgcagccagttccgcacccggctgaacagcagccatgaggcctttgctgccagcctgcggcagctggaggccggccacagcggccgcctggagaagacagaggacctgtggctgcgggtgaggaaggaccacgccccccggctggcccggctgagcctggagagctgcagcctgcaggatgtgctgctgcacaggaagcccaagctgggccaggagctgggccggggccagtatggagtggtgtacctgtgtgacaactggggcggccacttcccctgtgccctgaagtctgtggtgcccccagatgagaagcactggaatgacctggccctggagttccactacatgaggagcctgcccaagcatgagcggctggtggacctgcacggcagcgtcatcgactacaactacggcggcggcagcagcattgctgtgctgctgatcatggagcggctgcaccgggacctgtacacaggcctgaaggccggcctgaccctggagacccggctgcagatcgccctggatgtggtggagggcatccgcttcctgcacagccagggcctggtgcaccgggacatcaagctgaagaatgtgctgctggacaagcagaacagagccaagatcacagacctgggcttctgcaagccagaggccatgatgagcggcagcatcgtgggcacccccatccacatggcccctgagctgttcaccgggaagtatgacaacagcgtggatgtgtatgccttcggcatcctcttctggtacatctgcagcggctctgtgaagctgcctgaggcctttgagcgctgtgccagcaaggaccacctgtggaacaacgtgcggcggggggcccggcctgagcggctgcctgtgtttgatgaggagtgctggcagctgatggaggcctgctgggatggagaccccctgaagaggcccctgctgggcatcgtgcagcccatgctgcagggcatcatgaaccggctgtgcaagagcaacagcgagcagcccaacagaggcctggatgacagcacctag

SEQ ID NO: 186216 - DNA, 2790 bp, Artificial Sequence
  derived and/or modified sequence
atggagggcgacggcgtgccctggggcagcgagcccgtgagcggccctggaccaggaggcggaggcatgatacgggaactgtgccgaggattcggcagatacagacggtacctgggacggctgcgccagaatctccgcgagacacagaagttctttcgggatatcaagtgctctcacaaccatacctgtctctcgagtctgactggggggggaggggctgagcgaggacccgcgggcgatgtagccgagacaggccttcaagcgggccagctcagctgcattagcttccccccaaaggaagagaaatacttgcagcaaatcgtagattgtctgccctgcattctgatactgggtcaggactgcaatgtcaagtgccagcttctgaatcttctgctgggagtgcaggtacttcccactacgaaactggggtccgaagagtcctgcaagctacgccgccttagattcacttacggcactcagacaagggtgagcttggcactgccaggacagtacgagctcgttcatacattggtggctcaccaggggaactgggaaacaatccccgaggaggacctggaggtgcaagagaacaacgaggacgctgctcacgtcctggccgaattggaagttaccatgcatcacgccttgctgcaggaggtggacgtcgtggttgctccctgtcaaggcctgcgtccaacagttgacgtgctgggcgacctggtgaatgactttcttccagtcattacctatgcgttgcataaggatgagctcagcgaacgcgatgagcaggaattgcaggagataaggaaatacttttcgtttccagttttcttcttcaaggtgccaaaattaggaagcgagataatagactcaagtaccagacggatggagtccgagaggtcccctctgtaccggcagttgattgatcttgggtatctgagttcttctcactggaactgcggtgctccaggacaagatactaaagcccaaagcatgctggtggagcagtcggagaagttacgtcacctcagcacatttagccaccaggtgctgcaaactcgtctggtggatgccgccaaagctttgaatcttgtgcactgtcactgtctcgacattttcattaatcaggctttcgacatgcagcgcgacctgcaaatcaccccaaagagattagaatatacaaggaaaaaggagaacgaactgtatgagtccctcatgaatatcgctaaccgaaagcaagaagaaatgaaggatatgatcgtggagactctaaataccatgaaggaggaactccttgatgacgcgactaacatggagtttaaagacgtcattgtgccagaaaatggggaacctgttggaacccgcgagataaagtgttgcattcgccaaatccaagagttgataatcagcagactgaaccaggcagttgccaataaactgatctcatctgtagattatctgcgggaaagctttgtggggactctggaaaggtgtttacagagccttgagaagagccaggatgtctcggtacatataaccagcaactacctcaaacaaattttgaacgcagcctaccacgtggaggtgaccttccattccggatccagtgtgactcgcatgctctgggagcaaattaagcagatcatacaaagaatcacctgggtctcaccaccagcaataacattggaatggaagagaaaggtagcccaggaagccatcgaatcactgtccgctagtaagttagccaagagcatctgctctcagtttcgcaccaggttaaacagttctcacgaggccttcgcagcaagcctacggcagttagaggctgggcactctggaagactcgaaaagacagaggacttatggctgagggttcgcaaggaccacgcaccaagactggcccggttgtccctggaatcctgttcattgcaggacgttttgctccatcggaagccaaaactgggccaggaactcggccggggccagtatggcgttgtctatctgtgtgataattggggaggacatttcccttgtgcgctgaagtcagttgtcccgcctgatgagaagcactggaatgatctggctttggagttccattacatgcgtagcttgcccaagcacgaaagactggttgatctccatggatctgttatcgactacaactacggggggggatccagcatagctgtgctccttatcatggaacgtttgcatagggacctttatacgggcctaaaggctggacttaccctggagactcgcttgcagatagcgctggatgttgtggaaggtatccgatttctgcactcccaagggctggttcacagggatatcaagctcaagaacgtgctgctagataagcagaatagggctaagattaccgatttaggattttgcaagcccgaagccatgatgtctggctctatcgtcggtacacccattcacatggcaccggagctattcacaggaaagtacgataactctgtggatgtatacgcatttggcatactcttttggtacatctgttccggttctgtcaaactaccagaggctttcgagcgttgcgcatccaaggatcatctgtggaataacgtgcggcgtggcgcccgacccgagagactccccgtgttcgacgaggagtgctggcagctgatggaggcctgttgggacggagacccgctgaagagaccattgctggggatcgtgcagcctatgttgcaaggaatcatgaatagactctgcaaatccaacagcgaacagccaaacagggggcttgacgactccacgtag

SEQ ID NO: 186217 - DNA, 2790 bp, Artificial Sequence
  derived and/or modified sequence
atggagggggacggcgtcccttggggatcggaacctgtgtctggacccggaccagggggtgggggaatgatccgagaattgtgcaggggtttcgggagatatcgtagataccttggacgactccgccagaacctccgtgaaactcaaaagtttttccgcgatataaaatgttcccataatcacacctgtctaagtagtctaacaggtggagggggagctgaacgaggtccggcaggagacgtagcagagacaggcctgcaggcaggacagctgagctgtatcagctttccacccaaggaggagaaatacctgcagcagatcgtggattgtttgccgtgtatactgatcctggggcaagattgcaacgttaagtgtcagcttctgaaccttctcctgggcgtgcaagttctcccaacaacaaagctcggctccgaggaatcctgtaagctaagacgcctgagatttacgtacggcacacagacccgggtgtcactagctctccccggtcagtacgagctggtgcacacattggtagcccaccagggaaattgggagaccattcctgaggaggatctcgaggttcaggagaataatgaagacgctgcccacgtactggctgagctggaagtgaccatgcatcatgccctcctgcaggaggtggacgtggtggtggccccatgtcaagggctgagacctacggtggatgtattgggagacctggtcaatgactttctacccgtgatcacctacgctctgcacaaggatgaattatccgagcgtgacgagcaggagttacaggaaatacgaaaatatttttcctttcccgtgttcttcttcaaggtgcccaaactgggaagcgaaattattgactctagtacccggaggatggagagtgagaggagtcccctctatcgccagttgatcgacctgggttaccttagcagtagccactggaactgcggagccccaggacaggatactaaggctcaatctatgcttgtggagcagagtgaaaaactccgacacctgagtacatttagccatcaggtcttgcagacaaggttagtagacgcggcaaaagcgctgaatctcgtccattgccattgcctcgatattttcatcaatcaggccttcgacatgcagagggatctgcaaataacacccaaacggctcgagtatactcgcaagaaggagaacgagctgtatgagagcctcatgaatattgcaaacaggaagcaggaggagatgaaggatatgattgttgagactctaaacacaatgaaagaagaacttctcgatgacgctacaaacatggagtttaaggacgtgatcgtgcccgaaaacggcgaaccggttgggacccgggagattaaatgctgcatcaggcagatccaggagctcatcatttccaggctcaatcaggcagtagcaaataagctcatctctagtgtggattacctccgcgagtcattcgtgggcacactggaaagatgccttcaatctctggagaaatctcaagacgtatccgtgcacatcacctctaattatttgaagcagatcttaaacgcagcctaccatgtagaggtgaccttccacagtggctcttcagtgaccagaatgttgtgggagcagatcaagcagatcattcagcggattacttgggtgagcccgcctgcaattaccttggagtggaagagaaaggtggcccaggaagcaattgagagtctatcagctagtaaactggccaagtctatctgctcccagtttaggactaggttaaatagcagccatgaggcatttgctgcatccctcaggcagctggaggccggacattcgggcaggctggagaaaaccgaggacttgtggctgcgcgttagaaaggatcatgctccacgacttgcacgcctcagcctggagtcatgttccctccaggatgtcctgttacacaggaagcccaaacttggccaagagttaggacgcggacagtacggagttgtgtacttgtgtgataattggggtgggcacttcccgtgtgctctgaagagcgtggtgccacctgatgagaagcactggaacgatctggcactggagttccactacatgagatccttgcctaagcacgagcggctggtggacttgcacgggtctgtaatcgactataattacgggggaggcagctccattgctgtcctgctgatcatggagagacttcatcgggatctgtatacaggactgaaggctggactgactttggagacccgcttacaaattgccctggacgtcgtagaaggtatcagatttttgcattcacaggggcttgtgcacagggatataaaactgaagaatgtcctattggacaagcagaatcgggcaaagattaccgacctgggcttctgcaagcccgaggctatgatgtcaggcagtatagtgggcactccaatccacatggcacccgagctgttcacaggcaagtacgacaattctgtagacgtctatgccttcggtattctcttttggtacatttgctctggcagtgtcaaactgccagaagctttcgagcggtgcgcctctaaagatcatctgtggaacaatgtgcggcgaggggctcggcctgagcgtctgcctgtgttcgacgaagagtgttggcagcttatggaggcatgttgggacggggaccccttgaagcgccctctactgggaatcgtccagcccatgctgcagggcatcatgaatagattgtgcaaaagcaactcagaacagccgaaccggggactggatgactcaacgtag

SEQ ID NO: 186218 - DNA, 2790 bp, Artificial Sequence
  derived and/or modified sequence
atggagggcgacggcgtgccctggggcagcgagcccgtgagcggccccggccccggcggcggcggcatgatcagagagctgtgcagaggcttcggcagatacagaagatacctgggcagactgagacagaacctgagagagacccagaagttcttcagagacatcaagtgcagccacaaccacacctgcctgagcagcctgaccggcggcggcggcgccgagagaggccccgccggcgacgtggccgagaccggcctgcaggccggccagctgagctgcatcagcttcccccccaaggaggagaagtacctgcagcagatcgtggactgcctgccctgcatcctgatcctgggccaggactgcaacgtgaagtgccagctgctgaacctgctgctgggcgtgcaggtgctgcccaccaccaagctgggcagcgaggagagctgcaagctgagaagactgagattcacctacggcacccagaccagagtgagcctggccctgcccggccagtacgagctggtgcacaccctggtggcccaccagggcaactgggagaccatccccgaggaggacctggaggtgcaggagaacaacgaggacgccgcccacgtgctggccgagctggaggtgaccatgcaccacgccctgctgcaggaggtggacgtggtggtggccccctgccagggcctgagacccaccgtggacgtgctgggcgacctggtgaacgacttcctgcccgtgatcacctacgccctgcacaaggacgagctgagcgagagagacgagcaggagctgcaggagatcagaaagtacttcagcttccccgtgttcttcttcaaggtgcccaagctgggcagcgagatcatcgacagcagcaccagaagaatggagagcgagagaagccccctgtacagacagctgatcgacctgggctacctgagcagcagccactggaactgcggcgcccccggccaggacaccaaggcccagagcatgctggtggagcagagcgagaagctgagacacctgagcaccttcagccaccaggtgctgcagaccagactggtggacgccgccaaggccctgaacctggtgcactgccactgcctggacatcttcatcaaccaggccttcgacatgcagagagacctgcagatcacccccaagagactggagtacaccagaaagaaggagaacgagctgtacgagagcctgatgaacatcgccaacagaaagcaggaggagatgaaggacatgatcgtggagaccctgaacaccatgaaggaggagctgctggacgacgccaccaacatggagttcaaggacgtgatcgtgcccgagaacggcgagcccgtgggcaccagagagatcaagtgctgcatcagacagatccaggagctgatcatcagcagactgaaccaggccgtggccaacaagctgatcagcagcgtggactacctgagagagagcttcgtgggcaccctggagagatgcctgcagagcctggagaagagccaggacgtgagcgtgcacatcaccagcaactacctgaagcagatcctgaacgccgcctaccacgtggaggtgaccttccacagcggcagcagcgtgaccagaatgctgtgggagcagatcaagcagatcatccagagaatcacctgggtgagcccccccgccatcaccctggagtggaagagaaaggtggcccaggaggccatcgagagcctgagcgccagcaagctggccaagagcatctgcagccagttcagaaccagactgaacagcagccacgaggccttcgccgccagcctgagacagctggaggccggccacagcggcagactggagaagaccgaggacctgtggctgagagtgagaaaggaccacgcccccagactggccagactgagcctggagagctgcagcctgcaggacgtgctgctgcacagaaagcccaagctgggccaggagctgggcagaggccagtacggcgtggtgtacctgtgcgacaactggggcggccacttcccctgcgccctgaagagcgtggtgccccccgacgagaagcactggaacgacctggccctggagttccactacatgagaagcctgcccaagcacgagagactggtggacctgcacggcagcgtgatcgactacaactacggcggcggcagcagcatcgccgtgctgctgatcatggagagactgcacagagacctgtacaccggcctgaaggccggcctgaccctggagaccagactgcagatcgccctggacgtggtggagggcatcagattcctgcacagccagggcctggtgcacagagacatcaagctgaagaacgtgctgctggacaagcagaacagagccaagatcaccgacctgggcttctgcaagcccgaggccatgatgagcggcagcatcgtgggcacccccatccacatggcccccgagctgttcaccggcaagtacgacaacagcgtggacgtgtacgccttcggcatcctgttctggtacatctgcagcggcagcgtgaagctgcccgaggccttcgagagatgcgccagcaaggaccacctgtggaacaacgtgagaagaggcgccagacccgagagactgcccgtgttcgacgaggagtgctggcagctgatggaggcctgctgggacggcgaccccctgaagagacccctgctgggcatcgtgcagcccatgctgcagggcatcatgaacagactgtgcaagagcaacagcgagcagcccaacagaggcctggacgacagcacctag

SEQ ID NO: 186219 - DNA, 7874 bp, Artificial Sequence
  derived and/or modified sequence
ccgagccgcaaagacagagcgggcagaggcgatggagggcgacggggtgccatggggcagcgagcccgtctcgggtcccggccccggcggcggcggaatgatccgcgagctgtgccggggcttcggccgctaccgccgctacctgggacggctgcgacagaacctgcgcgagacccagaagttcttccgcgacatcaagtgctcccacaaccacacttgtctctcctccctcacgggcggcggcggggccgagcgcggccctgcaggcgatgtcgccgaaaccgggctgcaggcgggccaactgagctgcatttccttcccacctaaggaagagaagtacctccagcagattgtggactgcctcccttgcatactgatcctcggccaggattgtaacgtcaagtgccagctgttgaatctgctgttgggggtgcaggtgcttcccaccaccaagctgggcagtgaggagagctgtaagcttcggcgcctccgcttcacctatgggactcagactcgggtcagcctggcgctccctggacagtatgaactagtgcacacgctggttgctcatcagggcaactgggagaccatccctgaggaggatctggaggtccaagagaacaatgaggatgctgctcatgttttagcggaactggaggtaacgatgcaccatgctctcttacaggaagtggacgttgtggtagcaccatgccaaggcctccggcccacagtggatgttctgggtgacttggtgaatgatttcttgcctgtgataacctatgcactccacaaagatgaactctctgagagggatgagcaagagcttcaggaaatccgaaagtatttctcctttcctgtattctttttcaaagtgccgaaactgggctcggagataatagactcctcaaccaggagaatggagagcgaaagatcaccgctttatcgccagctaattgacctgggctatctgagcagcagtcactggaactgtggggctcctggccaggatactaaagctcagagcatgttggtggaacagagtgaaaagctgagacacttgagcacattttctcaccaggtgttacagactcgcctggtggatgcagccaaggccctgaacctggtgcactgccactgccttgacatctttattaaccaggcatttgacatgcagcgggacctgcagatcactcccaaacgtctggaatatactcgaaaaaaggagaatgagttgtatgaatcattgatgaatattgccaaccgaaagcaggaggaaatgaaggatatgattgttgagacacttaataccatgaaggaggaacttctggatgatgctactaacatggagtttaaagacgtcattgtccctgagaatggagaaccagtaggcaccagagagatcaaatgctgcatccgacagatccaggaactcatcatctcccgacttaatcaggcagtggctaataagctgatcagctcagtggattacctgagggaaagcttcgtcggaaccctggaacgatgtctgcagagcctggagaagtctcaggatgtctcagttcacatcaccagtaattatctcaaacagatcttaaatgctgcctatcatgttgaagtcacgtttcactcagggtcgtcagttacaaggatgctatgggagcaaatcaaacagatcatccagcgcatcacatgggtgagcccacctgccatcactctggaatggaagaggaaggtggcccaggaagccattgagagcctcagcgcctccaaattggctaagagcatttgcagccaattccggactcggctcaatagttcccacgaggcttttgcagcctccttgcggcagctggaagctggccactcaggccggttagagaaaacggaagatctatggctgagggttcggaaagatcatgctccccgcctggcccgcctttctctggaaagctgttctttacaggatgtcttgcttcatcgtaaacctaaactgggacaggaactgggccggggccagtatggtgtggtatacctgtgtgacaactggggaggacacttcccttgtgccctcaaatcagttgtccctccagatgagaagcactggaatgatctggctttggaatttcactatatgaggtctctgccgaagcatgagcgattggtggatctccatggttcagtcattgactacaactatggtggtggctccagcattgctgtgctcctcattatggagcggctacaccgggatctctacacagggctgaaggctgggctgaccctggagacacgtttgcagatagcactagatgtggtggagggaatccgcttcctgcacagccagggacttgtccatcgtgatatcaaactgaaaaatgtgctgctggataagcagaaccgtgccaagatcactgacttaggattctgcaagccagaggccatgatgtcaggcagcattgtggggacaccaatccatatggcccctgaacttttcacagggaagtacgataattccgtggatgtctacgcttttggaattcttttctggtatatctgctcaggctctgtcaagctccctgaggcatttgagaggtgtgctagcaaagaccatctctggaacaatgtgcggaggggggctcgcccagaacgtcttcctgtgtttgatgaggagtgctggcagttgatggaagcctgttgggatggcgaccccttgaagaggcctctcttgggcattgtccagcccatgctccagggcatcatgaatcggctctgcaagtccaattctgagcagccaaacagaggactagatgattctacttgaaagcaaagacctttctctttcactctctagttatttccttccccctcaccttttggccatggggagaatttgacatttattcactataggacacactcccaagggaactggtgcttgctgggaaacttggaaccttcccaggcagggatgactcctggacagtgaagagttgaatgactgagcatattcagcagctcactgaagcgccaagctatccctttagcaaaaaagtgtctcagatgtgtaaaagctgaggaatgtggtgttctggcttcacaaatgaaaaggaggcagatgttaccattgtcttttcactgtatatacttctaagacagcaagcgggacactgcagtggcaatagtgttaaaaaatctcattctcatgatttttggctctagctaggaatagtttagtcaggactcagaaaatttgagcttagttctgggattatgaaaacatggggacaaaaacaataacttgtggatgtctggttcctgctgtctgcagccaggtatctcaggttgcaatggtcagaagtcccagtgagggagctagaaacagagctatctgttcctcatagtgccagtgtgtttacatttataggaccacatatccctggtttctgggggagggtttcactgttacatcaccaagaggccctgaaaagaggaaaaaaaaaaaaaaagaggccaggcatggtggctcacgcctgtaatctcagcactttgggaggctgaggcgggcggatcacaaggtccagagttcaagagcagcctggccaacatggtgaaaccccgtctctactaaagatacaaaaaattagccgggcgtggtggtgcatgcctgtaatccaagatactcaggaggctgaggcaggagaatcgcttgaacctgggaggcggaggttgcagtgagccgagatcatgccattgcactccagcctgggcgacagagtgagactctgtctcaaaaaaaaaaaaaaaatagaatgtgtatgcatatatttgtgtgtatatgtatatatgtgtgtgtgtctatatctctatctatatagacatacacacaggagttattggatttagagttactgctaaccccagaacagaatctgttcttttacctttgagtcttttcttttgtttacctcttttcatctcaaagtgggaaagctccagataacatggtacttaggagtgagtgtctaagcaaaaccaacccaatgcgaagtatttgggtgagaactgagaggtgggagatgattggaggccatggcctatgtacaaacatactggaagaaaaccagcttgtttttaaaacttaacacaatcagaaatttttctttttgtgtttgaatctaacacactgacgtttggaaaacttgatcaatgagcttttaaccacgatttctcccgcaatttgttccttctttttacctttttaaaaatctgttagaagaaaaaaagcagcagacgaaagagaaaaaccctcctctggtagttctgtgtgtgcccctcacccctgtgtgctagtgtctgggaagtttccctgaaaggtgggaggcgggtgggtggtcttttggagggttcctcatgaagtgtgcttgaggaaagaaattctgattctaggcagaggaaggggaacaatttaaatattggtgcatctcagatgcacttgacttcaagccttcctcaaccaaactggtccattagattccgaaaaacaggtagacgaggaagtagacagtggaagtgagtagtctccctccatctgcctaatccccaataactgtggtctggcccctgtgttcagcccgagagtttgtaaaacaggtccccaggtaggtgtataagatgagttgcaaattagccgggcatgctggcacgcaccagtaatcccagctacttgggaggctgaggcaggagaatcacttgaacccgggaggcagaggtcatggtgagccgagatcacgccactgcactccagcctgggcaacagagcgagactctatctcaaaaaaaaacaaaaaaaaaaacaaaaaacaaagatgagtcgcacatctgctgctgggattttctagggttgtctatgacagaatgaccatcttttaaatattaatggagtataaatggagtctataatgggtctttcatataacttttaactctttggctatcctgggctctgatcatgatatgtttgagcatagtagctccctaaactcttggagcctttcagaaattccatgtagtgctaataacctttttacttgcaaatgataaagtaactgactcagtgtctttgggctctgcaggctttagccttgttttggtaggatgttcagtatattctcagaatttttaccacctatttagctatacttcaagtactctattctctgcactaacttactgtccttctgggaactatgatggggcttcaagggagtcaggtgtcaagaaaggaggggtaagtactctctacttgctggaaaatcattgtaagtctgttgtgtatgaaattttaggaaaagtcttatatagttccctttccagactgttttcttttgactctaactataatcataagtctgtgcttccattatgaaggtcacattcctagcattcttgggaagtattagctcatactctcattcacatatgggaggttagatttttttcctctacccagagtccctttttagtttaccccacggcttagtttgctgtcagataccagttctctagcagattccccaacagttttttccccagtggggagggtggaagggagggactgatataagtaaggagatgagtagttgtgttacagttcattttctttaaaaaaaagtattttgagaaaaggtgcaaaatattcttgaaagtctctaggccagccaaagtccacatatggatatttggggatgttatttaaatactcagcaggctgagtgcaggtatacgtgtgtatagagtgtgtatactttgcttttgttttataacattgtcagctaattttggctttgttctttggcatccattcttattataagtgatggaatgccatgaaatgtactgtattgtatattacttgggaggacactaggttttcaaagaagtctggcagcacttgggttatagagggctcagcatgaccaaagtcctaaagattttacctcccagctttggttgtatgtgttcccaagtggtgaggtgagattgtggctggaggaagaaaaaggatggcatgaaagaatgacccttattgtggtctgtccttctaatcaacataattagggcagcttaccccaacatgaaaatgatgacctggccatttttaatggccagagcttgaagtctggtctctcattttgtttcagaaatgagtgagaggccttcctgcagagcagtcaggagaaatggtggagcctggggccctggaatggctgaccctgtgcctagagagctgatggcaagggctgtctggcatggctcatttgggtggggtttccccaggcataccttagttccctgatcctctgcaaagagtagctcattgactgagcaagcgcttcaggaggactgtgctggttgttcccagaccaaagagagtcacttttgactccatcaacttcaaggggacagagcctaggcagcagattctcctaatttttaacactaaaattcaaggaagcagtggaggaaagaatgcattactaccacagatagaaataggggactcatagaactctcgactagtacctgtcagctctcaaatgcattcttgtgtctttgcttgagctgccaaagaagggtcacaaagtgttcttcctcatggaagaagtgcctcggggttgcagggctgcaaagtgacaactgcactgaatgacactttattttttggctttggcttattatttagcactgggaggcccaggggaattggtgattacagtagcactttgggaagttaaagccccctttgggcttgctttggagagatgatggcatgcttggtattccatttggataatcaggaagcctccctagtccatccatattgtgtcagagtgggattaacaaccctggaagagtccactgccaaaagagtagttgctttcctggaatttccaaagcttttggattttctggatcaagtaacccactttttaaaacctgaggtcaggagttcgagaccagcctggtaacatggtgaaaccccgtctctattaaaaatagaaaaaattagccaggcatggtggcgggcacctatagtcccagctactcaggaggctgaggtaggagaattgcttgaacccaggagacagaggctgcattgagccaagatcacaccactgcactccagcctgggcagcagagcaagactccatctcaaaaaaaaaaaaaagaaaaagaaaaagaaggttaatccttcagttatggaggtgggatgaatagagcttgtttgatgttaaagtgggtaaggagggagtggccttgagacacttgtattccaaactctcctggaggtttccagtagcactactgttcctaaaagggtttcatttttaacttcatctgttttgttaacatccagtccaattgaggtgatctcagaggtgcatcaggacatctagcactggggaggccaccttgcccagatagttgaaaagaaaattggtctgggcagcctgttgtcttttgtcttcatgtaatgttttttctttgttttaaaggactaatgtttattacagtgttaaataaaagtgtaagatactaagtgtgtagaataaaagtgcaataacaaaagacaatgactttggcacacacttcagtctttatcctctctcctttcttgtgctacctggctctttccataatattgttacagcaggaccgtcttaattgtgtgcattttgaagagatgcgactctgggttaatcttcattagtgtaatattgaagggttgggtttggttttatagagtattctgtatacttgttgggatacacaaataccagatgtgctgtataataaagatcacattaacgttt

SEQ ID NO: 186220 - protein, 689 aa, Artificial Sequence
  derived and/or modified sequence
MGSSGLGKAATLDELLCTCIEMFDDNGELDNSYLPRIVLLMHRWYLSSTELAEKLLCMYRNATGESCNEFRLKICYFMRYWILKFPAEFNLDLGLIRMTEEFREVASQLGYEKHVSLIDISSIPSYDWMRRVTQRKKVSKKGKACLLFDHLEPIELAEHLTFLEHKSFRRISFTDYQSYVIHGCLENNPTLERSIALFNGISKWVQLMVLSKPTPQQRAEVITKFINVAKKLLQLKNFNTLMAVVGGLSHSSISRLKETHSHLSSEVTKNWNEMTELVSSNGNYCNYRKAFADCDGFKIPILGVHLKDLIAVHVIFPDWTEENKVNIVKMHQLSVTLSELVSLQNASHHLEPNMDLINLLTLSLDLYHTEDDIYKLSLVLEPRNSKSPTSPTTPNKPVVPLEWALGVMPKPDPTVINKHIRKLVESVFRNYDHDHDGYISQEDFESIAANFPFLDSFCVLDKDQDGLISKDEMMAYFLRAKSQLHCKMGPGFIHNFQEMTYLKPTFCEHCAGFLWGIIKQGYKCKDCGANCHKQCKDLLVLACRRFARAPSLSSGHGSLPGSPSLPPAQDEVFEFPGVTAGHRDLDSRAITLVTGSSRKISVRLQRATTSQATQTEPVWSEAGWGDSGSHTFPKMKSKFHDKAAKDKGFAKWENEKPRVHAGVDVVDRGTEFELDQDEGEETRQDGEDG

SEQ ID NO: 186221 - protein, 112 aa, Artificial Sequence
  derived and/or modified sequence
MGSSGLGKAATLDELLCTCIEMFDDNGELDNSYLPRIVLLMHRWYLSSTELAEKLLCMYRNATGESCNEFRLKICYFMRYWILKFPAEFNLDLGLIRMTEEFREVASQLGYE

SEQ ID NO: 186222 - DNA, 2070 bp, Artificial Sequence
  derived and/or modified sequence
atgggcagcagcggcctgggcaaggccgccaccctggacgagctgctgtgcacctgcatcgagatgttcgacgacaacggcgagctggacaacagctacctgcccagaatcgtgctgctgatgcacagatggtacctgagcagcaccgagctggccgagaagctgctgtgcatgtacagaaacgccaccggcgagagctgcaacgagttcagactgaagatctgctacttcatgagatactggatcctgaagttccccgccgagttcaacctggacctgggcctgatcagaatgaccgaggagttcagagaggtggccagccagctgggctacgagaagcacgtgagcctgatcgacatcagcagcatccccagctacgactggatgagaagagtgacccagagaaagaaggtgagcaagaagggcaaggcctgcctgctgttcgaccacctggagcccatcgagctggccgagcacctgaccttcctggagcacaagagcttcagaagaatcagcttcaccgactaccagagctacgtgatccacggctgcctggagaacaaccccaccctggagagaagcatcgccctgttcaacggcatcagcaagtgggtgcagctgatggtgctgagcaagcccaccccccagcagagagccgaggtgatcaccaagttcatcaacgtggccaagaagctgctgcagctgaagaacttcaacaccctgatggccgtggtgggcggcctgagccacagcagcatcagcagactgaaggagacccacagccacctgagcagcgaggtgaccaagaactggaacgagatgaccgagctggtgagcagcaacggcaactactgcaactacagaaaggccttcgccgactgcgacggcttcaagatccccatcctgggcgtgcacctgaaggacctgatcgccgtgcacgtgatcttccccgactggaccgaggagaacaaggtgaacatcgtgaagatgcaccagctgagcgtgaccctgagcgagctggtgagcctgcagaacgccagccaccacctggagcccaacatggacctgatcaacctgctgaccctgagcctggacctgtaccacaccgaggacgacatctacaagctgagcctggtgctggagcccagaaacagcaagagccccaccagccccaccacccccaacaagcccgtggtgcccctggagtgggccctgggcgtgatgcccaagcccgaccccaccgtgatcaacaagcacatcagaaagctggtggagagcgtgttcagaaactacgaccacgaccacgacggctacatcagccaggaggacttcgagagcatcgccgccaacttccccttcctggacagcttctgcgtgctggacaaggaccaggacggcctgatcagcaaggacgagatgatggcctacttcctgagagccaagagccagctgcactgcaagatgggccccggcttcatccacaacttccaggagatgacctacctgaagcccaccttctgcgagcactgcgccggcttcctgtggggcatcatcaagcagggctacaagtgcaaggactgcggcgccaactgccacaagcagtgcaaggacctgctggtgctggcctgcagaagattcgccagagcccccagcctgagcagcggccacggcagcctgcccggcagccccagcctgccccccgcccaggacgaggtgttcgagttccccggcgtgaccgccggccacagagacctggacagcagagccatcaccctggtgaccggcagcagcagaaagatcagcgtgagactgcagagagccaccaccagccaggccacccagaccgagcccgtgtggagcgaggccggctggggcgacagcggcagccacaccttccccaagatgaagagcaagttccacgacaaggccgccaaggacaagggcttcgccaagtgggagaacgagaagcccagagtgcacgccggcgtggacgtggtggacagaggcaccgagttcgagctggaccaggacgagggcgaggagaccagacaggacggcgaggacggctag

SEQ ID NO: 186223 - DNA, 342 bp, Artificial Sequence
  derived and/or modified sequence
atgggcagcagcggcctgggcaaggccgccaccctggacgagctgctgtgcacctgcatcgagatgttcgacgacaacggcgagctggacaacagctacctgcccagaatcgtgctgctgatgcacagatggtacctgagcagcaccgagctggccgagaagctgctgtgcatgtacagaaacgccaccggcgagagctgcaacgagttcagactgaagatctgctacttcatgagatactggatcctgaagttccccgccgagttcaacctggacctgggcctgatcagaatgaccgaggagttcagagaggtggccagccagctgggctacgagaagtag

SEQ ID NO: 186224 - DNA, 519 bp, Artificial Sequence
  derived and/or modified sequence
atgggcagcagcggcctgggcaaggccgccaccctggacgagctgctgtgcacctgcatcgagatgttcgacgacaacggcgagctggacaacagctacctgcccagaatcgtgctgctgatgcacagatggtacctgagcagcaccgagctggccgagaagctgctgtgcatgtacagaaacgccaccggcgagagctgcaacgagttcagactgaagatctgctacttcatgagatactggatcctgaagttccccgccgagttcaacctggacctgggcctgatcagaatgaccgaggagttcagagaggtggccagccagctgggctacgagaagcacgtgagcctgatcgacatcagcagcatccccagctacgactggatgagaagagtgacccagagaaagaaggtgagcaagaagggcaaggcctgcctgctgttcgaccacctggagcccatcgagctggccgagcacctgaccttcctggagcacaagagcttcagaagaatcagctag

SEQ ID NO: 186225 - DNA, 234 bp, Artificial Sequence
  derived and/or modified sequence
atgggcagcagcggcctgggcaaggccgccaccctggacgagctgctgtgcacctgcatcgagatgttcgacgacaacggcgagctggacaacagctacctgcccagaatcgtgctgctgatgcacagatggtacctgagcagcaccgagctggccgagaagctgctgtgcatgtacagaaacgccaccggcgagagctgcaacgagttcagactgaagatctgctacttctag

SEQ ID NO: 186226 - DNA, 339 bp, Artificial Sequence
  derived and/or modified sequence
atgggcagcagcggcctgggcaaggccgccaccctggacgagctgctgtgcacctgcatcgagatgttcgacgacaacggcgagctggacaacagctacctgcccagaatcgtgctgctgatgcacagatggtacctgagcagcaccgagctggccgagaagctgctgtgcatgtacagaaacgccaccggcgagagctgcaacgagttcagactgaagatctgctacttcatgagatactggatcctgaagttccccgccgagttcaacctggacctgggcctgatcagaatgaccgaggagttcagagaggtggccagccagctgggctacgagtag

SEQ ID NO: 186227 - DNA, 2070 bp, Artificial Sequence
  derived and/or modified sequence
atgggatcttctgggctgggtaaggccgctaccctggacgagctgttgtgcacctgcatcgaaatgtttgacgacaacggcgagctcgacaattcgtatctcccgagaatagtgcttctaatgcacaggtggtacttgtcaagcactgaattggcagagaaattactgtgcatgtaccgcaatgcaaccggtgagtcctgtaacgaatttagactgaaaatatgctatttcatgcgatattggatcctcaaattccctgccgagttcaatctggatctgggactgattcgtatgaccgaggaatttagagaggtcgcttcccagctgggctatgagaaacatgtctcactgatagacatcagtagcattcctagttatgattggatgcgccgagtcactcagaggaaaaaagtgtccaaaaagggcaaggcctgcctgctgttcgaccacctcgagccaattgaactcgcagagcatctaactttcctggaacacaagtcattccgcaggattagtttcactgattaccagtcctacgtcatacacggttgtctcgagaataacccaaccttggagcggtcaatagctttgtttaacggaataagcaaatgggtgcagttaatggtactgtcaaaaccaacccctcagcagcgggctgaggtgattaccaaattcataaatgtggcaaaaaaactgctgcaactcaaaaacttcaatacacttatggcagtggtaggtgggttgtcacatagctctatctcccgtctgaaagagacgcattcccatttgagcagcgaagtgactaagaactggaatgagatgacagaactcgtatccagcaacgggaattattgtaactacaggaaagccttcgcagattgcgatggttttaagatcccgattcttggggtccacttgaaggatcttatcgccgtccatgtaatattccctgactggactgaagaaaacaaagttaacattgtcaagatgcaccaattatctgtaactctttctgaactggtttctctccagaatgcatctcaccatctggaacccaatatggatcttattaatttattgactctaagtttggacctgtaccacaccgaggatgatatctacaaactgagcttagtgttggagccccgaaatagcaaatctccgaccagccctacaacccctaataagccagtggtgcctttggagtgggctcttggggtgatgcccaagcccgatcccacagtcataaataaacacattagaaaactggtcgaaagtgtgttcaggaattacgatcatgatcacgacggttatatttctcaagaagacttcgaatcaattgccgcaaacttccccttcctagactcattctgcgtgctggataaagaccaggatggattaatctctaaagatgaaatgatggcatatttcctgagggcgaagagccaactgcactgtaagatggggccggggttcatccacaactttcaggaaatgacctacctcaaacctaccttctgtgagcactgcgcgggattcctttggggaatcataaaacagggctacaaatgtaaggactgcggtgctaactgtcacaagcagtgcaaggacctgctggtgcttgcctgtaggagatttgctagggccccgagtctgagtagcggccacggaagcctgcccggctccccttctctgccacccgcccaggatgaagtgttcgaattccccggggttacagccggccaccgagacctcgattcacgagccattactctggtaacaggtagctcccggaaaatatcagtccgtctgcaacgagccactacaagccaggcgacccagactgagcccgtttggagtgaggctggctggggcgattccggttcccacacttttccaaaaatgaaaagcaaatttcacgacaaggccgctaaggataaaggcttcgcaaaatgggaaaacgaaaagccccgagtgcatgcgggagtggatgtcgtggaccggggcactgagttcgaactcgatcaggacgagggcgaggagacgcgtcaggacggggaggacggctag

SEQ ID NO: 186228 - DNA, 342 bp, Artificial Sequence
  derived and/or modified sequence
atgggatctagcggcctggggaaggccgcaacactggatgagcttctctgtacatgtattgagatgtttgacgacaacggagaactggataactcctacctccctagaattgtcctgctgatgcatagatggtatctgtcaagcacggaactcgccgagaagctgctctgtatgtataggaatgcaacaggggaaagctgcaatgagttcagactcaagatttgttacttcatgcgatattggattctaaagtttccggcagagttcaacttggacttaggactcattagaatgaccgaggaatttcgcgaggttgcttcacagttaggctacgaaaaatag

SEQ ID NO: 186229 - DNA, 519 bp, Artificial Sequence
  derived and/or modified sequence
atgggctcgtccggcctaggaaaagccgctactctggacgagttattatgcacctgtattgagatgttcgacgacaatggagagctggacaatagctacctgccacgaattgtgctcctcatgcaccgttggtacctctcctctactgaactggccgaaaaactgctgtgtatgtataggaacgctaccggcgaaagctgcaatgagttccggctcaagatatgctattttatgcgatactggattttaaaattcccggccgaatttaacctcgacctcggactgatcaggatgactgaggagtttagggaagtagcctcacaactgggatatgagaagcacgtctctcttatcgacatctcgtccattcccagctacgactggatgcgccgtgtgactcagcggaaaaaggtaagcaaaaaagggaaagcttgcctgcttttcgaccatctcgagcctattgagcttgcagagcatctgaccttcctcgaacacaaatcattccgtaggatctcctag

SEQ ID NO: 186230 - DNA, 234 bp, Artificial Sequence
  derived and/or modified sequence
atggggagctctgggctaggcaaggccgcaacattagacgagctgttatgtacttgcattgagatgttcgatgataatggggagttggacaattcttacttgccaaggatcgtcctgctgatgcataggtggtacctctcctccacagagctggcggagaaactgctatgtatgtataggaacgccaccggcgagtcatgcaacgagttccggttgaagatctgctatttctag

SEQ ID NO: 186231 - DNA, 339 bp, Artificial Sequence
  derived and/or modified sequence
atgggatcttcggggttgggcaaagctgccacgctcgacgagctgctgtgtacgtgcatcgagatgtttgatgacaatggtgaattggataactcctacctcccacgtatagtcctcttaatgcatagatggtatctgtcttctaccgagctggcagaaaagttactttgcatgtaccgcaatgccaccggcgagtcatgcaacgagtttcgtctcaagatttgctacttcatgcggtactggatcctgaagttcccggcggagtttaatctagatctaggattaatcaggatgactgaagagtttagggaagtggccagccaactgggatatgaatag

SEQ ID NO: 186232 - DNA, 2070 bp, Artificial Sequence
  derived and/or modified sequence
atgggcagcagcggcctgggcaaggccgccaccctggatgagctgctgtgcacctgcatcgagatgtttgatgacaacggggagctggacaacagctacctgcccagaattgtgctgctgatgcaccgctggtacctgagcagcacagagctggccgagaagctgctgtgcatgtacagaaatgccactggagagagctgcaatgagttccggctgaagatctgctacttcatgagatactggatcctgaagtttcctgctgagttcaacctggacctgggcctcatccgcatgacagaggagttccgggaggtggccagccagctgggctatgagaagcacgtgtccctgattgacatcagcagcatccccagctatgactggatgagaagagtgacccagaggaagaaggtgtccaagaagggcaaggcctgcctgctgtttgaccacctggagcccatcgagctggccgagcacctgaccttcctggagcacaagagcttccgccgcatctccttcacagactaccagagctatgtgatccacggctgcctggagaacaaccccaccctggagaggagcatcgccctcttcaacggcatcagcaagtgggtgcagctgatggtgctgagcaagcccaccccccagcagagagctgaggtgatcaccaagttcatcaacgtggccaagaagctgctgcagctgaagaacttcaacaccctgatggctgtggtgggcggcctgagccacagcagcatcagccggctgaaggagacccacagccacctgagcagcgaggtgaccaagaactggaatgagatgacagagctggtgagcagcaatggaaactactgcaactacaggaaggcctttgctgactgtgatggcttcaagatccccatcctgggcgtgcacctgaaggacctgattgctgtgcacgtgatcttcccagactggacagaggagaacaaggtgaacatcgtgaagatgcaccagctgtctgtgaccctgtctgagctggtgtccctgcagaatgccagccaccacctggagcccaacatggacctgatcaacctgctgaccctgagcctggacctgtaccacacagaagatgacatctacaagctgagcctggtgctggagcccaggaacagcaagagccccaccagccccaccacccccaacaagcctgtggtgcccctggagtgggccctgggcgtgatgcccaagccagaccccaccgtcatcaacaagcacatcaggaagctggtggagagcgtcttcagaaattatgaccatgaccatgatggctacatcagccaggaggactttgagagcattgctgccaacttccccttcctggacagcttctgtgtgctggacaaggaccaggacggcctcatcagcaaggatgagatgatggcctacttcctgcgggccaagagccagctgcactgcaagatgggccctggcttcatccacaacttccaggagatgacctacctgaagcccaccttctgtgagcactgtgccggcttcctgtggggcatcatcaagcagggctacaagtgcaaggactgtggggccaactgccacaagcagtgcaaggacctgctggtgctggcctgccgccgctttgcccgggcccccagcctgagcagcggccacggcagcctgcccggcagccccagcctgcccccagcccaggatgaggtgtttgagttccctggggtgacagctggccaccgggacctggacagccgggccatcaccctggtgacaggcagcagcaggaagatctctgtgcggctgcagagggccaccaccagccaggccacccagacagagcctgtgtggagcgaggccggctggggagacagcggcagccacaccttccccaagatgaagagcaagttccatgacaaggccgccaaggacaagggctttgccaagtgggagaatgagaagccccgggtgcatgctggggtggatgtggtggaccggggcacagaatttgagctggaccaggatgaaggagaggagacccggcaggatggagaagatggatag

SEQ ID NO: 186233 - DNA, 342 bp, Artificial Sequence
  derived and/or modified sequence
atgggcagcagcggcctgggcaaggccgccaccctggatgagctgctgtgcacctgcatcgagatgtttgatgacaacggggagctggacaacagctacctgcccagaattgtgctgctgatgcaccgctggtacctgagcagcacagagctggccgagaagctgctgtgcatgtacagaaatgccactggagagagctgcaatgagttccggctgaagatctgctacttcatgagatactggatcctgaagtttcctgctgagttcaacctggacctgggcctcatccgcatgacagaggagttccgggaggtggccagccagctgggctatgagaagtag

SEQ ID NO: 186234 - DNA, 519 bp, Artificial Sequence
  derived and/or modified sequence
atgggcagcagcggcctgggcaaggccgccaccctggatgagctgctgtgcacctgcatcgagatgtttgatgacaacggggagctggacaacagctacctgcccagaattgtgctgctgatgcaccgctggtacctgagcagcacagagctggccgagaagctgctgtgcatgtacagaaatgccactggagagagctgcaatgagttccggctgaagatctgctacttcatgagatactggatcctgaagtttcctgctgagttcaacctggacctgggcctcatccgcatgacagaggagttccgggaggtggccagccagctgggctatgagaagcacgtgtccctgattgacatcagcagcatccccagctatgactggatgagaagagtgacccagaggaagaaggtgtccaagaagggcaaggcctgcctgctgtttgaccacctggagcccatcgagctggccgagcacctgaccttcctggagcacaagagcttccgccgcatctcctag

SEQ ID NO: 186235 - DNA, 234 bp, Artificial Sequence
  derived and/or modified sequence
atgggcagcagcggcctgggcaaggccgccaccctggatgagctgctgtgcacctgcatcgagatgtttgatgacaacggggagctggacaacagctacctgcccagaattgtgctgctgatgcaccgctggtacctgagcagcacagagctggccgagaagctgctgtgcatgtacagaaatgccactggagagagctgcaatgagttccggctgaagatctgctacttctag

SEQ ID NO: 186236 - DNA, 339 bp, Artificial Sequence
  derived and/or modified sequence
atgggcagcagcggcctgggcaaggccgccaccctggatgagctgctgtgcacctgcatcgagatgtttgatgacaacggggagctggacaacagctacctgcccagaattgtgctgctgatgcaccgctggtacctgagcagcacagagctggccgagaagctgctgtgcatgtacagaaatgccactggagagagctgcaatgagttccggctgaagatctgctacttcatgagatactggatcctgaagtttcctgctgagttcaacctggacctgggcctcatccgcatgacagaggagttccgggaggtggccagccagctgggctatgaatag

SEQ ID NO: 186237 - DNA, 2070 bp, Artificial Sequence
  derived and/or modified sequence
atgggcagcagcggcctgggcaaggccgccaccctggacgagctgctgtgcacttgtattgagatgtttgatgacaacggcgagcttgacaatagctacctgcctagaattgttctcttaatgcacaggtggtacctgtcgagcactgaactggccgagaagctgctctgcatgtaccgcaatgcaactggcgaaagctgcaatgaatttaggctgaagatctgctactttatgagatactggatacttaaattccccgctgagtttaatctggatctgggcctaatacgcatgacagaggaattccgcgaggtcgcgtctcagcttggttatgaaaaacatgtgtctctgattgatatctcttccattcccagctatgactggatgcgccgcgtgactcagcgtaaaaaggtgagcaagaaggggaaggcatgcctgctcttcgaccacctggagccaattgagctggcggaacatctgacctttcttgaacataagtctttccgacgcatttcatttacagattatcagtcctatgtaatccatgggtgcctagagaacaacccaacactggagcgaagtatagctttatttaacggcatttctaagtgggtgcaattaatggtgctatctaagcccacgccacagcaaagagcagaggtgattacaaaattcatcaacgtggcaaagaaactgctgcaactgaaaaatttcaacacgctgatggcagtcgtcggcgggttaagtcattctagcattagccggcttaaggagactcactcacacctttcctcggaggttacgaagaattggaacgagatgactgaattggtgtcttccaacggcaactactgtaattatcgcaaagcttttgccgattgcgatggatttaagatacctatcctgggcgtccatctcaaagacctgatcgctgtgcatgtgatctttcccgattggactgaggaaaacaaagtaaacatcgtgaagatgcaccagctcagcgtgaccttgtccgaactggttagcctacagaacgcctctcatcatctggaacctaacatggatctgatcaatctccttactctgtctctcgacctgtatcacacagaggacgatatatataagctttccctagtgctagagccacgaaatagcaagtcaccaactagccctactactcccaacaaacctgtggtgcccctggaatgggccttgggcgtgatgcccaagcccgatccaacagtgattaacaagcacattaggaaacttgttgaaagtgtattccgaaactatgaccacgatcacgatgggtacattagtcaagaggatttcgaatccattgccgctaatttcccctttctggatagcttttgtgtgctggacaaagatcaggatggcttgatctccaaggatgaaatgatggcttatttcctcagagccaagagtcagctccattgcaaaatgggccccggctttatccacaattttcaggaaatgacctaccttaagcctaccttttgcgagcattgtgccggattcctatggggaatcatcaagcaaggctataagtgtaaagattgcggcgctaattgccacaagcaatgtaaagatttgcttgtgttggcgtgtcgccgtttcgcccgagctcctagcctgtcgtccgggcacggctctctcccagggagcccttcattgcctccagcacaggacgaggtttttgaattcccgggcgtgacggctggacatagagacctggatagtcgggcgatcaccctagtgactggatcttcccggaaaataagtgtccggctccagagggctacgacgagccaggcaacccagaccgaaccagtgtggtctgaggcgggttggggcgatagtgggagccacaccttccccaagatgaagagtaagtttcacgataaggctgcgaaagataagggctttgctaagtgggagaacgaaaagccacgcgttcatgcgggcgtggatgtggtggaccggggcactgaattcgagctggaccaggatgaaggggaagagacccgccaagacggtgaagatgggtag

SEQ ID NO: 186238 - DNA, 342 bp, Artificial Sequence
  derived and/or modified sequence
atgggcagcagcggcctgggcaaggccgccaccctggacgagctgctgtgcacatgtatagagatgtttgacgataatggagagttggacaactcctacctcccaagaatcgtcttgctgatgcacaggtggtacctgtcttccaccgagctcgcagagaagctgctgtgtatgtatcgaaatgccactggggagtcatgcaatgagttcaggttaaagatatgttattttatgcggtattggattctgaaatttccggcagagttcaatttagatctaggactgatccgcatgacggaggagttcagagaggtcgctagccagctcggatacgagaagtag

SEQ ID NO: 186239 - DNA, 519 bp, Artificial Sequence
  derived and/or modified sequence
atgggcagcagcggcctgggcaaggccgccaccctggacgagctgctatgcacgtgtatagagatgtttgacgataatggggaacttgataacagctatctgccaagaattgtgctcctcatgcaccgctggtacctctctagtaccgaacttgctgagaagctcctgtgcatgtaccgaaatgcaaccggtgagtcttgtaacgagttccgtctgaaaatctgttatttcatgcggtattggatcctgaagttcccagccgagtttaacctggatttgggactgataagaatgacagaagagttccgggaagtcgccagtcagttgggctacgagaaacatgtaagcctgatcgatatctctagcattcccagctatgattggatgaggcgagttacacagagaaaaaaggtgtcaaaaaaggggaaggcctgtttattgttcgatcatttggagcctattgaactggcagaacatttaacattcctggaacacaaatccttcagacgaatcagctag

SEQ ID NO: 186240 - DNA, 234 bp, Artificial Sequence
  derived and/or modified sequence
atgggcagcagcggcctgggcaaggccgccaccctggacgagctgttgtgtacatgcatagagatgtttgacgataacggtgaacttgataactcatacctgccgcgcattgttctgcttatgcatcgttggtacctgagttctaccgaactggcagaaaagcttctctgtatgtaccgcaacgccactggcgaatcctgcaacgaatttagattaaagatctgctacttctag

SEQ ID NO: 186241 - DNA, 339 bp, Artificial Sequence
  derived and/or modified sequence
atgggcagcagcggcctgggcaaggccgccaccctggacgagctgctgtgtacatgtatcgaaatgttcgatgacaatggggagctggacaactcatacctgcctcgcattgttctactcatgcatcgctggtatctgagttcaactgaactggccgagaagctcctctgcatgtaccgtaatgcaaccggcgagagttgcaatgagtttaggcttaagatttgctatttcatgaggtattggatcctcaagttccccgcagagtttaatctggatctaggcctcatcaggatgacggaggaatttagagaagtcgcttcccagttggggtacgagtag

SEQ ID NO: 186242 - DNA, 2070 bp, Artificial Sequence
  derived and/or modified sequence
atgggatcgtccggacttggaaaagctgctactctggatgagctgctctgcacctgcatcgagatgttcgacgacaacggcgagttagacaattcttacctgcccagaatcgtccttctgatgcacagatggtatctgagcagcaccgagcttgctgagaaacttttatgcatgtacagaaacgctaccggcgagtcctgcaatgaattccgcctcaaaatttgttactttatgcgttattggatcttgaagtttccagccgagttcaacctggatctgggccttatcaggatgacagaagaattccgcgaggtggccagccagctgggatatgagaagcacgtcagcctcatcgacatttcttctatcccgtcatacgactggatgcggagggtcacacaaagaaagaaggtctctaaaaaagggaaggcctgtctgctttttgaccacctggagcctattgagttggccgagcacctgactttcttagagcataagtcattccgcaggattagctttaccgactaccagtcatatgtaatccacggatgtctggaaaacaacccaacgctcgaaaggtcaattgccctgttcaacggtatcagtaaatgggtgcagttgatggtgctctctaagcctactccacagcagcgggctgaagtgattactaagtttataaatgtggcaaagaaactcctccaactcaaaaactttaacacacttatggcggtagtgggcggtctctctcacagtagcatcagccgcctgaaggagacacattcgcatctttcatctgaggtcactaaaaactggaacgaaatgactgaactggtgagctccaacgggaactactgcaattacaggaaagcgttcgcggattgtgatggttttaagataccgatactcggggtccacttaaaagacttgatcgcagtccatgttatcttccccgactggactgaagaaaacaaagttaatatcgtgaaaatgcatcagcttagtgtcaccttatctgagcttgtctcccttcaaaatgcttcccatcatctggagcctaacatggacctcattaatttgttgactctctccctcgatctgtatcacacagaagatgatatctacaagctgtctctcgtgttggaacccagaaacagcaagtcccccacatcccctactacgcccaacaaaccagttgtccccctggagtgggcgctaggagttatgccgaagcctgatcctacagtgataaacaagcatatccgcaaattagtggaaagtgtcttccggaactacgaccacgaccacgacggttacataagccaggaagacttcgagtctattgcagctaatttcccattcctcgatagtttttgtgttctagataaggatcaggacggcctcatcagcaaagatgagatgatggcctactttctgagagccaaaagccagttgcactgcaagatgggtccaggctttatacataacttccaagagatgacatacctcaagcccactttttgcgagcactgtgccggatttctctggggaataatcaaacagggctacaagtgtaaggattgtggcgctaactgtcacaaacagtgcaaagacttgctggtccttgcatgtcgtcgcttcgccagggcaccgtcactttcaagcggccatggctctctccccggttccccttccctgcctcctgctcaggatgaggtattcgaattccctggagtcaccgctggacatcgagatttggatagtagagccatcactctggtgaccggtagctcccgcaaaatttccgtccgcctgcaaagggctaccacgtcccaagccacacaaactgagccagtgtggtccgaggccggttggggagacagcggctcacatacctttcccaagatgaaatccaagttccacgataaggcagcaaaggataaagggttcgctaagtgggagaacgaaaaacctagagtgcatgctggcgtggatgttgtcgaccggggtacggaatttgaactggaccaggatgagggggaggagacgaggcaggacggggaggatggctag

SEQ ID NO: 186243 - DNA, 342 bp, Artificial Sequence
  derived and/or modified sequence
atggggtcctcaggcttgggcaaggctgctaccctggacgaactgctttgcacttgtatcgagatgttcgatgacaatggtgaactggacaattcatatctgccccgaatcgtgctgctaatgcacagatggtatctgtcatctaccgagctcgcggaaaaactgctgtgtatgtaccgtaacgccaccggggagtcctgtaacgaatttcgacttaagatttgctattttatgcgttactggatcctgaagtttcccgctgaatttaaccttgacctcggactaattcgcatgactgaagaattcagagaggtcgcttctcagcttggttacgaaaagtag

SEQ ID NO: 186244 - DNA, 519 bp, Artificial Sequence
  derived and/or modified sequence
atggggtcgtcaggtctgggcaaggcggcaactctggatgagctactgtgtacctgtatcgagatgtttgatgataacggggaactcgataattcttaccttccccgtatagtgttgctgatgcacagatggtatctgtcctcgacagaactggccgagaaacttctctgtatgtaccgcaacgctacaggtgaatcgtgtaatgagtttcgccttaagatttgttatttcatgagatactggattctgaagttcccggcagagtttaacttggacctgggcctcatccgcatgaccgaagaattccgcgaagtggcgtcccaactgggatatgaaaaacacgtcagcctcattgatataagctctatcccttcgtatgattggatgcggcgtgtgacgcagaggaagaaagtctccaaaaagggtaaggcctgtctcctgtttgatcacctcgagcctatagagctcgcagaacatcttacctttttggagcataaaagtttcagacgcatctcttag

SEQ ID NO: 186245 - DNA, 234 bp, Artificial Sequence
  derived and/or modified sequence
atggggtctagcgggctggggaaggcagcgaccctggacgagctcctgtgtacgtgtatagaaatgttcgacgacaatggggagctcgacaattcgtacttgccacggattgttttgcttatgcaccgatggtacctgagtagcactgagctggcagagaagctgctgtgtatgtatagaaatgctaccggcgagtcgtgtaatgagtttaggctgaaaatttgctacttttag

SEQ ID NO: 186246 - DNA, 339 bp, Artificial Sequence
  derived and/or modified sequence
atggggtcatcagggctgggaaaggcagctacccttgatgaactgctgtgtacatgtatcgagatgttcgacgacaacggagaactagataattcctacctgcctagaatcgtcctcctcatgcatcggtggtatcttagcagtaccgagttggccgaaaagctactgtgcatgtataggaacgccaccggggaatcatgcaacgaatttagacttaagatatgctattttatgagatactggattctgaagttcccggctgagtttaatcttgatctcggcctgatcaggatgacagaggagttccgtgaggtcgcctcacaactgggctacgaatag

SEQ ID NO: 186247 - DNA, 4210 bp, Artificial Sequence
  derived and/or modified sequence
gataccctttacactagattagcaggcaaaactatgatggtttgtgatatccatgcttgtagaagtaataagaagaaagggaacacagaagctttattttatagtggagtcctgactctaggccttaataattgcatggttttggagttttcttgaagtacaactaaggacaggtcaccactaggcactaacatcgctgacttgcatgattatggagatggtctatctgatgctgaaaatgtctctagttttttgacaacggctaaataaccatgggatcaagtggccttgggaaagcagcaacattagatgaactgctgtgcacttgcattgagatgtttgatgacaatggagagctggataatagttatttgccaagaatagttctactgatgcaccgatggtatttatcttccactgaattggcagaaaaacttctctgcatgtatcgaaatgccactggagaaagctgcaatgaatttcgattaaagatctgctacttcatgaggtactggattctgaagtttcctgcagagtttaatttggatcttggtttgattcgtatgactgaggaatttcgggaagtagctagtcaactaggatatgaaaaacacgtcagcctcatcgacatatccagcattccttcctatgactggatgagaagagtcacacagaggaaaaaagtatccaagaagggaaaagcctgtctgctgtttgaccatctggagcccattgaattggctgagcacctcacttttctggagcataaatcttttagaaggatctcattcactgattaccaaagctatgtcatccatggctgcctggagaataatccaaccttggaaagatcgattgctttatttaatggaatctctaagtgggtccagttgatggttcttagcaaaccaaccccccagcaaagggcagaagtcatcacaaagtttatcaatgttgcaaagaagctccttcagctcaaaaattttaacaccctgatggcagtggtgggaggcctcagtcatagttccatttcacgcctcaaagagacccattctcatctttcttcagaagttacaaagaactggaatgaaatgacagagttggtctcctccaacggcaattactgcaattaccgcaaggcctttgccgactgcgatggcttcaaaatccccatccttggagtacacttgaaagacttgatagctgtccatgtcattttcccagactggacagaggagaacaaagtgaacattgtgaaaatgcaccagctctccgttaccctgagtgaactagtctccctgcagaatgcctctcaccacttagaacccaacatggatttgatcaacctgctcacgctttccctggacctctatcacactgaagatgatatttacaaactgtcactggtgctggagcctagaaattctaaatcgcctacctcccctacgacgcccaacaagcctgtggtacccctggagtgggcattaggggtgatgccaaagccagaccccacggtcatcaacaagcacataaggaaattagtggagtctgtatttagaaactatgatcacgaccatgatgggtacatttcccaagaggactttgaaagtatagctgccaattttcccttcttggattccttctgtgttctggacaaagatcaggatggcctaattagtaaagatgaaatgatggcttacttcctgagagctaaatcccaactacactgtaaaatgggaccaggatttatccataattttcaggagatgacctatctcaagccaaccttctgcgaacactgtgcgggatttctctggggcataatcaagcaaggatacaaatgcaaagactgtggagccaattgtcacaaacagtgcaaagacctcctggttctggcctgcaggagatttgcccgggcgccctccttgagcagtggtcatgggtcactgcctggaagcccctcgctgcccccagcgcaggatgaggtgtttgagttccctggagtcactgctggacacagggatttagacagcagagccatcacactggttacaggctcttctcgcaagatctctgtgaggctacagagggccaccaccagccaggccacccagactgaacctgtctggtcagaggctggctggggggactcggggtcccacaccttccctaaaatgaaatccaagttccatgacaaagcagcaaaggacaaaggctttgccaaatgggaaaatgagaagcccagggtgcatgctggtgtggatgttgtagaccggggcacggagtttgaacttgaccaggatgaaggagaagagaccagacaggatggtgaggatggctgacttcaggctgcggaaactgaaggcaataatgttggcttttggaaggggcaagacgagaaactctgaagaaagctctgactctcaggaagttatctggaaagatacctggatgtttactgccttgggacactgtgggatctccatgtttggactatgggacagagaattgaccctaactaactaactatgaactatttatttcctcctcccctacccctagttaagtgccacaaagactgtgttatgtagtcagtacttttttctcatgtatctttctctagaccatttatatacgggtgaaatgaaagcttttttgcatgtacttgatactcagtctgtaaactcagacttcgctttttttgtgagactatcctttcaatatttttataaacttttgtgtgtgctgtggcagggaacagttaacaaggagtttatttagaggggtttttttcattttttgtttttcttgttttgttttgttttgttttgttcttcttggtgtgctttttggatgggaccagaacttaacattttcctgaggactaggaagctcatcagacactggaatgcagtgattcttctaatgatggtcaactgcaaggagaaactgtttacatccttcccactacacagttgctatgatatgtaacaagtcacacatgtatatatcacacaagtcttaccaattctgcgtcactaggaagctatagcatggtcgtgaaagctctcctaatacttacttaaatagccatggaagaaaattatgcttgtcccttctgactgggttaagccatctttcttaagattcctgaagtagaaatagcaattaagaaattaattcaagttttgacggttaacatttagcagaaaaacaaaccattgaataagctactaggtgaaatgcaaaacaaccatcaatttttttaaactcaataattttgtgaaaaaaaaaaccaccaccaaacttttggttgtaaaagagaacccttgttcccttcctaagaaactgccttccacaattaaagaatactcatagaaagaaaataatcataaatcatatttgattaacatttcatttaagcttttaaaatatcaattttttaaatagctcccatttacccaaaataactagttatgggtctatttcttccatgattagaggagagagaacttgattcaagatactgaaaaatagagctgggactgagcctgtgaatgacaggaatgatctattaccaggtgactagtcggaaactacacagacgtgcactggtctgcatttgggggctaaagtgtatatattccatttaaaatggaatttgtttgtatttggggcagtcttcagtaaagcctttctcctttcttttctccattgaggacagttctgctcagcaaaattgttgagtacctgttctgggcaggtcccacgctatatgcacaaagttaagaaaaacttggtcttagcccttgggagctgacagcccatgggcattaaggcaaagtagttccagtgatttaaaatacggttccaaatacgctaaaaccaacttgtgccaaccagatttacagattggaaatactgcagatgatgtgaagttatcagttggaggagctgtgattaagctggataataagagaacgtgccatctgtaaagcactcagaaggcagccatccctagatgttggtttcatgtatattacactatctactactatccataaatgcaataatatgcatgttaacaacattaaaaacagcaaacagcaatctaagtacagaaaagctttttgtgtgtttaaaaaaattgaagaaaattcaggaagaaacgtgttaataaacattgtactgttcttttgcttctcaaagg

SEQ ID NO: 186248 - DNA, 557 bp, Artificial Sequence
  derived and/or modified sequence
acttggcagctggacaggcagagtgctgatgtgaaaaataccacgacaaaaccaccctaatttggaactgtatctgtatggaaacaacagagttttcttgaagtacaactaaggacaggtcaccactaggcactaacatcgctgacttgcatgattatggagatggtctatctgatgctgaaaatgtctctagttttttgacaacggctaaataaccatgggatcaagtggccttgggaaagcagcaacattagatgaactgctgtgcacttgcattgagatgtttgatgacaatggagagctggataatagttatttgccaagaatagttctactgatgcaccgatggtatttatcttccactgaattggcagaaaaacttctctgcatgtatcgaaatgccactggagaaagctgcaatgaatttcgattaaagatctgctacttcatgaggtactggattctgaagtttcctgcagagtttaatttggatcttggtttgattcgtatgactgaggaatttcgggaagtagctagtcaactaggatatgaaaaac

SEQ ID NO: 186249 - DNA, 540 bp, Artificial Sequence
  derived and/or modified sequence
acttggcagctggacaggcagagtgctgatgtgaaaaataccacgacaaaaccaccctagtgttcatttcactgggcaggttgtctaccagaaccaaggggcctctttgaattttctttcaagctattaataagaggcatgcatcctcctagacacaatcatccatttagtaaaataggttctccaaaatacttatcattcaggttgaataaaccagttctacagactgcttcttccatgcatttcccaatgatgctagctgcccttaaaattctttcagatttggaactgtatctgtatggaaacaacagagttttcttgaagtacaactaaggacaggtcaccactaggcactaacatcgctgacttgcatgattatggagatggtctatctgatgctgaaaatgtctctagttttttgacaacggctaaataaccatgggatcaagtggccttgggaaagcagcaacattagatgaactgctgtgcacttgcattgagatgtttgatgacaatggagagctggataatagttatttg

SEQ ID NO: 186250 - DNA, 861 bp, Artificial Sequence
  derived and/or modified sequence
gaaatagctgtctatcacaggcagctaggaactgcttgcccacttttttttgttctgaaagaaaggatacagaccatctgggccagttctccaaaatacttatcattcaggttgaataaaccagttctacagactgcttcttccatgcatttcccaatgatgctagctgcccttaaaattctttcagatttggaactgtatctgtatggaaacaacagagttttcttgaagtacaactaaggacaggtcaccactaggcactaacatcgctgacttgcatgattatggagatggtctatctgatgctgaaaatgtctctagttttttgacaacggctaaataaccatgggatcaagtggccttgggaaagcagcaacattagatgaactgctgtgcacttgcattgagatgtttgatgacaatggagagctggataatagttatttgccaagaatagttctactgatgcaccgatggtatttatcttccactgaattggcagaaaaacttctctgcatgtatcgaaatgccactggagaaagctgcaatgaatttcgattaaagatctgctacttcatgaggtactggattctgaagtttcctgcagagtttaatttggatcttggtttgattcgtatgactgaggaatttcgggaagtagctagtcaactaggatatgaaaaacacgtcagcctcatcgacatatccagcattccttcctatgactggatgagaagagtcacacagaggaaaaaagtatccaagaagggaaaagcctgtctgctgtttgaccatctggagcccattgaattggctgagcacctcacttttctggagcataaatcttttagaaggatctca

SEQ ID NO: 186251 - DNA, 596 bp, Artificial Sequence
  derived and/or modified sequence
aacagctgctctcggcgtgctccggcacttggcagctggacaggcagagtgctgatgtgaaaaataccacgacaaaaccaccctaatggagtttcactctgtcgcccaggctggagtgcagtggcacgatctcggctcactgcaagctccgcctcccgggttcacaccattcttctgcctcagcctcccgagtagctgggactacagatttggaactgtatctgtatggaaacaacagagttttcttgaagtacaactaaggacaggtcaccactaggcactaacatcgctgacttgcatgattatggagatggtctatctgatgctgaaaatgtctctagttttttgacaacggctaaataaccatgggatcaagtggccttgggaaagcagcaacattagatgaactgctgtgcacttgcattgagatgtttgatgacaatggagagctggataatagttatttgccaagaatagttctactgatgcaccgatggtatttatcttccactgaattggcagaaaaacttctctgcatgtatcgaaatgccactggagaaagctgcaatgaatttcgattaaagatctgctacttc

SEQ ID NO: 186252 - DNA, 554 bp, Artificial Sequence
  derived and/or modified sequence
acttggcagctggacaggcagagtgctgatgtgaaaaataccacgacaaaaccaccctaatttggaactgtatctgtatggaaacaacagagttttcttgaagtacaactaaggacaggtcaccactaggcactaacatcgctgacttgcatgattatggagatggtctatctgatgctgaaaatgtctctagttttttgacaacggctaaataaccatgggatcaagtggccttgggaaagcagcaacattagatgaactgctgtgcacttgcattgagatgtttgatgacaatggagagctggataatagttatttgccaagaatagttctactgatgcaccgatggtatttatcttccactgaattggcagaaaaacttctctgcatgtatcgaaatgccactggagaaagctgcaatgaatttcgattaaagatctgctacttcatgaggtactggattctgaagtttcctgcagagtttaatttggatcttggtttgattcgtatgactgaggaatttcgggaagtagctagtcaactaggatatgaaa

SEQ ID NO: 186253 - protein, 125 aa, Artificial Sequence
  derived and/or modified sequence
MDHKPLLQERPPAYNLEAGQGDYACGPHGYGAIPAAPPPPPYPYLVTGIPTHHPRVYNIHSRTVTRYPANSIVVVGGCPVCRVGVLEDCFTFLGIFLAIILFPFGFICCFALRKRRCPNCGATFA

SEQ ID NO: 186254 - DNA, 378 bp, Artificial Sequence
  derived and/or modified sequence
atggatcacaaacccctcctgcaggagagacctcccgcctacaacctcgaagcaggacagggggactatgcatgcggaccccacggctatggagcaatccccgccgctcctcctccacccccctacccatacctggtgactggcatacccactcaccacccacgcgtatataacattcacagcaggactgtgactagatatcccgcaaacagcatagtcgtggttggaggctgtcccgtttgcagagtgggcgtcttggaggattgctttacctttctgggcatttttcttgccattatcctcttcccctttggttttatctgctgtttcgcgctacgcaagcgcaggtgtcctaattgtggagccactttcgcgtag

SEQ ID NO: 186255 - DNA, 378 bp, Artificial Sequence
  derived and/or modified sequence
atggaccacaagcccctgctgcaggagcggcccccagcctacaacctggaggccggccagggcgactatgcctgtggcccccacggctacggggccatcccagctgcccctcctcctccaccctacccctacctggtgacaggcatccccacccaccacccccgggtgtacaacatccacagcaggacagtgacccgctacccagccaacagcatcgtggtggtgggcggctgccctgtgtgccgggtgggcgtgctggaggactgcttcaccttcctgggcatcttcctggccatcatcctcttccccttcggcttcatctgctgctttgccctgaggaagaggcgctgccccaactgtggggccacctttgcctag

SEQ ID NO: 186256 - DNA, 378 bp, Artificial Sequence
  derived and/or modified sequence
atggaccacaagcccctgctgcaggagcggccccccgcctacaacctagaagcggggcagggggactacgcttgcggccctcacgggtatggagccatcccagcggctccgcctccccctccttatccttacctggtgacaggaatacctacacatcacccccgggtctacaatatccatagccggacggtcactagatatccggctaatagtatcgtggtcgtcggaggttgcccggtttgccgggtaggcgtcctggaagactgttttacgttcctcgggatatttcttgccattattctctttccgttcggatttatctgctgcttcgcattgcggaagagacgctgtccaaactgtggggccacctttgcctag

SEQ ID NO: 186257 - DNA, 378 bp, Artificial Sequence
  derived and/or modified sequence
atggaccataagccattattacaggagcgcccacccgcttataacttagaggcaggccaaggcgactatgcctgcgggccacacggatatggtgctattccagccgcacctccacctcccccatacccctatctggtgactgggattccaacacaccacccccgagtctacaatatccactcccgcacagtgaccaggtatcccgcaaatagtatcgtcgtggtgggaggatgccctgtgtgccgggttggtgtgctggaggattgttttaccttcttgggcatttttctagccattattctgttccccttcgggtttatctgctgttttgccctgagaaaacgcagatgtccaaattgcggagcaactttcgcgtag

SEQ ID NO: 186258 - DNA, 780 bp, Artificial Sequence
  derived and/or modified sequence
gcgtctgcctcagaggggcccgagccacccggtccgccgcgtccccgccgccgccgccgcgtcccccgccggggccgaccgagccgagccgggccggagcggcgggcgcggccgggccgccatggaccacaagccgctgctgcaggagcggccgcccgcctacaacctggaggccggccagggcgactacgcgtgcggcccgcacggctacggcgccatccccgccgcgcccccgccgccgccctacccctacctcgtcacagggatacccacccaccatcccagggtctacaacatccacagccggaccgtcacccgctatcctgccaactctatcgtggtcgtaggaggctgtcctgtctgcagggttggggtgctggaggactgcttcaccttcctgggcatcttcctggccatcatcctcttcccctttgggttcatttgctgttttgccttgaggaagcgacgatgccccaactgtggagccaccttcgcttaaagggaacaccaggcccggctttcctacacccagctctctttttctaatgtaaatgttgtgtacaataattttatttgattaagcttcaggactgttttgtaaagcgaggtgggaccgatgtggcacacgccagctgcggtttcccggagcgtggagaggcagtgctgctgctcccgcccgaggctcatgacaactcaataaagcactgcttttattttttgcagtcttcaatttgagaaaggtgagaaataatgttttcaataaatgagattcataccatt

SEQ ID NO: 186259 - DNA, 378 bp, Artificial Sequence
  derived and/or modified sequence
atggaccacaagcccctgctgcaggagagaccccccgcctacaacctggaggccggccagggcgactacgcctgcggcccccacggctacggcgccatccccgccgccccccccccccccccctacccctacctggtgaccggcatccccacccaccaccccagagtgtacaacatccacagcagaaccgtgaccagataccccgccaacagcatcgtggtggtgggcggctgccccgtgtgcagagtgggcgtgctggaggactgcttcaccttcctgggcatcttcctggccatcatcctgttccccttcggcttcatctgctgcttcgccctgagaaagagaagatgccccaactgcggcgccaccttcgcctag

SEQ ID NO: 186260 - protein, 469 aa, Artificial Sequence
  derived and/or modified sequence
MGTVHARSLEPLPSSGPDFGGLGEEAEFVEVEPEAKQEILENKDVVVQHVHFDGLGRTKDDIIICEIGDVFKAKNLIEVMRKSHEAREKLLRLGIFRQVDVLIDTCQGDDALPNGLDVTFEVTELRRLTGSYNTMVGNNEGSMVLGLKLPNLLGRAEKVTFQFSYGTKETSYGLSFFKPRPGNFERNFSVNLYKVTGQFPWSSLRETDRGMSAEYSFPIWKTSHTVKWEGVWRELGCLSRTASFAVRKESGHSLKSSLSHAMVIDSRNSSILPRRGALLKVNQELAGYTGGDVSFIKEDFELQLNKQLIFDSVFSASFWGGMLVPIGDKPSSIADRFYLGGPTSIRGFSMHSIGPQSEGDYLGGEAYWAGGLHLYTPLPFRPGQGGFGELFRTHFFLNAGNLCNLNYGEGPKAHIRKLAECIRWSYGAGIVLRLGNIARLELNYCVPMGVQTGDRICDGVQFGAGIRFL

SEQ ID NO: 186261 - protein, 259 aa, Artificial Sequence
  derived and/or modified sequence
MSAEYSFPIWKTSHTVKWEGVWRELGCLSRTASFAVRKESGHSLKSSLSHAMVIDSRNSSILPRRGALLKVNQELAGYTGGDVSFIKEDFELQLNKQLIFDSVFSASFWGGMLVPIGDKPSSIADRFYLGGPTSIRGFSMHSIGPQSEGDYLGGEAYWAGGLHLYTPLPFRPGQGGFGELFRTHFFLNAGNLCNLNYGEGPKAHIRKLAECIRWSYGAGIVLRLGNIARLELNYCVPMGVQTGDRICDGVQFGAGIRFL

SEQ ID NO: 186262 - DNA, 1410 bp, Artificial Sequence
  derived and/or modified sequence
atgggcaccgtgcacgccagaagcctggagcccctgcccagcagcggccccgacttcggcggcctgggcgaggaggccgagttcgtggaggtggagcccgaggccaagcaggagatcctggagaacaaggacgtggtggtgcagcacgtgcacttcgacggcctgggcagaaccaaggacgacatcatcatctgcgagatcggcgacgtgttcaaggccaagaacctgatcgaggtgatgagaaagagccacgaggccagagagaagctgctgagactgggcatcttcagacaggtggacgtgctgatcgacacctgccagggcgacgacgccctgcccaacggcctggacgtgaccttcgaggtgaccgagctgagaagactgaccggcagctacaacaccatggtgggcaacaacgagggcagcatggtgctgggcctgaagctgcccaacctgctgggcagagccgagaaggtgaccttccagttcagctacggcaccaaggagaccagctacggcctgagcttcttcaagcccagacccggcaacttcgagagaaacttcagcgtgaacctgtacaaggtgaccggccagttcccctggagcagcctgagagagaccgacagaggcatgagcgccgagtacagcttccccatctggaagaccagccacaccgtgaagtgggagggcgtgtggagagagctgggctgcctgagcagaaccgccagcttcgccgtgagaaaggagagcggccacagcctgaagagcagcctgagccacgccatggtgatcgacagcagaaacagcagcatcctgcccagaagaggcgccctgctgaaggtgaaccaggagctggccggctacaccggcggcgacgtgagcttcatcaaggaggacttcgagctgcagctgaacaagcagctgatcttcgacagcgtgttcagcgccagcttctggggcggcatgctggtgcccatcggcgacaagcccagcagcatcgccgacagattctacctgggcggccccaccagcatcagaggcttcagcatgcacagcatcggcccccagagcgagggcgactacctgggcggcgaggcctactgggccggcggcctgcacctgtacacccccctgcccttcagacccggccagggcggcttcggcgagctgttcagaacccacttcttcctgaacgccggcaacctgtgcaacctgaactacggcgagggccccaaggcccacatcagaaagctggccgagtgcatcagatggagctacggcgccggcatcgtgctgagactgggcaacatcgccagactggagctgaactactgcgtgcccatgggcgtgcagaccggcgacagaatctgcgacggcgtgcagttcggcgccggcatcagattcctgtag

SEQ ID NO: 186263 - DNA, 780 bp, Artificial Sequence
  derived and/or modified sequence
atgagcgccgagtacagcttccccatctggaagaccagccacaccgtgaagtgggagggcgtgtggagagagctgggctgcctgagcagaaccgccagcttcgccgtgagaaaggagagcggccacagcctgaagagcagcctgagccacgccatggtgatcgacagcagaaacagcagcatcctgcccagaagaggcgccctgctgaaggtgaaccaggagctggccggctacaccggcggcgacgtgagcttcatcaaggaggacttcgagctgcagctgaacaagcagctgatcttcgacagcgtgttcagcgccagcttctggggcggcatgctggtgcccatcggcgacaagcccagcagcatcgccgacagattctacctgggcggccccaccagcatcagaggcttcagcatgcacagcatcggcccccagagcgagggcgactacctgggcggcgaggcctactgggccggcggcctgcacctgtacacccccctgcccttcagacccggccagggcggcttcggcgagctgttcagaacccacttcttcctgaacgccggcaacctgtgcaacctgaactacggcgagggccccaaggcccacatcagaaagctggccgagtgcatcagatggagctacggcgccggcatcgtgctgagactgggcaacatcgccagactggagctgaactactgcgtgcccatgggcgtgcagaccggcgacagaatctgcgacggcgtgcagttcggcgccggcatcagattcctgtag

SEQ ID NO: 186264 - DNA, 1410 bp, Artificial Sequence
  derived and/or modified sequence
atggggaccgtccatgcccggagccttgaaccgctgcccagcagtggcccagacttcggcggattgggggaggaagctgagttcgtcgaagtggagcccgaggctaaacaggagattctcgagaacaaggacgtggtcgtgcagcatgtacattttgacggactgggcaggacaaaagacgacattattatttgtgaaattggagacgtctttaaggccaagaatctgatcgaggtaatgagaaagagccacgaggctcgggaaaagctccttagacttggcatctttcggcaagtcgacgtcctgatcgatacctgccaaggagacgatgcactccctaatgggctcgatgtgacatttgaagtgactgaactgcgacggctgacaggtagctataataccatggtgggcaataatgaagggtctatggttttgggtctgaaactcccaaatctgttaggtcgtgccgagaaggtgacattccaattctcctacggcactaaggaaacctcctacggtctctccttctttaagcctcgcccaggaaactttgagaggaatttctccgttaacctgtacaaggtgactggtcagtttccttggagttctctgcgcgaaacggatcgcgggatgtctgctgagtactctttcccaatatggaagacatcccatactgtcaaatgggaaggagtgtggcgagagctgggttgcctcagcagaaccgcttcatttgcagtgaggaaagaatctgggcacagtctgaaaagtagcttgtcgcacgccatggtaattgacagcagaaatagcagcattctcccacgcagaggtgcccttctgaaggttaatcaagaattggctggctacactggcggagatgtgagcttcatcaaagaggacttcgagctgcaactgaacaagcagttgatttttgactcagttttcagcgcttccttttggggaggaatgctggtacccattggtgataaaccgagcagtatcgccgaccgtttctatcttggcggaccgacttctattcgtgggttttcaatgcactctatagggccacagagcgagggcgactatctcggcggtgaggcctactgggccgggggcctgcatctgtacactccgctcccttttcgacccggccaaggtggatttggggaactgtttaggacacactttttccttaacgccggaaacctttgcaatctcaactatggagagggaccaaaagctcatatcagaaaactggccgaatgtattcgatggagctacggcgccggaatcgtactgaggttgggaaacatcgcaagacttgaattaaactactgcgtgcccatgggtgtccagactggagaccgaatttgtgacggcgtgcagtttggtgctggaatacgattcctttag

SEQ ID NO: 186265 - DNA, 780 bp, Artificial Sequence
  derived and/or modified sequence
atgagtgccgaatattcttttcctatttggaagacctcacacactgttaaatgggaaggagtgtggagggagctggggtgtctgagtcgaactgcaagcttcgccgtgcggaaagagagtggccactctctgaagtcgtcactctcccacgcaatggtgattgattctaggaacagctcaatcttgcctagacgaggggctttactgaaggtgaatcaggagctggctggttataccggcggcgatgtcagttttattaaggaggacttcgagctgcagctcaacaagcagctcatttttgattccgtcttctcagcatctttttggggggggatgttggtgccaattggagataaacccagcagtatcgcggacaggttttaccttggcggtcccactagcattcggggatttagcatgcatagtattggaccacagtcagaaggagactaccttggcggagaggcttattgggctggcggacttcacctatatactcccctgccattccgtccaggacaaggggggttcggggagctgttcagaactcatttctttcttaacgccggaaatctgtgcaacttaaattacggcgaaggccccaaagctcatatccgtaagttggcagaatgcattaggtggtcctatggggccgggattgtgctgaggctgggaaatatcgctcgacttgagctgaactactgtgtgcctatgggggtacaaacaggagaccggatttgcgatggagtgcagtttggcgcaggcattaggtttttatag

SEQ ID NO: 186266 - DNA, 1410 bp, Artificial Sequence
  derived and/or modified sequence
atgggcaccgtgcacgcccggagcctggagcccctgcccagcagcggccctgactttggaggcctgggggaggaggccgagtttgtggaggtggagcctgaggccaagcaggagatcctggagaacaaggatgtggtggtgcagcacgtgcactttgatggcctgggccgcaccaaggatgacatcatcatctgtgaaattggagatgtgttcaaggccaagaacctgattgaggtgatgaggaagagccatgaggcccgggagaagctgctgcggctgggcatcttccggcaggtggatgtgctgattgacacctgccagggagatgatgccctgcccaacggcctggatgtgacctttgaggtgacagagctgcggcggctgaccggcagctacaacaccatggtgggcaacaatgaaggctccatggtgctgggcctgaagctgcccaacctgctgggccgggcagagaaggtgaccttccagttctcctatggcaccaaggagaccagctatggcctgtccttcttcaagcccaggcctggcaactttgagaggaacttctctgtgaacctgtacaaggtgacaggccagttcccctggagcagcctgcgggagacagaccggggcatgtctgctgagtacagcttccccatctggaagaccagccacacagtgaagtgggagggcgtgtggagggagctgggctgcctgagcaggacagccagctttgctgtgaggaaggagagcggccacagcctgaagagcagcctgagccacgccatggtgattgacagcaggaacagcagcatcctgccccggcggggggccctgctgaaggtgaaccaggagctggccggctacacaggaggagatgtgtccttcatcaaggaggactttgagctgcagctgaacaagcagctgatctttgacagcgtcttcagcgccagcttctggggcggcatgctggtgcccatcggggacaagcccagcagcattgctgaccgcttctacctgggcggccccaccagcatccggggcttctccatgcacagcatcggcccccagagcgagggggactacctgggcggggaggcctactgggccggcggcctgcacctgtacacccccctgcccttccggcccggccagggcggctttggagagctgttccgcacccacttcttcctgaatgccggcaacctgtgcaacctgaactatggagagggccccaaggcccacatcaggaagctggccgagtgcatccgctggagctatggagctggcatcgtgctgcggctgggcaacatcgcccggctggagctgaactactgtgtgcccatgggcgtgcagacaggagaccgcatctgtgatggagtgcagtttggagctggcatccgcttcctgtag

SEQ ID NO: 186267 - DNA, 780 bp, Artificial Sequence
  derived and/or modified sequence
atgtctgctgagtacagcttccccatctggaagaccagccacacagtgaagtgggagggcgtgtggagggagctgggctgcctgagcaggacagccagctttgctgtgaggaaggagagcggccacagcctgaagagcagcctgagccacgccatggtgattgacagcaggaacagcagcatcctgccccggcggggggccctgctgaaggtgaaccaggagctggccggctacacaggaggagatgtgtccttcatcaaggaggactttgagctgcagctgaacaagcagctgatctttgacagcgtcttcagcgccagcttctggggcggcatgctggtgcccatcggggacaagcccagcagcattgctgaccgcttctacctgggcggccccaccagcatccggggcttctccatgcacagcatcggcccccagagcgagggggactacctgggcggggaggcctactgggccggcggcctgcacctgtacacccccctgcccttccggcccggccagggcggctttggagagctgttccgcacccacttcttcctgaatgccggcaacctgtgcaacctgaactatggagagggccccaaggcccacatcaggaagctggccgagtgcatccgctggagctatggagctggcatcgtgctgcggctgggcaacatcgcccggctggagctgaactactgtgtgcccatgggcgtgcagacaggagaccgcatctgtgatggagtgcagtttggagctggcatccgcttcctgtag

SEQ ID NO: 186268 - DNA, 1410 bp, Artificial Sequence
  derived and/or modified sequence
atgggcaccgtgcacgcccggagcctggagcccctgcccagcagcggaccggactttggaggcctgggagaggaggccgagttcgtcgaagtcgaaccagaagccaagcaggagatacttgagaacaaagatgtggtcgtccagcatgtgcactttgacggcctgggtcgcacgaaggatgacatcatcatttgtgagatcggcgacgtctttaaagccaagaatctgattgaggtgatgaggaagagccacgaggcaagagagaagttgctgcggctggggattttccggcaggttgacgtcctgatcgatacctgccaaggcgatgacgccctgcctaatggactggacgtcacctttgaggttaccgagctccggaggctgacaggttcatataatactatggttggcaacaacgagggttccatggtgttaggcctcaaactgcctaatctgctgggaagagctgagaaggtcactttccaattctcatatggcaccaaggagactagctacggtctctcttttttcaagcctcggccaggcaattttgagcgaaacttttcggtcaacctttacaaagttaccggacagtttccatggagctcgctgagggaaactgatcgaggaatgtcagccgaatatagttttcccatctggaaaacatctcacaccgttaagtgggaaggagtatggagggaactcgggtgtcttagccggactgcgtcatttgccgttcggaaggagagcggacacagcctgaaatctagcttgtcacacgcaatggtgattgactcccggaactcctccattctgccgcgacggggagctctcttgaaagttaaccaggagcttgcagggtacaccgggggagacgtctcatttatcaaagaggattttgagctgcagttaaacaagcagctgatatttgatagcgtgtttagcgcatctttttggggcggtatgctcgtgccgatcggtgataagcctagcagtattgcagacaggttttacctcggcggcccaacaagcattcggggattcagcatgcattcaattggtccacagtctgagggtgactacctgggcggggaggcctattgggccggcggcctgcacctatacacccccctacccttccgtcccgggcagggcggattcggggaactcttccgaactcacttttttttgaacgcagggaatctttgcaaccttaattacggcgaaggaccaaaagcacatatacgtaaacttgctgagtgcattaggtggagctacggggcagggatcgttcttaggttagggaatattgctcgcttggagttgaactattgtgtccctatgggtgtgcagactggtgacagaatttgcgatggggtgcagttcggtgccggaatacggttcttgtag

SEQ ID NO: 186269 - DNA, 780 bp, Artificial Sequence
  derived and/or modified sequence
atgagcgccgagtacagcttccccatctggaagaccagccacaccgtgaaatgggaaggggtgtggagagaactcggatgtctgagtcgcacagccagcttcgctgtacggaaggaatccggtcacagtttaaaatcatccttgtcccacgctatggtgattgatagtaggaattctagcattctgccccgcaggggagcacttctgaaggtcaatcaggagttggcaggttacacggggggtgacgtgtcttttattaaggaggacttcgaactgcagctcaataagcaattaattttcgatagcgtgttttcagctagtttttgggggggcatgctcgtccctattggagataaacccagcagcatagcagatcgcttctatctgggcggaccaacctccattaggggcttcagcatgcattccatcggcccacagagtgaaggagactatcttggaggagaagcttattgggcgggggggctccatctgtataccccactaccgtttcgaccaggccagggaggctttggggaattgtttagaacacacttctttctcaatgccgggaatctttgtaatctgaattacggggaaggcccgaaggcccacattcggaaactggctgagtgcattcgctggagctacggtgctggtattgttctgcggctcggcaatatcgccagactggagttgaattactgtgtgcccatgggtgtacaaaccggcgaccgaatctgcgatggggttcaatttggtgcgggaattaggttcctatag

SEQ ID NO: 186270 - DNA, 1410 bp, Artificial Sequence
  derived and/or modified sequence
atgggaactgttcacgccagatcactcgaaccattaccatcttctggccctgacttcggcggactgggagaagaagcagaattcgtcgaggtggagcccgaggcaaaacaggaaattctggaaaacaaggacgtagtcgtccagcatgttcacttcgacggcctcggaaggacaaaggacgatatcattatctgtgagatcggcgatgtctttaaagcgaaaaatttgattgaagttatgcgtaagagccatgaagctagggaaaagttgttgaggttaggaatatttcgacaggttgatgtactcatcgatacatgccagggggatgacgcacttcctaacggtcttgatgtgacatttgaggtcaccgagctacggcgtttgacgggctcttataacacgatggttggcaacaacgagggctcaatggttctgggactgaagttgcctaacctgttaggacgagcagagaaagtgaccttccagttctcttatggcaccaaggagactagctacgggttgagtttctttaaacctaggcctggcaatttcgaacgaaatttttcggttaacttatataaagtgaccggccaattcccatggtccagccttagggagacagacaggggcatgtccgccgagtactcctttcccatctggaaaacttcccacaccgtaaaatgggagggcgtgtggcgcgagctgggttgcctctctcggaccgcttcctttgctgtccgaaaagagtcaggtcacagcctaaaaagcagcctgagccatgccatggtgattgattcacgaaacagctcgattttgcccagaagaggcgcattactaaaggtgaatcaagaactagctgggtacactggcggagacgtgtccttcattaaggaagatttcgagctgcagttgaacaagcagctgatattcgatagcgtgttctccgctagcttctggggtgggatgctggtacccataggtgataagccatcaagcattgccgataggttctatctcggcggacctactagtattcggggtttcagtatgcattccatagggccacagagcgaaggcgattatcttggtggcgaagcatactgggctgggggtctccacctctatacccctctgccattccggcctggtcagggcggattcggggagttattcagaacccacttcttcttaaacgctggcaatctctgcaatctgaattatggggagggacctaaagcccatattaggaagttggcagaatgtatcagatggtcgtacggtgctggcatcgtcctgcggctggggaatattgctagactcgagctgaactattgtgtcccaatgggagttcagactggtgacagaatctgtgacggagtgcagttcggcgctggtatccgtttcctgtag

SEQ ID NO: 186271 - DNA, 780 bp, Artificial Sequence
  derived and/or modified sequence
atgtctgctgagtactcttttccaatttggaagactagtcacacagtgaaatgggaaggggtgtggcgggagttagggtgtctctcaagaactgcctcctttgctgtcaggaaggaatctggccactccttaaaatctagtcttagccatgcgatggtgatcgatagcaggaacagctcgatcctgcccaggcgtggcgcactattgaaggtgaatcaagaactagctggttatactgggggtgatgtctctttcataaaagaagattttgagctccagttgaacaagcaactaattttcgactctgtgtttagcgcaagtttttgggggggaatgctagtacccattggagataagcccagcagtattgccgatcgattttaccttggagggcctacatcgattcgcggtttttccatgcactctatcggaccgcaatctgagggggactatctgggcggtgaagcctactgggctggcggactccatctgtatacccccctgccttttaggccaggacagggtggcttcggagagctcttcaggacccacttttttctcaacgccggaaacctgtgtaacttgaactatggcgagggcccaaaggcccatattcggaaactggccgagtgtattaggtggagctacggcgcaggcattgtgctcagactggggaatatagcgcgactggagctaaactactgcgtccctatgggggtgcagactggggataggatttgcgacggagtgcaattcggagccggaattaggtttctgtag

SEQ ID NO: 186272 - DNA, 1717 bp, Artificial Sequence
  derived and/or modified sequence
cggggaatcatggccgcccccagtgttccgcgtccgggggtttgtgggagttgccttgacctgcagctccgccaccgcggacccgccttctgccctcagcagcagacgctctgtcccgcccgggcagctctgcgaggcagcggctggagagggaaccatggggactgtgcacgcccggagtttggagcctcttccatcaagtggacctgattttggaggattaggagaagaagctgaatttgttgaagttgagcctgaagctaaacaggaaattcttgaaaacaaagatgtggttgttcaacatgttcattttgatggacttggaaggactaaagatgatatcatcatttgtgaaattggagatgttttcaaggccaaaaacctaattgaggtaatgcggaaatctcatgaagcccgtgaaaaattgctccgtcttggaatttttagacaagtggatgttttgattgacacatgtcaaggtgatgacgcacttccaaatgggttagacgttacctttgaagtaactgaattgaggagattaacgggcagttataacaccatggttggaaacaatgaaggcagtatggtacttggcctcaagcttcctaatcttcttggtcgtgcagaaaaggtgacctttcagttttcctatggaacaaaagaaacttcgtatggcctgtccttcttcaaaccacggcccggaaacttcgaaagaaatttctctgtaaacttatataaagttactggacagttcccttggagctcactgcgggagacggacagaggaatgtcagctgagtacagttttcccatatggaagaccagccacactgtcaagtgggaaggcgtatggcgagaactgggctgcctctcaaggacggcgtcatttgctgttcgaaaagaaagcggacattcactgaaatcatctctttcgcacgccatggtcatcgattctcggaattcttccatcttaccaaggagaggtgctttgctgaaagttaaccaggaactggcaggctacactggcggggatgtgagcttcatcaaagaagattttgaacttcagttgaacaagcaactcatatttgattcagttttttcagcgtctttctggggcggaatgttggtacccattggtgataagccgtcaagcattgctgataggttttaccttgggggacccacaagcatccgcggattcagcatgcacagcatcgggccacagagcgaaggagactacctaggtggagaagcgtactgggccggcggcctgcacctctacaccccattacctttccggccaggccagggtggctttggagaacttttccgaacacacttctttctcaacgcaggaaacctctgcaacctcaactatggggagggccccaaagctcatattcgtaagctggctgagtgcatccgctggtcgtacggggccgggattgtcctcaggcttggcaacatcgctcggttggaacttaattactgcgtccccatgggagtacagacaggcgacaggatatgtgatggcgtccagtttggagctgggataaggttcctgtagccgacacccctacaggagaagctctgggactggggcagcagcaaggcgcccatgccacacaccgtctctcgaggaaacgcggttcagcgattctttgactgcggaccctgtgggaaaccccgtcaataaatgttaaagacacactccgag

SEQ ID NO: 186273 - DNA, 1432 bp, Artificial Sequence
  derived and/or modified sequence
agctctgcgaggcagcggctggagagggaaccatggggactgtgcacgcccggagtttggagcctcttccatcaagtggacctgattttggaggattaggagaagaagctgaatttgttgaagttgagcctgaagctaaacaggaaattcttgaaaacaaagatgtggttgttcaacatgttcattttgatggacttggaaggactaaagatgatatcatcatttgtgaaattggagatgttttcaaggccaaaaacctaattgaggtaatgcggaaatctcatgaagcccgtgaaaaattgctccgtcttggaatttttagacaagtggatgttttgattgacacatgtcaaggtgacctttcagttttcctatggaacaaaagaaacttcgtatggcctgtccttcttcaaaccacggcccggaaacttcgaaagaaatttctctgtaaacttatataaagttactggacagttcccttggagctcactgcgggagacggacagaggaatgtcagctgagtacagttttcccatatggaagaccagccacactgtcaagtgggaaggcgtatggcgagaactgggctgcctctcaaggacggcgtcatttgctgttcgaaaagaaagcggacattcactgaaatcatctctttcgcacgccatggtcatcgattctcggaattcttccatcttaccaaggagaggtgctttgctgaaagttaaccaggaactggcaggctacactggcggggatgtgagcttcatcaaagaagattttgaacttcagttgaacaagcaactcatatttgattcagttttttcagcgtctttctggggcggaatgttggtacccattggtgataagccgtcaagcattgctgataggttttaccttgggggacccacaagcatccgcggattcagcatgcacagcatcgggccacagagcgaaggagactacctaggtggagaagcgtactgggccggcggcctgcacctctacaccccattacctttccggccaggccagggtggctttggagaacttttccgaacacacttctttctcaacgcaggaaacctctgcaacctcaactatggggagggccccaaagctcatattcgtaagctggctgagtgcatccgctggtcgtacggggccgggattgtcctcaggcttggcaacatcgctcggttggaacttaattactgcgtccccatgggagtacagacaggcgacaggatatgtgatggcgtccagtttggagctgggataaggttcctgtagccgacacccctacaggagaagctctgggactggggcagcagcaaggcgcccatgccacacaccgtctctcgaggaaacgcggttcagcgattctttgactgcggaccctgtgggaaaccccgtcaataaatgttaaagacac

SEQ ID NO: 186274 - protein, 125 aa, Artificial Sequence
  derived and/or modified sequence
MQLLKALWALAGAALCCFLVLVIHAQFLKEGQLAAGTCEIVTLDRDSSQPRRTIARQTARCACRKGQIAGTTRARPACVDARIIKTKQWCDMLPCLEGEGCDLLINRSGWTCTQPGGRIKTTTVS

SEQ ID NO: 186275 - DNA, 378 bp, Artificial Sequence
  derived and/or modified sequence
atgcagctcctgaaagcactgtgggctctagccggtgcggcactgtgctgttttctggtgttggtgatccacgctcaattcctcaaggagggacaattagcagcaggcacgtgcgagattgtgaccttggaccgcgattcctctcagcccagaaggactatcgcacggcagacagctagatgcgcctgccgtaaggggcagatagccggtaccacacgcgctcgcccagcttgtgtggatgcaaggattatcaagacgaaacagtggtgcgatatgctgccttgcctggaaggcgaggggtgtgatctgctcattaatcgcagcgggtggacttgcactcagccgggtggccgtatcaaaactacaactgtatcttag

SEQ ID NO: 186276 - DNA, 378 bp, Artificial Sequence
  derived and/or modified sequence
atgcagctgttgaaagcgctgtgggcacttgccggcgccgccctgtgctgtttcctagtattagtaatccacgctcagtttctgaaagaaggccagcttgcggctggcacttgtgaaattgtgaccctggaccgagatagttcccagcctaggaggacgatcgcaagacaaactgcacgctgcgcctgccggaaaggccagattgccggcactactagagctagacccgcatgtgtcgatgcgagaataatcaaaacaaaacagtggtgtgacatgctgccgtgtcttgagggagagggctgtgacctgcttataaacaggtcagggtggacatgcactcagccagggggaagaataaaaacaactaccgtgtcatag

SEQ ID NO: 186277 - DNA, 378 bp, Artificial Sequence
  derived and/or modified sequence
atgcaattgctgaaagccttgtgggctctcgccggggccgccctgtgttgcttcctggtgttagtcatccacgcccagttcttaaaagagggtcagcttgccgccggaacctgtgaaatcgtaactctggaccgggactcctcacaacctagacgcactattgctcgtcagacagctagatgtgcctgtcgtaaaggtcagatcgctggaaccacccgagcacgccctgcatgtgtggacgcacgcataatcaaaacgaagcagtggtgcgatatgctgccgtgtctcgaaggagaggggtgcgacttgctcatcaatcgatctggatggacttgcacacaacctgggggcagaatcaagactacgaccgtcagctag

SEQ ID NO: 186278 - DNA, 378 bp, Artificial Sequence
  derived and/or modified sequence
atgcagctgctgaaggccctgtgggccctggccggcgccgccctgtgctgcttcctggtgctggtgatccacgcccagttcctgaaggagggccagctggccgccggcacctgcgagatcgtgaccctggacagagacagcagccagcccagaagaaccatcgccagacagaccgccagatgcgcctgcagaaagggccagatcgccggcaccaccagagccagacccgcctgcgtggacgccagaatcatcaagaccaagcagtggtgcgacatgctgccctgcctggagggcgagggctgcgacctgctgatcaacagaagcggctggacctgcacccagcccggcggcagaatcaagaccaccaccgtgagctag

SEQ ID NO: 186279 - DNA, 378 bp, Artificial Sequence
  derived and/or modified sequence
atgcagctgcttaaggcactctgggccctggccggcgctgccctgtgttgtttcctagtcctggtgatacatgcccagttcctgaaggaagggcagttggcagcgggcacctgcgagatcgtgactttagaccgcgactcctcacagcctcgacgtacaatcgctcgccagacagcacgttgcgcatgcaggaaaggacagatcgctgggacgacaagggccagacctgcatgcgtcgacgccagaatcataaaaaccaagcagtggtgcgacatgctgccttgtctggaaggagaaggctgtgatctgctgattaatcggagcggttggacctgtacgcagccggggggccggattaaaacaactactgtttcatag

SEQ ID NO: 186280 - DNA, 2638 bp, Artificial Sequence
  derived and/or modified sequence
aaagacacaaatcgcctcccggagtggcgcctccagtcgcggcggagcgcggcgttggcggcggatggagggcgcgagcgggcggccgcggaggctgcacccggcggggcgctgatgcggcgcctggaccttcgctgcgcgacttcgggggcgtcggccgagttgggactccgcgatgcagctcctgaaggcgctctgggcactggcaggggccgcgctctgctgcttcctcgtcctagtgatccacgcgcagttcctcaaagaaggtcagctggccgccggcacctgtgagattgtgaccttggaccgggacagcagccagcctcggaggacgatcgcccggcagaccgcccgctgtgcgtgtagaaaggggcagatcgccggcaccacgagagcccggcccgcctgtgtggacgcaagaatcatcaagaccaagcagtggtgtgacatgcttccgtgtctggagggggaaggctgcgacttgttaatcaaccggtcaggctggacgtgcacgcagcccggcgggaggataaagaccaccacggtctcctgacaaacacagcccctgaggggccccgggagtggccttggctccctggagagcccacgtctcagccacagttctccactcgcctcggacttcacccgttctctgccgcccgcccactccgtttccctgtggtccgtgaaggacggcctcaggccttggcatcctgagcttcggtctgtccagccgacccgaggaggccggactcagacacataggcggggggcggcacctggcatcagcaatacgcagtctgtgggagcccggccgcgcccagcccccgccgaccgtggcgttggccctgctgtcctcagaggaggaggaggaggaggcagctccggcagccacagaaggctgcagcccagcccgcctgagacacgacgcctgccccaggggactgtcaggcacagaagcggcctcctcccgtgccccagactgtccgaattgcttttattttcttatactttcagtatactccatagaccaaagagcaaaatctatctgaacctggacgcaccctcactgtcagggtccctggggtcgcttgtgcgggcgggagggcaatggtggcagagacatgctggtggccccggcggagcggagagggcggccgtggtggaggcctccaccccaggagcaccccgcgcaccctcggaggacgggcttcggctgcgcggaggccgtggcacacctgcgggaggcagcgacggcccccacgcagacgccgggaacgcaggccgctttattcctctgtacttagatcaacttgaccgtactaaaatccctttctgttttaaccagttaaacatgcctcttctacagctccatttttgatagttggataatccagtatctgccaagagcatgttgggtctcccgtgactgctgcctcatcgataccccatttagctccagaaagcaaagaaaactcgagtaacacttgtttgaaagagatcattaaatgtattttgcaaagcctaaagttatatatttaacagtttttatatgttgtatatttgtagaaaatcctatttaacaattaacgtggcagtcccggccgtcctgagagtcgggccgagccccgtgtgtttctgaagactctgggggtgggacacggcggggaggtggtgccccgcggaccccggggtgccaggcacggaaggcgggactctgggagaagcgtgcggaggaccgtggcgtcggcgtcccggatgtgtcggtcgtgcccggggaggccgggttcccctcgctgcgggccaggcttggctcctgattccctctctggtccctgtattggtcaacacttgagcgtacaatatcttgaacatgcttcttccaatgggttttgtttcccatttcctgcccctttcgccactcacggaccttgaggccagttgacggcccttctccccacgcctgtgtccccgcgttctgagaagtcctctgtcttcgtgtcactaggtccagaaagtcgcgccgggcagaggcgcaggcggggccggcagggccgaggaataagcgacaattctggtttttctcccctggccgtcgttcgccagcctccttcattttcctgagttcccgctgaagtatatactacctatgagtccaattaacatgagtattatgctagttctatcctactaaaaaaaacgtaaaaaaataactatatagaagctgttccagcaaccatagactgaagatacgaaagaaaatccatttatttaagacctgttccggtatccatgaggacataatttacctttcagtcaccacaaatttataggcatttgtatcctggactaaaagaaggggctgaggttgggtttgtcatcacagagggggtgggcctggaaagggtccttcccaagctgccccggctccggcggcccgggccggcagcctctgccagccagcgtcctcacggcctccccctcgcctgtttcttttgaaagcaagtgtagacaccttcgagggcagagatcgggagatttaagatgttacagcatatttttttttcttgttttacagtattcaattttgtgttgattcagctaaattatgaaaaataaagaaaaactcctttgataa

SEQ ID NO: 186281 - DNA, 378 bp, Artificial Sequence
  derived and/or modified sequence
atgcagctgctgaaggccctgtgggccctggccggggccgccctgtgctgcttcctggtgctggtgatccacgcccagttcctgaaggagggccagctggccgccggcacctgtgagatcgtgaccctggaccgggacagcagccagcccaggaggaccatcgcccggcagacagcccgctgtgcctgcaggaagggccagattgctggcaccacccgggcccggcctgcctgtgtggatgcccgcatcatcaagaccaagcagtggtgtgacatgctgccctgcctggagggggagggctgtgacctgctgatcaacagaagtggctggacctgcacccagcccggcggccgcatcaagaccaccaccgtgtcctag

SEQ ID NO: 186282 - DNA, 378 bp, Artificial Sequence
  derived and/or modified sequence
atgcagctgctgaaggccctgtgggccctggccggcgccgccctgtgctgttttctagtactcgtgatacatgcccagttcttaaaagagggccagcttgctgccggcacgtgcgaaatcgtgaccttggaccgcgactcctctcaacctaggcggacaatcgccagacagacagcccgttgcgcctgtaggaaaggccaaatagcggggaccactagagcccgcccagcttgcgttgacgcccgcatcataaagactaagcaatggtgcgacatgctgccatgcttagaaggagagggctgcgacctcctgatcaataggagtgggtggacatgcacacaaccagggggcaggatcaaaacaactactgtgtcttag

SEQ ID NO: 186283 - RNA, 378 nt, Artificial Sequence
  derived and/or modified sequence
augcagcuguugaaagcgcugugggcacuugccggcgccgcccugugcuguuuccuaguauuaguaauccacgcucaguuucugaaagaaggccagcuugcggcuggcacuugugaaauugugacccuggaccgagauaguucccagccuaggaggacgaucgcaagacaaacugcacgcugcgccugccggaaaggccagauugccggcacuacuagagcuagacccgcaugugucgaugcgagaauaaucaaaacaaaacaguggugugacaugcugccgugucuugagggagagggcugugaccugcuuauaaacaggucaggguggacaugcacucagccagggggaagaauaaaaacaacuaccgugucauag

SEQ ID NO: 186284 - RNA, 378 nt, Artificial Sequence
  derived and/or modified sequence
augcaauugcugaaagccuugugggcucucgccggggccgcccuguguugcuuccugguguuagucauccacgcccaguucuuaaaagagggucagcuugccgccggaaccugugaaaucguaacucuggaccgggacuccucacaaccuagacgcacuauugcucgucagacagcuagaugugccugucguaaaggucagaucgcuggaaccacccgagcacgcccugcauguguggacgcacgcauaaucaaaacgaagcaguggugcgauaugcugccgugucucgaaggagaggggugcgacuugcucaucaaucgaucuggauggacuugcacacaaccugggggcagaaucaagacuacgaccgucagcuag

SEQ ID NO: 186285 - protein, 2697 aa, Artificial Sequence
  derived and/or modified sequence
MNGDMPHVPITTLAGIASLTDLLNQLPLPSPLPATTTKSLLFNARIAEEVNCLLACRDDNLVSQLVHSLNQVSTDHIELKDNLGSDDPEGDIPVLLQAVLARSPNVFREKSMQNRYVQSGMMMSQYKLSQNSMHSSPASSNYQQTTISHSPSSRFVPPQTSSGNRFMPQQNSPVPSPYAPQSPAGYMPYSHPSSYTTHPQMQQASVSSPIVAGGLRNIHDNKVSGPLSGNSANHHADNPRHGSSEDYLHMVHRLSSDDGDSSTMRNAASFPLRSPQPVCSPAGSEGTPKGSRPPLILQSQSLPCSSPRDVPPDILLDSPERKQKKQKKMKLGKDEKEQSEKAAMYDIISSPSKDSTKLTLRLSRVRSSDMDQQEDMISGVENSNVSENDIPFNVQYPGQTSKTPITPQDINRPLNAAQCLSQQEQTAFLPANQVPVLQQNTSVAAKQPQTSVVQNQQQISQQGPIYDEVELDALAEIERIERESAIERERFSKEVQDKDKPLKKRKQDSYPQEAGGATGGNRPASQETGSTGNGSRPALMVSIDLHQAGRVDSQASITQDSDSIKKPEEIKQCNDAPVSVLQEDIVGSLKSTPENHPETPKKKSDPELSKSEMKQSESRLAESKPNENRLVETKSSENKLETKVETQTEELKQNESRTTECKQNESTIVEPKQNENRLSDTKPNDNKQNNGRSETTKSRPETPKQKGESRPETPKQKSDGHPETPKQKGDGRPETPKQKGESRPETPKQKNEGRPETPKHRHDNRRDSGKPSTEKKPEVSKHKQDTKSDSPRLKSERAEALKQRPDGRSVSESLRRDHDNKQKSDDRGESERHRGDQSRVRRPETLRSSSRNEHGIKSDSSKTDKLERKHRHESGDSRERPSSGEQKSRPDSPRVKQGDSNKSRSDKLGFKSPTSKDDKRTEGNKSKVDTNKAHPDNKAEFPSYLLGGRSGALKNFVIPKIKRDKDGNVTQETKKMEMKGEPKDKVEKIGLVEDLNKGAKPVVVLQKLSLDDVQKLIKDREDKSRSSLKPIKNKPSKSNKGSIDQSVLKELPPELLAEIESTMPLCERVKMNKRKRSTVNEKPKYAEISSDEDNDSDEAFESSRKRHKKDDDKAWEYEERDRRSSGDHRRSGHSHEGRRSSGGGRYRNRSPSDSDMEDYSPPPSLSEVARKMKKKEKQKKRKAYEPKLTPEEMMDSSTFKRFTASIENILDNLEDMDFTAFGDDDEIPQELLLGKHQLNELGSESAKIKAMGIMDKLSTDKTVKVLNILEKNIQDGSKLSTLLNHNNDTEEEERLWRDLIMERVTKSADACLTTINIMTSPNMPKAVYIEDVIERVIQYTKFHLQNTLYPQYDPVYRLDPHGGGLLSSKAKRAKCSTHKQRVIVMLYNKVCDIVSSLSELLEIQLLTDTTILQVSSMGITPFFVENVSELQLCAIKLVTAVFSRYEKHRQLILEEIFTSLARLPTSKRSLRNFRLNSSDMDGEPMYIQMVTALVLQLIQCVVHLPSSEKDSNAEEDSNKKIDQDVVITNSYETAMRTAQNFLSIFLKKCGSKQGEEDYRPLFENFVQDLLSTVNKPEWPAAELLLSLLGRLLVHQFSNKSTEMALRVASLDYLGTVAARLRKDAVTSKMDQGSIERILKQVSGGEDEIQQLQKALLDYLDENTETDPSLVFSRKFYIAQWFRDTTLETEKAMKSQKDEESSEGTHHAKEIETTGQIMHRAENRKKFLRSIIKTTPSQFSTLKMNSDTVDYDDACLIVRYLASMRPFAQSFDIYLTQILRVLGENAIAVRTKAMKCLSEVVAVDPSILARLDMQRGVHGRLMDNSTSVREAAVELLGRFVLCRPQLAEQYYDMLIERILDTGISVRKRVIKILRDICIEQPTFPKITEMCVKMIRRVNDEEGIKKLVNETFQKLWFTPTPHNDKEAMTRKILNITDVVAACRDTGYDWFEQLLQNLLKSEEDSSYKPVKKACTQLVDNLVEHILKYEESLADSDNKGVNSGRLVACITTLFLFSKIRPQLMVKHAMTMQPYLTTKCSTQNDFMVICNVAKILELVVPLMEHPSETFLATIEEDLMKLIIKYGMTVVQHCVSCLGAVVNKVTQNFKFVWACFNRYYGAISKLKSQHQEDPNNTSLLTNKPALLRSLFTVGALCRHFDFDLEDFKGNSKVNIKDKVLELLMYFTKHSDEEVQTKAIIGLGFAFIQHPSLMFEQEVKNLYNNILSDKNSSVNLKIQVLKNLQTYLQEEDTRMQQADRDWKKVAKQEDLKEMGDVSSGMSSSIMQLYLKQVLEAFFHTQSSVRHFALNVIALTLNQGLIHPVQCVPYLIAMGTDPEPAMRNKADQQLVEIDKKYAGFIHMKAVAGMKMSYQVQQAINTCLKDPVRGFRQDESSSALCSHLYSMIRGNRQHRRAFLISLLNLFDDTAKTDVTMLLYIADNLACFPYQTQEEPLFIMHHIDITLSVSGSNLLQSFKESMVKDKRKERKSSPSKENESSDSEEEVSRPRKSRKRVDSDSDSDSEDDINSVMKCLPENSAPLIEFANVSQGILLLLMLKQHLKNLCGFSDSKIQKYSPSESAKVYDKAINRKTGVHFHPKQTLDFLRSDMANSKITEEVKRSIVKQYLDFKLLMEHLDPDEEEEEGEVSASTNARNKAITSLLGGGSPKNNTAAETEDDESDGEDRGGGTSGVRRRRSQRISQRIT
